United States Patent Application Publication US 2014/0004565 A1 - sequence listing, part 2

SEQ ID NO: 745 - DNA, 2630 bp, Cricetulus griseus
gaaacacactggttgtgagttttgcagacctggaacaatttaaccaacaactttctaccaccattcaggaggagttctatagagtctacccttacctgtgtcgagccttgaagacctttgtcaaagaccgaaaggagatcccttttgccaaggatttttatgttgcattccaagacctacctacaagacacaagattcgtgagctcacttcatccaggattgggttactcacccgcatcagcggccaggtggtgcgcactcatccagttcaccctgagcttgtgagtggaactttcctgtgcctggactgtcaaacagtgatcaaggacgtagaacagcagttcaaatacacacagccgaatatctgccgaaatccagtgtgtgccaacaggaagaggttcctgctagacactaataaatcaagatttgttgattttcaaaaggttcgtattcaagagactcaagcggaacttccccgaggaagtatcccccgaagtttagaagttatcctgagagctgaagctgtggagtcagcccaagctggtgacaagtgtgacttcacagggacgctgatagttgtgcctgatgtctccaagcttagtataccaggagcacgtgcagaaactaactcccgagtcagtggagttgatggatatgagacagaaggcattcgagggctccgagcccttggtgtcagagatctgtcttataggctggtcttccttgcctgttatgttgcaccaacaaacccaaggtttggagggaaagaactcagagatgaggaacagacagctgagagcattaagaaccaaatgacggtgaaggagtgggaaaaggtgtttgaaatgagtcaggacaaaaacctgtaccacaatctctgtaccagcctattccctactatccatggaaatgatgaagtaaaacgtggtgtcttactgatgttgtttggtggtgttcctaagacaacaggggaagggacctctcttcgaggggacataaatgtttgcattgttggtgatccaagtacagctaagagccaatttctcaagcatgtggatgaatttagccccagagctgtctataccagtggcaaagcctccagtgctgctggcttaacagcagctgtggtgagagatgaagaatctcatgaatttgtcattgaggctggagcgctgatgctggctgataatggtgtctgttgtattgatgaatttgataagatggacattcgggaccaagttgctattcatgaagctatggagcagcagaccatatctatcactaaagcaggagtgaaggcaactctgaatgccaggacatccattttagctgcagcaaaccctgtcagtggacactacgacagatcaaaatcgctgaaacaaaacatcagtctgtcagcacccatcatgtcccgctttgacctcttctttatcctggtggatgagtgcaatgaggtgacagattatgctatcgcaaggcgtatagtagacttgcattcaaggattgaagaatcaattgacagagtttattcccttgatgatatcaggaggtatcttctttttgcccgccagtttaagcccaagatttccaaagagtccgaggacttcatagtggagcagtacaaacgcctccgacagagggatggctctggggtcaccaagtcctcatggagaatcactgtgcgacagctggagagcatgatccgcctctcagaatcaatggcccggatgcactgctgtgacgaggtccagcctaaacatgtgaaagaagcttttcggttactgaataaatcaatcatccgtgtagaaacgcctgatgtcaatctagatcaagaggaagagatccagatggagacggatgagggaccagatggcatcaatggtcatgctgacagccctgcccctatgaatggggtcaacggcctcagtgaagatgccaatcaggaacccatttccaagccctccctgaggctgggtttcgctgagtactgccgaatctctaacctcattgtgctccacctcaggaaaatggaagaagaggaggatgagtcagcattaaagaggagtgagcttgttaattggtacctgaaggaaatcgagtcagaaatagactctgaagaggagctcattaataaaaagaggatcatagagaaggttgttcatcgtctaacgcactacgatcatgttttgattgagcttacccaggccggactgaaaggctccaccgaagaaagtgagagctatgaggaagatccctacttggtggtcaaccctaactacttgcttgaagattgagatggtgaaggtaactttgtagccagagataggacttgtggtgtcctccctctgccctggagcctgatgacactcaggagagacagtttctggagcagtgcttgaggatggtttgaagagagctgagttcatggccccagaacctcatgctgggacagtttgggcattttgtgcttcttctcttattggaatcagaacccaatcgtgttctttctgtaagacctttgtctttgtgtataggaaaagcctgctgcttctgttatataggcatctggaaattgccttcttcagtttccagctattgcttttattcatgaaaataaataaattgttctg

SEQ ID NO: 746 - DNA, 2630 bp, Cricetulus griseus
  modified_base (714)..(714): a, c, t, g, unknown or other
caggagcatgctctcttcctgtatacacaccggaggatggccatcacaggagacgacgtatctctggaccagatagtgccactctcaaggagattttatgctggaagaagtgtccccagatggtgagctctacactccttggctctgatgtgacggtacaactggacacagcagagctcaggcttgtattccaacttaacctttggttcacacaccaggatgttcctccaggaagttgccagagcctgtccagggttcgctgcgagacacaatggtgaaatcacatcttgtgcagaaggaagaggattatacctacatccagaacttcaggttttttgtgggtacatacaatgtgaatggacagtcccccaaagaatgtctccggccctggctgagccacagcacccaggccccagatgtgtactgtgtagggttccaggagctcgatctgagtaaagaagccttcttctttcatgacaccccaaaggaggaagagtggtttaaggctgtgtcagagagccttcatccaggtgccaagtatgcaaaggtgaagctcatccggctgggttggaattatgttgctgttgtacgtcaaacaggaacacgcagcacatatctcagaagtggaagctgagactggtggggacaggaatcagtggggaggagtgggtaaacaaagggaggagtggcgatcgaggttccagctgcacaacngagcatctgcgttttcacggagggttgagcttaccttccagcctactttacaagtacgatactggctctgacgactgggataccagtgagaagtgtcgtgctcctgacctggtgtgaccgtgtcctctggaaaggaaaaaacatctctcagctgagttaccagagccacatggccttgaagaccagtgaccacaagcccgtcagctcggtgtttgacatcggggtgagggttgtgaatgaagaactctatcggaagacactcgaggaaattgtccgatccctggataagatggaaaatgccaacattccctctgtgtcactgtccaagcgggagttctgttttgagaatgtgaagtacatgcagttgcaaaccgagtccttcacgattcataatggccaagtaccctgccaatttgaattcatcaacaagcctgatgaaaagtcttactgtaagcagtggctgactgccaaacccagcaaaggcttcctactgccagattctcacgttgagatagaattggagctctttgtaaataaggctacggccacaaaactcaactcaggtgaagacaaaattgaagacattctggttttgcacttggaacggggaaaggattactttttgtctgtgtctggaaactacctgcccagctgtttcgggtctcccattcatacattgtgcttcatgagggaaccaatcttagacctgccactggagactgttagcaagctgactttgatgccagtgcagacagcagatgacaggagccagctggagaaccccatggaaatccccaaagaactctggatgatgatcgattacctgtatagaaatgctatccggcaggaagatctgtttcagcagccaggcctgaggacggaatttgagcatataagggactgtttggatactggaatgattgataacctctgcgctagcaaccattccgtagccgaagccttgctgcttttcctagagagcctaccagagcctgtcatctgttacagtgcctaccataactgcttggagtgttctggcaattacacagccagcaaacaggtcatttctactctccccacgttccacaaaaatgtcttcaactacttgatgtcgtttttgcaagaattgctgaaaaattcagcagaaaatcatttggatgaaaatattctagctagtatatttggcagcttactgctccgaaacccagctggtcgccaaaagcttgacatggtggagaagaagaaggcccaagagtttattcaccaattcctctgtagtccagtttgaacctcaatcctcctctcctgttttacccaaggcagccacaactgtcagcccatgccattggctagtactcctatgctgccttgtgaagacatgggacaaatccacaataatagaactgacattcaatgttcaactttagttatttaacacaaatagatctctattcatttatatttttaaaaaatttaagtaactatacattgccttactcaaactgtctccaggaaatacagtgagttccctgtatccctgactgaacatctcataattagatatttggactaactgaagtccttgaaggagaatgagttgaacagcaggaatttgattggatgttcctggacaaacaagttttagccattccagatgcttccactgtccaatctgaggacatgtatatactggggcaactctgtcccctttgtacttggctccaaggcctctcagtggcccctagaagcatggaaggtctttggtgaaacaagtgggattttgtaggccagacagtcctcccaactgtatataatgcattccctctcatatgtgtaatatattttaatgataaatgtatttttaatagtgaaaaaaaaaaaaaaaaaaaaaaaaaaaaaaaaaaaaaaaaaaaaaa

SEQ ID NO: 747 - DNA, 2630 bp, Cricetulus griseus
atcatttgtctttgaaagaagaggcttctgacgtggttcgtcaaaagaagaagtacccaaagaagcctaaggcagaggctgtgatagctcctccgcagcccactcctgagacattgcctgtgatcaataagagtgacattaagcaatatgactttcagagctcagatgaagatgaatttccacaggtaccatctccagcatcagaacctgaagaagaaaatgatcctgatggtccctgtgctttcagaaggcgggctttggaccaagctaaccatacgtgtgaaaatttagagttggcagacctggataagttgaggtataagcattgtcttacaacacttacagttccaagaagatgtataggatttgcacgaaggcgaattggcagaggtggaagggtcataatggaccgactatctacagaacatgacccagttctgaaacagatagaccctgagatgctgaatggttcttcaagctcttcccaaactatagacttttcttcttatttctctcggaccaatgcttccagtaaaccttgtgaaaatagactgtccctttctgaaatattaagcaatatcagatcatgtcgactacagtgtttccagccaaggctactaaatgtacaggacattgataatgaagaatgtacctcaagaaaaccagggcagactgtgagcagtaaaagagtttctgcaccatctgtagctttattgaacaccagcaagaatggcatatcagtaacagggggcatcacagaagagcagttccagacacatcaacagcagctagttcaaatgcaacggcagcagcttgcgcagcttcaacagaaacagcaatcccagcattcctcacagcagacacacccaaaagcacagggctcaagcacctctgactgtatgtctaaaacacttgactcggccagtgcacactttgctgcatctgcagttgtcagtgctcctgttcctagtcgcagtgaggtatccaaggaacagaacactggccacaacaacatgaatggtgttgtccagccttcaggaccatctaaaacaatatattccaccaatatggctttatcatccagcgcagggatttcagccgtacagcttgtaaggacagttggccacactactacaaaccacttgatcccagcattgtgcacaagcagtcctcagacgcttcccatgaacaattcctgcctgaccaatgcagtgcacctcaataacgtcagtgttgtttctcctgtcaatgtgcatatcaatacacggacttcagcaccatcgccaacagccttaaaacttgccacagttgctgccagtatggacagagtgccaaaggttactcccagcagtgccatcagcagcatggccagagagaaccatgaaccagaaagattgggtctaaatggaatagcagagacaacagtagctatggaagtgacataacctaaagcatgtggctttgacctgtgtggatggtgtgcagtcattcatattccagcggaatacaaaaggcaacactctgtggatcacagagcagaacaatggacctaaatggactacagtatatcggatgttaaatcgatatatgatgtatattttgtaaaattgggaaaatcactaccttgtaaaatagtttatttgtatcatcaatattatttctgttacttgaatagtagatattcatcatcatgcttttgcacttgaatttgcaactgaatggatattaaaaaataattctttaatgggatcatgagcatgaaatgggatcctgcatcacttgtttaactatttatttgccatgtttacattttgatcttgtaaaaaaaaataatccaactttgtgtactaaaaagttaagattcatagctaggaatgaattcttgtaattttttcaaaggaactgtaaagttttcacttggttcatttttgttcacaatttgactagatggactttttggaaatactttagtggcatttacactgtcaaatacgacttcaaggcaaaatagtagttttctattactgtgcaggggaaagggatggatcgatacatgcaaatttaatggagtaactcacttttccatatattttgaatgtatatttctatttataataccagtttataaaaataattacacagaaaaagtggactaggaaaattatgcatctagcacatttaaactgtgcagatatgaaaatttttcacggattacattttatctgaagactgcatattttaactggctttaaaactgtaacacaccacataaaagatatttaccaggtatgtattgcattatatcattgcaataattattggaagtctatatatcgagccatcccaggttttgggaggggggagggttgtggcaagattgtcttttcaattttggagagttttcctgtggctacaaggcaagtaacgggttggaaaaagtctgactgtaagtgttggacaccttcatagtgtagtgttttagtgtactttttttatacggttcttgtaaattagatacgtgtagtggtgtttccgaatgtttgtttatgcactagttcagacaactttccctgttacttgttcttgataagtgaaaactgcagggaaataaaaaatacatatacaaaaca

SEQ ID NO: 748 - DNA, 2627 bp, Cricetulus griseus
atgtgcccagtttactatgaaatacttgatttagtatgcaaaagatgttttgatgaattatcaccaccttgctctgaacaacataacagggagcaaattttaattggcttggaaaagtttatacaaaaagaatatgatgaaaaggcaagattgtgtttatttggttcttcaaagaatggatttggattccgtgatagtgatctggatatttgtatgactttggaaggccatgaaaatgcagagaaattaaactgtaaggaaataattgaaaatctggcaaaaattcttaagaggcatccaggtttaagaaatattctgcctataactactgccaaagtgcctatcgtaaaatttgaacatagacgaagtggattagaaggtgatatcagtctatataacacattggctcaacacaacacaagaatgctagctacctatgcagctattgatcctagagtacagtacctgggatatacaatgaaagtgtttgccaagcgctgtgacattggagatgcatctcggggaagtttatcttcatatgcgtatatccttatggtgctgtactttctgcagcaaagaaagccaccagttatcccagtcctacaagagatctttgatggaaaacagattccacagagaatggttgatggatggaatgcctttttcttgataaaacagaagaactagaaaaagtcgtttaccttcacttggaaagaacacagaatcactaggagagtctttggttaggactgcttcgattctatactgaagaatttgatttcaaggagtatgtaatcagtattcgtgaccacttttgaaaagcagtggacatctaaatgcattgcaattgaagatccttttgacttgaatcataaccttggtgctggtgtttctagaaaaatgaccaattttattatgaaggcattcattaacggaaggaaactttttggtacccccttttatccactcattggcagagaagctgagtacttcttttgattcgagagtattaacagatggagaactggctcctaatgatcgttgttgccgagtatgtggaaaaataggtcattacatgaaagattgtcccaaaaggaaaagactaaagaagaaagacagtgaagaagagaaggaaggaaacgaagaagaaaaagactcccgagaccttgactccagagaccttaggtgtttcatatgtggagatgcaggacatgtgcgtcgggaatgcccagaagtcaagatggcccgacagaggaatagcagtgtggcagcagcccagctagtccgaaatcttgtcaatgctcagcaggtggctggttcagcccagcagcagggtgaccagtccataaggactagacagtcttcagaatgttctgattcaccatcttattctcctcagcctcagccatttccacagaattccccccaaccaaccgctattcctcagcctccatcccagccaggatcccagcctaagcttggcccacctcagcagggaggccagccccctcatcaggttcagatgcccttgtataactttcctcaatcaccaccagctcagtattctcccatgcatggtatgggactattgccaatgcaccccctccagatccctgccccatcatggcccattcatggcccaatgctccactctgcacctggtagtacccccagcaatattggcttgaatgatcccagcatcatatttgcacagcctgctgccagaccaatggcaatccctagctcttctcatgatggacactggcctcgtactgtggctccaaattccctggtgaacaatggtgcagtgggtaattcagagccacgctttcgaggactaaatcctccaattccatgggaacatgcaccacgtccccatttcccccttgtcccagcttcgtggccttatggtttgcatcaaaatttcatgcatcagggaaatccaagatttcagcccaataaaacccttctatgctcaagcagacagatgtgctacccgtcgctgtagagagcgttgtccccacccaccaagaggaaatgtgtcggagtaatgccagcccacagcaaccagccaatcctgctgtttcaagggtatccgtacctcagtgtcagttacactcagcagaaaaagtgacatttaaggaaagcaaaacaaatcaggtcctgatttaaaattttaacacatgtttagatagcttatttaaattctaagactgtttttaaacactgtattatttgtatataaatatgaactatagtttttactggtatcactaaaatgagtgatacaaatttcatctattttattaccctatttttaagggaattttatgttttgtttaaccttgatgaattgtataaagagagaatttaaaaattacattctttattttctattagctgtattcatactttggttgcttcagactttatatatattgttcttaaggattaggagaggatttcatgtgttttaaatttgtcacttctattctttacagaaccttgtagtgccaaaaactttttaaaaggtaaaaaaaaaaaataaaattacaacataaagattactaaaaaattttcttttacatacttgtatgttgaatatattcaaacttgaatggaaagtt

SEQ ID NO: 749 - DNA, 2626 bp, Cricetulus griseus
gtccccgggctcggtcactgcgaggtcccattcgagcgctgcgccgtaacaagtgggcgaggatgccgtacgagatcaagaaggttttcgctagcctcccccaagtggagcggggcgtctccaagatcctcggcggagaccccaagggcaatcattttctctacaccaatggcaagtgcgtcatcctgaggaatatcgataaccccgctattgctgacatctacacagaacatgcccatcaagtggtagtggccaagtatgcacccagtgggttctacattgcttctggagatgtctctgggaagctaaggatctgggataccacacagaaggagcatcttctaaagtatgagtaccagccttttgctgggaagatcaaggacattgcctggacggaagacagtaagaggatcgccgtggtcggggaaggaagggagaagtttggagctgtctttttatgggacagtggctcttctgtgggtgagatcactggacacaacaaagtcatcaacagtgtggacatcaagcagaacaggccctaccgactagcaactgggagcgatgataactgtgcagcattcttcgagggccctcctttcaaattcaagtttacaattggtgatcacagccgctttgtcaactgtgtgcggttctctcctgatgggaacaggtttgccacagctagtgccgatggccagatattcatttatgatggaaagacaggagagaaagtgtgtgctcttggaggaagcaaggctcatgacggaggaatttatgctattagttggagtcccgatagcactcatttgctatctgcctctggagataaaacctctaagatttgggatgtcaacgtgaactctgtggtcaacacatttcccatgggctccagtgtcctggaccagcagctgggctgcctgtggcagaaggaccacctcctcagcatctccctgtctggatatatcaactatctggacaagaacaaccccagcaagcccctctgggtcatcaagggtcacagtaaatccatccagtgtctgacagtgcacagaaatggtggcaagtcctacatctattccggaagccacgatggacatatcaattactgggattccgaaacaggagagaatgactccttctctggaaaaggccacacaaatcaggtgtccaggatgacggtgaatgagtctgggcagttggtcagctgcagcatggatgacactgtgcggtacaccaacctcacactgagggactatagtggacaaggagttgtgaaactggatgttcaaccaaagtgtgtagctgttggtcctgggggatatactgtggtcgtgtgcattggacagattgtcctcctgaaggaccagaaaaagtgcttcagtatcgacaaccctggctatgagcccgaagtcgtggccgtgcaccctggtggggacatggtggctgttgggggctcggatggcaaagtgcgtgtttactccatcctgggctccacgctaaagaatgaaggcaagctcctagaagccaaggggccagtgacagacttggcctactcccatgatggtgccttcctggctgtgtgtgatgccagcaaggtggtcacagtgttcagtgtggctgatgactactcggagaacaatgttttttatggacaccatgcaaaaatcgtgtgcctggcttggtcaccagacaatgaacactttgcctcaggtggcatggacatgatggtgtacgtgtggacacttagtgacccagagaccaaagttaagatccaagatgctcaccggctgcaccatgtcagcagcctggcctggctggatgagcacacattggtcaccacttcccatgacgcctctgtgaaggagtggacaatcacctactgaggacgccgctcaccccacggaccgaatcagggactagatttttaactgcctcagagcacccttctcttaactatttctgtaacgctccccttcccgcctgtcccgggagtgagcagggcctgcgaataccctcctctctacagggagtctatgtctgtacgcgtccttctgaaagctttagacagtaacagtttgcacatgagaaataaagcaagcacttaaacagcagcgtacctgaaaacttactgcccaccagaccgtgagagtgtggaacattccagaggcagcagcctccaaagcacagaccccagcccctgtggctcttgcagcttatcaggaagctgggtagggagcaggccacggctctcctttcccatgcaagatgcagctgcactggagaggaggagctgctctgcagacccctgtgtcagcattctgggtagagcaggtgtctactccatggtgtaagtcatgttacatggctgtctccctggagttatccccagatcccatggggacatgtgaaccttgatctcattgtcagattttgtgcttgattttaagaatggaatcattgggttttttgtttgttttgtgtttgtttttttaattgtatcttgactgttgtctgtcttgttcctgagctggcgtgctgacagtaccatgtctaggcgagtagtgcccttcatagccagactgaggctatggtcacatgatcaccatgcttcaatgtttcctgtctc

SEQ ID NO: 750 - DNA, 2626 bp, Cricetulus griseus
cgccttcttgtgactaagatggcggcggagcatccagagcctcccaaaggagaattgcagttgccgccgccgccacctccaggccactatggcgcctgggctgctcaggagcttcaggccaaactggcggaaataggagctccgatccaggggagtcgcgaggagctggttgagcggctgcagacctacacccgcagacggcattgtgctagaacacctcctctccgagtcggtgagcctgtggcattatcagaagaggaacggctgaagctggcacaacagcaggcagctttgctgatgcagcaagaggaacgtgccaaacaggcagctgtgttaatggagcaggaacggcagcaggagattgccaagatgggcactgcagtccctcggcctcctcaagatatgggccagctgggtgttcgaactcctctgggacctcgagtagctgctccagtaggccctgtggttcccactcccactgttttgcccatgggagcacctgttcctcgccctcggggtcccccacaaccccctggagatgagaacagagagatggatgatccctctgtgggccccaagatccccaggctttggaaaagattctacaactgaaggagagccgtcaggaagagatgaactctcagcaggaggaagaagaaatggagacagatactcgctcgtctctgggacagtcagcatcagagaccgaagaggacaccgtgtccatatctaaaaaagagaaaaatcgcaagcgtcgtaaccgaaagaagaagaaaaagccccagcgggtgcgggcagcatcttcagagagctctggggaccgagagaaagaatcagctcgttctcgaggctctgactcccctgctgctgatgttgagattgaatatgtgactgaagaacctgaaatctatgagcccaacttcatcttcttcaagaggatttttgaggctttcaagctcactgatgatgtgaagaaagaaaaagaaaaggagccagagaaacttgacaaaatggagaactctgcagtccctaagaagaagggctttgaggaggagcacaaggacagtgatgatgacagcagtgatgatgaacaggaaaagaagccagaagcccctaagctgtccaagaagaagttgcgccgaatgaatcgctttactgtggcggaactcaagcagctggtggctcggcctgatgttgtagagatgcacgacgtgactgcacaggaccctaagctcttggttcacctcaaggccacccggaactccgtccctgtgccacgccactggtgttttaagcgcaagtacttgcaaggcaaacggggtatcgagaagcccccctttgagctgccagacttcatcaaacgcacaggcattcaggagatgcgagaggccctgcaggagaaggaagaacaaaagaccatgaagtcaaaaatgagagagaaggttcggcccaagatggggaagattgatattgattaccagaaactacatgatgcctttttcaagtggcagaccaaaccaaagctgaccatccatggagacctatattatgagggcaaggagttcgagacaaggctgaaggagaagaagcctggagatctatctgatgaactaaggatttccttagggatgccagtaggacccaatgcccacaaagtccctcccccatggctgattgccatgcagcgatatgggccacccccatcctacccaaatctgaaaatccctgggctgaattctcctattcctgagagctgttcctttggataccatgctggtgggtggggcaaacccccagtagatgagactgggaagccactttatggggacgtgtttggaaccaatgctgctgagtttcagaccaaaactgaagaagaagagattgatcggaccccttggggagaattagaaccatctgatgaagagtcctcagaagaagaggaagaggaagaaagtgatgaagacaagccagatgaaactggctttatcacacctgcagacagtggcctcatcactcctggagggttctcatcagtgccagctggaatggagacccctgaactcattgagctgaggaagaagaagatagaggaggcgatggatggcagtgagacacctcagctgttcactgtattgccagagaagagaacagccactgttgggggagccatgatgggatccacccacatttatgacatgtccacggttatgagtcggaagggcccagcccctgaactgcaaggtgtggaagtagcgctggcacctgaggagttggagctggaccccatggccatgacccagaagtatgaggagcatgtgagggagcagcaggctcaagtagaaaaagaagacttcagtgacatggtggctgagcatgctgctaagcagaagcaaaagaaacggaaagctcagccccaggacagtcgtgggggcagcaagaaatacaaggaattcaaattttaggtcccttctcacattgctggctatcctttaggctttgtctgtatgtctgggctttatatgtggatgcccgaaagctaactctgtacttccctaggcttgtcatttcttgttcttattttagaattgttttgtaaataaagctgtttcccaaggaaggaatagaa

SEQ ID NO: 751 - DNA, 2625 bp, Cricetulus griseus
gcaaggttgccccagctgggcactgtaggtcaatccccctacaccagcgccccaccgctgtcccatacccccaatgccgacttccagcctccctactttcccccgccctaccagcctatctaccctcagtcgcaagatccttactcccacgtcaacgacccctacagcctgaaccccctgcacgcccagccgcagccgcagcacccgggctggcccggccagaggcagagccaggagtctgggctcttgcacacgcacagggggttaccccaccagctgtcgggcctggaccctcgcagggacgtaccggcggcacgaggatctcctgcacggcccacacgggctcggctcggggctcggggacctcccgatccactccttacctcacgccatcgaggacgtcccgcatgtagaagacccgggtattaacatcccagatcaaactgtaattaagaaaggccctgtgtccctgtccaagtccaacagcaacgccgtctccgccatccctatcaacaaggacaacctcttcggtggcgtggtgaaccccaacgaagtcttctgttcagttccgggtcgcctgtcgctcctcagctccacctcgaagtacaaggtcacggtggcggaagtacagcggcgcctctcaccgccggagtgtctcaacgcgtcgctgttgggcggagtgctgcggagagcgaagtctaagaatggaggacgatctttaagagaaaaactggacaaaataggattaaatctgccagcagggagacgcaaagctgccaacgtcaccctgcttacatcattagtggaaggagaagccgtccacctagccagggactttgggtacgtgtgcgaaactgaatttcctgccaaagcagtagcggaatttctcaaccgacaacattccgatcccaatgagcaagtgacaagaaaaaacatgctcctggctacaaaacagatctgcaaagagttcactgacctgctggctcaggaccgatctcccctggggaactcgcggcccaaccctatcctggagcctggcatccagagttgcttgacccacttcaacctcatctcccatggcttcggcagcccggcggtgtgtgcagcggtcaccgccctgcagaactatctcaccgaggccctcaaggccatggacaaaatgtacctcagcaacaaccccaacagccacacggacaacagcgccaaaagcagtgacaaagaagagaaacacagaaagtgaggctctcctcccgccccgcgcccgcccgcccgcccgcccgcccccccccacccggcccgccgcccacccggcaggtgacagctccgggaccagccactcctactgctgctgctacgctgcgccgccgccgccgcgccgcccctcgtccccggagtcctcgggactgctctctctcgactgccagtgaggcagccgctgcctactcagcgccctgcctcaacttccccatcagcaccaacaccccccttgccctcttgtggagcctaaaagaacagaacaggtcgtgaagccagcaaagaaaagttctgtcgcgtttgtgaaccttttttttttttttaaatcaaatctaacaacaaacattaaaactttttttttctaaaaaaaaaaattttaaaaaagttaatacgagcttcatgggactaactcatcgccttcccttgcatacttcagattgtagccatactttaaaaaaaaaaaaggcaaagaggataatgacatttttatcagtattgtgaataaacttgaacacaaatacagaagttctatgtcctgtcttcagttgtagaagttgtctctgcaaggtgcccacttgaacttgctctgatgacacaatccacacttctataagggaatcagtgttcacgtctctgtatatatttatttatgtgtaatttaatgggatttgtaaatatggtgagtcttgttttaaaccttttttttttatttatctggtgatctcatttacctcctgttcagtggcttttggatcctccctattagttcttcatgtggttttacttacttagaaatccagggtttgggtgatgataatgaaacagctgaacaaaaacttttttaaaagtaaaataaaattttatatataattagtattacatttagcttttcattgaatggaaaggaaacagtgatattgggacactggaaagatttttttttaatggagcggtttgataactctcctatggtattgtggggagaaaaaataaagtttatttgagttcactgttctcccttaaaagcgtcctctgagcaataaatgaatattgtctttaaaccaagggttagggatttctctgtcctctctccttttctcctctctctctctctctctctctctctctctctctctctctctctctctctctctctctctctctctctcttccctctctccccccctctctctccccctctctttttttgttcaacttcaagcatttgggaccacctggtattgtgtgtcttcaccggccacattggaagcagttctagatgtactgtgttgagttgcgctggcagtagtctccctgcctgtcaatgtatcatagtcctttgttgcccagataaataaattatttgatacg

SEQ ID NO: 752 - DNA, 2623 bp, Cricetulus griseus
aaattaaagtagttaccattggagggaggccagaggtgaaacctgtcattggtgtctcagcattgaccccaggaagtcaactgattaatactacaactcagccctctgtgttacagacccaacagttaaaaacagtacagattgctaagaagcctcgaacaccaacctctggtccagtgatcacgaagctcatctttgcaaaaccaattaatagtaaagcagtcaccggacagacaactcaagtgtcaccaccagtcatcacaggtgctggccccagctccaggaacagggaatgtgggatatgcagtacttcctgctcagtatgtcactcagttacagcagtcttcatatgtgtctatagcaagcaactctaattttactggaacatccggtatccagacacaggcaaggcttccattcaatggcataattccatcagagtctgccagtcggcccagaaaaccctgcaattgtacaaagtcactgtgcttgaaattgtactgtgattgctttgcaaatggagagttttgcaacaactgtaattgtaccaattgttacaacaatttggaacattgaaaatgaaagacaaaaaagcaataaaaggcatgccttgataggaatccagaagcttttaagccgaaaatagggaaaggaaaggaggggagtcggaccgtcggcacagcaaagggtgtaactgcaaacggtcaggatgtcttaagaactactgtgaatgctatgaggcaaaaataatgtgttcctccatctgcaaatgcattggctgtaagaattttgaagaaagcccggaacgaaagaccttgatgcacttagcagatgcagctgaagtgagggtccagcaacagacagcagccaagaccaagctgtcctctcagatctcagacttgctgacgaggccaaccccagccctgaacagtggaggaggaaaattgccatttacatttgtaactaaggaagtagctgaagccacgtgtaactgcctccttgcccaggcagagcaggcagacaagaaggggaagtcaaaggctgcggcagagcggatgatacttgaggagtttggacggtgtctgatgagcgtcatcaactctgcagggaaagcaaaaagtgacccttgtgccatgcactgctaactcctgcacaaaagctgcacgtggactgtacagaaaacttaaggttccggaacacttgactttctagaagatagtttaacaattactgtattttaattcagcccttgttttaagagacctgaaactataatattgaatgagaagaaattagtacattttaaatcttagttaattctgcctatgtcccttctaaatttttttctttaaatatttttcctttattgtattacatattttttaatttgcttggggttttcttaagaattagatgttctgtccttctgattccattgacaaagtacattcataaattattgtaatatcaatttatttctttaatgaaaacaaaatattaagggacagacggatgggcagtgtgtctctgtgatgaggaatggctaacatgttctgggatgtctttattttctttgaaggaggtggtatgttttacaataattgtcaaagtcattatggataagtactttaaaatgagagatgtgtgttctctaataattgcacaaattaacctaaatcattttcagtaattaaaactgtatgctcttaggaacctattgtaataggactcttgagtttataacaagggaaaactgtgttggaattgaggcattttgtaaggttaccttaaatccttgctaactaatagcatatgcttattaccctcctacaaggattctatagttgtatgtagtaagtgtgtatatatgttcatatgaacatgaaaggtataggcactagaaattaatgcaaagaggattccgttatttattaaagtatcctctttttaaaatgtggatttataaattatagtgcagtaactttaaatgtagatagtgcagacattcttagcacctcagtctagtgtgtcaaagtaaactttgtataaatgtaaattagtctaaaaggacaaaataatattcatcaagttatttttcaaaagactgcaataagtttttggtctaaacctaaactttgttcattttgtatatattatgtgttaattctaattgcaccattgtgatgtgtatttatatacagtgtgcacaaatgtttgtgaatttttgattacaattgtagattatgtatgatggcattgcttaagaatgttttgcttgtaaaaatttgaaggtgcaatcaaatgctactagttttgatttttcagaagctctctgaagcatcaagccctcctccctgtctggtactcactaaacaaccttttgtattaggcgtttgcatcaaatcgctgaacaaagttaatagctacatgagctcaccaattttaaaagattatttggggagggttcggtacataatttttaagccctatttacatcccaaagtagaaagattatattactagagctattcaaaaagtacacttttctatattagtaaaaacagggacagaagaataaatcatacagaaaataaacatttatactattctagtaagaagaaaa

SEQ ID NO: 753 - DNA, 2623 bp, Cricetulus griseus
ggaaatccaaattctcctcccaaagtgcccattgtgattcaagacgatagccttcccacggggccccctccacagatccgcatcctcaagaggcccaccagcaacggtgtggtcagcagccccaactctaccagcaggccagctcttcctgtcaagtccctagcccagcgggaggcagagtacgcagaggcccggagacggatcctgggcagtgccagccccgaggaggagcaggagaaacccatccttgacaggccaaccaggatctcccaacccgaagacagcaggcagcccagtaatgtgatcagacagcctttgggtcctgatgggtcacaaggcttcaaacaacgcagataaatgcaggcaagaaaggatgccgctgccgccgccgccgccatcgcctcctggattgtctgccatgggttgcactgccgtggcagacatctggacttgagcagagggaacgacctgacttacttgcactgtgatcccccttgctccgcccactgtgaccttgaaccccatgcactgtgacctctgcctccccaccttcccactgtgattggcatgttgacaagggctgtcccaagtcaatagaaagggaaagggtggggattaggggaggattgggggaacctaccaaggactcagagtagagggtcagacagtgctacttggggtaaagccagtgccagcaataagtttatcatgctcattaatttgggatttcaaaacacaaatgagaactgccctcacccaccccaagtgcatgtcgccatcacttaaaagtaagttccattgaaaatatcctttcttttttttttttcttcctatttttgtttgtttatacaaatatctgatttgcaagaaaaagtgcatggaaggggttttagcagtttaatgaatttttaattgagaaagggtagtttggtagtcacttaaagatgtttctaggaaatttgctagaaacattaaccaataggattttggtgagcttagcttctgtattcctactgctgcccagaaaaggcagggctctggagcccccagtagtagatgagcactgtgcctatattgccttcctccagctaagtcccagctaagttgcctagagacagctcagagagccagggggagggtgccaaccccacctctagtattgtgggaaatggggaaagtgacagatttcccctttccatacccctcagggtggctccctaccagacaggtttgctgcttctagaggtggggggaaagaaaaacttcgcattgctgaggcagctggttgataggtttctcagaggcctctgctgccctttcccttcttatcagaacgaggctggtatgcaggccatttctgtccctgagcctggagatttgctttggctcttggtggggagagagaggcttgagggggtagctgtgtcccaccaggtgctctcaggcttcctagtctttcccatgcacttcgccttatccctcagccagcctgatggcctcccctctcctggccagcacacatgtttgggagtgggcacagccctagaccttcctgaaaccaggggccttctatgagggagctggaacagagcctcagcaagagggttggccacccccaggagggggcaggaagggagttggctgctagctccttgtctagggcctacccacaggggctggtggtttctggttggaggacagactgtgctttctgtggagaagggtgcagaaaccctgcttgccccaccccctctagtgggagctaaggacagctggtgtctgctttttgagagcttgcaggagtggctctcccatctcactctggccaaagaaggccctgcccacagtgtactttcgcctgcccaccagcagtcttgcatttggcctcctagacggagaggtggctggcacaacaagaaagaaagaaagaaagaaaaatttttttcttttctttctttcttcctgtcttaagttgcaggctttggcttggaaatccccagggggatgaggggcaggaacctgaggctgctgcccctttgtctgtcttcatggtactgtcccttcccccagctcttcctggaacccatgagccaggcctcagcccttccagctaaccgcttcccatgagccactactctgatgtcagcctataaccaaaggagctggggtccaggtctggtgaccagcccttctcagtcccctcaatcagggtgctccccacctgcaggcaggaggcaacaccctatctgctgccatcagccccttccagagcccacctgtcccacccagccctgtcctgccctgccataccctgctctgccccatctgggggtgctctgctcagggatgggctggcagggctgcatccagtctccctggtgagcagagactcaagaaaacctctggggtcctgctctggtcatatgaccctaggggggacccttgggcatctgcacagaagggactgggagggagggccgcaccctgcagtctcgctctgctggtgtagcaggcagctccccaccctaacccccaccgtgggctcctgagtcggcagattaagcattttataaattgtattttaaatacatgttttaaacttgtcaaaaaaaaaaaaaaaaaa

SEQ ID NO: 754 - DNA, 2623 bp, Cricetulus griseus
catgttgcttcagaatccacaactggcttatgctttgctacaagcacaggtagtgatgagaattgtggatcctgagattgccctgaaaattctgcatcgccagacaaatatcccaacgctgatttcaggcaaccctcagccagtccatgttcctgggcctggctcaggacccaatgtttcaatgaaccagcagaatcctcaggcccctcaggctcaatctttggcaactcctcgtggtctcttaggagatgcccccaatgacccacggggaggcacttttaatgactgtaactggagaggtagagcctagagcttacttgggaccaccaccaccacctcatcagggcccacccatgcaccatgttcctggccatgaaggccgtggaccacccccacatgacatgaggggaggtccattagctgagcccagacctttaatggcagagccaagaggacccatgctggatcagaggggtccacccatggatgctagaggtggaagagatccccgaggattagatgcacgagggatggaggccagagccatggaggccagaggattggatgccagaggactggaggcccgtgccatggaagctcgtgctatggaggcccgtgctatggaggcccgtgccatggaggcccgtgccatggaggctcgtgctatggaggcccgtgctatggataccagaggcccagtacctggacctagaggacctctgcctagtggaatccaaggtcccaatccaatgaacatgggggctgtcgttccccagggatcaagacaggtcccagtcatgcagggagcaggtatgcagggagcgagcatgcaaggtggaagccagcctggtggcttttagtcctggacagagccaagtcacaccccaggaccatgagaaagctgctttgattatgcaggtccttcaactcaccgcagaccagattgccatgctgcctcctgagcaaaggcagagtatcctaatcttaaaggaacagatacagaaatccactggggcaccttgaaaggttctcaaaaatacctggcaacaaatctggaaatacaattccataacatcattgaaatgttgaaaattggtgacttctgcatcctaacccttgatgtctcaaattggtgccaggtggagaactcgtatcaccatttctccaaatgaaagcagttcattcggttgtcttagtttgtatattttctgtgatcttaaactttgaacacatttttaacatactgcaaattgatatacataacccttttgcttttaagaagctaaacaccaatgtaaaagcttaagatatattttctacccttagcagccttgtcctttaatcttatattgccatagctctattctttctttagcataaatgtttactcttcttaatgatacttgagtatttcttggaagaaatgttttcaggagctttgttttttgttgagtttgcattcagcaagataatacgttttgccctttgaaaactttctagagtctttgagttttctgggagaaaaagcaaagactgttgtaaagctcttctgtctaggtagccaactttacaagtttacaaagtcactagttttccacatgttcaaatttaataaggaaaataaagtgaactaaatatattttaccacccgttttcaagaaaattgcaaagctttcagctctttgcttttaaattcattccaagaacgtaaaacagaaaaccctaaaactttacattttcaagtcttttaagaggaccaagcatatagcacaggaaagtagattgtctgttacggttgcctgcttttttccaagtactacctacttggaaggtaattagtgccattggcctgtgctagcctgaaagtcaccttgccctttgttctccacatagtggcattaatgaagaacattgtttctttctagcaggtcagactgaagacatctgaagagttgccttataactagtaaagtttactagaactaattttaagcttatttatattctcagagccctaccctctgtgttaggattatgggcaggtgaattaaaatcattgcttagacatacaaagcataataatattgcttacatgtcaaacaaaggaatgccaagatagtaaaattgggggattttttctctatattacagtgaaaatttgctgtatatgtcatactgtaaccaatcaagaaaagtgcaaaacagcaagtttcccaaaggctcattaaacttaatgttgtttagcagacactcaggtgaataaattgacaagagcagtggcatcccaaaattcatccccatggaagcactcatcagtaggaaaaagaatgacatttaagtgagtgatcccctcagtaagaaagacctggagaatagtcaaaattataaattctttatttctttttataccagacattcataaacaaacccctttaacaaaaatagtagagaaaattggtgttgaattcatttattccatgatgtaggccaggtgttcccagttatttcaaacaatacaaaatgacatatagttggcttctaattataatgtaaatttgattacagttaatatacgtcagatgattattgttttgtcctggattcaataaatattttaaaagtc

SEQ ID NO: 755 - DNA, 2622 bp, Cricetulus griseus
gggctgcggcccaacgggcagaccaagccgctgcccgcgttgaagctggcgctggagtacatcgtgccgtgcatgaacaagcacggcatctgtgtggtggacgacttcctgggcagggagaccgggcaacagataggcgacgaggtgcgcgccctccacgacacgggcaagttcacggacgggcagctggtcagccagaagagtgactcttccaaggacatccggggggaccagatcacctggatcgagggcaaggagccgggctgtgagaccatcggcctgctcatgagcagcatggacgacctgatccgccactgcagcgggaagctgggcaactacaggataaacggccgaacgaaagccatggttgcttgttacccaggcaacggaacaggttacgtccgtcacgttgataacccaaatggagatggaagatgtgtgacatgtatatattatctaaataaagattgggatgccaaggtaagtggaggtatacttcgaattttcccagaaggcaaagcccagtttgctgacattgaacccaaatttgatagactgctgtttttctggtctgaccgacgcaaccctcacgaagtacaaccagcatatgctacaaggtacgcaataactgtttggtattttgatgcagatgagcgagcaagagctaaagtaaaatatctaacaggtgaaaaaggtgtgagggttgaactcaataagcctaattcggtcagcaaagatgtctagcagggcctttggtgtctagcagttcccacatcacctacagctgctcgattgccttctgtggactcatggatggaatgaacagagactcctggctggtattccagctgggagccaggtgacttggccaggtgttgtccaacagagggctccatctgctgtgactgtgctatggggtcagctccagatctgtgactgcacttggctgctgactgaagaggagatgctgtctgaggagagtggcttttccatctggacacgaaacaagggccctatataggattttcttcattcttctattttgccagatctatcatctaactgagttcatttcatctcttttttatatcaagtttgaattcggggaatttttgtattaggtacaatttatcaaaactgaattaagaaaaaatttacagtattattcctcaaaataacatcaatctatttttgtaaacctcttcatgctattaaattttgcccgaaagaccctcctacgatgattgtcgccagtgactgattttttaaaagctatgcgactggcactaaataaacttgaggtcctcttccactctggttcccaagacaaagggctttcttcagcttcaggtctggcctgtcatcaatcgtgtcccactgccacagttttccccgtggcttctccttagtttgactgtgcttccagatcctcccagatcagagcctcattctgttgcagagcacccaatggccccaggcacatggacacgtgtgtggttgtagcctcaagcatggtcatcggcttcttggacagctatgactcattttcacaaccagtaatgaaagacgtgtgcagcttagaaatcaaaagaagtgtaaaaccagacactctttgttttatgtgtttttctatttaaagagggacagtggcacaaccacacaaggcctgccagactcttgtcacctccacagtccccttaaaaagccagactttgcacagattatgggtaactccttgcccccttgggtgttctatctctgaccttgatctttgccaaaatgtgtgtatgcagaactatttctgtgtatttcaccttgcatcagtcttagcagccatgtagtttgtatccaattagaaaccttttctgtggaaagctcagtaattcttattaagagattgctattgttcatgtaaaacatgaaaaaaaaatcaagtaaagctgaatatggattgggggttactcagcactgtgcttgcgtgaggggctcatggcaggaagtccagttctgtcccaccgctgacaacctctccagcaagtgcctctgccagccggccagctctaaggttttgccacctggccccaaaagcaccatgtttcagagttgggagaaactgtctggctttggtggtagaagatctgtttgactggagcatcagccttttaatgtgggagtcccgggtatactttgtatgggaccgttactggtgtaccaagtctcagactcttctgcctgggggttgtgcttgccagacaaaatttaaattatatatcttttggaaagtttatgtactttcctggaggtcactgtgaaaagatcaaagaaatcaggattagttatgcacttaatacccgcttaaactcagtttcatgttagggctctgtttaaaactttgtggcctctgtgtgttaatcctggttaaagagaaagctttatgatgctgtttattcagtacattaagcagctgtggaacagacctttatccatggtaggcagagcacttcattcaggatttgcatagagactcgtgtggttcggacgccgtgtttcctatgaaagcctctcacattgcttgtaaagctactctaattaaaaagatgtataaatgttcttagaaaaaaa

SEQ ID NO: 756 - DNA, 2620 bp, Cricetulus griseus
agggtcttccctcctgaagaatggcatcagcttgtcagaggctgcgtttttatgcctgtcctctgacaaggcagctcgtctgtgggccacctgtcatccagtgggaaagaagaacaattccagcgtgtgccagaagtatttacagtgccacagggacgtggacgaaggagtacacactacagaccagaaaggatgttgagaattggtggcatcgacagataaaagagcaggcgtccagaatttcagaggatgataaatcgaagcccaaattctatgtgctctccatgttcccatacccttctggcaagctgcacatgggccacatacgagtctacaccctcagtgacaccattgcgaggttccagaaaatgagaggcatgcaggttatcaatcccatggggtgggatgcatttggattgcctgccgaaaatgctgccatcgagaggaatttgcacccagaaagctggacccaaagcaatattaaatatatgaggaaacagcttgaccgcctcggcctgtgcttcagctgggacagggaaatcactacctgtttgccagactactacaaatggacgcaatacctgtttatcaaactctacgaagctggactggcctatcagaaggaggccttggttaactgggatccagtagatcaaacggtgttggccaatgagcaagtgaatgaatatggctgttcatggcgttctggagccaaagtggagaagaaatacctccgacagtggttcattaagacaactgcatatgcaaaggctatgcaggatgcattggcagacctcccagagtggtacggaataaagggcaatgcaggccactggattggggactgtgtaggctggtcacctggaggttgatggacaagacacaggaggagaaactgacagcatacacagccactcctgaggccatttatggcatttcccatgtggccatttctcctaaccacaggcttctacacggctgcagttccctgaaggaacccttgcagaaggtactagtccctggcagagattgcctcacaccagtgatggctgtgaacatgctcacccagcaggaagttcccatcgttgtcatggccaaggctgacttaggaaggttcgtctagattcaaaaataggaatccccagcaccagctcagaggacaccagcatagcccaagccctgggcctgccctactctgaagtcattgaaacttcaccagatggcacagagagactgagtggatctgctgaggtttaggtccagcccctgtttgtgcaagaacaaaagagaagttagaggtaacatgggagaagatgagcaagtccaaacacaacggtgtggaccccgaggagatcgtggcacagtatgggattgacacagtccggctctacatcctcttcgcagcccctcctgagaaggatatcttgtgggatgtaaagaccgacgcgctccctggagtgctgaggtggcaacagcggctgtggtccctgacaacacggttcatcgaggcaaggactcgagggtcagccccccaaccccagctgttgaacaacaaggaggaaaccaaggcccgaaacctctgggagtacaagaactcagtcataactcaggtaaccacccatttcacagaggactttgcactgaattctgcagtttcacagctgatgggactcagtagtgccctcttgcaagcctctgacagagtggttctccacagccgtgagtttgaggacgctctgtgtgccctgctggtgatggctgcccccactggctcctcacataacctcagaactctgggcaggcctggcgctggtaccaagcaagctctgtgaccattatgcctgggatgccggtgtgatgcttcaggcctggcccactgtggactctgaatttcttcagcagcccgatgtggtgcagatggccattctgatcaacaacaaggcctatggcaagatctctgtgccccagcaagttgcccaggaccaggacaaagtccatgaatttgttctccagagtgagttgggcaccaggctgttgcaggggagaagcatcaagaaggccttcctctcccccaggactgccctcatcaatttcctggtacaggagtgaccagggttcaaggaccctccttccctgcccagatcaaggaaaggaatgttagcttaggaaaagagaagagacaaacatcagggacattggcctttgtgccaggacagactgaagtcagcaggggcctaaggcgagctcagggaggacagaaacctcccgtggagcagaagggcaaaagctcgcttgatcttgattttcagtacgaatacagaccgtgaaagcggggcctcacgatccttctgacctttgggttttaagcaggaggtgtcagaaaagttaccacagggataactggcttgtggcggccaagcgttcatagcgacgtcgctttttgatccttcgatgtcggctcttcctatcattgtgaagcagaattcaccaagcgttggattgttcacccactaatagggaacgtgagctgggtttagaccgtcgtgagacaggttagttttaccctactgatgatgtgttgttgccatggtaatcctgctcagtacgagaggaaccgcag

SEQ ID NO: 757 - DNA, 2618 bp, Cricetulus griseus
aaatctgctgctctccacatagatctgtgtaaagccacatccccagcggatgcttgtcagtacctactccagtttgccaggaagcctgttgaggcagaaagcgtggaggggtagtcaggattctcttggaacattactataaggaaaatgatccatctgtgagactgaaaattgcgtcattgttgggattattatcaaagacttcaggattctctccagactgcataatggatgatgccattaacatactacagaatgaaaagtctcatcaagtcctagcacaactgttagacactttgcttgcaattggcagtaaactaccagaaaatcaagctacccagatgcgattagtggatgtagcctgcaagcacctgacagatacatcccatggtgtacgaaataagtgcctgcagttacttggcaatcttggctctttggagaaaagtgtcacaaaagattgatgactacgagcaggtgcgcagtgctgcagtccagcttatctgggttgtcagtcagctctatcctgaaaagtatcgttccaataaccttcgtctaatgaagaaaattcgtttagttgatgatgcatttgggaaaatttgccacatggtcagtgatggctcctgggtagttcgtgttcaagcaaacgcactgcacatgagcgtgccaaggaacttttacagttcaggggagttttccagcggcaggaaatggggagatgatgctcctaaagaagaaatagacacaggggctgtgaacttgatagagtcaggagcttgtggagcctttgttcacgggttggaagatgagatgtatgaggttcgcattgctgctgttgaggctctctgtatgctggcccagtcttcaccctcttttgccgaaaagtgccttgatttcctagttgacattgtttaatgatgaaatagaggaagtgcgtctgcagtctatacataccatgagaaaaatctactaacaatatcaccctccgagaagatctactgacagggactccatatggaagtgcttgaagtttctgggaagtcggcatccaacccttgtgcttcctttggtgccggagctcttgagcactcacccgttttttgatacagctgagccagacatggatgatccagcccacatcgcagttttagttcttatcttcaatgctgctaagacctgtccaacaatgccagcactgttctcagatcataccttcaggcactatgcctacctccgagacagtctttctcatcttgttcctgccttgaggttaccagggagaaaactagtatcatcaactgtctcctctaacatcaccccccatgaagatccttcccagcagttcctgcagcaaagccttgacagagtgtatagtgttcagcacctagaccctcagggggcccaggagctcctggaatttaccatcagagatctgcaaagacttggagaacttcagtctgaattggcaggagtagctgacttctctgccacctatcttcggtgtcaactgctccttataaaggctttgcaggaaaagctgtggaatgtggctgcccccttatatctaaagcagagtgatttggcctcagcagcagcaaaacagatcatggaagaaacctacaaaatggagttcatgtacagtggtgtggagaataagcaggtggtgatcatacaccacatgaggcttcaggccaaagctctgcaacttatagtaactgcacgaactactcgaggagtcgaccccttgtttggaatgtgtgaaaaatttttacaggaagtggatttttttcagaggtgtttcattgccgatttgccccaccttcaagacagctttgtggacaaacttcttgatcttatgccccgactcatggcatctaaacctgtagaagtgatcaaaattctacagacaatgctacggcagagtaccttcctacatctcccacttccagagcagatccacaaagcctcagccaccatcattgaaccagcaggagagtcagacaaccctttgcggtttacatctgggttggtggtagccttggatgtggatgcaaccctggaacatgtgcaagaccctcagaacagtgttaaggtccaggtcttgtatccagatggccaggctcagatgatccaccctaagccagcagactttcggaatcctggcccagggcggcaccgtctcatcactcaggtgtacctctcccatactgcctggacagagccatgccaggtggaagtgaggctcttgctggcctataactccggtgcacgaattccaaaatctccatggatagagggtggtgagatgtcatcgcacgtggaaaacagcattgagggcaccatccccttcagtaagcctgtgaaagtttacataatgcccaagcctgcaagacgctgacccacaagcagtcttctcagccatgctctagaagcccttccttaggtatcaatgagcaggagctttggaagtggtgtgtaggcatgaagaattgtcaatcttacaattccattagtatcatacacagggtcaatcatttttgcattaaaaacagaaacattctggtttttctcctccattcccataataaagttgagaaaacacctaaaaaaaaaaaaaaaaa

SEQ ID NO: 758 - DNA, 2618 bp, Cricetulus griseus
gtggagggcgtctgtccacagacacaggcagttcttcgacaagcctggcttgaaaacatccgtcctgttttagtgattaataagctagatcgcctgatagtggagctaaaattcaccccacaagaggcctactctcacctcaagaatattttagaacagattaacgcacttacaggaactctttttactctaaagtcctagaagaaagggcagagagagagacagactcccaggtgaagacacagtctgaacaaggagatcaagtgtacgactggagcactggtttggaggatgctgacgactctcagctgtacttctccccagagcagggcaatgtggtgtttaccagttgcaatagatggctggggctttggaattgagcactttgccagaatccccaaagacgtgaacgtgcacgacagagacacgcagaaaggcttgcaggaacacaggggcaggcaccccaaggtcccacccaggatggaggtacccttgaaacaggtccccagggagatgagccaagaggtgatgagccagacgtggcaagtattagccctcaacctgtggcccaggaagaaagcagccaagaagccttcattgcatttgctcgtgtgttcagtggcatagctcgaagaggacagaaaatttttgtcttgggacccaagtacagccctgttgagtttttacaacgggttccactaggcttctcagctccgctagaggacctgcctccagtcccccatatggcatgctgtactctggagaacctgtatcttctgatgggaagagagctggaagatctggaggaagtgcccccaggaaatgtgctgggaattggaggcctccaggactttgttctaaaatctgcaacgttgtgcagcctgccatcctgccctccgttcattcctctcaactttgaagccacccctattgtgagagttgctgttgaaccaaaacacccaagtgaaatgcctcagcttgtgaaaggaatgaagctgttaaaccaagctgatccctgtgtccagattttaattcaggaaacaggagaacatgttttagtcacggcggggaggtccaccttcagcgatgtttggatgacttaagagaaaggtttgcaaagattcacatcagtgtatctgaacccattattccattcagagaaacaatcacaaaacctcccaaagttgacatggtcaatgaagaaataggcagacagcaaaaagttgctgtcatacaccaaacaaaagaagaacaaagcaaaattccagagggcatccatgttgactcagatgggctgatcaccatcacgacgcccaataaactagccactctcagtgttcgggccatacctcttccagaagaggttactcagattctagaagaaaatagtgacttgattcgttctatggaacttttgacatcctccttgaatgagggcagaaatacccagggaattcatcagaagactcaagagaaaatttgggaattcaaaggaaaactagagcaacacttaatagggagaaaatggaggaacactgttgaccaaatctggtcatttggcccaagaaaatgtggacccaacatacttgtcagtagaagtgaagatttccagaactcagtatggtctggcccagctggcaaagaatcaaaagaagccagtagattccgagactttggcaatagcattgtgagtggtttccagctagcaaccctctctggtcccatgtgtgaggagcccctcatgggtgtctgctttgttctagaaaagtgggaactaaataagtgtgcagaacaaggagcaagtgataaacagaaccaaaaacagtgtgatctggcagaagagggacaggaagaaggtaaaacctgtcacagtggagatgaaaaccaagagcaacaagatggctgctctgagccctttgaagagacttccccaaaaggagaatctccagtcactgactgctatggacccttctcagggcagctaattgccaccatgaaagaggcttgtcgctatgctctacaggtgaagcctcaacgcctgatggcagctatgtacacatgtgacattatggccaccagtgatgtcctcggccgagtctatgctgtgctgtcaaagcgagagggtcgagtgcttcaggaagaaatgaaggaagggacagacatgttcatcatcaaggccgtgctgcctgtggccgaaagcttcggctttgccgatgaagtcaggaagaggaccagtggactggctagcccccagctagtgttcagccactgggaggtcattcccagtgaccccttctgggtgccaaccactgaggaggagtacctgcactttggggagaaggcagattccgagaaccaggcccggaagtacatgaatgcagtgcggaagcggaagggcctctatgtggaggaaaagattgtggaacacgcggaaaagcagagaacactcagcaaaaacaagtagctaaaaagaagtagctactgcttgtggtgggcccttttcttttaatgaactaacaaatcttatcaagggtataatttggaaaaatctcattttgataaattatctgtgtgggttctctttcaataataaacctgggctatatattttaaaggca

SEQ ID NO: 759 - DNA, 2617 bp, Cricetulus griseus
gctgcaattgttttactaatgatgtgcttgaagccagacaagaggaggtcaggatggaaggagttgatccaaatgcacttaattctttggttcagtatgcttatacaggtatgctgcaactgagagaagacaccattgaaaatttgctggctgcagcatgtctcttacagctgactcaggtcattgatgtctgctgcaatttcctcataaagcagcttcatccgtcaaactgcctagggattctctcatttggagacgcccagggctgtgtggagctccagaatgtggcacataagtataccatggaacatttcattgaagtagtaaagaaccaagaattccttctgctcccagctaatgaaattgcaaagcttctgtgtagtgatgacattaatgtgcccaatgaagaaacaattttccatgctctcatgcattgggtaggtcatgatgctcagaataggcaacgagatctggcgaagctgctttcttatatcagactgccattactttcaccacagttacttgcagatctggaaaacagttcgatgtttactgatgatctggagtgccagaagctattaatggaagctatgaagtatcatctcttgcctgagagaagatccatgctgacaaagccctcgtaacaaaacctagaaagtcaacggtgggggcactttatgctgtgggaggtatggatgctgctaaaggtactactaccattgagaagtatgacctcagaaccaacaattggatccatattggcactatgagtggtcgtagacttcagtttggagttgcagttgttgataacaaactttatgttgtgggaggaagagatggcttaaaaactttgaatactgtggaatgttttaatccagttaccaaaacctggcttgtgatgcctcctatgtcaacacataggcatgggcttggtgtagccacacttgaaggaccaatgtatgctgttggaggtcacgatggatggagttatctaaatactgtagaaagatgggatcctgatggacgtcaatggaattacgtggccagcatgtcaactcctagaagcacagttggagttgttgcattaaataacaagctctatgctattggtgggcgtgatggaagttcctgcctcaagtcaatggagtactttgacccacacactaacaagtggagtctctgtgctcctatgtccaaaagacgtggaggtgtgggcgttgcaacacacaatggatacttgtatgttgtaggggggcatgatgcccctgctcctaaccattgctccaggctttctgactgtgtagaaagatatgatccaaaaagtgattcgtggtcaactgtggcacctttgagtgttcctcgggatgccgttgctgtatgcccccttggagacaaactctatgtggttggtggatatgatggtcatacttatttgaatactgttgaatcatacgatgctcagaaagacgaatggaatgaggaagtcccggtgaacattggaagagctggggcatgtgttgtagttgtgaagctacactgaatctctcattagctactgcaatgaaatggaattgcctcaagaatgaagaagaaatatgctcttttatgaagttgataagcaaattcaaatgctgttttgtcattttcatatatagtagaaatcattaacgttcataaggctgaaaaaagttaaatgtggattaaatgttagtgttgagtgtatgtgctgtctcagattataatctaatgagaaatccaataggctatgtttagactcattactataaaatgttacaatacctaacaaaaatttggtagtgggcagtatttgaaggtgataaatacattaatactcttcatgtaagtgtctaggaagtaaaaacatgtttttttattaaaggtactctactgttagaaacaacttaatataaaaacatgacagaagctttgcagcataaagtatggtttcaaacaatagctcacccagctaataatacctcacatttgccaagaagaaagggatttctttgtcaatgaggccgatcatttattgatgtaatttgctatactaatcatactatgtcaaacttttcacaggttatattttcagttcactaactgccaaaatatatgtatagattttctaatctctgatgtggtttgttggtagattcatttgcagtaaaaacatcataatgtcgcatatacaatctatagtctgtaacagtgaaaattgtattgatacaaactgtgcctgatcttcagaatgcgagggcctcagttgcacaaaattaattatttcctcaagcatttaatgtgttcttgataaacaccttctcttaagtttaaaaagttgacataaacaattctaaagaagattacagttgagagtatgaagcacaatgataacatttggaaacactgaaatgtttaatatgcacagtcaattctataattctctttgcctatcaataccctattttcttttaatttcataatcatgttacccagcagtaaatggtaagaacatatgtactacaaactacacttttgaaaacaaaaaacgaaaaagactatttgagtagtattttagcttttaactatattttcatttatc

SEQ ID NO: 760 - DNA, 2617 bp, Cricetulus griseus
gttacccaccaagccgaagcttactaagacacccagatatttcctgcattctcggaacggaagggaagtctccccggcacacacagtcttctgggttcttgggaaatctatccatggtgacaaacctggatgacagtaactgggcagctgcattctcatcacagcgtttgggcttctgcacaaacgtggagccccacagtgtaactgaggacgtaaacctgagtgctgttatgttacgtgaagatgaccctggagaggctgcatccatgagtatgttctctgatttcctgcagtctttcttgaagcactcttcgaccacagtttttgatcttgttgaagagtatgaaaatatctgtggtagtcaggtgaatatgctgagtaaaatagtgagccgagcgacgcctggactgcagaagttttcaaagacagccagtatgctctggcttcttcaacaggagatggtcacatggaggttgcttgcctctttgtatagagacagaatacagtcttccttagaagaggaaaatatgtttgcagttgctgctattaacgccagtgagaagacggttgtggaagctctatttcagagagactcactggttcgacagagtcagctggtggtagattggttagaaagtattgccaaagatgaaattggagatttttctgataatattgagttttatgcaaaatcagtatattgggaaaataccctccataccttaaaacagcggcagctgctgccttacataggaagtgtccggcctcttgtcacagaattggatcctgatgctcctattagacagaaaatgccacttgatgacctggatagagaagatgaagttagattactcaagtatcttttcactctcattcgagctggaatgacagaagaggcacaacggctctgcaaacgttgtgggcaagcatggcgagctgcgacactggaaggctggaaactctatcatgaccctaatgttaatggaggtacagagctagagcctgttgaagggaatccatacagacggatttggaagattagttgctggagaatggctgaagatgaacttttcaataaatatgaacgagcgatttacgcagcactgagtgggaacctcaagcagcttcttcctgtctgtgacacttgggaagacacagtgtgggcctacttccgggtgatggtggacagcctggtagaacaggagattcggacgtcagtaatgaccctggatgaaacggaagaactccctagagagtacatggaagcgaattggaccttagaaaaggtttttgaagaacttcaagccactgataaaaagagagttctggaagagaatcaagaacattaccatgtagttcagaaattccttatcctgggagacctggatggtttgatggatgaatttagcaagtggctttccaagagcagaagcaatctacccggacacctcctccgcttcatgactcaccttgttttgtttttccgctccctgggattgcagaccaaagaagaagtttccattgaagttttaaagacatatatacagcttttaataagtgagaagcacacaaacctcatcgcattttatacttgtcatttgcctcaagaccttgctgtcacccagtatgcactgtttttggaaggtgttacagaatttgagcaacggcaacagtgcctggagctggctaaggaagcagatttggatgttgcaacaataacaaaaactgtagttgagaatattcgaaagaaagataatggtgaatttagtcaccatgacctggctccatccctagatactggcacgactgaggaggaccgtgtaaaggtggatgtgattgactggctggtattcgacccagcacagagggcagaagcactgaagcagggcaacgccatcatgagaaagttcttagcatcaaagaaacatgaagctgcaaaagaagtgtttgtaaaaatccctcaagattccattgcagaaatctataatcagtgggaggagcaaggcatggagagcccacttcctgctgaagatgacaatgctatccgagagcatttgtgtatcagagcctatctggaagcccatgagaccttcaatgagtggtttaagcatatgaattcagctccacaaaaacctgcattgatatctcaaccaacttttacagagaaagtggcttttgaacacaaagaaaagaaatatgaaatggactacagtatttggaaaggacatttagatgccctcactgctgacgtaaaggagaaaatgtacaacgtcctgttgtttgttgatggaggatggatggtagatgtcagagaggatgctgaggaagaccctgaaagaacacatcagatggttttactaagaaagctctgtctgcccatgctgtgtttcctgcttcatactatattgcatagcacagagcagtaccaggagtgcctgcagttggctgacatggtgtcctctgagcgccacaaactgtacctggtattttctaaggaagaactaaggaaactgctgcagaagttaagggaatcctctctgatgcttctagaccaggggcttgacccgctcggatatgacgttcagtcataactcatcacctctgatgccccggacta

SEQ ID NO: 761 - DNA, 2616 bp, Cricetulus griseus
actttcttggtcaaagtcaaagtaaggccttactgaagaaccgcctcctgcctcccttgctgcacgcccttttcccagttatggctgctgagccacccatgggccagttggatcctgaagaccaagattcagatgatgatgacttggagattgggctgatgggggagacccccaagcactttgctgtacaggttgtggacatgctggcactccaccttccccctgagaagctctgtccccatgtgatgcccatgctggaagaagccttaaaggagcgagctcccgtaccagcgtaaagcagggttcctggtgttggctgtcctgtctgatggtgctggtgaccacatcaggcaaagattgctgtccccactgctacagatcgtgtgcaagggcctgggtgacccctcacaggttgtccgcaatgctgctttgtttgccttgggccagttttcagataacttacagccccatatcagcagctactcagaggaagtgatgccactgctccttgcctatcttaagtcagtgcctacagggaacacacaccacctggccaaagcctgctatgccctggagaacttcgtggagaacctagggcccaaagtgcagccctacattccggagcttatggagtgtatgctgcagcccctgaggaaccccagcaaaccccggaccaaagagctggctgtgagcgccataggagccattgccacggctgcccaagactccctgctgccctacttccccaccatcatggagcttatccggggattcctgttgactgcccatgaagaccttcagcttgtgcagatccagagcttggaaaccctgggagtgctggctcgagcaatgggagagtccatgaggcccctggctgaggaatgctgtcagctggggctggggttatgcagccacatagatgatcctgacttgcggcgctgcacgtacagcctgtttgcagccttatcagggttaatgggagatggcctggcaccttacctgcctcaaattaccacgctcatgctgctgtcattgcgttccaccgagggcattgtgcctcagtatgatggaatcagctccttccttctgtttgatgaagagagcgaaggggaggaagaagaggacctcgtggatgatgatatggaagaggaggaggactctgagatctcagggtacagtgtggagaatgccttcttcgatgagaaagaagatacctgcactgccctgggggagatctctatgaatgccagtgtggccttccttccatacatggataacgtctttgatgaagtactcaaactgctggagtgtcctcatctgagtgtgcggaaagcggctcatgaagctctgggacagttctgctgctcgctacataaggcctgtcagagtaacccttccgagcccaacaagactgctctgcagtctgccttggctcgagtggtaccgtcttacatgcaggcagtgaaaggagaaaaggaacgcccggtggtaatggcagtgctggaggccctgactggggtgctgcgcacctgtggggctgtcacactgtacccctctgggcgcctcagtgagctctgcagcatgctcaaggctgtgctgcagaagaagacagcctgtcagaacaccgaggaggaagatgaagatgaagatgatgaccaggcagagtatgacgccatgttactagagcacgctggagaggccatccctgccctggcagccgcagctggaggacaggccttcgctcctttctttgccagtttcttgccgttattgctgtgtaagatgaaacagagctgtacggtggcagagaagtcctttgcggtgggaacactggcagagtccattcagggtctgggtcctgcctcagtccagtttgtgtctcggctgttccctgtgctgttaaacactgcccgggaagcagacccagaggtgcggagcaatgccatctttgggctgggtctacttgcagagcatgggggctgccctgctcaggaccacttccctaagctactaggtctccttttgcccctcctggcaagggagcatcatgatcgagtccgtgataacatctgtggggctcttgcccgtctgctgatggccagtccagcaaggaaagcagatccccaggtgctggctaccctgctacatgccctgccactgaaggaagacatggaggagtggatcactataggttgcctcttcaacttcctgcaccagaacaaccctgagcagcttgcagatgtggctccggagctcctgcgtatctgcagcctgattctgccagacaacaggatcccagcagacaccaaggcggcactgctgctgctcctgacgttcctggccaaacagcacgctgacaacttccactcagccctgggctctctgtctgctgataaagctcaggaactccaggccttgctgggcctcacttagactacaggctccagctgggccagagggccccaagactaccagtcagcccaggcgcagcccacctcaccaaagactatatatatcattggaagtcaatcctgcttgctgtcacttaacgaggggtgtctctggggctggaagctattcaagcagagctgtgacatcacactgtaataaaggcag

SEQ ID NO: 762 - DNA, 2616 bp, Cricetulus griseus
ctcgagtcttgctgcgacataaagcagatgtgaccaaagaaaatggccagggatggacagttttacatgaagctgtcagcacgggtgatccggagatggtatacacagtcctgcaacaccgagactaccacaacacatccatggccctcgaaggtgtacctgagctgctacacaaaattcttgagccccggatttctatgtgcagatgaaatgggagttcaccagctgggtgcccttggtttctaggataaagcagaagttgttaatggttacgaagcaaaggtttacacagtgaacaatgtgagtgtgataaccaaaatacgtacagaacacctgacagaggaggaaaagaagagatacaaagaggaccggaatccactggagtctctgctgggaactgtggaacatcagtttggtgctcaaggggacctcactactgagtgtgccaccgtgaacaaccccacggccatcacacccgatgagtactttgatgaagactttgatctgaaagacagggacattggaaggccaaaagagctgacgatcagaacacaaaagtttaaagctactctgtggatgtgtgaagagttcccactctccctggtggaacaggtcattcccatcatcgacctcatggcacgaaccagcgctcattttgcaaggctgagagacttcatcaaactggactttcctcctggattccctgtcaaaatagagatccccctgttccacgttttgaacgcaaggattacatttggaaacgttaatggctgtagcactgctgaagagaatcagagtatggaggggatccaggctgacacagcttccgaggtcacaaacttcgaggttgatcagtctgtgtttgaaatccccgagtcctatcatgttcaagacaatggaaggaacatgcatctccaagatgaggactatgaaataatgcagtttgcaatccagcagagccttctggagtccagcaggaaccaggacctttcaggaccagcatcaaatggagggatcagtcccacccacagttatgaagcccagtatgagagggccatccaggagagcctcctaaccactatggaaggtcagtgcccaggtgccctcagtgagtcaagccgttttgatagcgacctacagctggccatggagctgtctgccaaagagctggcggaacaggagctaaggctccaggaggaagaagcagaactccagcaagtcttgcagctgtcactcactgagaaatagacatttctgtccggggcggctcctctgggctgcatgggagtgcttcatcagctgagaccctagacagagggcctacacttcctgcagacagcagctgccccttccttatgcaaaggtgcaggaccaggaactccccagagtggaggaggggagcattggcaggtcccatctccaggctgaggggaggagagcattgtcaccttcttccattagctatcctggcttgcaggtcacatttttactaccagctttagacagagacgccaagccctgcagttagtagatacatcttaatcagacatgatgacagttactgctgttcaccaaagaaatgggttctgctgccctctttattttcccttctgccagggttcctaggacatggccattattactccccatctgtgccctgttccatgccctttaccccagctaagaggatatgtacaggatctattttagattatggctaactatttgcatcaaattaagatatacagatgaccacggatgttgccttagccttaaaaattattaatagttttaagccacctcactccacacactgaggacctgacttgagtccgcaaaggcagttagttcctttgggagcagcatcctccaggctaaaccgaaggcagctaatcctgtccttaggggcagctaggggaatccaaggctggttctcacgacaggcaagctgaccactggacagcagagaacctagtcaccgtggcggtgcccgctctggtgaaggatttcccaccgggagagagccagcacatggcctattgttagagaggacaggatgaacttgaaaccagaagggagctaacatggagtagaggctcttcattcaaaagggaaaagtgacgactcctcattgctttttagagttcaaatcaacatctttctggataaatatattttttaacagaatctttttattatttttaaaagatataaaaatgactactcccatcagtagcaatacaaggttatgcattttaaccagattttctcaggccttttttggatacgtttagtagttaactattttgtctaaccctcctgtaaatacctattgctaacagaccgcccctggggaatacagccaagggcaccttgcacctctcacctggtgcaggcattcacccccacaggctgcgctgatcacatggtagtaataccttcccattttgcgtctgtttcctgttacacttcttctggggacaggaagagaatccacggtccccagaaatgtctgtttgatacagtcagtgttgccagtaaaatgttcttagacacaaaaaaaaaaaaaaaaaaaaaaaaaaaaaaaaaaaaaaaaaaaaaaaaaaaaaaaaaaaa

SEQ ID NO: 763 - DNA, 2614 bp, Cricetulus griseus
cggatgaggagaaggtacgcatagctgctaaattcatcactcatgcacccccaggagagtttaatgaagtattcaatgatgtccggctactacttaataatgacaatctcctcagggaaggggcagcacatgcatttgcccagtataacatggatcagttcacacctgtgaagatagaaggctacgatgaccaggtcttaattacagagcatggtgacctcggtaacagcagatttttagatccaagaaacaaaatttcctttaagtttgatcatttacggaaagaagcaagtgacccccaagcagaagatgtggacggaggcttgaagtcttggagagaatcctgtgacgttgctttaagagcctatgtgaaagatcattattccaacggcttctgtactgtttatgctaaaactatagatgggcaacagaccattattgcatgtattgaaagccaccagtttcagcccaaaaacttctggaatggtcgttggagatcagagtggaagttcaccatcacaccgcctacagcccaggtggttggagtgctcaagattcaggttcattattatgaagatggtaatgttcagttggtcagccataaagatgtgcaagattcagtaactgtttctaatgaacgtaccaaactaaactatcaaacaatgtcagacaccacgttcaaggccttgcgccggcagcttccagttacccgcaccaaaatcgactggaacaagatactcagttacaagattggcaaagaaatgcagaatgcttaaggccaactgtaggagtctccagtacaaggaaagaaaaggattcaacatggtgtggtcatatgataaataagtgatttataaacaaacaagagtgatattttgctagttaacaaagttaacagatcttctagcctcatggaaaactgttgaacctacagcactgtcttttgtgtgtgtgttctctgccttgtaattttctgttatcattatatctacttgtaaatctttttttttaattctgctacatttaatgtcaaagagatctatcctgaagtcattttactgtttagaaaatttcctagccatgacatcctattactggtttttacagagtatttgttgagtactttttactctgtgctttaaagcatttccagtcttcagtggcttttactgatccaccagttgctaaagaggctatgctacaaactgtggctaagtggacaacacactccttctctgtctgactgctttgattgtttataaagcatctcacaattatagttttcatacatttggattggggctttttgagtctgtgttgggaggcaaaggaagtttcctgaaaattccatggcagcagcttctctggggacttgttttaaatccaaagacttgaaccacatcccctatgcatgaacgtttattttcatctcttgcctcctcccgtatatgtccatcgtagccatagatgtcagcaggaagtacagcttagaaaggcattgggagatccaggattgtcaatcacttgggccttgtttgttctgagcattgtttaggccctaaccctgggctttgtctctcagtgaatagaatttatacctattacatatccttcctctctaggccctagccctaaattctgtttgtcagtcagtagaactcattcatattgtaaaggtcacaggtgctttactacttggcaagggaatttcaatgtagctagccctgaaactttgttttgagaattgtcatgcggagactttccccaaagttctactatgtttaaatgtgtggaaatattaaaacacagcatcagattctagaagtcttaatccaagtctgaccaagcccgatgcacagagttttcattctgtctttccttggtccacttttcctagcatacatacctacaggaatgcctcaacagatgtcagcaattttagaagagttttggccgtttgtatttctgtttaatattcaagaactggtgacatactgtggatgtagtagagtataaaacttgtaaaacacaggtgttgaaggaataataggtatctgtgttttaatgctgtctggcaggattgctctataagatgatcgaatagctatgtcactcacaaagctggaatgaaccaaagtgaaaaggatgctagtgctttcttctaaacaagatgtaaaactcattccagattcctttctccatcatcctgcctgcctagaactcatatgtaactgtgatattgctatcttcccaggtatgttggcaggtgtgtgtgtgtgatctccgagcacacaggtaatatgatatgacccatgacaactggtaatggtggattcatttacattgtttacatttctatgaccacgccttaggggaaggtcagttttttaaaaaccaagtagtgtcttcctacctgtccccaaatacaagtcaaaacagaagggtgttttgcttccgctttgttttttgcttagtaatacagtcaagcagacgtttgtttgcaaatgaaagccgtgtaagcatttttgtttatttcaaataaaatatatttgtattatttgtcattcatactatccatccatgccacactatcttctgtatgaggtagtccaat

SEQ ID NO: 764 - DNA, 2613 bp, Cricetulus griseus
ccacagaccctcggatggcccgttcctccccctacccaactgatgtggcccgagtggtgatcccattttccatgtcaatgagtggagaagcaccttccacaaggatgttgttgttgtatctggtatgttatcgacgcaatggccacaatgagatggatgaacctatgtttacacagccactcatgtataagcagatccgcaagcagaagcctgtgctgcagaagtatgcagagctgctggtatcccagggtgtcgtcaaccagcccgagtatgaggaggaaatctccaagtatgataagatctgtgaggaagcatttaccagatccaaagatgaaaagatcttgcacatcaagcactggctggattccccctggcctggctttttcaccctggatggacagccccggagcatgtcttgcccctccactggcctggaagaggatgtcttggcccacattgggaatgtcgccagctctgtacctgtggagaactttaccatccatgagggcgtaagccggatcttgaagactcggaaggaggctggtaacaaaccggactgtggactgggccctggcagagtacatggcatttggatcactcctgaaggaaggcatccatgtccggctaagtggccaggatgtggagcggggcaccttcagccatcgccaccatgtgctccatgatcagaatgtagacaaaagaacctgcatccccatgaaccacctttggcccaatcaggccccctacaccgtatgcaacagctctctgtctgaatatggtgtcctgggctttgagctgggctttgccatggctagccctaatgctctggttctctgggaggcccaatttggtgatttcaacaatatggcacagtgcatcattgaccagttcatctgcccaggacaggcaaagtgggtgcggcagaatggcattgtgctcctgctgcctcatggcatggaaggcatgggtccagagcattcctctgcccgcccagagcggtttctgcagatgtgcaatgatgacccagatgtcctgcctgacctacaggaagacaactttgacatcaatcagctatatgactgcaactggattgttgtcaactgttccacccctggcaacttcttccatgtacttcgacgacagatcctgctgcccttccgaaagccgttaattgtcttcactccgaaatccctgctgcgccaccctgaggcaagaactaactttgatgagatgcttccaggaacccacttccagcgtgtgatcccagaaaatggccctgcagctcaggacccaaacaatgtcaaaagactactcttctgcactggcaaggtgtactatgacctcacccgagagcgcaaagccaggggcatggaagagcaggtggctattacaaggattgagcagttatcaccattccccttcgacctcctactgaaggaggcacagaagtatcccaatgctgagctggcctggtgccaggaagagcacaagaaccaaggctactatgactatgtcaagccaagactaaggaccaccattgaccgtgccaagccagtctggtatgctggccgagaccctgctgctgctccagccactggtaacaagaaaactcacctgacagagctgcagcgcttcctggacacagcctttgacctggaagccttcaagaaattctcttagatgcccctggagttgatgaggccatggccccccgtgtccatgatgctctttgcttctccactaaagaacagtgcctcagcactgcccacacttctgccccttgctgtgccacatgcctccgcctgttctcataggaattagattgtctcctccagtgctcagctgctcccaggccagatactgcccagcctgtgctgacttctctcaggctgcccaccttccatggaggcaataaggagcaagatgaagaaaggtcccctcaagatatcctagggaaggcagctctggccctatccatcctcactatgtaatcctctggggttggaacagaaatactatgtggcttcctaaggtactggtagtcagtccttgtcacccaacaagccacagattcaagactaggggtagcttcgtcttgctagagccaaactgagaagtcatggaggaactatagctggtagggtttcgggtgtcactcagcttgttgggtgagcagagagctacccttcttgggtttggggctgtttgtacggaatttgccctagctaccatgcctggagtgattggctctaaatagagtccagaagctccctcgggtcctaaaccccaggcactggctgcgtcttggtcctgctgactctcccccccccctttcctaatcccctggccacttaattttctttctgttgttcccttgaacacatggaagcagttgataaatccttttcttcactgtgccaaggcaggtcaaaaacagatcagtggataagggcaaggtgacacaaggagccagctgtccttcctccctcttttgaccttcaaagggacagatctgattgatttatttattttggtttaaaaaaaaaaagaataaaaaggacaaccaactttgcattgcatcggcttgacccataaactaagttatcatggcca

SEQ ID NO: 765 - DNA, 2612 bp, Cricetulus griseus
agccaagggccattgccctggatcctgcacatgggtacatgtactggactgactggggggaagcaccccggatcgagcgggcagggatggatggcagtacccggaagatcattgtagactctgacatttactggcctaatggactaaccattgacctggaggagcaaaagctgtattgggcagatgccaagctcagcttcatccaccgtggacatagtgctgcaggtgggcgacatccgtcatgccattgtcatcgactatgacccgctggagggctacgtgtactggacagatgattgaggtgcgggctatccgcagggcgtatctggatgggtcaggcgcacagacacttgtgaacacagagatcaatgaccccgatggcattgctgtggactgggtcgcccggaacctctactggacagatacaggcactgaccggattgaggtgactcgcctcaatggccacctcccgaaagaatcctggtatctgaggacctggatgaacctcgggccattgtgttgcaccctgtgatgggctgggtggatgggcgccagaacatcaagagggccaaggatgacggtacccagccttctacactgacctctcccagccaaagtttgagtccagacagacagccacacgatctcagcattgacatctacagccggacactattctggacctgtgaggccaccaacaccatcaatgtccaccggctggatggggatgccatgggagtggtgcttcgaggggaccgtgacaaaccaagggccattgctgtcaatgctgagcgagggtacatgtacttcaccaacatgcaggaccacgcggccaagattgaacgggcctccctggatggcaccgagcgtgaggttctcttcaccaccggcctcatccgtcccgtggccctcgtggtggacaacactctgggaaagctcttctgggtggatgcagatctaaagcgtatcgaaagctgtgacttgtcaggggccaaccgcctgaccctggaagatgccaacatcgtgcagccagtgggtctgacggtgctgggcaggcacctctactggatcgaccgccaacagcagatgattgaacgtgtggagaagaccactggggacaagcggactagggttcagggccgtgtcacccacctgacaggcatccatgctgtggaggaagtcagcctggaggagttctcagcccatccatgtgcccgagacaatggtggctgctcccacatctgcattgccaagggtgatggaacgccgcgttgctcatgcccagtccacctcgtgctcctgcagaacctgctgacgtgtggtgagcctcctacctgctcccctgatcagtttgcgtgtgccactggtgagattgactgtatccctggagcctggcgctgtgatggcttccccgagtgtgccgaccagagcgatgaagaaggctgtccagtgtgctctgcctcccagttcccctgcgcccgaggccagtgtgtggacctgcgtctgcgctgcgatggtgaggccgactgccaggatcgctctgatgaagctaactgtgatgctgtctgtctgcccaatcagttccggtgcaccagcggccagtgtgtcctcatcaagcagcagtgtgactccttccctgactgtgctgatggatctgatgagctcatgtgtgaaatcaacaagccaccctcagatgacatcccagcccacagcagtgccattgggccagtcattggcatcatcctctccctcttcgtcatgggcggggtctactttgtctgccagcgagtgatgtgccagcgatacacaggggccagtgggccctttccccatgagtatgtcagtggaacccctcacgtgcctctcaacttcatagccccaggtggttcccagcacggtcccttcccaggcatcccgtgcagcaagtccatgatgagttccatgagcctagtgggggggcggggcagtgcgcccttgtatgaccggaatcatgttactggggcctcatctagcagctcgtccagcacaaaggccacactatatccaccgatcctgaacccaccaccatcaccggccacagacccatcgctgtacaacatggacatgttttactcttcaaacatcccagccacagccagaccatacaggccctacatcatccgaggcatggcacccccaacaacaccttgcagcacagacgtgtgtgacagtgactacagcaccagtcgctggaagaccagcaaatattacctggacttgaattcagactcagacccctacccacccccacccacaccccacagccagtacctgtctgcagaagacagctgcccgccgtcgcctgtcactgaaagaagctactgccacctcttcccgccccctccgtccccctgcacggactcatcctgacctcagccgcccaccccggcctcgctgcctccctgtaaatatttttaaatatgaacaaaggaaaaatatattttatgttttaaaaaatgaatataattgggatttttaaaaaatgagaaatgtgaacagtgatgggggtgggcagggctgggaaaactttgtacagtggagaaatatttataaacttaattttttaaaacata

SEQ ID NO: 766 - DNA, 2610 bp, Cricetulus griseus
agggacagacagaaaccacagctcagaaaaataagatggaaccaagaaacctagccatcgtttttggtccaactctagtgagaacatcagaagacaacatgacccacatggtcacacatatgcctgaccagtacaaaatcgtagagactctcatccagcatcatgactggtttttcacagaagagggtgctgaagaacctcttacaacagtgcaggaggagaacacagtagactcccagccagtaccaaacatagatcatttactcaccaacattggaaggacaggcgtgctccctggagatgtatcagattcagctactagtgactcaacaaaatctaagggctcgttggggatcggggaaggatcaggtatagcagggagctgcttgtgtcctccatcttcgcagctgctagtcgtaagaggaaaagccaaagagaaagcccagccagcagctccgaagatgagctggacagcgtgtccccaccgcacagctccaaacgcaacaggtcaccaactctcagctgtcgcctggccatgctcaaggagagccccagatcccttctgacacagaagccccacagcgaagaaacagggtctgacacgggcactctgcttagcacatcttcccaggcttcactggtgaggtcctccactaaaaaatcaaacagtccagaaaccaagcacagtgagtttttggccaataccggcaccatcacctcggattattctaccacatcatcagctacctacttgaccagcctggactccagccgcctgagccccgaggtgcagtctgtagcagagagcaagggggacgaggccgacgacgagaggagcgaactggtgagcgaagggcgaccggtggagacggacagtgagagcgagttcccagtgttccccaccgccctgacttcagacaggctgttccgagggaagctacaggaggttgccagggtgagccgcaggaactcagaaggcagtgaagccagctgcactgagggaagcctcacaccaagtttagacagccgtaggcagcagttcagttcccacaggctgatcgaatgtgacacgctgtccaggaagaagtctgctcgcttcaagtcagatagtgggagccctggagactccaggactgagaaagaagctcctgccctggccaaagtgtttgatgtcatgaagaagggcaagtcaacagggagcctcttgacacccagcagaagtgaatccgaaaagcaggaggccacttggaaaacaaagatagcagatcgcttaaaactgagacccagggcacctgctgacgacatgttcggagttgggaatcaaaaacctactgccgagacagcaaaaaggaaaacatcaaacgcagacacacactcggagggcacagagatgctactgaaatcagcgtcctaagtttctggaaagcacatgagcagaatgcagacaaggagtccgaactttcagctgtgaatcggctaaaacccaaatgctcggcccaggacctctccatctcagactggctggccagggagcgcatccgcaccagcacctccgacctgagccgaggcgaaggctgccactcacaagccgagagccccagcgtgctgggcacatccgccagcacccatgcaccattctctcagcagcccgaagccaggggtgctgctagcaccttggcttcaaccagcggaccccctgtttccacaccaccacagtcacctgaccaaataaacggagaaagcttccagaacacgagccaaaatgctagttctgcagccaacactcaccctcacaaactgtctgagagtcccggcactaaaacagagtctcctccgtgtctataagctgggtctatctactatgaacaagaagaaaatactgttacacagtccaataactctgtaaatatttttctcgtaccagaattgttattatgcagccttggtttgggctggattcaccattttgcactgtgaaatagctttacagtgcattgctacagccagaagaacacacagtatatcagatagttgtatacaaataagcaaggtgtttgttgcaacttactacatagtatattccccaaattactgaagaaaactcactggctcatgcagaagagttgttcttttggttcctcactaacaaaagtgcctcatgacaaaagtacatttgatttttagggtgccatactgttgaaattagataacttgcattgaataaatgaatgcgttttatccgtaacaaatttcattacatttaccagttttaacacaggtgggtacatacagaacttccattctctagtcattccagaaggaactgagttttatattcaagcttttaatacagtttttgagttttgtgtgacttgaatttttaatctttctgtaaaatacgtaataacttaaatgaacatattctatgtatcttttcttcagataccagatttgatataaatgttgtaacataggtgtgtagatagtggatcctggatggaactggcttcttactgagaatataattctgcatgaggacttacattcaaacctgtgtcatgcctgtgtgcatacccaattaaacactggaaataaaaatgttttggtgaa

SEQ ID NO: 767 - DNA, 2610 bp, Cricetulus griseus
aatcaccagcactggctgaaggtaccttaacatggggaatcttcttaaagttttgacatgcacagaccttgagcaggggccaaattttttccttgattttgaaaatgcccagcctacagagtctgagaaggaaatatataatcaggtgaatgtagtattaaaagatgcagaaggcatcttggaggacttgcagtcatacagaggagctggccatgaaatacgagaggcaatccagcatccagcggatgacaagctgcaagagaaggcatggggtgcggttgtgccactagtagggaaattaaagaagttttacgaattttctcagaggctagaagcagcattaagaggccttctgggagccttgacgagcacaccgtactcccccacccagcatctagagcgagagcaggctcttgctaaacagtttgcagagattcttcacttcacactccgctttgatgaactcaagatgacaaaccctgccatacagaatgacttcagctactacagaaggacgttgagtcggatgagaattaacaacgtaccggcagaaggagaaaatgaagtaaataatgagttggcaaatcgaatgtctttgttttatgctgaggccaccccaatgctgaaaaccttaagtgatgcaacaacaaaatttgtatcagagaataagaatttaccaatagaaaacaccacagactgcttaagcaccatggcaagtgtatgcagagtcatgctggagacgccggaatacaggagcagatttaccaacgaagagacagtatcgttctgcttgagggtaatggtgggtgtcataatactctatgaccacgtccatccagtgggagcatttgccaaaacttccaaaattgatatgaaaggttgtatcaaagttcttaaggaccaacctcctaacagtgtagaaggtcttctcaatgctctcaggtacacaacgaaacatttgaatgatgagactacctccaagcagattaggtccatgctgcagtgagagctgtggcagtgttcttcacgactgggaatgcagagtcctagtgattgccattaatcctccttattatccttgctttggtttctttcctctgtccctcccctcttttttaatcatgttcttgttctcaagacttctcttctgtgccaaaatcggtaaagctatactttggaaggggctttgtccttcgcaacaggccatccaaggcagctaattgtgcattgcattgaggtctctgctgagaaaagttctgtgacttgaactaaatatttttaaatgtggattttttttgaaaactaatatttaatattgcttctcctgcatggcaaaactgcctattctgctatttaaaaccctcatggatttattttctactgccgctttttcatgtccagccaaaatgaaatgtttaaattaactgtgttgtacaaatggtacccaacacaaaccttttttaaattagtaagaattttgtttaaagttttaagtttgcattttgacttttttttttaaggatgtatgttgtgtgtttaacctttattaactaatgttaaaaactgtgatgtgtgcgtagaatattacgtatgcatgttcatgtttaagaatggctgttgataaaataaaaatcagctttcctttttctaagtgtggcttgtttactgaggtttctgaaatttttccctgtatatatttctgtggaatgcatatacacattacatgtgatttttttctttctcctgggggatagctatgtctttttcagttgtatttttcttacttttgtctatgtacataagtgtaactgcttttaaaactgttgtatataagatgaccagtgattgtgccattaattgacttctgttttgatttaatcttgggtgagtggtgagtcgtagaaggaaaaaagcaaaaccacattttctcagtttcaggagtgaaagggcagcaagaagcactgggtgtttcagaagcaagacgatcccttgacattggaggaccgtgagcaataagagtacttcccagaggaaaccctgtggctgttggatttcagacttgtatcttctatgatggtggaaaataagtttctattctaagccacgtagtttgtggtaatttgtttcagtcagcctaagcactggctacaaccgtctcacaaacagcctgatagatacttcacacttacggaccttttctgatactctggagaaatcacagtgttgagatgctgtgcaggccgagagtttgagagaagagccgtgcattttcctccagtgtcccaagaaagttcttgcaccgtccctaaatacggatagctgccaagttagcgcttggatggagtgaatgagtacaaataaataaagtagatgtaaagtaatgctactgtggccttttcaggtaacatggttcacgctctgcatgttgaagattaagttctgtacctacaacagcctgtgaattaaaaaatgatttttaaaaggttggggaaataaaggataacaaatgttttttttaagaattgaaaaaatattttgtagcatgagaaaactatatgaaattcaaactccagtgttcataaataaaattttattgaacataaaaaaaaa

SEQ ID NO: 768 - DNA, 2610 bp, Cricetulus griseus
  modified_base (327)..(327): a, c, t, g, unknown or other
caaggtggtgctacccatgcgctcatttgcacggctgaaggatctccattttgaccctcccaacgctgtggtccatgcgggtggtgtcctgactgtggagataacagtgtgcagccagatgcctgtccctgtccacgtggaccagatcgctatcaacgtccactttagcattgaaaaaaacaactaccggaagacagctgagtggctgaccaagcacaagacttccaatggaatcgtcaccttcccagctgaggcctccctgttccctgcatctcagaacagcctgcctgccttggacttgtcggagatgttggagagaagcccctntgataactccttgaacaccacaggcatcatttgtaggaatgccacatgctcctaaggaggcgaggagagtggctccactgcctcgctccggatccagtcctccgacaaggtcacgagtatcagtcttccctctgcacctgcataccatgtgatcgagtttgagctggaggttctgtctttaccttcagctccagcagttggtgaggatagcagtattctggggacaccagagccctacaggaagcagaaagacatgcagcaaactgactattgcatggtcaccacagatcacaaggtgtccattgattgcccgtggtctatctactccactgtcattagcactgacattcagtgtgcccttcaggaccacgcactctctactctctgctggaacccggaaatatgtccaagtctgtgtccagaacctgtcagaactggactttgagctgtcagatagtcatctggaagacatgggtcatgctaccgacctgaggctggtacccctgaacacacagtcccagcagcttatccacagcaagcagtccgtgttctttgtctgggagttgacgtggacgcaggagcctccccctcctctgcactgccagttctcggtggggttttcaccagcttctgaagagcagctgaccgtctccttgaagccctatacttatgagtttcaagtggagaacttttttacactgtacaatgtgagagctgagatcctccctgcttcaggggctgagtactgtaggacgggctcactctgctccttggaggtatctatcacacggctcgctgacctcctggatgtggacaaggatgaagccctcgtggagtctgaggaatatttttccaccaagcttatgtacgaagttgtggacaacagcagcaactgggctgtatgcgggaagagctgtggtgtcatctccatgcctgtggctgcccaggccactcacagagtccatatggaagtgatgcctctgtttgctggtcacctccctttgcctgatgtccgactgttcaagtacctcccccatcactctgctcatgcctctcaactggatgccgatagctggatagaaaatgacagcctatcagtggacaagcacctagatgaccagctggactgcagcagcgtgagaagtcgaggcagcacacactcagcttccagcagcgagcacaaaggcttgcccatgccccggctccaggcactgcccgctggccaggtcttcaactccagcactggcatgcagatcctggtcatccccagtcaagacgaccacgtcctggaagtcagtgttacctgatgatgccatgggccagtgaagcccgagtggccgtgagtgcactttagggattgtggctggattgtggtctgtggtaacacactagctctaaccagactttggcagacctgcctagctacagacacagcagagaacagtgtccttcagctgctcagtggagtagagtcacctcatgttgtctgtgacacaggattgttttcagtttttcatccctgtccctgtccccatgctggtaaccccaactcatcataccctcccaactgtcctacactccagattccctagttacggttttatagtaacaccgcttggggccagggggtggggtggtggggaacataaccccttctgtgccttgggatgcccggcagatcacaaggtccacctgtagaagccacatgatgaaaagtactggagagagatggccagagcacaggaagtgtgatatggagatggcataggctgaacattctggatctctgattctcctaatgttgattgaatatcatatgcacttggaattaaatctatatttattataattgttggatgtgggggtaaaatgttttctctcactttaaagtctgctcatgtattgtagctgtatagttgacatcttttgcaccttaagtcttggaactgaagatgctccatctggagtgaaggagagagaggtctctcttgtgctctggtcagtcataaaggaggactcagggcctggaggagcctctgctgatccactgggttgcagtcataccgtaccaacgggttcatttacttttggttgtaaatttgattgtacatattgttgatttgttatttttaagagtacagactaactgatgtaatgtttgtgtataagttgcaccaaaaatcaaggacaaaataaatgtgtgtttctttttactggtgttgaagtcatagcttgtaaatacatgctgtatgtaatttaaacgtttttctattcctaccgaaa

SEQ ID NO: 769 - DNA, 2609 bp, Cricetulus griseus
tacacgcagacgagcgggtcgccagaaccgaggcggcctcgtgcagcggcgccctcctcagaatccactccactccagcggtttctgcagagaggcatgaggggtggctcctggcctcgggagcgtgaggtgggctcggggtcggccaattaaggggaacttcgcggacggcccggccggctccaccagccccgtcctctccggggcgtagcgccaggcgcgggaatccaccgaggccgctatgttcccgcggaggccgccggcctcccctggccgcctggctggcgggcgcgcgggcgggggcctgctggccgtgctggccaatcagtgtcgcttcgtgacgggcctgcgcgtgcggcgagctcagcagatcgcgcagctctacggccgcctgtattcggaaagctcgcgctgcgtcctactcggacgcctctggcgccggctgcgcggccctcccggccatgcctctgtcttgatggcggcgctcgccggtgtcttcgtatgggacgaggagagaatcaccctcctgaaccaaagactccagcagaagggaatgaaaaatcaaaggacaaaagaggagccatgggaaatggtgatggacaagaaacacttcaagctgtggcggcgccctattacgggcacccacctttaccagtaccgagtttttgggacatacacagatgtgacgcctcggcagttcttcaatgttcagctggacacagagtacaggaaaaagtgggatgctcttgtgatcaagctggaggtgattgagagagatgtcgtcagtggttctgaggttcttcattgggtaacacattttccttatccaatgtactcaagggattatgtttatgttcgtcggtatagcgtggatgaggaaaacaatgtgatggtcttggtgtcccgtgctgtggaacaccccagtgtgccagagtctccagagtttgtcagggtcagatcctatgaatcccaaatggttatccgtcctcacaagtcatttgatgagaatggctttgattatttactgacatacagtgacaatccacagacagtgtttcctcgttactgtgtcagttggatggtttccagtggcatgccagatttcctggagaagctgcacatggccactctgaaagccaagaacatggagatcaaagtgaaggactacatttcgtctaagcctctggaaatgagcagtgaggccaaggccactgctccgtcttctgagcggaagagtgagggtagccgtggcccggctcggattgagtatgcttaagggcctttgggataaggagagacaggcactttgggacctgccttgctccctcagctctgctgcaggacagggacaagtcacatgttagaagacatctgctgtaactgtcagtgcgagagaattataactggagttagatttcatttggagccatcttgctctttaccaaacagagagggctgtgacatcatggagtcgtcatgttctcaggccagctgttgtgaaatccagtattatgttgagctaatctggaacaaacctctcactttaggccagaagggaatgactcccatctgcctcttccaagaagcttccttgctgacattccaaatgccaccgttggttgtgcagcgctctggatatccttcagttctgtatgttacttgaaaagtgattggccctgggttctcactaaggggtcactaggagtactcttggtaacagtcctgtggtgatgtgaacactggctgagctaagtgccttgtcctcaccttgctttatcattagagacatgacgtttgtaccaagggatccaaccccctgcaaaatactatgacactgacatatttgactcaaagcagttattgtaactggcttttctgtgtttatgggctgtgcttgctggattgttgcctctgctgtagccttagcccatttgccaggagcaccagagacaaacccctttagacagtactttgatgccatcagttgttttgatagcgtcagtggaagtacatacaaaatgtctcacttaaaagtaactatttctttttaaccctggtagcaaattggagttcactgttttcccactgcagattgactgggccttcctggagggctaaaggtagtggatggtggttgcaccatttcctcagaactttcaaaactgtaagctgccatgtgggccagcagatgaagtctttccctgtaccaatatggtagggatatggcttatgtgaccctcctgagcctctaaaacatttctctccagagctgacatagaagtaagacacagtttggataagatcacaaccagatgatatgggcctggccttgctggattctttatggtgaatagggatcaagttttaaatcttcctcccttttcttttcttttttcctgcttgctatcctgttgtggtattgaaaaaggaactaaacccaaggtgaacttaacccttttaaaaaactttgttgcctactcagttctgtgccaaggaaacaactaactccctcaatgttggatgtcttctgttggcagagcagagagatgcattgagcagtcccagtgtctttcagtaagcatttctcccttctccccaggacctgacag

SEQ ID NO: 770 - DNA, 2606 bp, Cricetulus griseus
gccctgagccgacatgtgcagaggcatgctgtggagcggcctgggggcacacccactcctgtcatcgcctactccaaaggcagcgttggccccagacctagtgatgtcaaggaggaagccccccaagagatgcaggtgtcctcatcgagtggggaggcaggcggcggcggtggcggtgctgctgccgaagctcccgaaactgcttcgctccaggacccggtcatctctgggggtgaggagcccccaggagcaggtgggggcagctatgtgtacccacctgtgcaggagttcccctggccctgataggaggcagtcgggagcccagtggggcaggaggaaaagctgggaatgagggactagtgggagcctctgatggagagcggatggaggactgccaaagtcaccttctaccctgaaccctacccactcgtctatggcccccagctcctagctgcctacccttacaacttcagcaacttggctgctctcccagtcgctctcaacatggtcctacctgatgagaagggtgggggggccctccccttcctgcccggggtctttggctacgcagtgaatcctcaagcctctctctctgccagttccccctaagggagtaggggaacaggcaggggttgagagaacccaaaagggggatgtagggtgagcactaaagccagatcccccttttcaccagatgccacccttcctgagccccccatcactatcagctccctggcctccctgcctgccccttgggagccccatcacactctagtgcagggattgggggcccctggagctcaggagtcaggctgctttgtgtgattgtagtctccccacccctgagaagggtctttggtggttatcctatctcttctggcctttatagatggcttctttggggctaagccaaaatttgagcaccaggtatgaagcactccatacaggatggagaagagattccatttcctccctgccaattcctcactatggtttcttctagattagaccaaatagccagaaaattgctgggggtttgatgtgtggttagcccaagatttgtacattgccttccaccctagctttatcctgtctcctccagtgtcactgtcctcaccagtcactccagatggtttccagggaaccatcttcctcttctggtgggctttggggtatccccaccaactttgcctccaaaatagcaccttataccccatctttgactcagttccccacacccaaagatcccagcctagggatggggtgcagggattttcaatggtccctaatccctaatttgcactagttaaccctggtcagggtccctatgtttccttccagcggggaagatttagattgtttgttcctatttcttgttgaaaagtggggcctccctaatgtgtgattagatggatatttcccatattaccaaccagctcacaaggggagagccagtttgggggagcaaattttgatgtgggaattagaggagtatgactttaaaaaggagaaagactgttttaatccaaatgacagcctttctctcagctactgttttctgaggccaagatggctaccctctgacctactgtggagggggtatgatcatggcttttggagggaggtgagtttggaaaggccaggagcatcttcctgccccctcctaacctcccagtccataggaagggggaggttgtttttgacaggcttcctgaatgttaatcacggagggaagggtcactccattcctcctctgtctctttgcacttttcttggtcttgaccacagcctgagtgaagaatttcctactgaatgtaccaagttccagttttaaggggaaaagtttcaaacaagggaaaaataagaaaaaaaaaaaaaaaaatacactaaaaattcccataaatcttgtttctggcacttttaagaaaaaaaactagacaaaaaacacaataataaagaatacatatatatatctacacacaaattatatatatatataaatatatctatatatacagcggaaccacaagagagactgaggaaggcctgaatgcagggggcagacatgaccacagtccctctgtgcccttcaccggccctcctctgaggaagtcaggagagtttttaatatgggtaagaagaatagcttccagaatttggcaacaaataaagttgtgacaaagccaaaaacttaaaaatatgtatttgagctggaaggtttcaatattgtgagtttcaggtattggaaatttgggattttgcaattttgtcacttgaagatgatcaagtcttgtcagtccgtgccctctttctccatattccctgggaagaagggagtgggaaggccactggttctgtgccacagcacgcaagatttagaattctagactctagctctatacgtagtgaggacccagatttagagaaactgaccattatttatctccagatttgtgtgtgtttccaattctctaggccaataaaccgacaagacaatgaactatgcttacggtgggatgccaggtgcggttatttgtgtggctgctgggtctgggggcaggcatttggtttccttgctccacagggatcctgagacctgtagtcta

SEQ ID NO: 771 - DNA, 2605 bp, Cricetulus griseus
  modified_base (2098)..(2098): a, c, t, g, unknown or other
ctcgagtctcgctgcctcccgggagtgccgtgcgccgcagcccgggcccaggccccggcagcgcctggggtcaaggattcctcatgtccataacatgttggctgaggctctgcagctcacccccactctctgagtggtctccattaattggaccccgtgatttccactctctgctgtcttggacgtcatgagcattgcaatccctctgggagtcaccacaccagatacatcctactcagatatggctgctggatttagtatggaggatattgttcccctgcagaaggcttttccagcagatatgaacatggctttatgaaagaatctctctcgtggatccatgtcacctagtggtgaaagggcctgtgaaggagtcccatctgctcctcagaatcccccacaaaggaaaaaagtatccttgctggagtaccgcaaacggaaacaggaagctaaggagaattctggtggggaagtgactcttcacagagcaaaagcaagtctgcaggagctgggcaaggcagcagtaactctgtttctgacatctcattcctctacatcacattcggaggcagtaagcccatcagattccaggggcacttcttcctctcactgcagacctcaagagaacatcagcagtaggtggatggttcctacatcagttgaacgactccgggaaggaggaagcatccctaaggttctccgaagcagtgtgagagtggcccaaaagggagagccctctcccacatgggagagtaacctcacagagaaagagtcagaccctgcagatggagaaggcccagagccattgagttcagcactctctaaaggagcaactgtttacagcccttccagatacagctaccagctcctgcagtgtgacagtccccggacagaatcacaaagcctccttcagcagagttcgtcccctttcagaggacatctcacccagtctccaggatacagttatcgaactactgcactgagacctggaaactcccccctctcatggttcttcagaatcaatccctttcttccacatccctaccccagcccctgccctttacggggactgcagggtattatagcagccagccgcattctggaaacagcactggcagcaatcttccgaggaggagctgttcttcaagtgctgcctacccctaccccaccagggcacttcagactcaccaacctcagactcggtttctcagcccagcacaggaactttgagttccacctcctttcctcagaactctaggtcatcattgccatcagacttacggactatcagtctgcccagtgctgggcagtcagctgcctaccaggcctccagggtatctgcggtttccaattcacagcactacccacatcgtgggagtgggggtgtacaccagtaccgactccagccactgcaagggtcaggagtcaagactcagacaggactttcctagggcttctggatatgggcaaactgaacttgatgagcccatagctgcttccttccagctgcctctggaaccaaggccgagcatattgctggggaagaggggtacaaggtgccagaggaatgggtctggtcagcaagaaatgagacttgtggtcgtgactggcctccggccttggagaaagatgtaaatcttgtctgaagcagagactataaagaagtttctccctgctgttaagggtcattgttaacaagcaaatggtgtttcggttagtaacggttctaagtgcaatgacttgtgttgaagcctatgtctccatccttgcctgtagcctgtagtcacttgtgcagtagtggtctggggaacctttgaatttagttttcctattcccagttaatcaggagttgctgtcctaagagcaggactgcctccatgactgagaaacatgcactcatgactgcagggtaagaatggggcagataggattgtagaatggcaccgacagggctgtgattgtgtgtgggtctgccccacgtttctttgggggatgcttacatgagagtgggcagattgagagttaacaagttgcccatacccctaacactgttctggatgagagacaagagcagactggcttctccccatccagtgcnattgtgcctgttgtacacccctggaggagccctggagccagcccaggcggggtacacaatctttttaaattccatatggttgccagcttatttctttcacttgtttactgtaatacctggcgtgtttttatttatctaacttttggacaagatatactgtgagttctccctccttacctctaatctgtttctttcccagttccccagcctctttcatctccttctttttctaccctgacctataactatcatatgcacagttcttctctctttgtgtgtgactgttacaaaatttcacttttcaaaattgaaatcaggtgtttgctcaaatgaggggagatttttctgttatggttttagatttttgttttaatgctgaaccctcagcatagttactttttctttttttagcatcgcttcttcctcaagtggagtgtttacaccttgctgtaacatttgaactttcacaagagatgtaataattttgataataaaattcttaaccat

SEQ ID NO: 772 - DNA, 2605 bp, Cricetulus griseus
tggtagtcgctgccggagtcttgtttgaaactggtggtcgggccgggcggagtgtgtgtgtagcggaggacccgccggagggctaggccgttcctgagcgccccggtcccgccgcctctcggacccgctgaccccagccgggctccccgcccgtcccgtgccccagcccgccgcctctccggccggctctgcggcccagccgccaccatgtccctgcacggcaaacggaaggagatctacaaatatgaagcgccctggactgtctacgccatgaactggagcgtgcggcccgacaagcgctttcgcctggcgctgggcagcttcgtggaggagtacaacaacaaggttcagcttgttggtttagatgaagagagttcagagtttatttgccgaaacacctttgaccacccataccccaccacaaagctcatgtggattcctgacacaaaaggcgtctatccagaccttctggcgacaagtggtgactatctccgtgtgtggagggttggtgaaacagagaccaggctggagtgcttgctgaacaataacaagaactcagacttctgtgctcccctcacctcctttgactggaacgaggtggatccttatcttttaggtacctcaagcattgacacaacctgcaccatctggggactagagaccgggcaggtgctgggacgagtgaatctcgtgtctggccatgtgaagacccagctaattgcccatgacaaagaggtctatgatattgcgttcagccgagctggaggtggcagggacatgttcgcctctgtgggtgcggatggctctgtgaggatgtttgacctccgtcatctggagcacagcaccatcatttacgaagaccctcagcatcacccactgcttcgcctctgctggaacaagcaggaccctaactaccttgccacgatggccatggatggaatggaggtggtgatcctggatgttcgagttccctgcacacctgtcgccaggctaaacaaccaccgagcatgtgtcaatggcatcgcttgggccccacattcatcctgccacatctgcactgcagcggatgaccatcaggctctcatctgggacatccaacagatgcctcgggccatcgaggaccctatcctggcctacacagctgaaggagagatcaacaatgtgcagtgggcctcaactcagcctgactggattgccatctgctataacaactgcctggagatactccgtgtgtagtcttggcggcacctcacctaccaggccagggcttgtgtgtttcagcctctgcccctttccctccccacgtaagaagaacatgtttccagtggccagtatgtctattgttgctttacacccactgtgtccagaagctgctgtaggagtccaggccggttgcccctcgctatctgtgcaggactgtgctgtgtggtgcaccgcaagcccagggctgggtttgccaaattctctcctttcctcttctttgtcttcttcaattaaacatttctgtatatgaccctaaacaagatcttgaggttgagatagacggacaattctcataaaggatggactgatcagttgtggtgatcccagggccagccagctaagattgtctacccctgggcactggccctcacctcagtctaggttctgagcagtattggacttggtagcctacagttggccatgctgactttcaggcctcaggtgactgtttccgttacatgaatgggttccatggaggggacttgtatggttctgattttagatgagtccctggcagtgtaggacatgctctggggagagtttgcctggctcattttctgctgagctacctgaaggtttcttagattctgtgacatgaggagagtagtaggcctgaaatctgatgggtttgccccttagctgtcattgctggagaagtaaatccagctacatcctctcttcctcccatactgtcattgctgctaatggtcagattgtcaagcatgtggcattatgggatagacaagcttcttgggctgctgtctgaatgttactttttaaatatggaaacatgcaggatgtcttctccaagaggcttgaactaatgtgccagccagaacccctgagtgtgaattatagcatgattgtacaaacctctgtagaaaatggagatttcttgttctacaaaatgttaagctctaactgatccatttctgtgccctttagcctatgtgtatgaacttactttcttaaatatttaaacttcccttctgttctaaagcttttgtgccatcccttgttcaggtggagaggaagctgcccctttgcagaactgtactgtaaccatttctcctttataaatattattttcacatggctgattgtatacagggcttgtaataattttaacactgtgctgtgaaagagcttaggattctccaccagaggcgacttgagaagcacccgagagtggagtgttctttctgtgactttacttcttcctacgtacattaagtctattcgttctgtttcagcctcctgtataagaagtaccgtattttctgcccatcatactttgtaataaaacttgaacatgtatagactgaaaaaaaaaaaaaaaaaa

SEQ ID NO: 773 - DNA, 2604 bp, Cricetulus griseus
cgggctcgtacccacgcggcgctgcggcccgcctggcctgcaacgctcccaccggctcggcggcacgatgccctttgacttcaggaggtttgacatctacaggaaggtacccaaggacctcacgcagccgacatacactggtgccattatctccatctgctgctgcctcttccatcctcttcctcttcctgtccgaactcactggattcatcaccacggaagtggtgaatgagctctacgtcgatgacccagacaaggacagcggaggcaaaattgacgtcagtctcaacatcagtttacccaatttgcactgtgaattggtcgggcttgacatccaagatgagatgggcaggcatgaagtgggccatatcgacaactccatgaagatcccactgaacaacggagcaggctgccgctttgaaggccagttcagcatcaacaaggtccccggcaacttccatgtgtccacgcacagtgcccacacgccccagcccacacgaacccggatatgacacatatcatccacaagctctcctttggggatacactacaggtccagaatgttcatggagctttcaatgctcttggtggagcggacagactcacctccaacccacagtgtatgaggacaagagtggcaagcagcgtttactcctaccagtacacagtggccaacaaggaatatgttgcctacagccacacgggtcgcattatccccgccatctggtttcgctatgaccttagccccatcacagtcaaatacacagagagaaggcagccactctacaggttcatcaccacgatctgtgccattattggtgggaccttcactgttgctggcattttggactcctgcatcttcacagcctcagaagcatggaagaagatccagctaggcaaaattcactgacatcctgcccagcccagtgactgaggaccagggaccctgctagcctgcctccagtgccctatctccttctgccttctttggcccagtgtgtgtgggaggagggggtggtggtgatgatgggtggcacaaggttccacagctacctctttccccatgttttagataaatcaacactgcctggagtcatggcgttcctttccctacagagccccaagaccagagtgaagcatagggaggtactccaaggatgctggtgacccctcatgggaaagctgtagtcttttctctggtagggactagtccacagagcatctctcatccaggctttgacaatctttaaacccctaccatttggacacactaacagctcagtttctcccccagcagccaacctgagctctcagccttgggaccaggctgcccaaaggtactgctacctggcgctttcaacatggaatggtacttggcaggcaagcccctagaaacggcattgcagctggaacttgcttgtgtcccattgcctcatgcccaacctagagctcaggccttaccccttgccccacccctgcctcattctatgaagcagatgcccaatcgtttggcacaatggtggagactcagatttgcccaccagtcctgaggcagctcacgggtgccccttcctctcttgtctttgcttttctgaattccccaccaatgtgcctcagccgctgtgctatgtggcaatagcattttttggtgaaggggctggttcccactgctgagttcccccgacatacactgttacattcttcagtgtggggggttagggtcatgtgactgggaggttgtccttggaagaccacgtaaggcacagtctgtgcacttctgtccaatccagaagcacccttccctgcaaaccaccactgatcttgtcttggtatccacctttggttccaaggccttagcggggaaatgaagcagatcagcttcttctctttgcacctctaccttgtaggctcccaagggtgcccagcattcgggacccacttgccattgagatcctctgttagctgagcacataccaactcgttcccagccccaggaggccccagtgtctcctccacttccccctgacggtggatcccttccctgttaccccccatccttccgagaatttaagctatgctctcatgtccagagagagccgcatgcctgggcttcgtttatatgagaccgccttgcatacttttgtaatgaaggggtgttttatttttgttatgtttttcttgagtaatctcttatgggtagccagattctctgccgcttgtaatttttgcctctgaattccaattagcaaaacttccctttttatatgagttgactgttgttgtgtatgtaaactgcccctggccacttggacagatttcttttctttttttaaacattctgttccccagttacagaaaccagtccctttggtgtataaatctgtcacatgtggagggtggggcagggcgggacagggcgggaagtatgtggcatgcatatgagttgaaatcccacttttgtgaggacacagggatgtcggttttccatggaagagacgcctctggtctgttattcttataaaggtattctcagagggacatatgtttcgagtctttcccactcactgggttcaaatagattattaaaagactgcttttcagaaa

SEQ ID NO: 774 - DNA, 2603 bp, Cricetulus griseus
  modified_base (671)..(671): a, c, t, g, unknown or other
gaaagtgaaacgtttgcaaaaagagcaattgaaagtttggtaaagaagctgaaagagaaaaagatgaattggattctttaataacagctataactacaaatggagctcatcctagcaaatgtgtcaccatacagagaacactggatggacggcttcaggtggctggtcggaaaggctttcctcatgtcatctatgcccgtctatggaggtggcctgatctacacaagaatgaacttaaaacatgttaaatattgtcagtatgcatttgatttaaaatgtgatagtgtctgtgtgaatccatatcactatgaacgagttgtttcacctggaattgatctctcaggattaacactgcagagtaatgctccaccaagtatgttagtgaaggatgaatacgttcatgactttgagggacagccatccttacccactgaaggacattcaattcaaaccatccaacatccaccaagtaatcgtgcatcgacggagacatacagcgccccagctctgttagccccatctgagtctaatgctactagtaccaccaacttccccaacattcctgtggcttccacaagtcagccggccagtattctggcaggcagccatagtgaaggactgttgcagatagcttcagggcctcagccaggacagcagcagaacggattacnggtcagccagctactaccatcataacagcactaccacctggactggaagtgacatttaaggttccttcaagctgccctattgttactgtggatggatacgtggatccctctggaggagatcgcttttgcttgggtcaactctccaatgtccacaggacagaagctattgagagagcaaggttgcacataggcaaaggtgtgcagctggaatgcaaaggtgaaggtgatgtttgggtcagatgccttagtgaccatgcagtctttgtgcagagttactacctggacagagaagctggacgagcacctggagacgctgttcataagatctacccaagtgcatatataaaggtctttgatttgcggcagtgtcatcggcagatgcagcagcaggcagccactgcacaagctgcagctgctgcacaggcagcagctgtagcaggaaacatccctggtcctggatccgtaggtggaatagctccagcaatcagtctgtctgctgctgccggcatcggtgtcgatgacctccgtcgcttgtgcatactcaggatgagctttgtgaaaggctggggccccgattacccaagacagagcatcaaggaaacaccatgctggatcgaaattcacctccaccgtgctctccagctccttgatgaagtgcttcacaccatgcccattgcagacccgcaacctttagactgagaactctcaccatggacgccctagccattttcaggatggtggactatgaaatataatcctgtttataatctgaagatctattgcatttttgttctgctctgtcttttcataaagggttgaaagatgtgtttgctgccttgctcttagcagacagaaactgaattgaaactttttttctattttggaacttttaagtcatggctcagagcgtaaagatcaggaagaaccaattcttactaaatcttcactggttgtgatgtatgaaggggtcattccagtgtcgggaactcagccccttatgctgattttaaggctgaaaagttctcaaagttagctcacctgttacttagtgagcaagttattgttgaacacactgtgttcaagtgccacatgggtgagtcagttttactgaaagcaacttcactatgttttaaaaatcttttatcaaccttttgtccagaatgttttttgcaagttaaacagtgaaggtgaattaaattcatactgccttgcagacttcagggtttttttttcccaagacaaaacactaatctgtgtgcatagtgacaattccttacaattatcagtcaaagaaataccatttaaaattacattttttttagccctaatggataaccattatcaagatatgtacttttgccctgttaaacagtagatgaattcttctatatttctaggcatatggttggttataaaaaagcctagggggaatttctttcccttgattcacagggagaaggttttgtatttataaaaacactaaaagcagtgttgctctgcctaatgcttcactgttctgcaagatggcagtgcttcaactaaaataatgaatattttggaaactgctaaattctatgttaaatactgtgcagaataatggaaacattgcagttcgtaatagggagtttggatatttttgtacttgatttgatgtgtgactttttttcatatactgtttaaatcatgtatgttttgacattgtttaaaattcagtttttgtatcttggggcaagactgcaaacttttttataccttttggttattctaagccctttgtttgacatcatcgatcagtcagcagtgactttgtgtagagactgaagtagaaaagttgcagatacgttgactgtaccacagacacaacatgtatactttttacctagttagtagcataaataaaactgagtctcaaaaaaaaaaaaaaaaaaaaaa

SEQ ID NO: 775 - DNA, 2603 bp, Cricetulus griseus
ggccggctgggcgcgggcagcgccgggagcccgcggtgggggcacactgcagccgggagccccggggaggggccgcgccgccagcgtctgaactaggatgtcccgacatgaaggtgtcagctgtgatgcatgtttaaaaggaaattttcgaggtcgcagatacaagtgtttaatttgctacgattacgatctttgtgcatcttgttatgaaagcggggcaacgacaacaaggcatacaactgaccacccgatgcagtgcatattaacaagggtagattttgatttgtactatggtggggaagctttctctgtagagcagccacagtcttttacttgtccctattgtggaaaaatgggctacacggaaacatctcttcaagaccatgttacttctgaacacgcagaaacatcaacagaagtgatttgtccgatatgtgcagcattacctggaggcgatcctaatcatgtcacagatgactttgcagctcatctgacacttgaacacagagcccctagagatttagatgaatcgagtggtgttcgacatgtacgtagaatgtttcaccctggtcgggggttaggaggtcctcgtgctcgtagatcaaacatgcactttactagcagttctactggtggactctcttcttcacagagttcatactctccaagcagtagggaagccatggatcctatagctgagctgttatctcagttatcaggagtgagacgctctgcaggaggacagcttaactcttcaggcccttccgcttctcagttgcaacaattgcagatgcagctgcagctcgagcggcagcatgcgcaggctgcacggcaacaactggagacagctcgcaacgcaagccggcgcactaacacaagcagcgtcaccactacaatcacacagtccacggccacagccaacacagccaacacagacagcagccagcaggctctccacaactcccagttccttttaacaaggttgaatgatcccaaaatgtctgaagcagagcgccagtccatggaaagcgagcgcgcagaccgcagcctgtttgttcaggagctccttctgtccacgttagtgcgggaagagagctcgtcctcagatgaggatgaacggggggagatggcagattttggtgctatgggctgtgtagatattatgcctttagatgttgctttagaaaacctaaatttaaaagagagtaataaaggaaatgagcctccaccacctcctctttgatgacctccccactcgcagacagtgtcctctgtgctgtatttgccaatgaaagtggacaacagctaccctgggtttgtttggtgattgtaatttcaggtctgtcactcttgttacattgtgtacattcaaaaggaagagagaaaatatatatgataatcatttccacttaactaatttttacttctagcaggtaaatgtaggtagcagtgcagggtgatctctgcttcctgtaccttgacatgcaaaaggctctcctaatactccacattcaaactgaagaggaaaattgaaatctctaatgaagctgctgtgtgtatttatgaatattaatgaataaaaactgcttggatggtttacctaactactgcatgtaggtttttgcagcgtgcatgaagtaaaacttaaaaaaaaaaagttaataaaatacaaagcccaaagcttttccaacattattcagtggttacagggcagagttagcttttgaatagtgtctgcctgactactcacccttatacatgtgcctcctacgcacaaagtcagctctgcagtggaacctgggggtcctagccagggatgcactctgctgtgtgactgtcctgtcgccctgttaaccatcttgctcccacggagcccagcctgtctgaagacacaccagtaaaggcgggatctgctgcagggcatctctgtgccctttaaacaaatcttgtttgtgtttgttggaagtttttactttttgtggttgtttaaactttttgattgttaaacatgttcattcaggtgtagatgaatttcatttattcactgttcagcaaagttaacctgaattatgttgtcttgtttttaaaaaatctcacattctcaatcatattttacgttatttatgtatttgttagtttgtcttagacagatcactatcagggagccgggtttggaggatgggtgctttttatttgtttcattttttcacactagctccaggaagggacagtgggtctggggaaggggggcagtttttggaatgtaaatttaggactttaaaaaaggtgcacagcttctgataaatttctaactagacttaacctaatcatgtctggctccagtcctcttcctgtgagccctcctctctgtttgctctcctctctctccaccatcttgtcctttcctctctgtttcttcatgacaagcatacagacttgaacccccccggggtgttctcaagaactgtgaagtccatgttcacgcaaatgtaccaaaaacaagtcatcctacatgtctaaaaaaccattgcttctcctcgggaacttgaggcactaccagctccaaatgcagtagctgttttccttggtctctgtgatggaaa

SEQ ID NO: 776 - DNA, 2603 bp, Cricetulus griseus
cccttcgataagatcattgaaaaggcagctgagattgccagcagtgacagtgctaacatgtcaagtcgaaggtggaaaaaaatttcttgctgtactgaaagaaatcttggacagagaccccctgtctcaactgtgtgagaatgaaatggatcttatttggactttgcggcaagactgccgagaaaatttcccacagtcactgccaaaactactcctgtcaatcaagtggaataaacttgaagatgttgctcagcttcaggcactcctgcagatttggcccaaactgccacccagggaagccctggagctcctggatttcaactacccagaccagtatgtccgggaatatgctgtaggttgcctgcgacagatgagtgatgaagaactctctcagtatcttttacagttggtgcaagtgttgaaatatgagccttttcttgattgtgccctctctagattcctattagaaagagcacttaatagaggactcagttggagtgatctttaaaaacggtgacgatttgcggcaggacatgctgacgctgcagatgctacgcctgatggatctgctctggaaagaggccggtttggaccttcggatgcttccctatggctgcttagcaacaggagatcgctctggcctcattgaggttgttagcacctctgagacaatcgctgacattcagctgaacagtagcaacgtggctgccacagcagccttcaacaaagatgcactcctgaactggcttaaagagtacaattctggggatgacctggaccgagcaattgaggagttcaccctgtcctgtgctggctactgtgtagcttcttatgtccttggcattggtgacaggcatagtgacaacatcatggtgaaaaaaactaggccagctcttccacatagattttggacatattctcgggaatttcaaatctaaattcggcattaaaagagagcgagtaccttttattcttacttatgacttcattcatgtcattcaacaaggaaaaacgggaaatacagaaaagtttggcaggtttcgccagtgctgtgaagatgcctatctgattttacggcggcatgggaacctcttcatcaccctctttgcactgatgttgactgcagggcttcccgaactcacatcagtcaaagatatacagtatcttaaggactctcttgccttaggaaagagtgaagaagaagcactcaaacaatttaagcaaaagtttgacgaggcgctcagggaaagctggactaccaaggtgaactggatggctcacacagtccgcagagactacaggtcttagcatcggtcttgactcctagtggacttgcccatttgcttcctttccattttgcacttgcactaaattgaacatgaccctgccagaaatgcaaagggaatgaaatcctgaaactcagagtgaaatcaagaacaaggcctcccacagagcctaatctgaaccaccccgtgatgcccaccctctgtttctcaaatgcttccaggactcgtcatgaatattgccaacagcatggaggaccctttcctgctgaccttgcacgcgaggaatgctaccagggactatgtgggatatttttttctccccttcagtatttggtactttaccagagaggtgtaaatacttcttttcagtgttgtgaccaagtactgcctctcagccaacacttaccattacatttgggggctgggggctgttctaagaaaggtattccctttcctttttaaattatgtaagctacaaattacattgattatgttgaacttattatttttcaaaggaaatattttaaatctgtgaaaactcactaattttgttaatatttatctatcatgatggcatcattccagccagacttgctgagaatctattggtgaggcaaatataatatatataaatataatatatatacatacgctgcatatatgtttataaaatttctagagggagttctatataaaaagatgtttctttggtattcttcagcctgtgttttaaagttttacaaaagcagagcttttgcctaagttactttgcagttaactgtggatccagttcttccatctgcttcaatactaaggcatacatgaatgcagtttctctatgtagctctgagagttcatttcatagaacacaaacaatacttgagtagacagagccaaggaagtgaacaaatgaaaaggaatctatttatggaataaactccaaacctaaatttcagtattttagtaatatgccagctgttcttactgtatttattaaaatgtataaataatgtgatttttttcaatggtattagttcagattgaagtggattcatgccacgtggaaatctttaatttatttgttgaggtaccatatagttagggtgctaggtgacaagtaatattaacatgtgcaataggaactactggtttggtgtgtaaatggatgtcaaggtccagcagaactactgcttcttctccaaagagaatgggagccctcaatcctcagtgacacaggaaagacaactgagtgcttgccctgtgacttcagttttctataggaactttattaaagattgtttaattttgttgtccttc

SEQ ID NO: 777 - DNA, 2603 bp, Cricetulus griseus
cctcccacggtgcgcctggcagccgatgcccaggctgcacgaccacgtctggagctgctcgggctccggcgccgcgaggccgcacagcctcccgcgaggcatgattgcggcagcccgctgtccgcagggctccggagccccggagccgagcccgcgccccggagcccgcgagcgggaacggcaggatgcggcgcgcggcccggcagctggcaccacgacctggtgcagcggagcctcgtgctcttctctttcggcgtggtgctggccctggtgctcaacctgctgcagatccagcggaatgtcacgctcttccccgacgaggtgatcgccaccatcttctcctccgcctggtgggtgcccccgtgctgtggcacggcagccgctgttgtcggcctactgtacccctgtattgacagtcacctgggagaaccacacaagttcaagagagagtgggccagcgtcatgcgctgtattgcggtgttcgttggcatcaaccacgccagtgccaaattggattttgccaacaatgtccagctgtccttgactttagcagccctgtctttgggcttgtggtggacattcgatcgctcccgaagcggccttggacttgggatcaccatcgccttcctagctacgctgatcactcagtttcttgtgtataatggtgtctaccagtacacatccccagatttcctttatattcgttcttggctcccatgtatatttttctcaggaggcgtcacagtgggaaacataggacgacagttagctatgggtgttccggaaaagcctcacagtgactgaacttcagggcatggttcagagtggaagcaggatgcggagacactggtcctgggtgtgatgaagactcttttttcctcaatgtcccatttagactgggctgacgatgataaatgactcctgaagaagtgttcacatggtctagactagcaaatggaggcaaggactacttacctaaaagtcttaccttgctcacccaccctcacacctgtctgcactggaacattccattccaggctgtatgtgagagtggggtagggggccagtttcctgagtattagatttcattcatcattcaaagcaagttgccatatttcaaagccttgaatcaaaatgaatcaccaacctgcagttttgtgtcagtgcccaaaggagagaggttgatggtgcttaacagacatgaagtatgtgtagtaagagtatttatccagaattaaaatatagggttgtgtaaaaggcggggagagaagagtagagtgagttggaggaaggccgtgctcccagtgggtcccagtgcagcccatctgcaggtctcgctcaggcaggcgctcacacgtgggtctcaccactgtgacaactatgctttcactgccaggggtttgtagacaatcttactgagagccaagggcaacacaaagctatgactgcaccgtgatgctggacttttcacctcaacttaaatgaagttttgtccacggtctggaccatctaagagtgagtagctgtctgctgtttcagtcgtcaggagccgaaattgtttccatcactccagagtggagaggactttcccacagccctatggagcttgcaatctgtgattgccttgtaaaaggttgagtgtgcaggtcactgcattaaacacgcggtgtcttgtatgcattgaatggcatagaccacgtgggacctaatttgcaagtattgggtcttcgacttcaagtgcaatgtgtatgaaaaccaatctgagccttgtattctcttaaatatttattttttatttttttttaccgtcgtgagctgttccagagagggttctcgggtcatttcagagctgcgtggggtgagctcagcaataccgtatcagctgtgacctccctcagtcacacccaccactgcaccctagtcctctgacatactccagttttgtgaatttagtaatttttacttacaaatttaccttttttgtattctgcaatggaactgtgtttgttttaaattctatggaactgactcattgaagcagaagttggtccccaggcaggacagaagctcggtgcctgtgttttttttttttttgttttgaggaaaatgtctggagtaaactggttttctgaaacaactttggttagaagaaaatgggttgttctggatttctgggcaatccttgaaatttcctggaaataaaaacaaatgatcggtcctccaaaggtattcttcagctaagacttatgtgtcttaagaaaagctactagaagaaaaggaaatgaatttggtgatgtacttgattatatatgatgagttttttttttttctgttaaactggaaataaatctattaggaataatgtaaccaaaaaatgtgaatccgaagaatgtttttttgccaatagtttatagcaggtacactgaaccaaagtgatggaatttgtaaaaatggtaattagtaccaaccacattcactgtccccgatctgaacacccagcgaggttcacgtccatgctaagtttgcagcattgtgttctttttgcattctttctttttttacttttattaaaggttcaaaaccaaaaaaaaaaaaaaaaaaaa

SEQ ID NO: 778 - DNA, 2602 bp, Cricetulus griseus
cacagaggaaggacataaaaaaagaactactgaagaaatactcagaggacactttgatgttctggaaaggaatagctgatgtagggttgatggatgaggtcatctgtaatatacagaaggagatagaagagcttctcaggggcgttcagcagcggctcatccaggctcccttccaggtcacagatgctgctgttctaaacaatgtggcccagacatttggcctcatggacacggtcaagagagtttggacaacagacggaagcaagtggagcagggagaaggccagtatctctacaccctggcagacttggaacggcagttggaagagcaaaaaagcaagcccaagatcctagactgaaaccccagacggttcaaaatgtggtactaatgcctgtgagcaccccaaagcctccaaaaagaccccggctccagcggccagcctccaccactgtcctgagcccctctcctgtccagcagccgcagtttactgtcatctcacccatcactatccacccccgtcggtcagtcattctctatgggcaatgttccagtggctaccctcacgccgagggcctccagtcctgtgactgtccacacactgccttctggccctcagctcttccgatatgccacagtggtttcctctgccaagagcagctcgccagacacagtgaccatccacccttcgtcaagcttggcactgctgagctccaccactatgcaggatggtagtaccctgggcaacatggccaccatggtgagccctgtggagctggtggccatggagtctggcctgacttcagcaatccaggctgtcgaaagcacctcggaggatggtcagaccatcattgaaattgacccagctccagaccctgaggccgaagacactgagggcaaagcagtcatcttggagacagagctgaggactgaggagaaagtggtggccgagatggaagaacaccagcatcaggtccacaatgtggagattgtggttttggaggactaactagggatggggccaagagctatgtttggttaaaaaaaaacaaactacaaaatctcgttgtaactgacaatgttgggttcctcctacccccctcactgacagacaaaatggacagaacaagctacctttcctgaagttaggaacaggtcatccagtgtcctaatcatcttaccccaaggaaggtattgcttttaggggaggcgtcaaaataaccaggaaccctttccagaatagtctgtctgtgtacacatgcatggtctcactcttgtaaagatgcattgaccaaaactctggaacacagacctgacaccggaagacgactgctccacatggatatagaagggtgcttgcctctgtatcctggatgtggcctcagaggccagtgcaaaaactcggaagcaaaaaggaagttgaactctgcttagagtggaaagtagcatgccatcatcagcttaaaaaggggaagtcctttaacaaggagagggcaaggagggatcttccaaaggagcatctggtgcccctcgagctctttgagggttgggttccattttagaagggcacacagaaatcaagggttggtcaaaactagtgctttagggacagctcaccttgcccccacgccttgtcaaagcgctcaccctccttacagaattgtcagtcggttcctgtgcagactgatgtggtgcacattgctctagttcttggactgtggctgtcatggggtggggctccaaggccatcatttttgttcttgactccaggaatggcagagttcctcagaccagctgttattttggggagccctgcattgcaagtgtgaagagtgtgtgtgtgtgtgtgtatgtgtgtgtgtgtgtgtgtgtgtgtgtgtgtctcataaaagacttaggcttggcagggaagactggaaacacctatttattgtgtgtgtgtgtctgtgtgtgtgtgtgtgtgtgtgtgtgtggtggagagcttgctatagtgtgtgtgtggaggtcagagaacaagttgcaggagtcagttctctccttccaccatgtgggtcctgggaattgaactcaggttgccaggcttggtggcaagcaccatcatccactgagccctcttgccagccctaaaagtttcagggtaagtctgaaactattacttgaacctagaaagccacatctcattcctgttgtactctttaggtcatttctcttttaccagagaatgaaagaaccaattcgggacacgggaggagccctagagaatagagacagtcttgttcaggtcctttcttttgcccatcacagctgttgtgattacatgagtttgttgttttctggtcttccaattgctgtcattgctagctggcctgtggtactgtgagatctctcacagaccctggtctagatgatttcagatggggtgagacacttgcaagttactgatgtgtgaataagcaattgcaatgaaattactcctcaggctgacttgatggtagctatcttttcttctagccattcattaaaataaacatttgtaaagtactatctaacagggatctgaatgcctctgtctccaagtgctgggattaaaggcatccaccaccac

SEQ ID NO: 779 - DNA, 2602 bp, Cricetulus griseus
tgctgcagcttttgagagaacaaggtaatggccacatcatctcttggacctcacgggatggtggtgagttcaagttggtggatgcagaggaggtggcccgtctgtggggactgcgcaagaacaagaccaacatgaattatgacaagctcagccgggccttgcggtactactatgacaagaatatcatccgcaaggtgagcggccagaagtttgtctacaagtttgtgtcctacccagaggttgcagggtgttccactgaagactgcccatcccagcctgaggtgtctgtagcctcgactgtagcaatggcccctgctgctgtccatgcagccccaggggacactgccactggaaagccaggaacacccaagggtgcaggaatggcaggccaaagtggtttagcacgcagcagccggaacgaatacatgcgctcgggcctctattctaccttcacaatccagtccctgcagccacagccacagccaccccttcaatcctcggcctgcctcagtgctccccaacactacccctgcaggagtacaagcacccccctcagggagcaggagcaccagtccaaaccccttagaagcctgtttggaggccgaagaggctggtctgcccctgcaggttatcctaaccccgcccgaggcccccaaccagaaatcggaagaattgagtctggagccaggttttggccgtcccctgcccccagaagtgaaagtggaggggcctagggaagagttggaagctgtaggggctgcatgctttggttcggaaactgtcaaagctgaaccagaggtctcgccctcggaaggcctgctggctcggctcccagccgtcttaatggagaacacagcacaggtgtgtggcctctctgcctctgccactgagatcacccaaccccagaagggccggaagccccgggacttggaacttccacttagcccaagcctgctgggtggcccaggacctgaacggactccaggaacaggctctggtctgcagccaccggggccggcactgacaccatccctgctacccacacataccttgaccccggtgctgctgacgcccagctcgctgccccccagcattcatttctggagcactctgagtccaattgcaccccgtagtccagccaagctctccttccagtttccgtccagtggcagcgcacaggtgcacatcccttccatcagcgtggatggcctctcgacccccgtggtgctctccccagggccccagaagccatgactaccaccaccaccccctttctggagtctctccattcatgctcctgaactctccagctagccatctcaaggagaaacagttcaactgacagacttatgctctggttgtggtggggtggatattcctaggaaagaggctctttcactaacttccacccaaaacagacaacttctttcttttttgccagcctcccagtggccgcctttacacgtctcctccttcaatggtaggggcggtttatttatttattttttgaaggccactgggaagaatctggcctaacccctttaggagagtgggtaagacatctctcccatttcctccccatttatcccctaaaacaagacaatcagggtatggcttgagaaggatctttatttatttctcagcctgcccttggggagttgagggcgccctgtcttccttttgggacatgggttgaagagctagcttgttttgttttattattcctggccatatctgagtccagggagcacttgtatgatttaatggtttgggagtcgtagccagagaagaatcacactgttaaaataggaattgctacctccccagccttctcagtcagcttgttcttttctcaagtaagcttttggccagggaagaatcttccttttcttgtttttccccctgagaagccattcctttgtctccaagttccctgggggcctgcctattacctcccaatggagggttttttggggtggtggtccccgtctgggggactcctccagccagtactccagggctctctgtctcccatcctcttccattttgatagtataatctatttttaaatggggcttttcaataggggagaggaaagcatctcttcctatctgtgatgggtgggtagtaagatgggtgggtagtaagggatttggaggcggtcttcctgccaaccccaagtgtttatttttgataccaaacgtgtattttcaactccctccctcccagccccccaatttcctgcgggcgggtacaaaggacccttttaagtgtccctggagttgggagggaggaatggggagacatgaagcctatcttgtatcaattctaggctggagtgggtagattcaaaaaaactcccaggctcacctccggtcagcactggcccagaccaggcctgaagacctggggggttggtgatttgggggacggtgctacactcgtctccactgtttctttacttccccaaaatggaccttttttctaagagtcccagagaatggggaattgttcctgtaaatatatatttttaaaggtgttgctgaaaggcctggtctacagagcaagttccaggacagtcaaggctacacagagaaaccct

SEQ ID NO: 780 - DNA, 2601 bp, Cricetulus griseus
ctagaagaactagcagaaaactgcgttggatactgcggtgcagacattaagtcaatatgtgctgaggctgctttgtgtgccctgcgtcgacggtacccacagatctacaccaccagtgagaagctgcagttggatctctcttcaattaatatctccgctaaggattttgagactgctatgcagaagataactaccagaaaagaaaatttaaatttccttcatttaaatagaaatgcctgttaccaacctatgtcttttcgaccaagattactaatagtgggagaaccaggatttggacagagctctcacttggcaccagctgtcatccatgctttggaaaagtttaccgtgtatacattagacattcctgttctttttggcatcagtactacatctcctgaagagacatgttcccagatgattcgtgaagctaagaggacagcacccagcatagtctatgtcgcacatatccacttgtggtgggaaatagttggaccaacactcaaagccacatttatgacattattacaaggttcttccagtagcaccaccacctgaaccaagaccgctgacagcagaggaagtcagacagctggaggaacaagaagaagatacatttagagaactcaggattttcttaagaaatgtcacacataggcttgctattgataagcggttccgagtcttcaccaagcctgttgaccctgttgaggttcctgattatgtcactgtaataaagcaaccaatggacctttcatctgtaatcagtaaaattgacttacataagtatctgactgtgaaagactatctgagggacattgatctaatctgtagcaatgctttagaatacaatccagatagagaccctggagatcgtcttattaggcatagagcctgtgctttaagggacaccgcctatgcaataattaaagaagagcttgatgaagactttgagcagctttgtgaagagatccaggagtctaggaagaaacgaggttgtagttcctccaaatatgcaccatcttattaccatgtcatgccaaagcagaattctcctcctgctggtgataaaaggtcagctcaagagcccagtgaaaagctgaaggcaccgtgtcctcctgtggcttgcagtacccctgctcagttgaagaggaaagttcataataagtcaaagtggcatgtaggtaacaaaataaagcgaaggaaactttcacaagcaaaagacaatggccaaactgctgtgaataatcaagtcaggagtagtgatacggaggaaagtcagcccacaagcacagagcacaatgagctgggaaacacgggagagtcctccgtagaagagaatgagaagcagaatgtctccgaaaacaacctagacctgaaaatacctcgagtacctccaatattgagaatgagcttgaagaatctaatgaaattacagagtgtacagacttgagaaaagagaacattgattgcagtggagatgcttctagctcccaggtcatagacattcctgatgaaaatgaatccaaagaaatgtgtattctgcgaatgactcgagctagacgttcccaggtagagcagcagcagctcatcagtgtggagaaggccctggcgattctctctcagcccacaccctcgcttgttgtggaccataggcgcttaaaaaatcttttggagactgttgttaaaaaaagtcaggaatataatatattccaactggaaaacttgtatgcagttatcagccagtgcatttatgagcatcgcagggactatgacaaaacagctcttgttcagaaaatggagcaagcagtagaaaacttcaattgttccagatcatgatgtcattgcaccaagtatttttatattcaattcctatttgattgtcttcagatatgtccacataactgatgcaagataaaatgaaatcttgcattttgaagaaaaattaaaatagtgaaagtattttaattccctggtacttatgtacatgtggtaagataactgataagtcttggatgtttgagcagaacactgtaacaatagtaattgttcaagtttggctagatcttacagttttggtaattaattttttttgttgttgttttagcttaagcacttttaatttaacacttcctagtaggttattgtgtcagactagagttacgtctgttgtatgtttgccatctctttgtgtttgttttcctttaatgcctttcttccaactgccataattcaagttgtgatttgcaagggggcctcagagacaattctgtacttactataaaaattaatgtttttagataaacatttttataattctaatttgggttaataaagctttaaaattttattgtttaatttgtaattatatatacaacaaatggattagtgactagtttttgtatttcacaactgtttatctttctaccattgtatctaggttatattctataaatactttttatatgcatatatgactataaatgcaaattttgtattactgataccaaaatttttctagagagtttctctgtgtagccctggctttagctacacagtgagtttgaggccagcctggctacttgagactgtctcaaaaaa

SEQ ID NO: 781 - DNA, 2601 bp, Cricetulus griseus
ggagagccgcgggtacccgcctgagaggagccggcggaaccctggatcactgtacctggagaagaacagaaaattattatgcctgtgttccctcgggactctttggaaattgcacagtgacatcatctgggatttagtctggagcgtgcatccgggtgcctaagatggaagtagatataaacggggagtccagaagtaccctgaccaccctgccattacctgtggctgaggggagctcgccgggaaggcagaggcggagaaaccccgttgctctagcacgccatgctcgcccatgcgtcggactgtgtctggttaccagatcctccacatggactctaactatttggttggctttgcaactggtgaggaactcctgaagttagcccagaagtgcactggaggggaagagagccagggagaagccatgccgcccttccgctccaaacagctggatgctggacttgcacgctcctctcgtctgtataaaactagaagtaggtactatcagccatatgagattccagctgttaatggcaggaggcgaaggcggatgcccagctcgggagacaagtgcactaaatccttaccttatgaaccttataaggccctccatgggcccttgcctctatgtcttcttaaaggtaagagggctcactccaaatccctggactacctcaatctagacaaaatgagcatcaaggagccagctgacacagaagtgctacagtaccagcttcaacacctgaccctccgaggggaccgagtgtttgctaggaataatacatgaacgccttgcactgagcttagaccgctttaggccagcccgtattcggctagagaataatctaccgtcgttctctgtacatgacccttcacattagagatggttatatcagctaagtgttcctggaacataaaaaaaaattgtttggatcaagttttggatacaggaatgaaatcacaggtacttggggcggggcggggggatatcattctagagcacgcaactgcaaagaaaacagaatgttgaccgttagtttgcatagctttttagctagaacaaggttttggtgcagtaatttcacctttatgattccgacactcaaattgggaatgttacctgcttggttgttgctgacttggtatgattcattagaaatttataacgaagtacacagtgcttcttggatctctgtattttactatacaatgtatgtaatgatttgtcttctgaaatttagcgcttgaacactgctgaattggaccacgttttattttaaatattgagtttaaatattttataactggttttgcactgaaaacaattaacatttcagattaagagagtaatctttcttcacttgcctcaatactaatattgagcaatggaatttttttatttccgcatggaaagttaccgatctctatggctgtaaaatattcctttatagcattattattaaagtgtgtcttaataaaattaaatttgggatacaaagtatttattttacaatgggtagtgggtgggatgcgtgtccagagtgtttgtgacatggagtttccgtcagttggaaacatttccttactgattattttctaacttgaaatccacatgggacttgaagatggaaaggattctctccattgggttgttgccatagtactgcttgcatctcaatttcttgtaagtgaatacagctctcgcagaggctctcctgattttgacgatcaaatgcttagactgagtatgaggtgataaccactcagcagcacatccttgggtctttccgggttcagttctctgcatcacagcactcaccgaaattccagtttcaggattagtgtaggagcctagagtgcttctacagttttaatgggctaatcctggattacctaacaatttacgtctatcacactggtttaatttgttgctaaagaaataattccttgcctttagtaacagaagcagctcaactactcttgaccataaatgtatgtaacttaccttttgtaaacatttctatttcatccagtcttaaaggtgcaatttattactgatttggcattatctggctatatagaactaactccatattttgttttctttttggcacttcaagtttcgagtttcttaggggttagcagtcttgattacaaattaagaagactttttaattgatgaatgggccattcctggaacaatttgtggttttcctctgtccagaatgaatggcaaattttatttagagcagaataaatgttggcaacccaggaactcttagaggcagccatgtgacagcatgtatgagagagccatggagatgctggctcacgtcttactgagttgatcagagttttcagtggctggaaagtttccgatgttgtctatttaaaagtaaactgcacctttgtaacatattgtattgaatgatcactaagattaactatatctatacagtcaatagtttgacaagtaatagaatcctgtcagatgccaaagagttgggatttttacatttaatgattaaacaccgttatttattgatgatttaccctctggaactgtattatttctaactatgaaaataaaaagggtgatgt

SEQ ID NO: 782 - DNA, 2598 bp, Cricetulus griseus
ggtgacttgaacgtgatcctcagctcccctaagtacctggagctcttcctcttggctcagcagagggtgccagcgaaacttgagtcactgatgggctcggttgacctgttctcagaagagaatattcccagtctggtgaatgtgctgaagacagcagccaactccgtgaggaaggagcataagctgccagagtggctctggacctgctccgctggcacttaaggagacacagcagcgccaggcctgggaccagatgatgagtactctgaaggaactagaggcccgctcctcagagaccagagcccttgccttccagcacctgctgcttctggtgggcctccacctctttaagtcccctacagagagttgtgatgtcctaggtgacattcagacctgcatcaaaaaaagtaatggagcagaatccccgtcgatcacgctctagagccaaagcctcccaggaacctgcgtgggtggaggtgatggtcgagatcttgctgtccctgctggctcaacccagcaacttgatgcgcaaggtggtccggagaggatgacaacgtggtggtcactgatgataccaatgagaagcagctgaagcgtggagaggatgaggactccgatagtgaggacaataaaaactctgacagtgatgtggatagtgaggatggagcagagagtgaagaggaggaccgtgacaaggatgtggacccaggctttcgtcagcagctgatggaagtgttacaagctgggaatgcactgggtggagtggacagtgaggacgaggaggagcttggggatgaggctatgatggccctggaccagaacctggccagcctatttgcagagcaaaagctgcgcatccaggcccggcaagaggagaagaacaagctgcagaaggagaagcagctccgacgggacttccaaatccgagtactggacctgatagaagtgctggtgaccaaacagcctgagcaccccctgatcctggaactgcttgagccactgctgagcatcatccaacgcagcatgcgcagcaaaggctccaccaagcaggagcaagacctcctgcacaagaccgcccgcatcttcatgcaccatctatgccgtgcccgccactactgccacgaggtagggccctgtgcagagggtctgcatgcccaggtggaacggcttgtgcagcaggctggcagtcaggctgacgcctccgtcgccctttactacttcaatgcctctctgtacctgctgcgagtactcaagggcaacactgctaagagatacgaggatggtcagaatctaccgggagctgaacccaaggactcagaggcccagactgccaattgcttggacttggatttcgtgacccgggtgtactcggcagcactggagtcttttctgactaagcgtaacagcccactcactgtccccatgttcctcagcctcttctcccgatacccagtaatctgtaagaacctgcttcctgtcctggtccagcatgtgtctggcccattgcggccccgccatcaggcccaggcgtgcctgctgctccagaagaccctgtctgcacgggagctgagagtgtgttttgaggatcctgagtgggagcagctgattggccaggtcttgggaaagctcacccagaccctgcagacactgggggatgcacagagcaagggggagcagcagagggagttctccaccttggagctactgaacattctcttcaagacagtcaatcatgagaagctgtctgtggacctcacttctgtcttgggcctgctgcaaagcaagcagcagaagctacagcagagcttgcagcaggggaaccactcttctggctccaaccgcctctacgacctctactggcaggccatgaggatgctgggagtccaacgtcccaagtcagaaaagaagaatgtcaaggatgttcctagcgactcccagagccccattagccagaagcggaagaaaaagggattcttgcctgagaccaagaaacgaaaaaaagttaaatctgaggacaccacaccgggaaaggatgctacatcagggcaggaggtagtgacagcgggtgccacgcctgctgctgctggtgaaggccagccccccagcacaggcaagaagaaaaggaagagggtgaaggccaacactccatcccaggtgaatggtacacctgtcaccaagagtccagctcccaacaaccccaccctaagccccagcaccccttttaagtccccaaaactacagaagaagaaagagaagctttcacaggtgaatggaggcactcctgtgtcccctatagagcctgaaggcaaagagcatcaccagaaggctcttcccacaaaggaggtcttgagaaagtccccccagtctgccctaccacgaaaaagggcaagactgtctctggttagcaggagccccagcctgttacagagtgtggttaagaaaaggaaagtggcccggaggaaaatgcagacaccttgagtgtggtgtggtctgttttcccctaaaaaaaaaaaaaaaaaaaaaaaaaaaaaaaaaaaaaaaaaaaaaaaaaaaaaaaaaaaaaaaaaaaaaaaaaaaaaaaaaaaaaaaaaaaaaaaa

SEQ ID NO: 783 - DNA, 2597 bp, Cricetulus griseus
ggcccaggcccaggctcaagcccaggcccaggcccaggcccaggcccaggcccaggcccaggcccaggctcaggcccaggcccaggttcccaggcatcagttgacaaaattaattcaagagccccctcataaaaaaggattggaagacatgaagaagctaaggcacccggctccaacaatgctgtccatccaaaagtggcagttctcgatgagtgcaattaaagaagaacaagaattaatggaagaaatgaatgaagatgagcctattaaagcaaaaaacggaagagagatgataataaagacattgattcagagaaagaagctgccatggaagctgaaattaaagctgcccgagaaagggccattgtccctctggaggctcgaatgaagcagttcaaggacatgctgctagaaagaggggtgtctgctttttcaacatgggagaaagagttgcacaagatagtatttgaccctcggtacttgcttcttaatcctaaagaaagaaaacaggtgtttgatcaatatgtcaagaccagagcagaggaagaacgaagggaaaagaaaaacaaaataatagcaagccaaggaagatttcaaaaaaatgataggaagaagacaaagtttaataccaagagctacttttagtgaatttgctgccaaacatgctaaagattcaagattcaaagcaattgaaaagatgaaagatagagaagcattgtttaatgaatttgtggcagctgcaaggaagaaagaaaaagaagattcgaagaccagaggtgagaagattaaatcagatttctttgagcttttatccaatcatcacttggacagtcagtctcgatggagcaaagtaaaagacaaagtagaaagtgacccgaggtacaaagcagtggacagttcttcaatgagagaagaccttttcaagcagtacatagaaaaaatagctaagaatttagactcagaaaaggaaaaggagctggaaaggcaagcccgcattgaggcaagccttcgagaacgggaaagagaagttcaaaaagcacgttctgagcaaacgaaagaaattgaccgagagagagaacagcacaaacgagaagaagcaatccagaatttcaaggctcttctgtctgacatggtacgttcttccgatgtgtcatggtctgatactaggaggaccctccggaaagatcaccgctgggaatctgggtccttattggagagagaggagaaagagaagctttttaatgaacacattgaagcacttaccaaaaagaaaagggagcactttaggcaacttctggatgaaacttctgcgatcaccttaacatccacatggaaagaagtgaaaaaaataattaaggaagatcctcggtgtattaagttctcctccagtgacaggaaaaaacaaagggagtttgaagagtacatcagagacaaatacatcactgccaaagctgacttcaggacacttttgaaagagaccaaatttataacatacagatccaaaaagctaatccaagaatctgatcaacacctgaaagatgtagaaaagattttgcagaatgacaaacggtatctagtactggactgtgtaccagaggagaggaggaaactgattgtggcctatgttgatgacctggatcgccggggtccacctccacctcccacagcatcagagcccactagacgatccacaaaataattctaaatacccgtccacgggctctctaatggaaaaaacgcttgcatgagccaaattttcaggtttttacatatatgtgcattagtcaacctattgcagaaccacctgatgaagagaaggagaagcaattgtgagcagtctctgaacagaacactttgaaatatttaatgcttttctttgtgtggcatgactgacatacatactcaattataggctgtctagtaaatttaaaatctcgaagctaaaaatcatcctgttctgaagtcagtgacttggtggtcttcttactagcagtgttactcagcaagacaggagcgtgtgtggttggagcttgcaaataccacagactccaagaaaactgaagttggggtttgtttttaatttttttttttaagcgggtaaaagagaaaacactgaattgaattcttccagagactatgactattatgatggacacactttgacctttgtctctaaagaacagtttagttgtatttgtttacttccgtgctttgattctcccctctgagttagaggccaagtcttgtttagcccaggagaagatttatttagtaatttcttctcaggttatgaacacattcataactaacatgttggccagaatagaatcctggttaaacatactttattatccactgaatgatctttaccgaaattctgaattagacaacaaaattacctttctggatgttccctgtaaactactcctgtttgaatgttgaacttttgtttctaaagtttaattttaagatgtttgaatgttcagtttatgtatttgaactacaataaaccaacccttttatatatgtggattgtaaatgattattgttacacaatatatttatacaaacttctttaaaccttttttttttttttt

SEQ ID NO: 784 - DNA, 2597 bp, Cricetulus griseus
aggaggaggaggaggaggaggcagagagagcatcatgacagggatgaatccgtgggacgaaagggacatacatccgcaccagtgatggacggatcttttgctgtccgggcgactggcaaaccaaaaggcccctgaagatggtcggatggctgccgttcccaggggtcttctcttgcatccacaagcaatggcagacacagtgcctcatcacccaaagcccctgaccccgaagggctggccaggcccgtctctcctgacagcccagaaatcatcagtgagctccagcagtacgcagatgtggccgctgctcgggaatcccgccagaactccccaagcatcagtgtctccttaaaccataacctcaccacccccttcacctcccaggctggggataattccctgtttatgggcaataccccctccttctaccagctgtccaatttgctggcagatgcccgcctggtgtttccagtgactactgaccctctggtgccagcaggccctgtcagttcctcttccacggctacctcagtcactgccagcaacccctccttcatgctcaaccctcctgtgccacgggatactacccagctattcactcccacttctcacagccacctcctagagtggttggccataatggcagggctctattgctgtttattggccagtgtgtgtgtgtgtgtgtgtgtgtgtgtgtgtgtgtgtgtgtgtgtgtgtgtgtgtgtgtgtgtactcatgcatgagaaaagggtcccagatggatggtgaatcaattgaccaggaaaagagaattagaattaaccaagagttagattaaacacctgtgttgtggggaagtggcctctcaggaaaatcagggagctctgagactggctagttgggggtggttaagactcattccacagaaattgaaacttgggatcatggactttgctactgggaagtaagtaacctccacatttggaactgttgtcttctgtgatgattttacaggccagtcctctctgctgaattgtgaagccggatatgtagctgctgggttgaggcagtggactatttattggtcagatccttcttgatggcttatctctgaagtcctcacccctttaagttagctacttaagtatattgtttccttggcttaaagatacttctgtctggtccttttctaggaatcaatgtgtagattatatgtttgtgacttacaactaaaaacgaagttccccactctgggagcatgaagcccaaagagcttcatgctctttgctaataagttgaaacaaagcatcagccatttagatgggagtgctggtagcaagcagtcagtatctttaagcctgacattcattgctctggaactgagtccttctcccacgggggaaggttttctggaggctttacattccttgttcctagatagactcttgttccccacttccctatggtttctacatgaccatgagccatggctttctgtgcattcaactaggttgctctctccgcaccacagctgctgagagaagtcacccttcccccaaaggatgactgtggcttctctgctgactaattcccaggaaatcagcacctcaaggccggtctgaaaatgctgtgctgcccactgctcacgactcttctgcccctgtgcattcaaattgctgtaatccctcgatgtctgttctgtgcctctagcttggctgtaggcctttacgagtacctgagtcctataatgatgaactaagcaggcagtgtccaccctctttgcttttcagggacccaaatctgcgcctttcccctgccatgagtctgtttgctgtagtcatctagtgtgctggggagagatagccaggcaggctgcataatctccagtgtagagggctgagggaggcttgggcactctgctaccactactaagatatgttcagacgagaggggacctcatactgtgacctgacccaggaccctccctggaagagagttcagcccagctgtgtttgagtgagtgtgtgtatgtgtttgcatgtgtgtgctcatgtgcactgtggtgtaaaatgactgttatctggttgtgtaactcagggtaggctggggactcaccagaagaatccctccagcctgcccatgacaggtttttcccttgtaccctcttcagaggggtcagagagagggtccaggtgggttgaaggggttgcaatggataaccactaaggccacactgctaccagaggagttgggggagaggggaggagatgaggatgccccaaggccctggtatctggctttagttttctgtcttctttgctcaggacgccccagaaggcccaggacctatgcctggcttagaggaccatctgtggctgggtgatccagctgctggtgtgatcatgggcttccctctctctcagtagggcaggcaacttctgccccagagactgggcaactggctgtttctatgacgtatttatttttacttgtgtttcatgtcacttttttaaaaaagcaaacagaacaattgtaagtcagtataactgcctatcagttttctttatttctctttttgtaaaataaaatttaaactcaaaaaaaaaaaaaaaaaa

SEQ ID NO: 785 - DNA, 2597 bp, Cricetulus griseus
aaaatggctaatcaggtgaatggtaatgcggtacagttaaaagaagaggaggaacccatggacacttccagtgtaactcacacagagcactacaagacactgatagaggcaggcctcccacagaaggtggcagagagacttgatgaaatatttcagacagggttggtagcttatgtcgatcttgatgaaagagcaattgatgctctcagggaatttaatgaagaaggagctctgtctgtgctacagcagttcaaggaaagtgacttatctcatgttcagaacaaaagtgcatttttatgtggagttatgaagacctacaggcagagagagaaacagggcagcaaggtgcaggagtccacgaaagggcccgatgaggcgaagatcaaggccttgctcgagaggactggttatactctggatgtaaccacaggacagaggaagtatggtggtcctccaccagacagtgtgtactcgggtgtgcaacctggaattggaacagaggtcttcgtaggtaaaatcccaagagacttgtatgaggatgagttggtacccctttttgagaaggccggtccgatctgggatctacgcctcatgatggatccactttctggtcagaacagaggatatgcatttatcaccttctgtggaaaggaagctgcccaggaagcagttaaactgtgtgacagctatgagattcgccctggtaaacacctgggagtgtgcatttctgtggcaaacaacagactttttgttggatccattccaaagaataagactaaagaaaacattctggaagagttcagtaaagttacagagggtttggtggacgttattctctatcatcaacccgatgacaaaaagaagaatcgggggttctgcttccttgaatatgaggatcacaagtcagcagcacaagccagacgacggctgatgagtggaaaagttaaagtgtggggaaatgtagttacggttgaatgggctgaccctgtcgaagaaccagatccagaagtcatggctaaggtgaaagttttatttgtgagaaacttggctactacagtaacagaagaaatactagaaaagtcattttctgaatttggaaaactggagagagtgaagaaattgaaagattatgcattcgttcattttgaagatagaggagctgctgttaaggctatggatgaaatgaatggaaaagaaatagaaggggaagaaattgaaattgtcttagctaagccaccagacaagaaaaggaaagagcgccaagctgctagacaggcctccagaagcactgcgtatgaagattattattatcaccctcctccccgaatgccgcctccaatgagaggtcgaggtcgtggcggagggagaggtggatatggctaccctccagattattatggctatgaagactactatgatgattactatggttatgattatcacgactatcgtggaggctatgaagatccctactacggctatgatgatggctatgcagtaagaggaagaggaggaggaaggggagggcgaggtgctccaccaccaccaagggggcggggagcaccacctccaagaggtagagctggctattcacagaggggggcacctttgggaccaccaagaggctcaaggggtggcagagggggtcctgcacaacagcagagaggccgtggttctcgtggagctcggggcaatcgagggggcaatgtaggaggcaagagaaaggcagatgggtacaaccagcctgattccaaacgtcgtcagaccaacaaccaacagaactggggttcccaacccatcgctcagcagccgcttcaacaaggtggtgactattctggtaactatggttacaataatgacaaccaagaattttatcaggatacttatgggcaacagtggaaatagacaagtgagggcttgaaaacgatactggcaagatacgattggctctagatctacattcttcaaaacaaaattggcttaactgtttcatctttaagtagcagtttgctgccatttgtattcagctgaagaaatcactattgtgtatatactcaagtctttttatttttcttcttttctaaatgctcttggacattattgggcttgcagagttcccttattctggggttacaatgcttttatcgttccaggctttattttagcttcagaacaaactgttaaatcatgattttgcagaacctttggtttggacagttctggttttttggatttggaatagattacataggagtatggagtatgctgtaaataaaagtacaagctagtgctttgtcttagtagttttaagaaattaaagcgaacagatttaagtttccttgtattgaaaataacctatgactgtatgttttgcattcctagaagcaggttaactgtgtttttaaattgttataacttcacacctttttgaaatctgccctacaaaatttgtttggcttaaacgtcaaagccgtgacaatttgttctttgatgtgattgtatttccaatttcttgttcatgtaagatttcaataaaactcaaaaatctattcaaaacaaaaaaaaaaaaaaaaaaaaaaaaaaaaaaaaaaaaaaaa

SEQ ID NO: 786 - DNA, 2596 bp, Cricetulus griseus
aagaacaatttgcaaacccaccccatcattcttaaaatctaggacaaagagccctcgggacggaactgcttcgactgcaaagctacacgctcagcccgggagcggcctgacggcccgagtccagcctctccacggagtagagcgccctggggtccctgaaacccgaaaccccagcgcagaaccggcggaaaccagagtgaaacccttgaacttttctggacaattgcttccgggcgtttccaggcagccaggggacccgtcggggaggcccggccgcgtatggcgagccccctgaggtccctgcagacgcaagagaggccagcgctccggctgcagcatggaccgcgcggggtgtctgggtgcgggcctgcggggactctgcgtggctgcgctcgtgctcgtgtgcgccgggcacggggcacgccgcgaggacggggaccagcttgctatgggggattcgatctctacttcatcctggaacaagtcaggaagcgtgctgcaccactggaatgaaaatctactacttcgtggagcagctggctcatagattcatcagcccacagctgaggatgtccttcatcgtcttctctactcgagggacaaccttaaatgaaactaactgaggacagggaacagatccgacaaggcctagaagaactccagaaagttctgccaggaggagacacttacatgcatgaaggatttgaaagggccagtgagcagatttactatgaaaacagccaaggatacaggacagcgagtgtcatcattgcactgacagatggggaactgcatgaagatctcttcttctactcagagagggaggctaacagatcccgaaaccttggcgcaattgtttactgtgttggtgtgaaggatttcaatgaaactcagttggctcggattgcagacagtaaggaccatgtgtttcctgtgaacgatggcttccaggctcttcaaggcatcagtccactcaattctaaagaaatcctgcatcgaaattctagcggctgaaccatctaccatatgcgcaggagaatcttttcaagttgttgtaagaggaaacggcttccgacacgcccgcaacgtggacagggtcctctgcagcttcaagatcaatgactcagtcacactcaatgagaagccctttgctgtggaagacacttacttgctgtgcccagcacccatcttgaaagaagttggcatgaaagctgcactgcaggtcagcatgaatgatggcttgtctttcatctccagttccgtcatcatcaccaccacacactgtttgaactacctaaaggcagacaccaaggcagacattattaatcagtctcagcactacttctcaatttagcccgaggatatgtttccacaatatttcaaaccacagctctaataacctgtcagtcatcagttggaactgacagagataaactatttacaatccctaccttagagaagcagaggagaatgggggagtcaccagcataaaaggtattatctggggaaaactgacctggccctgtgcagttttccaagaggctgttgtgaagtgtctgaggaataaggaatgttgatacatggtgattctgagaagaatttgcaaggtttaaccttagaattgacccagtatgtcttccatggtcattcagaattgtggttagaagtttctagaaactgaacaaggttactacctttcatagttggctactctgagcaggaaaagtctacctggcttaaagttcatcggttctgtgtcattccctgtaagcaacaggagatagtggttgtaattaggaaactgtgtgtgttatttgtttgaccccttgttattgtccttatgaagttttttatataaaagccaaattttgttgtatatattcatattccacatggcagatggaagcacgtcctataggtgtgaataaaaagaacagttgtagtaaattattaaagccagtgatatttcatggcaggttactctaccaagctgtgcttgttgatatcccatgaccatactgctctaatgtacaaatagttactgagctgacgacgcccttgtttacacaacatcaatgacaccttgctgaaaactgtagccagtccctgtgctgacagctggctcacaaccagggtcctgcctggagctgggcacacacttctgggagacagataagagcagtctttccccagcaccagggacaaagctacccataaactaatggaaatgctggctctccagccagggctggggtctccccagaaccctcaggaggagcagaagtggtcttcacttgccacctgcacacagtgtgatggtggaaattagttatctgagtctggctacattatcatgcttggagaaccaatttaaaagaattagaatatgatttctgaatgcacataacattaaactcttctctttttctatggtaatttagttatggatgttcagcgtctctgagtcattgtatgaaagatctgtcatcaccataccgtgctgtaggagactgggctgaacctgtacaatggtataccctggaagttgcttttttaaagtaataataataaacacctaaaaccaaaaaaaaaaaaa

SEQ ID NO: 787 - DNA, 2596 bp, Cricetulus griseus
caggagtttgacagtggcctgctgcactggcggattggtggtggggataccactgagcatatccagacccattttgaaagcaaggtagagctgctgccttcccgggccttatactgcccctgcccaacgccccctcggaaacaccttacaacaatagagggtacacaaggggacagcggagcaggaggggcccccgcctgatggccttccagagaaaaggatcacagccactatggatgacatgttgtccacccggtctagcacgttgactgatgagggaacaaagagtgcagaggccaccaaggaaagcagcaagtttccatttggcattagcccagcacagagccaccggaacattaagattttagaggatgaaccccacagtaaggatgagaccccactgtgtacccttctggactggcaggattcccttgctaagcgctgtgtctgtgtctctaataccatccgcagcctgtcatttgtgccaggcaacgactttgagatgtccaaacacccggggctattgcttatcctgggcaagctgatcctactgcaccacaagcatccagaacggaagcaggcgccactaacttatgagaaggaggaggaacaggaccaaggggtgagctgtgacaaagtggagtggtggtgggactgcttggagatgctccgggaaaacacgctggtcacccttgccaacatctcggggcagttggacctatccccgtaccctgagagcatctgcctgcctgtgctggacggactcctacactgggcagtttgcccttcagctgaagcccaggacccttcctccaccctcggcccccaatgccgtcctgtctcccccagaggttggtcttggaaaccctcagcaaactcagcatccaggacaacaatgtggacctgatactggccacgcccccctttagccgcctggagaagttgtatagtaccatggtgcgcttcctcagtgaccgaaagaacccagtgtgccgggagatggccgtggtactgctggccaatctggcacagggggacagcctggcagcccgggccattgcagtgcagaagggcagcatcggcaacctcctgggcttcctagaggacagccttgctgccacacagttccagcagagccaggccagcctcctccacatgcagaacccaccctttgaaccaactagtgtggacatgatgcggcgggcggcccgtgcgctgcttgccctggccaaggtggacgagaaccactcagagttcactctctatgagtcacggctgttggacatctcggtgtcaccattgatgaactcattggtttcacaagtcatttgtgatgtactgtttttgattggccagtcatgacagccgtgggacacctcccctccctgtgtgtgtgtgagtgtgtggagaacttagaaactgactgttgccctttatttatgcaaaaccacctcagaatccagtttaccctgtgctgtccagcttctcccttgggaaagtctctccccctatttgaaaagacaaagctctgcctacatagaagactttttattttaaccaaagttactgttgtttacagtgagtttggggaaaaaatggctttcccggttcttgcatcaacgggatgccacatttcataactgtttttaatgacttaaaaaaaaaaggaaaaaaataaacaaaaaaaaccctagaaggacaaaaggtgactgctgaactgtgtggtttattgttgtccattcacaatctcgcaggagccgagaagttggcagttgtgagcagaccctgttgactggagaggcctgtgcagtagagtgtagacccttccatgtactgtactgtacacctgctactgtaaacatactgtaataataatgtctccatggaaatgagagaaggcgctggctcagcagcaagctgtagtttttaaaaatgtttttagttcaatgttgaggagaaaaaaaaaggcttttcccccaaagtatcatgtgtgaacctacaacaccctgacctctttctctcctccttgattgtatgaataaccctgagatcacctcttagactggttttaacctttagctgcagcggctgcgctgccacgtgtgtatatatgatgttgtacattgcacataccctgaagctccacagttggtccccttcccagccacccctttatagtatgacgagttaacaagttggtgacctgcacaaagcgagacacagctatttaatctcttgccagacatcgctcttcgtggtgcgatgctgtacaggtctctgtaaaaagtccttgctgtctcggcagccaatcaacttatagtttattttttctgggtttttgttttgttttgtttcctttctaatcgaggtgtgaaaaagttctaggttcagttgaagttcctgatgaagaaacacaattgagattttttcagtgataaaatctgcatatttgtatttcaacaatgtagctacaaacttgatgtaaattcctcccttttttccttttttggcttaatgaatatctatttattcagtatgaaatctttatactatatgttccacgtgttaagaataaatgtacattaaatcttggtaa

SEQ ID NO: 788 - DNA, 2595 bp, Cricetulus griseus
ccagaaaagggttcgtttgctctggtgcagcctagggctctgtgctcaggccaccaagacaggtgaatatggcagagacactggagttcaacgacatcttccaggaggtgaaagggtccatgaatgatgggaggctacgattgagccgccagggtatcatctttaagaacagcaagaccggcaaagtggacaatatccaggctggggagttgacagaaggcatctggcgccgggtagcactgggccatggacttaaactgcttacaaaaaatggccatgtctacaagtatgatggcttccgagaatcggagtttgaaaaactctctgatttcttcaaaactcactatcgccttgagctaatggagaaggatctgtgtgtgaagggctggaactgggggacagtgaagtttggtggacagctgctttcttttgacattggtgatcagccagtctttgagatacccctaagcaatgtgtcccagtgtacaacgggcaagaatgaggtgaccctggagttccaccagaatgatgatgctgaagtgtctctcatggaggtgcgcttctatgtccctcctacccaagaagatggtgtggaccctgtagaggcctttgcccagaatgttctgtcaaaggcagacgtgatccaggccactggagatgccatttgcatcttccgggagctgcagtgtttgactcctcgtggtcgttatgatatccggatctaccctacctttctacacctgcatggcaagacctttgactacaagatcccctatactacagttctccgtctcttcctgctgccccacaaggatcagagacagatgttctttgtgatcagcctggatccccccatcaagcagggccaaacccgttaccacttcctgatcctcctcttctccaaggatgaggatatctccttgactctcaacatgaatgaggaagaagtggagaagcgatttgaggggcggcttaccaagaacatgtctggatccctctatgagatggtcagccgggtcatgaaagcacttgtaaaccgtaaaatcacagtcccaggcaacttccaagggcactcaggggcccagtgtatcacctgctcctataaggccagctcaggactcctgtacccactggagcggggcttcatctatgtgcacaagccccctgtgcacatacgctttgatgagatctcttttgtcaactttgcccgtggcaccacaaccactcgttccttcgactttgaaattgagaccaagcagggcactcagtataccttcagcagcattgagagagaggaatatggaaagctgtttgattttgtcaatgcaaaaaaactcaacatcaaaaacagaggattgaaagagggcatgaacccaagctatgatgattatgctgactctgatgaagaccagcatgatgcctatttggagaggatgaaggaggagggcaagatccgggaggagaatgccaatgacagcagtgatgactcaggagaagaaactgatgagtccttcaaccctggtgaagaggaagacgatgtggcagaggagtttgacagcaatgcctctgccagctcctccagtaatgagggggacagtgaccgagaagagaagaagcggaaacagctcaaaagggccaagatggccaaggatcgcaagagccgcaagaagtcttcagaggcgaagaagggtaaagatccaaatgcccctaagaggcctatgtctgcatacatgttgtggcttaatgccagccgagagaagatcaagtcagaccatcctggcatcagcatcacagatctttctaagaaggcaggcgagatctggaagggaatgtccaaagagaagaaagaggagtgggaccgaaaggctgaggatgccaggagggaatatgaaaaagccatgaaagaatatgaaggaggaagaggtgaatcttctaaaagggacaagtctaagaagaaaaagaaagtaaaagcaaagatggaaaaaaaatccactccctctaggagttcatcatccaagtcttcatcaaggcagctaagtgagagcttcaagagcaaagaatttgtgtccagtgatgagagctcttcaggagagaacaagagcaaaaagaagaggaggcggagcgaggactctgaagaagaggaactagccagcactcctccaagctcagaggactctgcctcaggatctgatgagtagaggagaaaattcttgtccttgccctgtcacatctccaggctttctacatagtccttggactctgtgccatctgagtaactgctcctggtggcttccacttctctgaggcaggcatcaagggaaacatctaacctcagctgctttgcaagaatggctccttgtaatctggggaaagactgggtaggagtgcattctgtctgctcacagtgcgttgaaggatctaagtcctcggctcacttgcccgactgtagggataaagctgcttcctgtcttattcaagtggctgcatcaggggtcatgtgaagtcaggcctgtagctcctaataggggcctatttctacttttattttgtatttctggtctgtgaagtcaatttaataaatggaactgactttgg

SEQ ID NO: 789 - DNA, 2595 bp, Cricetulus griseus
ctccgagggagctatcagaatttaagccagtcagtagcccatgattggacatcaggcttacatcgactgatcctgaaaaaagaagaggaaatcagagctgcagaccgctgcagaattcatttacagctcccaggaaagcaggacaagtcagggcggcccactttcttcactgctgtgttcaatacgtttacatctgctatcaaggaatcctgggtcagcagcctgcagctggccaagctggcacttgaggaggaaaaccacatgggatggttctgcgtggacgacgatggtaacctagccaagaaggagactcaccctctcctggtgggacacatgcctgtgatggtggccaggcaggccagagttcaagattgagtgcgcagcttataaccccgagccttacctaagcaacgaaagccaaccagcttcgccctcacagcacgtggcttcctgtggattggaagctgccaaagtcatagagtgcttcaatgtggagtctcgcatcctgtgcatggtatacattccggccgaggagccgaagccccaagagtccaatgaagccacggatccagatgccacagcctcaagagcatcccacgtgcccaccatctgcctagggcaccgaagaaagggagcgatctccatctacaaaagcagtcagggttgcaagaaagtgaggcttcagcacttctacacccccgacaagtccacagtcatgagcttggcctgctccccacagggcctgtatgcaggcctggtcaatgggtcagtagccagctacaccaaggctccagatggatcctggaactcagaaccccagcaagtgatcaaattgggcgtcctgcctgtcagaagccttctcctggtggaaggtgcgctgtgggcagcctcgggagggcaggtgttcatggccagcttggagacacataccatagagaatcagctggaggcccaccaggacgaagggatggtcatctcccacatggctgtggccggcgttggcatttggattgccttcacctcagggtccacccttcgcctcttccacacagagaccttgaagcacctgcaagatgtcaacattgatgcccccgtgcatagcatgttgccagggcaccaacgtctgtctgtgaccagcctgctcgtctgtcatggattgctcatggttggtaccagcctgggtgttgtggtggctctgccagttcctcgtcttcagggtattcccaaagtgacagggcggggcatggtctcctaccatgcacacaatgggcctgttaagttcattgtcatggccacagcttttcagaagaacaaggacagagccagagacagcccaccctccggccctgagcctcaggatgaagaccccaaggatttgctctgtggtgaggagggcacttcttgcctgggccagactgacaccaacacagccgtttggttgggagactccccgggactgacagctcagaagagtgacctgtcttcatcctcaggttctctgagcttgtcccatggctccagctccctagagcacagatctgtggacaacagcctgtgtgacctcctgaaggaccccagtgcctccccgaggagcagggcacaacgctctaggagagccaaagccagctcagcactggtggtgtgtgggggccaaggccaccggcgagttcacaggaaggctaggcaaccttctcaggaggacctggtgtcttcagtgatggtgtggcagatcccactgctgagcatgtagatcagaggctgccgcctggcatgagggtggcaagcagggacagctctcgactgggtgcaggccaagtggtggaggctgcatccataccactgggaccaactggaagcagagttgggaaaagaaatctgcagacgtcacacagattctctgccttctcccatggaacatccgagtcagaggtgtgagggaggcagaggagccatctcagagagctgacggggaactgtagtgtccagtagcataggaggtcattaacaattcttaaaatcatcctacttgacttaggctcactactgttatttatatcttatatattttttaaatctcagaataaaaaatgtaacaatttaaagagccaggtgacacattccagtccagtcagcttgcgttgtctgggagcgactgaggctttccaaagtcaactgatgtgtgtactgcaccctttaacaaatagtgtttttatattgtgttttctattaaaaattaaccattagcatttcagtcaatatactacatgtagtgttttgcacataatctttgctttaagccaaaatgtttaataatgtcaacgaatgtcaagggacatgagtaacctatatatagattctgtttgctccacctgtatttgtacatcagtgtttcacttactggatggctaaaaatttgttttcttaagcctaattcagatgctcaccagaaacacactcctcagcactttacaaatgactaaaaatgctaacttttaacttagccaaatattttctaaatcacacatatacccaagctttcttaaactgttagctgctatcttatttgataaaaataaaagactttttattttagaa

SEQ ID NO: 790 - DNA, 2595 bp, Cricetulus griseus
agccagaaggatttaccacgtgtcctcaacaagttttaagaaaaaggactttaaaaagcccagagtctgtggagtgtgcagacagaccattgacggtcaagggattgcttgccgagcttgcaaatattcctgccacaagaaatgtgaagcccaggtgtcgattccctgctctgtgcaagtccacctgggccaggctcctgagagttccaccccacctgcagctctccgctgtgacaagccttcaaggcccctggtcctgagtgcagccatggaggacagccatgaactggaccttacatatgtcacagagcgtatcatcgcggtgtccttccctgccagttgttcagaggagtcctacttgcacagcctgcaggaagtcacacgcatgctgaagtctaagcatggagacaactacctggtattgaatctttcagagaagagatacgaccttacaaagcttaatccaaaggagagcagccccaagtccaccctaactctactggggaatagccatccttctgaaagtcctcgaggcacccatgagttctgcatcactggcaaggactctccagggctgccctgcttccaatcctcagagctccaggcctcttttcacagccatgagctgtccatgtcagagcctcaggatgctctgccccctgcaggcagccaagccttcttaggctacaacacgtacttcaacactgtggaaatctccctcatctggtctttctacagtagacggtgatgaaattgagaaggggaggcatggttagtgaaggttcgtgcaggttggaacatggtgggagtctaagttagggtacagttgaaggggtgtgacgtgagggcagtggaagcctctggtgttggggagaaacatcaatgtcagagaccccactgctggtggtaaggactccatgatcctactcgcaggtggccagctgggctgtggagagcctagaggaccttgaaaggaaaatgagaagacggaatcaaaaaataccattttatgtaatttatattttacgtatgccaaattatttataactgcttgccattgccatactgcacccatgtcaaatgctgcagccgactaaaccgtgattgctagaaggcttgtccccttgtagacacacaagagacaactgtcccctcaagaagaaggtgaacaatggtctcagggtgacaccacgcagtcctgcaatcttcagtactgacaaacagttttgcctcaagcagccacctctaccctctatttgcacagcaacgtgtcttgcccatatgaccccaggaaggctctgatcatccctgtcccagcctgaaattcctactctctgatttctaaagtccagtgccagcttacaaatctcatagctgggataggtaaccattgtcaggctgggtttggaaatctacatggtgatcctctgtttcaaaaggggcagagatggaactatatgtagaattgaaatcaactgtgtgtgtgtgtgtgtgtgtgtgtgtgtgtgtgtgtgtgtgtgtgtgtgtgtgtgtgtgtgtgtgtatgtatgtatgtatgtatgtatgtgaaggtggactattccagttttagcttgtgtctgtttgtgagtgtatacaggtggaccattccacttttagctcctgtatgtgtatgtatgtatacaggtggaccattccactttttagctcctattgatgcaccaaaagcaagtgcctcatttctgtgccaaatgtttgccttggtctctaaggacctccttcgtggacacactctgatgtgcctgttagagggaatgtgcatcattccctagaggccccatgtcttccacagaggcttctagtgtttcagctattcatatgcagctaaaatccagatgggggttggggtggggactgacatttgtgctctggccaagaagtgccatgtcctatgatggtttatatgcaaatgtgacccaaagagcatgggatgcattcaagaagccacatgaacgtgctttcaaaactgactgaccaggtatgacctttactcaaggtaaaagtggtcaaggatattaagaaatttgctctgaggaaccacaggaagacagctctacaagctggtaggactaagttctgtcttctgtgtataacatgtttattgaacagaacaaggtgagacacagcatcatagactatactgtgtgctcagaaacactgggaaggggcattgtccaggcttgtgccacaagggcatcatttgggcacaagttagtacactcttctgggagtaaattcagtgacaccctacctaccacttacaatagatatagccagggtcccattaactttctcattaatggtcttatagtctccagtgttgggctgtacccatattagaagccacaatgcatttatcctcagtgtcaaagacattgtaatgttgccttatctgtcttatctgttagcgcagttttcactattctatattgtaaagaatatatatccagtatgtaaatgagtgttctataaaacttttgtataggcattttctctgctctttaaatatcagccttattcagagtataataaaaattatgaccttggtaagtctaa

SEQ ID NO: 791 - DNA, 2593 bp, Cricetulus griseus
  modified_base (12)..(12): a, c, t, g, unknown or other
gagaatggtggngcataagttcactgctgtgtaccaccaggaggcgttcagctgtcccatgatctactgatagacattctcagcagtgacaatttaaatgtaagaaaaagaagaaacagttcgagaagctgcaatgctgtggctagagtacaacacggagtcacgatcccagtatttgtcttcagttcttagccaaatcagaattgatgcactttcagaagtcacacagagagcttggttccaagggctcccacccaatgataaatctgttgtggtccaaggtctttataagtccatgcccaagttttttcaaaccaagacttgggatgactaaggaggagatgatgattttcattgaagcatcgtcagaaaacccttgtagtctttactcttctgtctgttacagcccccaggcagaaaaagtttacaagttatgcagcccgccagctgacttgcataaggttgggacagttgtaacccctgataatgatatttacatagcagggggccaagtgcccctgaaaaacacgaaaacaaatcacagtaagacaagcaaactgcagaccgccttcagaactgtgaattgcttttactggtttgatgcccaacaaaatacctggtttccaaagacaccgatgctctttgtccgtgtgaagccctctttggttttctgtgaaggctacatctatgcaatcggaggagatagtgttggtggagaacttaaccggaggactgtagaaagatacgacactgagaaggatgagtggacaatggtgagccctttaccttgtgcttggcagtggagtgcagcagttgtggtccatgactgcatttatgtgatgacattaaacctcatgtactgttactttccgagatctgactcgtgggtagaaatggccatgcggcagactagcagatcttttgcttcagctgcggcttttggcgataaaattttctatatcggagggttgcatattgccaccaattctggcataagactcccctctggcactgtagatgggtcttcagtaactgtggaaatttatgatgtgaataaaaatgaatggaaaatggcagccaacatccctgctaaaaggtactctgatccctgtgttagagctgttgtgatctccaattccctttgtgtgtttatgcgcgaaacccacttaaatgaacgagctaagtatgtcacctaccagtatgatttggaacttgatcggtggactctgcggcagcacatatctgaacgtgtactgtgggacctagggagagattttcggtgcactgtggggaaactttatccatcctgtcttgaagaatctccatggaagccaccaacttatcttttttccccagatggaacagaggagtttgaactggatggagaaatggttgcacttccccctgtataggggagttgagggggtgcacatgccagacttgtgatatcctttgctaaaaccagaggatataaaaggactaagtatgagtacatcaaaattctatctttgatacattttatttttatggcctacttaatatttgcatcagtataatatatatcagtgtgtcatacagaaagatatgcttctgtaatatgaaataggttatttggtaattgagaaactatgtgtatcatgtgagcataagagtctggattatctaacattgttagccctgtgtatgtacagtccagaacttcacttttaaaagttaatttttctgtttcagaacttcacttttaaaagtaattttctgttcctagtgtggtatatcagaattgtgctgagattattttagtatatgtattgaattcctgtacttctaaagtcctggaatatagtttttctagtataattcagctgcacttaacactaatgtttatgttggtatagaaatgtcttttaaatcctacactattgttgaggaagatctcctatacgtctatggtattacacagggaaagctgtgactgcaggatcagtctcactattctactaggtgcatggattcccttcccactgacttatacttgtctatctagaatacaggttgtccagtcagctggtcacttaccaggtgtggacttaagttgctgggcttgcaaatgaattgctagtccctcattgtgcgggtctgtgtggagctttaatcagtaaatgtctccactttctatattacattaacgttggctcatgcatataaccacctgctgctgatgtagttctccatcttaaaaagatttagagtggattaaccaggtcattacatcttaatttaataacgagcattactgtagagtgattgtgtgtaggtatctattaggtgtgttttttaacctgatgtgtgtatgtttggggggtaggggtaggaaggtgagcgtgcaggagtcgtctgcactgactgtacaggagagcagacactagcactgctctggcattaatcccaggaaccactagcagctgtggggcgccaccaatgcaacatgagcacaggtgcctcgtgacaaacattgctggcatgttcaactgcataatgctctggcactgtattttgaatgacattaatttattaaataaattgtatataatca

SEQ ID NO: 792 - DNA, 2593 bp, Cricetulus griseus
ggcggcggcggctgaggaaagcatgagtatggccgcgctagcaatgtcagtcccggacagcaccgtcgggtctcccagggccgaaggagaaggagttggggtagctcgcgaagagaaggacgccaccactaaaggaacggaggcctttggggatagcgaggaggatggggacgacgtgttcgaggtggagaagatcctggacatgaagtgcgagggaggtaagaacctttataaagttcgatggaaaggatatacgtctgatgatgatacctgggagcctgagattcatctggaggactgtaaagaagttcttcttgaatttaggaagaaagttgccgagaacaaagctaaagcaatcaagaaagatattcagagactgtctttaagcaatgacatatttgaagcagactttgatagtgaccagcaaagtgacacaaaagaagatacttcaccgaggaagaaaaaaaaaaaaataaagtgcaaagaagagaaaagtccagatgatctgaaaaaaaaaagaacaaaaattagggaaaactaaaagataagttcaagtcagagctggaaagcacctctgaaaatttaggttttgatataaggacaaagaaaagaattttggaagccaaggaagaattaaaggactccaaaaagctcaaaaaggatgaaataaaggaaaacaaggagttaaagaaagctaaaagagctgaaataagagatttaaagtttaaaataagagaagatatcaaagacaaccgaaaaacaaagaaagagaggtctattgaatgtccactggagtttgagtcacctgtacctaatgagtccctctccccagaggatgatggggaagactttgtttctgacaacaaagaagagaagcagaagataagaacggtaaaagataaggcaggacaggatacagtgcaagagggtatttttgagaaacatttggatgaccttgtaagtactgacgaggatgctggggcccgagttagaaggaagaagaaaaagccaaggatatttgatgaaacaaaagaaatcaagaagctagagaacatggacacctttttagaaaggaagatgatacctaaaaagcaaagataccaagacaagagcagaaataacctagagttaagtaggttaccatcacctatgtctatccaggctccgaaaagttcgaggctgagtggggaagagaagggcctaagatcctctgactcggcagaggaggagaaagacaaaaaaaatgaatccaaagaaaaataccagaaaaagtatgatttggacaaagaagaaaaatgccgaaaagagccaaagggattaaaatcatttaaagaaatcagaagtgcatttgatttatttaaaaaaacagaagacaaaaatgatgttcttgagaataattggaaaagagaagaagtacccttggattgtaaaactacagatgatcccaaaaacaaggacaagtgttcacttaaagacagaagaaatactagagatgagactgacacatgggcgtacattgctgcagaaggcgatcaggaagtttcagacagtgtgtgccaaacagatgagaattctgatggccggcaacagattttgagtttgggcatggatctgcagttggagtggatgaaattagaagattttcaaaagcatcttgatggggaagatgagacctttaccacaacaaatacaattccaagtaatttgttgagggatgctgtgaaaaatggagattatattgctgtgaaggttgccctgaattcaaatgaagaatacaacttagatcaagaggattctagtgggatgacactggtgatgttggctgcagccggggggcaggatgaccttctgagactccttatcaccaaaggtgcaaaagtgaatgggcgccagaagaacgggactacagcccttattcatgccgctgagaagaactttttaaccactgtggctattcttttggaagctggagcttttgtaaatgtccagcaaagcaatggtgagactgcactcatgaaagcttgtaaaagaggaaattcggacattgtgcgccttgtgattgaatgtggagctgactgcaacattttgtcaaagcaccaaaatagtgcattgtactttgcaaaacagtgtaataatgtgcttgtgtacgaactgctgaagagccatttggaaacactttcaagagttgcagaagaaacaatcagggattactttgaatcccgccttgctctattggaacctgttttcccaatagcatgtcatcggctctgtgagggaccagatttctcaacagatttcaattacaagccacctcagaacataccagaaggctctggtgtcctgctcttcattttccatgctaactttttgggtaaagaagttattgctcggctctgtggaccatgcagtgtacaagctgtagttttaaatgacaaatttcaacttcctgtttttctggacagtcactttgtttactcattcagccctgttgccggccccaataagttgtttatacggttgacagaagcaccctttgccaaggttaagttgctaataggagcatacagagtgcagctgcactgaccacaaagga

SEQ ID NO: 793 - DNA, 2592 bp, Cricetulus griseus
gagctgcggcagcaagtggctctgtttgcagctgccatgaggaagatgggtgtgaagagggggaccgtgtggttggttatctacctaacagtgcacatgctgtggaggccatgctggccgctgccagtattggagccatctggagttccacctcgccagactttggtgtgaatggtgtgctggaccggttttctcaaattcagccaaaacttatcttctcagtggaggctgttgtctacaatggcaaggagcatggccaccttggagaagctgcagcgagttgtgaaaggacttcctgaccttcagagagtggtgctgatcccctatgtcctcccaagggagaagatagacatttccaagatccctaacagtgtgttcctggatgatttcctggcaagtgggacaggcgcgcaggcacctcagctagagtttgaacagctgccttttagccaccctctgttcatcatgttctcctcgggcacgacaggagcacccaagtgcatggtgcactctgctgggggcacccttatccagcacctgaaggagcacatactacacggcaacatgatgagcagtgacattctgctctactacacaacggtcggctggatgatgtggaactggatggtatcagccctggccacaggagcatccttggtcttgtatgatggctccccgctggtcccgacacccaatgtgttgtgggaccttgtggacaggataggtatcaccatcctggggaacaggagtccaagttggctgtcagtgttggaggagaaggacatgaagccagtggaaactcacaatctccacacgctccacactatcctgtccactggctcaccgctgaaagcccagagctacgagtatgtatacagatgcgtcaagagccagtgtactccttggctccatctcaggtggcactgacatcatctcctgtttcatgggccagaactcatgtatccctgtgtacaagggtgaaattcaagcccggaaccttggcatggccgtggaagcctgggatgaggaagggaaggccgtctggggagagagtggcgagctggtgtgcaccaaacccatcccctgccagcccacgcacttctggaacgacgagaatggcagcaagtacaggaaggcttacttctccaaattccctggtatctgggcacatggtgactactgcaggatcaatcctaagacaggaggcatcgtcatgctgggccggagtgatggcaccctcaaccccaatggagtacgcttcggcagctcggagatctacaacattgtggaagccttcgatgaagtggaggacagcctgtgtgtcccccagtacaacagggatggcgaggagcgggtggtcctgtttctgaagatggcatctgggcacaccttccagcctgaccttgtgaagcgcatccgtgatgccattcgccttggcctgtcagctcgccatgtgcccagcctcatcctggagactcggggcattccgtacacactcaatggcaagaaagtggaggtggctgtgaagcaggtgatggctgggagggctgtggagcaccggggggccttctccaaccctgagaccctggacctgtaccggaacatccctgagctgcaggacttctgagccaacggctcgcacaccatctagctgtgcatgtgatggaacttagggacactttagagaccgcaactgctccagttggccctgggaactgtacattccgtgggctcggaaataacattcctgtttcggagtcattggtgggaaccaggccaggatgtgcctggccttcagagactaaaagggcgcactgaggcttgttcagccctgctgctgtaggtcggcacataggcttgcaggtgtggggctggtggtgttttgtgacagcacaccggaggagcgatgtggccttcaacctcatgagcccattgtcccatcttgctctatgaaggtgaaatcatacttaaactccctgtccttaactggcctggctcccttagctgtactgtcctctcaagagctggctgaagccaggacacatggcccagcgtgcctgtcacctcacagctggctgttgggacccctgggctgatggctcatgtactgtctgccatggccagaataccattctagggaattgtgagtgacactccagccagccaagagctctctgctaaggcaagtcccctctgctggcgagtgtctttgaccatctctgggtcttaatagcacagtgtttgaacaggtcaaatgttttaaagttaattgagggatcctggagtccttcagggatggagctgccatggtcagagggagatggcctcatgcttcctcttagttcctggactctttctgttgtgactgacctctgcatttgtaaatggagtctcaggcttggtcgtcaggactcgatggtgcttctcatctagcgtgtggagtctgtcacaaattctggtgattgttttgtatatattttttttaaaactgagcacaatgtaaaaccttttgaatatgtcctggattttaagtctataagggaaaagtgctatgaagaattttatgaaataaacttgtgctatgcacacctg

SEQ ID NO: 794 - DNA, 2592 bp, Cricetulus griseus
  modified_base (1391)..(1391): a, c, t, g, unknown or other
aaggcccaagcagccaccgcctgcttcgcactgaacctcctgactcagactcagagtccagctcagaggaagaagaagaatttggagcaattggaaatcgctctcgtttgtcaagggagactacttacgatgctgcaagatctgctatcccctgtgtgctttgttcatcctcgccgcctgtgtcgtggcctgcgttggcttggtagtggatgcaagtggctctcaaggaggatctggatgccctcaaggaaaaatttagagcaatggaatctaaccagaaaagctcattccaggaaatccccaaacttaatgaggaacttctcagcaaacagaaacaacttgagaagattgaatctggggagctgggcttgagcagagtctggatcaacatcacagaaatgaataagcagatttctctgttgagttctgcagtaaatcacctgaaagccaatgtcaagtcggctgcagacttacttggcctgcctagcactgtagagggacttcagaagagtgtagcttccattggcaatactttaaatagtgtccatcttgctgtggaggcaatacagagaactgtggatgaacacaagaaaaccttggaattactgcagagcaatatggagatcaatggaagcaacaaagagcttgcctgtaccttcacaactccttagaggagatcaacagtactgtagtgggataccagagacagagtaaccttaaatttgaggggatgaacgagacactcagtaacctgacacagagactcagcctgatggaaagtgatgtggctgcactgaacaaggcagaaaaaaagaacaaacctgacctccagcagaaagaagataattcaaattctcaggtatccaagcttcgagaaaaactgcagctgatcagtgctctcacaaacaaacctgaaagcaacaggcctccagagactgcagaggaagagcaagtacagaacttcacatcagatccatcaacattgccaaaattttcatactttcttggaaaccaaatggagacccagctaaaacctatctccttgccagggatttctagcatcaaagatcttcaggagttattccacaaggctggtcaagatatggatgggatgctgacctaccaggaaatctggaattccctaggttctgccatgccaagaccagagagcttgagagcctttgattccaatggagatgggagatactccttccaagagctaagagtagcattaggttcttatctcacggttctccctctttaaatttttgccttaatgtttgccttgcccatctatgctgtcactttcttggaaaggttgaaaatacacttcaacattatcctggcactttaggtaactcttgttcttctggctgccttccttttttttnttttttttgagaactgatttatatgaaatatactgagggtaatgtagcttgtcctttttagtttcaagttttatttgtaggcagatactttcctgacaccttaactctttgtgcttttcattggggaaacagggtttatttcttggtctttcatctgttctttcctcctttgctaaaaattggacagactgactggctgaggagccacaaaagcctatcactcagtgcagattggggttttcatttgtacattgtcttaacttgtgcatccagtgccttgtgttagtcaaacttcaccagccacagaccacctctgagaagaacaagatggtggtgaggagtttgactttgggtttaaatcctttggccttgtcaatcagcagctctcgagtgtttcccaccttagtttcttaaagcattgctccttggccctttgctgtgtaccatctagcataatatatactgaataaccttcctcaagctagtcatgatagtacatgcctataatccagcccttggaaggctaatgcaggaaaataatgagctctagtccagtccgggttacatagtgaaatcttgtctctgaaaaagtacctagcttaaagatggcttcagtggcatttaaggaggagcagaacaatgcttgcacttaaaaataagtggaatacaaaagagccaaggagtggacagtcttatttcactgctggctcctttcccttccattgcagttctttttgttgctggacacagctctgtcagcccccctttctggccccagcgtcacagttgaagattttgactgtgatgggttcacactcataatggcctattgagttgtttttagtgacagcttttgtttgctacacacctcattggcttgcttaccagccatctagatatggtcccttttctcacagtcaagccagaatacatttgggtattcctgagacttgaaagagcatgtattgtttgttatatgaacctaacctaccttgttgtttttctcatattaagaaatgtaaatctactttatattaatggagctattttggtaatgtataagcaattttggttctgttttgggagtggattcaaggtttccatgacttcatctgtgctttactggtttcctatcaatatagccattttaacttatctaaataaaacatttcctttctctacaaaaaaaaaaaaaaaaaaa

SEQ ID NO: 795 - DNA, 2591 bp, Cricetulus griseus
gattgcggagtctcaccccagtagcaacctgcttgacttgaacccacagtccatcaacaagctgctgacagcccttaatgaatgcactgagtggggccagatcttcattctggactgtctggccaactacatgcccaaggatgaccgtgaggcacagagcatctgtgaaagggtcactcctaggctctcccatgccaactctgctgtggtgctgtctgctgtgaaggtgttaatgaagttcatggagatgttgtccaaggacctggactactatggcacactgctcaagaagctagcacctcctctggtcacactgctgtcagcagagccagagctgcagtatgtggctctgcgcaacatcaacctcatcgtgcagaaaggccagaaatcttagaagcctcccaggccaacatcgcccaggtattggcggaactcaaagagtatgctacagaagtagatgtggattttgtacggaaggcagtgcgtgccatcggtcgctgtgccatcaaggtggagcaatctgcagagcgctgtgtgagcacattgcttgatctcatccagaccaaggtcaactatgtagtccaggaagccattgtggtcattaaggacatcttccgcaagtaccccaacaagtatgagagcgtgatagccacactgtgtgagaacctagactccctggatgagcctgaggcccgggctgctatgatctggatagtgggcgagtatgctgagcggattgacaatgcagatgagctgctggagagcttccttgaaggttttcatgatgagagcacccaggtccagctacagctactgacagccattgtgaagctcttcctgaagaagccaacagagactcaggagctggtgcaacaggtcctcagtttggccactcaggactcagacaacccagaccttcgggatcgtggctacatctactggcgcctgctctccaccgaccctgtggctgccaaagaggtggtgctggctgagaagcccctcatctcagaggaaacagaccttattgagcctacactactagatgagctcatctgctacattggcacactggcttctgtctaccacaagccacccagtgcctttgtggagggtggtcgaggagtggtgcataagagcctgccaccccgcactgcctcgagcgagagcacagagagccctgagacagcccctgctggagcaccttctggtgatcagcctgatgtcatccctgcccagggtgacctgttaggtgacctcctcaacctggaccttgggcctccagtgagcgccccacctttagctgcctcctcagtgcaaatgggagctgtggaccttcttggtggtggcctcgacagcctgattggagacagcaactttggggcacctccagcagcagtgacaacagcagcagcaccagccagacttggagcacccgtcagcagtggcttaagtgatctctttgacctgaccagtggtgtgggcaccctttcaggatcctatgtagctcccaaaacagtctggctccctgccataaaggccaaaggtctagagatctctggcaccttcacccgccaggttggctccatctccatggacctgcagctgactaacaaggccctgcaggtcatgacagatttcgccatccagttcaatcgcaacagctttggcttggcccctgctgcaccactccaggtgcatgcgccgctcagtcccaaccagactgtggagctctccctgcctctcaacacagtgggctcagtcatgaagatggagcctctgaacaatcttcaggtggctgtgaagaacaacattgatgtcttctacttcagcaccttatacccactgcatgtcctctttgtggaggatgggaagatggaccggcagatgttcttggccacatggaaagacattcccaacgagaatgaagcccagttccagatcagagactgtccactcaacacagaggctgcaagcaacaagctgcagagcagtaacatcttcactgtggccaagaggagcgtggagggccaggacatgctctaccagtctctgaagttgaccaacggcatctgggtactggcggagctacggatccagccaggcaaccccagcttgacgctgtccctgaagtgtcgagcaccagaggtgtcccagcatgtataccaggcctacgagacaatcctcaagaactgaagtccctccagcatccacccagccttctgccagccctatcatggagcccctgtgtgtggcagtacctcctcctctatttggggaaaggccaggtgggctcctgaccatccaggaggctcccccatcctaattgagggcccagagcaggtccatgccccctcctggagtgaaatctctgtgcatctccagtggctgttttccattgctgttgatgcgggatcaaaagaaacggaaccagcacagcagcagaagctgaacaggagaccacagggtgctcttccttctccctttgcctgggggtgagcatggaactccccttggggtcccagcccataatccttgccttgtctccccaccaagcctgtcctgggtagagtctgggtgccaatattactgct

SEQ ID NO: 796 - DNA, 2591 bp, Cricetulus griseus
gccgggtctctgggtttcttctgacccccaaccggccctcatggctttgtgtctggagctcttgaagcaatgttcatcatgcctagtggcatataagaagaccccaccaccggtccctccacgtactacatcaaagccgttcatctcagtcaccgtccagagcagtactgagtctgcacaggacacctacctggacagtcaggaccacaagagtgaagtgacgagccagtcaggcttgagcaactcatcagacagcctggacagcagtacccgaccgcccagtgtgacacgtggtggaatcagcccaggccctgaagctccggagccaccccctaagcatgcagctctgaagagtgaacaagggacactgacgagctctgagtcccattccgaggccatccccaaaaggaaactgtcatcaataggaatacaagttgactgcattcagccagtgccaaaagaggagcccagtcccgctaccaaattccagtccatcggggttcaggtagaggacgactggcgaagcagtgccccctctcacagcatgtcctcccgtcgggacactgactccgatacccaggatgccaatgactccagctgtaagtcatctgagaggagtctcccagactgtaccccgcaccccaattccatcagcattgatgctggcccccgacaggcccccaagattgcccagatcaagcgcaacctctcctatggagacaacagcgaccctgccctggaggcgtcttcgctgcccccacctgacccttggctggagacctcctccagctccccagcagagccagcccagcctggggcctgccgcagagatggctactggttcctgaagctccttcaagcagaaacggagagactggaaggctggtgctgccagatggacaaggagaccaaagagaacaacctctctgaagaagtcctaggaaaagtcctcagtgctgtgggcagtgcccagctcctgatgtcccagaaattccagcagttccgaggcctctgtgagcagaacttgaaccctgatgccaacccccgtccaacagcccaggacctggcagggttctgggacctgctgcagctgtccattgaggacatcagcatgaagtttgatgagctctaccacctcaaggccaacagctggcagctggtggagacccccgagaagaggaaggaagagaagaaaccaccacctccggttccgaagaagccagccaaatccaaggcggcaatgagccgcgacaaagcctcagacgcaggggacaagcagcgtcaggaggccagaaagagactcctggcagccaagcgagcagcgtctgtgcggcagaactcagccacagagagtgcggacagcatcgagatttatgtccctgaggcccagaccaggctctaaggccacaaaggagaaagcactcaattttaaatcattaaaaactcaatgcaaataggaaaaaaaaatttaaataccacaatctagccccttttccctttgggctgccatggcggacaacaacaacttggacagccctggcctggcctccagattgcagtctttttacttctgtctgctggggactagcttgtttacaggacgacgacagtccacggcagccttgggcccctgccatgcccctcccttcccaacatcccacggcttttcttttcctttcagagctcacacaggggtcaccaccgtggccagtagctttctggttcataccctttggggctgagggcacagaggacagaaatgggcagcactcctccctctccccagcctccccgctaagtgctcacacacaaagtgatggtccttggagcacgtgtggggaagccatggttaccgtgctccagccccttcagaaaattcaggactcccaagtggcttccaaggagttgtctgtcattggccgcacctttgtccagtcccccctgggacaggtggcggtgtctgtacgtatgtgtacatatgcacatagaccttagagtgtatatttaataaacgcccatctgctcacccaagcccaccagcgccgctgccaccggctcttggggtacctgcaggaggcgggtgtgtgaatagcatatatttttacatgtactatatctaggtgtgtgtacaagtgtgtgtaaaatatgccttgtgtgtaagcagccccccttttgtttgtccaccaaacccatcagcccagcctctttgtttttattctgttgtaattttcatcccaatctctcctgtcccccacttctatactcctattcccaaggtattctgagccctgagctgcaaaggcctaggcccacagagcaggatggggagggcaaggctgggtcaggccacctagagggggtcggacccagcagatgatttggcataccaggggctgttcctgtgggtatgactcaagggcattggggacatccttttgtctggcgcgtgctgcaggggtcccctgggtcccccaggtgaagcaaggcctggctctaggggcctgttctagcttggccgcccctctgtgaccttgggcaagtcacttgacctctgtgtgcctcaacttcctcctctgtaaaatggggacagt

SEQ ID NO: 797 - DNA, 2590 bp, Cricetulus griseus
caccctctgccagttcttcatgtgtgaggacagcaaggtggatgccctgggggaggccctgcagactactgtcagtcgctggaaatgtaagttctctgccccactgcccctggagctctacacctcctctaacttcatcgggctcttcgtcaaggaagacagtgcggaggtcctcaagaagtttgcggctgactttgccgcagaggctgcatccaaaacagaagttcacgtggagcctcataagaaacagctacatgtgaccctggcataccacttccaagccagtcacctacccactctagagaaactcgcccagaacatcgacgtcaagctagggtgactgggtggccaccatattctctcgggatatccggtttgctaaccacgagacgttacaggtgatctacccctattcccctcagaacgatgatgagctggagttggttcctggggacttcatcttcatgtctcccatggaacagaccagcaccagtgagggctggatttacggcacctcactgaccaccggctgctctgggctgcttcctgagaactacattaccaaggctgatgagtgcagcacctggatcttccatggttcctactccatcttaaatacggtgtcatccagctctctcacgtttggtgatggagtgttagagcggcgacagtatgaggaccaaggacttggagagacaacgcctctcaccatcatctgtcagcccatgcagcccctgagagtcaacagccagcctgggccccagaagcgatgcctctttgtgtgtcggcatggggagaggatggatgttgtattcgggaagtactggctatcccagtgctttgatgccaaaggccgctacatacgcaccaacctgaacatgcctcacagcttacctcagcggagcggtggtttccgggactatgagaaagatgctccaatcactgtgtttgggtgtatgcaagcaaggctagtgggtgaagccttgttagaaagtaacaccgttattgatcacgtttattgctctccatccctacgctgcgttcagactgcacataatatattgaaaggtttacaacaagacaatcacttgaagattcgggtcgagccaggcttatttgaatggacaaagtgggttgctgggagcacgttaccagcatggatacctccatcagagttagctgcagccaacctgagtgttgatacaacctacagacctcacattccagtcagcaaattggtgatatccgaatcctatgacacctacatcagtagaagtttccaggtgacaaaagagataataagtgaatgtaaaagcaaaggaaacaacattctgattgtagcccatgcatcttccctcgaagcctgtacctgccaactccaaggcctgtcccctcagaactccaaggactttgtacaaatggtcaggaagatcccatacctaggcttctgttcctgtgaagaattgggagaaactggaatatggcagctgacagatccacctatcctcccgcttacccatggacccactgggggcttcaactggagagagactttgctgcaagaataagccacctgagcaatgggaagaattggcctattgcagatgagttctcggatgttcaggagcagtgggaaaaccaatactgcattcaaagtggacagctcagaatcatttagcatatttctttttacgcttaggggtcttacagtaagactgtgtcaatgagagaaaggcatgattcagaaggagaaaaaaaaaacccatcttctctggacttgcctagctaacatggctttggagaattgtcttcctaagctggggcaccagctgcagcagagactaccacccttcttcaggctatgcatggctaaagagcctcattcttctcccagagagctacccccaccctcaggagacatgcaaggggaaggactgtgccttgaatccaactggggatgggatagtcttttggactccatttgcaagttaggcatagccatgcagtggagtgctttgatggttattaaaaaccataaaaaatagtccttggggcatagaacagagtccacccccagaagactccattcactagtgtgcaaggcacctgcttgaagactccaaccttcaccctggtaccgtcacttcatctctagagcagcctggccctccgtgcttctatctgtgaaatggggagaacacttttgctctccaaagcactttgagatactcagggggaaataaagaaaatggggaactcttgagtgggaggtacagggacttgcagaatattaatcaagtttaaattacccctgtgatagcccgatgagctgtgagatccctcagccagtctgaatcaagatctgtctttccacccaggctctagactgtgttaagcagttaaggagattgagatctggaaggatggatgttccattctttttttgaatcagcaagaaaccagggactgacttgaatgatggcagtcacaactgcactgcgagagtcgcagcctgtctgtggactctcatcacgcctgcttcatgtatttagagagagtgtgtgtatttaaaaaagaataaatgacaatc

SEQ ID NO: 798 - DNA, 2590 bp, Cricetulus griseus
gccgagaagaagccgcgagcttccccgatggtgccgccgcctcctccgtgccggggaggagcagccaaggggcagctgggcaagagcctggggccgctgctgctactcctggcactgggacacacgtggacctacagagaggagccagaggaccgcgacagagaagtgtgctcggaaaacaagatcgccacgaccaaatacccgtgtctgaagtcttcgggcgagctcaccacgtgcttcaggaaaaaatgctgcaaaggatataaatttgttcttggacagtgtattccagaagattatgacatttgtgcccaagctccctgtgaacagcaatgcacagataacttcggccgagtgctgtgcacttgttacccaggataccgatatgaccgcgagagacaccaaaagcgggagaagccttactgcctggatattgacgaatgtgccagcagcaacaccactctgtgtacacacatctgtatcaacaccatgggcagctaccactgtgagtgccgggagggctatgtccttgaagacgatgggaagacctgcaccaggggagacaaataccccaacgacactggacacgaagagaaggccgagaatgaggtgaaagctgggacttgctgtgccacatgcaaggagttctcccagatgaagcagacagtgctgcagctgaagcagaagattgctttacttcccaacaatgctgccgagctgggcaagtatgtcaatggtgacaaggtgctagcctcaaacacctaccttccaggacctcctggcctgcctggagggcagggcccacccggttcaccaggacccaaggggagtcctggattccctggtatgccaggccctccaggacagcctggcccacggggctcaatgggacctatgggaccatctcctgatctgtctcacattaagcaaggccggaggggccctgtgggcccaccaggagcaccaggaagacatggctccaagggggagagaggagcacctgggcccccagggtctccgggacccccgggttctttcgatttcctgctgcttgtgctggctgacatccgaaatgatattgccgagctgcaggagaaggtgttcgggcacaggactcactcttcagcagaggatgttcctctacctcaggaattttccagctacccggagactctggactttggatctggggatgactattccagaagaactgaagcgagagactctgagggccccagaaacttttatccatagcacgtcccatgtcttcatgtcaccaaaagagaagggtgaggaaacactctgctggaatctatttaatgctcgactgcttatagaacccagagttttcaagggtgtggatggatgaattctcaaaactatgcaaggctcaactttcctaatatccccacaaataaggcttggcaataaattgcctctgtgtttataaagcaattagaataaaaactcactgaacaaatgtaaggaagacatgaattttagttcagaaaaaaacgctctcccttcccaagttccaaaggggatggtgaataattaggtttcctgtgccaaacaaagtattaggagccagatacactggtatatgcctgtaatcccagtacctgagaagtagaaataggcagatcaagaattcaaggtcaacctcagctacataccaagtttgaagtcagcctggactgcataagagcctatatcaaaataataataatgataatgatgataaataataataataataataataataataatgaagaaggcactggggagatggcttagcagttaatgatgcttgctgctcttccagagggccagagttcaatttgcagctcctgcaccaggcagctcacaaactcctataaccccagttctgggtgatctgataccatcttctggcttctgtggcaccttcactcacatgcacatagataaacatgcatacacctaaaaatgaagtcttttttaaagcagtggatacaaagaggatgttgccttttcttgctatctatatacgctccaatacttgctacagaattaactagagtcatattgctatgtagagtccgttgtccaacaggcaaataataaatgcccattgacctttctcaggaagcaactctccaccttattttgagcatcattttatgcagggaaatagatgtagtttcctgacacagctttcatatatgtcttacaacatatcacaaataattttctatttggataagagaacaaaggctgtaattgttaaagctgaagtgatgtgctttataccactcctcctatagatgttaccatcagagagaagccatggaaaggacatttgggttccatatccctcagggatctaagcatgttttgtcagattcccagagcttattccctgagtgtgtgtgggggtcatgagtctgttttatttcccagtgactggtcatatacttcagtatctctatgcattatttatatcagatcatataccagtcaaactgatattccaacagtcatggatataatactatgaagtacttttgtatgactgtatatgcttaataacaaagttatttttctt

SEQ ID NO: 799 - DNA, 2590 bp, Cricetulus griseus
tcttgctacacatgaacctaacttcaccataatcagagaagaattcaaaccaaacaaacccaaaccatgtgctctttgtaatcagtttggacatgaggttaaggattgtgaaggtttgccaagagaaaagaagggaaagcatgatgaacttgcagatagtcttccttgtgcagaaggggagtttatcttcattcggctgaatgtccttcgagagtatctggaaagagaactcaccatggccagcttaccattcccatttgatgtggagagggagcattgatgactgggtgttcatgtgcttctttgtggggaatgatttccttcctcacttgccgtcattagagattagggaaggtgcaattgatcgtttggttaacatatacaaaaacgtggtacacaaaactgggggttaccttacagaaagtggttatgtcaatctgcaaagagtacagatgatcatgttagcagttggtgaagttgaggatagcatttttaaaaagagaaaagatgatgaggacagttttagaagacgaacaagaaaaaaaaaagagagatcaaccagcttttactcctagtggaatattaacacctcatgccttgggttcaagaaattcaccaggttgtcatgtagccagtaatccaagacaagcggcctatgaaatgaggatgcatagtaactctagtccctcaatatctcctaatacaagttttgcatctgatggctccccatctccaggaattaagagaaaagcagaagacagtgacagtgaaccagagccagaggataacgtcaggttatgggaagctggttggaagcaacgatactataagaacaagtttgatgtagatgcagctgatgagaaattccgacgtaaggtggttcagtcctatgttgaaggactgtgctgggttcttcgatattattaccagggctgtgcttcctggaaatggtattatccattccattatgcaccatttgcctcagactttgaaggtattgcagacatgtcttcagaatttgagaagggcacaaaaccgtttaaaccactggaacaactcatgggggtttttccagctgcaagtggtaactttctacctccatcatggcggaagctcatgagtgaccctgattctagtataattgacttctatcctgaagattttgctatcgatttaaatgggaagaaatatgcatggcaaggtgttgctctgttgccatttgtggatgaacgaaggctgcgggctgccctagaagaggtgtacccagacctcactccagaagagaacaggagaaatagtcttggaggtgatgttatgtttgtgggaaaacttcacccactacatgacttcattttagagctgtatcagacaggttccacagagccaatagatgtgccacctgaattgtgtcatgggattcaaggaaagttttctttggatgaagaagccattcttccagatcaaacagtatgttcccctgtgcccatgttacgggacctgacacagaacactgcagtcagtattaattttaaagatccacaatttgctgaagattatgtttttaaagctgtaatgcttccaggagcaaggaagccagcagcagttctgaaacctggtgattgggaaaaatccagcaatgggaggcagtggaaaccccagcttggctttaatcgggaccggcggcctgttcacctggaccaggcagcctttagaactttaggccatgttatgccaagaggctcggggactggtgtttacagcaacactgcaccaccacctgcaacttaccaggggagcttatacaggccactgttgagagggcaaactcagattccaaaacttatgtcaaatatgcggccccaagattcctggcgagggcctcctcctcttttccagcagcagagatttgacagaagtgttggagctgaacctctactgccatggaaccggatgctccaaacccaaaatgcagcctttcagccaaaccagtaccagatgctggctgggcctggaggatatccacccagacgtgatgatcgcggagggagacagggttatcccagagaaggaaggaaataccctttgccaccaccttcaggaagatacagctggaattaagcttttgtaaagctttcccaaatcctttcaccattatatacttttatgctatttgtggaaaggagatttctttctcaagtagtaggttttaataaaactacagtactttgtgtatttcttttaactgtgtgtatatttttgctgatctgatctcactgttttatgttgctttccagagatgtgtggtgcataatacagtgggtctgaatttattattgcttgtaaacacatttgatgaaattaggagtcctgggtttttattatggttaaaattcaagccagctctaagctgattttgatgcacatgaataattaggtatggacatttgaactgtacattcagcatactagagcatatgttgctcagcatttctttggaaacatttcattaaagtacttgtcttacagaaatttgtggactttaagtaaaaaaataaaaataaaactaaactttaaaaaaaaaaaaaaaaaa

SEQ ID NO: 800 - DNA, 2590 bp, Cricetulus griseus
  modified_base (878)..(878): a, c, t, g, unknown or other
gcaagtcactatcgtgcgactgacgtacttgtttccggccgatgggaccaggctgggctatgctgttgcctgcaaccggtgccggtaggcctgccgccatcatgtcagacacggacagcgatgaagattcctctggaggaggccctttttctttgaccgggttcctgttcggcaacatcaacggagcagggcagctggagggcgaaagcgtcttggacgatgaatgtaagaagcatcttgcaggcttgggggctttgggactgggcagcctgatcactgaactcacagcaaatgaagaattgactgggactgatggtgccttggtaaatgatgaaggatggattagaagtagagaagatgctgtggactattcagacatcaatgaggtggcagaagatgagagcagaagatatcaacagacaatggggagcttgcaacctctttgtcactcagattatgatgaagatgactatgatgctgattgtgaagatattgattgcaagttgatgcctcccccacctccacccccaggaccagtgaaaaagaaaaggaccaagattgtcttactggtgcaagtagcgttttcttttattctggataacattgtcactcagaaaatgatggcagttccagattcttggccatttcatcacccagttaataagaagtttgttccagattattacaaagtgattgtcagtccaatggatttggagactatacgtaagaatatctccaagcacaaataccagagtcgagagagctttctagatgatgtaaaccttattctggccaacagtgttaagtacaatgggcctgagagtcagtatactaagactgctcaggagattagtgaatgtttgttacagacattaacngagtatgatgaacatttgactcaacttgagaaagatatttgtacagctaaagaagcagctctggaggaagcagaattagaaagcccttgacccaatgactccaggaccttacacacctcagcctcccgatttgtatgataacagtacatccctcagtgtttctcgagatgcctctgtatatcaagatgagagcaatatgtctgtttttggatattcccaatgctacttcagaaaagcagctaacccaggaaggtgaagatggagatggtgatcttggagatgaagaggaaggaactgtacaacagcctcaagccagtgtcctgtatgaggatttgcttatgtctgaaggagaagatgatgaggaagatgctgggagtgatgaagaaggagataaccctttttctgctattcagctaagtgaaagtggaagtgactctgatgtgggatctggcagtataagacccaaacagccccgtgtgcttcaagagaatacgaggatgggcatggaaaatgaagaaagcatgatgtcctatgagggagatggtggggaggtttcccgtggtttggaggatagcaacatcagttatgggagctatgaggaacctgatcccaaatcgaacacccaggatacaagcttcagcagcatcggtgggtatgaggtatcagaggaggaagaagatgaggaagagcagcgctctgggcccagcgtactaagccaggtccacctgtctgaggacgaggaggacagtgaggatttccattccattgctggagacagtgacatggactctgatgaatgaggcttcctttaagcctcttcagtcagcctaggttgattacctttccccagcttatttatatgtgcatagtagctgataatgatatcaccagattaccactttagctttagtaataagtaaatagtaatcatctctccagatcctggagtagcaagttctttcccctaatcactgccaagaagagagagcagactcactcttccccattacactcctttaatgccatttattgctgttggtatataaacatggcaccgtttcactttctaatttgcaggctggaaagggtgttatcatgaagggaaatgttcaaagtctagatatgacagaatgtattccttatttgtttgtacctgccttgtttcagaaaggatgctggaatgactagacatgacactgaaagacggacaggaagcatatcttcaagagctttgcatttgagccaggtggtggcgcacgcctttaatcccagcacttgggaggcagaggcaggtggatctctgtgagtttgaggccaggctggtctacaaagtgagttccaggacagccaggacacagagaaaccatgtctcaaaaaaaacaataacagggagagagagaaattttcatgaagatagaaattgagtcaaataatagaagtgtatgatcccatttgtatgagtcaaaaatcaggtgtatatgatatgtttgtatatacttgtatgtgcaaaggaaaagatctgaaagagtatatgttaaaattgttcagaatgaaccttgtggggataggaatggagaggaggtggttcatttagtttatgtatactgagtgaatattctgcttttatttctgtatcatttgcatttttagtgtgtattatttttataataaaagttttaaaaatcctgtactccaaagaaaaaaaaaaaaaa

SEQ ID NO: 801 - DNA, 2589 bp, Cricetulus griseus
  modified_base (12)..(12): a, c, t, g, unknown or other
  modified_base (1623)..(1623): a, c, t, g, unknown or other
ttcttgcttctntggacctcatcaagatccaggcttgagagtggttaccaccaacatttctcctgagacttatattccatattttaagaatcacaatgttaactaccatttatccgtctgaataaaaggatgtatgatgctaagcgctttacggaagctggtttcgatcaccatgatcttttctttccggatggcagcactcctgctgagtcaatcgtccaagaatttctggatatttgtgaaaatgttgagggcgccattgctgtgcattgcaaagctggccttggtcgaacaggtactctgataggctgctacctcatgaagcattatcggatgacggcagctgagagtatcgcctggctcaggatctgcagaccaggttcagtgattggaccccagcagcagtttctggtcatgaaacagtcaagtctctggctggaaggcgactatttccgtcagaggttgagagggcaggagaatggacccctcagtgcagccctctccaaacagctctcggatattgatgacatttccataaatggcattgagaatcaagacaagcaagagtctgagctgtatagtgacgatgatgaaattagtggagtgacacaaaggagacagacttcgggccctgaaaagtcggagacaatcaaaagccaacactgttcccctcacatgtcccctagctgtgctgacctctgcactgtgtagtgttgccatctggtggattgtgtgtgactacattcttcccaccctgctgttctgtcttgatggcttcagaacacagtagccatccggaccctttgcagatagtttgctgttccagccgtttcaaggactaagacagtcttgcgttaaagtaagaaaccggtgaccagcactccagggaagactaggaacagaaagccccaacaagatttagtcaatcgatctgagaaaaaaacagacactgcaaaggccttagtttctttccacatacgaagttcattcaatgaagaaaaacgtcacttggcctctcagccagccacttgctgacttagggggtgtggttgaaccatttgaggggcccaactctcccttttgtaatctcaagttggataaaagctgctgttgtaagcttagtctcaggtgtcaatacccagccctctgccaccagagagctgttaaggatgaaaggagatgagcatcctctagtggtaccctctgtcttaagacaggatttggtacgatcagtttcactttattcttgttaattgggatgttcactgtgtgaagtacccaagctgcttgtctttcaccaaagagtgctttataacaatctgtgaaaactgcatttaaacactgttactgtgttgttgtggttactaaaacctgctaatgaatgttgacaaaattgttaaccctttgtaaagtcttgctctgtaatgccgtggagtttcttttcccgtggttctcaatttgattttagcgacaatcgcttgctcctggaattcggttgtttgtgtaagagaactcactgttgcctttggttagggaatgtgactagaaactgtagcgtgccttttctcttcacccttgctggaagccaacagcacttgtgccatgaagcaattgcaaaaaacngaatttatctgctgccaaaaagaaaaaaaaaaaaaaagatagacccaataattagagaatactttacagttgtcttggttactttcacaatagaagataatggtttttttgtctttttcccggtttggagactggaggaatgtaatatggaaagccattgagagccaatgccttcctaagatagatgaatgtattaggcgagcaggcaatcccacttgaaaagttgccttccttgtagttgtaacgaacaggttttaagtctaggtaacttcctgctgtgaattagtggacaatccctccccaactacaactactagatccttctgggatagaataccctgttgctacacagcatgaaccagtagatgttggatggaggggcctctttaacttaagaacttgaaatagctttgaaagttttaagatttctctcccactgaaatgccctagtgaggttagccactgctcttgcatttctccttaaatctgagtgttccccatgttactgagtggaaatactacagatgagttaaaaagacttgcctatactgtagaagaaattacctccttaatggtccaatagaactcactgtggatagactatccaacagattaaagtactgcgattttacacccattgtttgaagactttattgtacacttatgtacagatgattaagcgaagttttaaagtgtaatcagtatttgatcaatcgttgtcttgatattttattaaattgtatatttctaattttttaaagttaagagaactggttggatgtttattctcctgaaggtatttttaagataaagcttcaccgtagcctgtaaacttggcacatacatgtagtttttgatacttcttgttgcatttgaaaatcttgtgtattgtaaaatggttttatacaaaatactaaatggtagaaattgtataatttacaatcaaataattaaaaatatcaaaca

SEQ ID NO: 802 - DNA, 2588 bp, Cricetulus griseus
ggcggtgggggcgggcggcggcgggaggcggcggcggtgggggcgtggcgcgcggggcgaagaataatcatgggccagaccggaagaaatctgagaagggaccggtttgttggaggaagcgtgtaaaatcagagtacatgagactgagacagctcaagaggttcagaagagcagatgaagtaaagactatgtttagttccaatcgtcagaaaattttggaaagaacggaaaccttaaaccaagaatggaagcagcgaaggatacagcctgtgcacatcatgacttctgtgagctcattgcgcgggactagggagtgttcagtgaccagtgacttggattttccagcacaagtcatcccattaaagaccctgaatgcagttgcatcggtgcccataatgtattcttggtctcccttacagcagaattttatggtggaagatgaaactgttttacataatattccttatatgggggatgaagttctggatcaggatggcactttcattgaagaactaataaaaaattatgatgggaaagtgcatggagacagagaatgtggatttataaatgatgaaatttttgtggagttggtaaatgctcttggtcaatataatgatgatgacgatgatgatgatggagatgatcctgatgaaagagaagaaaaacagaaagatctagaggatagtcaagatgataaagaaagttgccctcctcggaaatttcctgctgataaaatttttgaagccatttcctcaatgtttccagataagggaacagcagaagaactaaaagaaaaatataaagagctcaccgagcagcagctcccgggtgctctgcctcccgaatgcaccccaaacatagatggaccaaatgctaagtctgttcagagggagcaaagtctacattcatttcatactctcttctgtcggcggtgttttaagtatgactgcttcctacatcccttccacgcaacacccaatacatataaacggaagaacacagaaacagctctggacaacaagccttgtggaccacagtgttaccagcatctggagggagctaaggagtttgctgctgccctcactgctgagcggataaaaacaccacccaaacgtccagggggccgaagaagaggaagacttccaaataatagtagcagacccagcacccctaccatcagtgtgctggagtcaaaggatacagacagtgacagggaagcaggaactgaaactggaggagagaacaatgataaagaagaagaagagaagaaagatgaaacttccagctcctctgaagccaattctcggtgtcaaacaccaataaagatgaagccaaatattgaacctcctgagaatgtggagtggagtggtgctgaagcctcaatgtttagagtcctcatcggtacttactacgataatttttgtgccattgctaggctaattgggaccaaaacatgtagacaggtgtatgagttcagagtcaaagagtccagtgtcatagcacctgtccctactgaagatgtggacactcctccgagaaagaagaaaagaaaacaccggttgtgggctgcgcactgcagaaagatacaactgaaaaaggacggctcctctaaccatgtttacaactatcaaccctgtgaccatccacgacagccttgtgacagttcgtgcccttgtgtgatagcacaaaatttttgtgaaaagttttgtcaatgtagttcagagtgtcaaaaccgctttcctggatgccggtgcaaagcacagtgcaacaccaagcagtgtccatgttacctggctgtccgagagtgtgaccctgacctctgtctcacatgtggagctgctgaccactgggacagtaaaaatgtatcctgcaagaactgcagtattcagcggggctctaaaaagcacttactgctggcaccgtctgatgtggcaggctggggaatctttatcaaagatcctgtacagaaaaatgaattcatctcagagtactgtggagagatcatttctcaggatgaagcagacagaagagggaaagtgtatgacaagtatatgtgcagcttccttttcaacttgaacaacgattttgtggtggacgcaacccgaaagggcaacaaaattcgttttgctaatcattcagtaaatccaaactgctatgcaaaagttatgatggttaacggtgatcacaggataggcatctttgctaagagagctatccagactggtgaagagctgttttttgattacagatacagccaggctgatgccctgaagtatgtgggcatcgaaagagaaatggaaatcccttgacatctcctacctcttccctcctctgaaacagctgccttagcttcaggaaccttgaggactgtgggcaatttagaaaagaaaatgcagtttgaaattctgaatttgcaaagtactgtaacagtaatttatagtaatgagttttaaaaaatcaactttttattgccttctcaccagctgcaaagtgttttgtaccagtgaatttttgcaataatgcagtatggtacatttttcaactttgaataaagaatacttgaacttcttaagaaaaaaaaaaaaaaa

SEQ ID NO: 803 - DNA, 2588 bp, Cricetulus griseus
  modified_base (18)..(18): a, c, t, g, unknown or other
aagtgcctctctgcagcngccgcactggaaacccccaacgagccgcgagatcagcaccctggccaacaaccagtgcatggccactgagagcgtggatcatgaattgggccggtgtacaaacagcgtggtcaagtatgagctgatgcgcccatccaacaaagcaccactcttggtgctgtgtgaagaccatcggggtcgcatggtgaagcaccagtgttgtcctggctgcggctacttctgcactgcgggtaaacttcatggaatgtcagcctgacatcaatatccgggacaatgaggagaacatttgtctgcactgggcagcattctcaggctgtgtagacatagctgaaattcttctggctgccaagtgtgacctgcatgccgtgaatatccatggagactcacccctgcacattgcagccagggagaatcgctacgactgtgttgtcctctttctttctcgggattcagatgttactttgaaaaacaaggaaggagagactcccttgcagtgtgcaagcctcaattcccaggtgtggagtgcactgcagatgagcaaagcacttcgggactcagcccctgacaagcctgttgctgttgagaagacggtgagcagagacattgctcgagggtatgaacgcattcccattccctgtgtcaatgctgtggatagtgagttatgtcccaccaactataagtacgtctcccagaactgcgtgacgtcccccatgaacattgacaggaacatcactcatttgcagtactgcgtatgcgtagatgactgctcctctagcacctgcatgtgtggccagctcagcatgcgctgctggtatgataaggatggccgactcctgcctgagtttaacatggcagaaccaccgttgatcttcgagtgcaatcatgcctgctcatgctggaggaactgccgcaatcgtgtggtgcaaaatggtctcagggcaaggctgcagctttatcggacacaggacatgggctggggtgtgcgctccctccaggatatcccactgggcacctttgtctgcgaatacgtaggagagctgatatctgattccgaagctgatgttcgggaagaggattcttacctctttgatcttgataataaggatggagaggtatactgcattgatgctcggttctatgggaatgttagccggttcataaaccaccactgcgagcccaaccttgtgcctgtgcgcgtgttcatgtcacaccaggacctgcggtttcccaggatcgccttcttcagtactcgcctgatccaggctggggagcagctggggttcgactacggggaacgcttttgggacgtcaagggcaagcttttcagttgccggtgtgggtctcccaagtgtcggcactcaagcgcagccctggcccagcggcaagccagtgcagcccaggaggctcatgagaatggccttccagataccagctctgcagctgctgccgaccctctatgaattgccggtggggccggcgggaccttccaaatcatattttggtgactgcaatttagagaggaaaatctgcacaagatgtccaagaggagctggaggtgtggacacctcccagggaatgttctggtcctgaggcgtttcagctggcccagtgctcaggccagagcactcctctggcctgcacctcgagacctgactccatgttgtataacttgtgagttcctggtggtggctctgtcgctgcagtgcttcccatttctcctggtctctgaggccctcgctccactgccaggtttgtttcgtatactgtctgatcaggctactataaggcactcaccaaggccaccgtcacctacaagctgctccgttagacctgctgcccacagcctgtgttgctggcaccaactcccaggtgccatccgaggacactagctcccttacagccgtggagaggttggccgacccaccactcactttgatgaaatgtgggttcgctttttaaagaaatcctatatctagccctatatatcaagcctcttactggtgtttctttgcgaggaagcaggttggtgatgcaggcagaccctgcaccagccccagccagttccgttgacgcaggcaccttttgttgatttttaagccacatgctatgatgatgaataaacttgtttgttttctaccattaccgaacattaggacaaacaaagaataaaaacacaaaacacagacaacggtgctgaatctggtgtggtttctactcaccacgtgaaaataaactatcaactgtaaaaaaagagaaacaaaatgattttagaataaaagtgcaggaaaaacttttttaaaaatagttaagtcttgtagttgaaataaatttagccgtcaccttttgtgtgatggcctggcaggtcatgtactttttttttttttttttttttttttttttttgtgtgtgtgtgtgtgtgtgtgtgtgtgtgactcttctaaaacattcattaatgcagtcatgtttatttttttctgttaaaatgttttttgacagttttaagagcagtcttttggctcagaccatttcttgttctgttttcaatgaaatcaataaaaaagtactttaaa

SEQ ID NO: 804 - DNA, 2588 bp, Cricetulus griseus
gatgaaccgggacaacaaggaagggcaggagcctgccaagcggaggagtgagtgtgaagaggctcctcgacgcaggtcagacgagcaccccaagaaggtgcctgcagatggcatcctacgccgaaagtctgatgatgtgcacctgaggaggaagcggaaatacgagaagccccaagagctgagtggacgcaagcgagcctcgacgcttcaaacgtcccccggttcctcctctcacctctcgccgaggcccgctctaggcagcagtctcagcccttggtggagatccagtctcacttacttccagcagcagctaaaacctggcaaagaagataagcttttcaggaaaaagcggcgatcctggaagaacgctgaggatcggttggcactggccaacaaaccccttcggcgcttcaagcaggaaccagaagacgaatctgcctgaggcacctcctaagactcgggaaagtgaccagtcacgttccagctcaaaagaactaagcaaggagctcaatcacgagatccaaaagacagagagtaccttggcccacgagaaccaccagcccatcaagtcagagcccgagagtgaaaatgaggagccaaagaggcccttaagccactgcgagcgcccacaccgcttcagcaagggcctcaacggcacccctcgggagcttcggcacccactgggacctggcctgcgcagcccacctcgggttatactcccggcccccaccctcttcgtccccacctaagtgcatccagatggagcgtcatgtgatccggccgccacccatcagcccaccacctgactcactgccccttgatgatggagcagcccatgtcatgcacagggaggtgtggatggcagtcttcagctacctcagccaccaagacctgtgtgtctgcatgcgggtctgcagaacctggaaccgctggtgctgcgataagcggttgtggacccgcattgacctgaaccactgcaagtccatcacgcccctgatgctgagcggcatcatccggcgacagcctatctcccttgacctcagctggaccaatatctccaagaagcagctgagttggctcatcaaccggttgcctgggctccgagacttggtgctgtcaggttgctcatggattgctgtctcagccctctgtagttccagttgtccattgctccggaccctggatgttcagtgggtagaaggactaaaggatgcccagatgcgggatctcctgtccccacccacagacaacaggccaggtcagatggacaatcggagtaaactccggaacattgtagaactgcgcctagctggcctggacatcacagatgcctccctgcggctcattatccgccatatgcccctgctctccaagcttcacctcagttactgtaatcacgtcactgaccagtccatcaacctgctcactgcagtcggaactaccacccgagactctctgacagagatcatcctgtcagactgcaataaggtcactgaccagtgcctgtccttcttcaaacgctgtggaaatatctgtcatattgacttgaggtactgcaagcaagtcaccaaggaaggctgtgagcagttcatagccgaaatgtctgtgagtgttcaatttgggcaagtggaagagaaactcctgcaaaaactaagttagttctagaacaagtatgtaaatatggcgggttgggggaacacagcgggggagggaaaaagactgcaaaaacaagtgggcttattccctttggaatttggaacaagagaccacaggacacagttctgtttcgcaagtcttgccaagggagaagccgttcaactacccaattggtgatgagtgagccagatgttttcctctgctctttctgcatcataactgcactgctttctggaccatttctaaggcggcatttagaagacattccaattggaaaggatgatgagctttggaaaatcctcttagaagcctaagcttagtgtttttgttggcagttttgtttgagacaccttgttccttgcaatgccaaggcttctggtgtcaacatagagtggaccacacacaccatctgcagccgtcttgacacattttgtttagttggttttgttacatcttacattatgcagaactatttttgtataaattgtttaaaagttatttatgcaagatttgaatgcataccagtgtttttattatttacattgccaactttccttcaggtagggagaacttaacctgtacttcatcaacataaagagcccatctacagatgtgcccaggtgtgacaggggctatgaccttccacttaaaagcatgtttaactggatgttgagagcctactttgtatgtcaagttacacaagcatgtgtggttaagtgtatagtatagtccaggtaaaacactatgccaagtttcaatagaaatcacttataattcagatttcagccgttacactcaggagggttttgctccaagcatgagctcttgtattctatctacatagatctaatttataccatgaatcaagtagaataaatgtgcccattgcctttcctttaaacaactgtgcaataaaaaaaaaaaaaaaaaaa

SEQ ID NO: 805 - DNA, 2586 bp, Cricetulus griseus
gtttgtcggagcaccataacatggtgtgggaagtgaagacaaatcagatgcctaatgcagtacagaaactcctgctggtgatggacaagagagcttcaggaatgaatgactcattggagttgctgcagtgtaatgagaatttgccatcctctccaggatacaactcctgtgatgagcacatggagctggatgaccttcctgaacttcaggctgttcaaagtgatcctacccaatctgccatataccagctaagttcagatgtgtctcatcaagactatccaagaccatcttggagccaggatacctcagacataacggaaaacactcaccgtgaagatgaggtggactggctgacagaattagcaaatattgccactagcccacaaagccctcttatgcagtgctcattttatggcagatcacctcctgtacacatcatagctactagactaaaagtttacattcctatgcacgcccaccaccagtcctcatgaccactggaaggaagaaacaccagtgagacatgaacgggcaaacagtgagagtccggcattttctgcatgtcctccctgtctgacgacgatgatctgggctggtgcaattcctggccttcaactatttggcactgtttttgaaaggcacgagactgtgcttccataaggaaagcaataaggaatggcaagatgttgaagactttgctagaactgaaggctgcgataatgaggaagagattcaaatgggcactcacaagggctatggttctgatggtctaaagttgttatcccatgaagagagtatatcatttggtgagtctgtactgaagttgacttttgatcctggtacagtagaagatggcttgcttactgtggagtgtaagctggaccaccctttctatgttaaaaataaaggttggtcatcattttacccaagcttgactgtggtacagcatggcattccgtgctgtgaaattcacattggtgacatatgtctacctcccggacaccctgatgccattaatttcgatgattcaggtgtttttgatacatttaaaagctatgacttcacacctatggactcttctgcagtgtatgttctgagtagtatggctcgtcagcgccgtgcttctttgtcttgtggaggacctggtagtgctcaagagtgtgcgagctctgaatgcagtaaaagctgtggctcacctgggtcatcacagctctcctctgattctctgtatgctaaagctgtcaaaagccacagctcagggactgtgagtgccacctctcctaataagtgcaaaagaccaatgaatgccttcatgcttttcgccaaaaaatacagagttgaatatactcagatgtacccagggaaagacaacagagccatcagtgtcatccttggtgacaggtggaaaaagatgaagaacgaggaaaggaggatgtacacattggaagcaaaagctttggctgaagaacaaaagcgtttaaaccctgactgctggaaaaggaaaagaaccaactcgggctctcaacaacattgaacctgatgcttgtgtttgtaagtctgtatctacataagtactgactctggatggaaaagcttggaagaccttggtctcaccatttgtcctgaatttgcgtgaacataagatactgatagtattgagtcctgaagtgatttaatgagtgaggatttgctttctccattagagcattaagtaagctacaactatcaacattgtaaaccaaattgccttattttccttccaaacttcatatatgtctatcaggtaatataggcttgaaaattgataccctgtggtgctaaagtacagtagaaagacgtgtatacgtgttttcttttaaattgtaagaaggggaattaaaacatatgtaactgctctttatatcagctccttactgcttattaatctgtattgtacccatgatatcaggaaggaagtagaagctggccttttcttgagtagccaccacatggcccagcatctgtgccaaacacagtcgcttttagtctggccagtgccaagagacaacataacatggcaggtaggtggtgtcattgtcctagttaaaagagccacctgcttcagataccacagacatgtgctgagttgatgcaccagggggcagcactcctccatgatttccagtgggggccaaactggccaacgtgcagttagttaatagcattgggctagtcactgtaatggtgctattaacagttgacaccgttgtattttaatgtgtcctctatctcctcagccacatatgttacatatctcttgtcaccgtgtctatggtgggggcagactttgcactttactttgcactttactcccttcagcttctaaagcagagcaagcacttcggcagtacagctgcttttgctctgctctgcgctacaatcatggcttctcatgttacttaccaagtggtatttttggttaggaatcacagctgtacaattgatttcagttcatcacacttctacttgttgcccctcaattttgcacactatattcttgtatattatttgaaaaaaaaataaaaaaaaaaaaaaaaaaaaaaaaaa

SEQ ID NO: 806 - DNA, 2584 bp, Cricetulus griseus
taaatacagtcaaagataaccttcctattcagattcagaaactgacagaagagaaataccaagtggaacaatgtataagtgaagcttccattataattcggaacacaaaagagcccacactgactttgaaggtgatacttacttcccctctaattagggacgaattggagaagaaggatggagaaaatgttatgatgaaagaccctccggacttactggacaggcagaaatgtctgaatgccttggcttctcttcgacatgcaaaatggtttcaggcaagggcaaatggattaaaatcatgtgttattgtcctccgcattctacgtgatttgtgcaacagagcacccacatgggcaccattgaaaggatggccactagagcttatatgtgaaaagtctataggtacttgtaatagacctttgggcgctggggaggccttgagacgagtaatggagtgtttggcatctggaatactacttcctgggggtcctggccttcatgatccttgtgagcgagacccaacagatgctctgagctacatgaccactcagcaaaaagaagaaatcactcatagtgcacagcatgcacttagactatcagcctttggccagatttataaagtgctggagatggacccccttccatctagtaagccttttcagaagtattcctggtcggttactgataaagaaggtgctgggtcttcagctctaaagaggccatttgaagatggattaggggatgataaagatcccaataagaagatgaaacgaaacttaaggaaaattctggacagtaaagcaatagaccttatgaatgcactaatgagattaaatcagatcaggcctgggcttcagtataagcttttgtcacagtctggcccagtccacgccccagtcttcacaatgtctgtagatgtggatggcacaacatatgaagcctcaggaccatccaagaaaacagcaaagcttcacgtagcagtgaaggttttacaggcaatgggatacccaacaggttttgatgcagatattgaatgtatgagctccgatgaaaaatcagataatgaaagcaaaaatgaaacagtgtcttcaaactcaagcaataatactggaaattctacaactgagacctccagtaccttagaggtaagaactcagggtcccatcctcacagcaagtggcaaaaaccctgtaatggagctcaatgaaaaaaggagaggtctcaagtatgaactcatctcagagactggtggaagtcatgacaagcgctttgtaatggaggtagaagtagatggacagaaatttagaggtgcaggtccaaacaagaaagtggccaaggcaagtgcagcactagctgccttagagaagttgttttctggacccaatgcagcaaataataagaaaaaaaagaatcattcctcaggcaaagggtgttgtgaatacagcagtatctgcagcagttcaggcagttcggggcagaggaagaggaactctgacaaggggagcgttcgtgggggctacagcagctcctggctatatagcaccaggttatggaacaccatatggttacagcactgctgcccctgcatatggtttgcccaagagaatggttctgttacccgttatgaaattcccaacatatcctgttccccactactcattcttttagtaaatgacagaagcttattcctattgaacaacagtacagtacaatgcagaatgttagagaaaaagcctttttatcctgctttctttgaacatacttgatcaaaattatttgtaaagaacatctttcctactttttgattttaacaaatgcaaattcagttctctaaaacttgaaaacaaacaaaaagaaaccagttctgtgaaacggtacctcattcctggaaataatttataccagcccctttgttgtagggaagtaagtctagcagctcaaagttgacgttctcagagagtatcagattatgtaaagttaaatttgtgaaggatgtatagagtctcaacactgatcacaaataaactgctttgttgtaacacagagtactgcctggttcctgatgcagccatggattcatagctgattgatgtgcttgccccagggcactttaattgggctgtagtttattttttttttttcaaaaattagtagaaacttttcatttaacctaactttgtaaataatgaagtgtgtaactaaagccaataaaatattttacctttttttttttttttttttttttgtttgagatttttttttttgtaagtttaaagattaccgtggactgccccatgtcttctgggcctgtggtgacttgcagatgctggactttacaagtgtcggcgtggttgaagcagcagcctgcatgtatggactgtcatcagtgcctcgcccagagatgcctggcctttcatccaaagggaccctgctgctccaagccctgcaagcagcaccctcgctgtggctcctttgtgttgaatatgttggactctgccatagactgacccctttgtctggctgctgtggtttgtaatgccttgacatgttacatttctttcccatttggatgaatgaaaataaa

SEQ ID NO: 807 - DNA, 2583 bp, Cricetulus griseus
agttggcggcgccggctgtggtggcacagacgaaaggcaggaaaggggcaggcctggcgagcgggaggacggccggccagatacgcaacccacgacgagtgagcttcgcagcataccgtttaagcatctaacccaaccgcccagctagttagccccagcggccccccgtcagctcaggttcggccggcccccggcccgcccgcccgccgcagccgtggtggcagccccgggaggagcgctggcgtccgtctccttcgattctcgggatttgaagatggctgcacagtcagcgccgaaagttgtgctaaaaagcaccaccaagatgtctctaaatgagcgcctgtaatgtcattcttgggccttgtaagaggcacttgctttgctccatttcactttcttcccattctgctttttagtttgttttgtttttaattcttttgacagctatgtgtgttttcttccattaaacttaaattagaatgtccttataggctcttaagtggttgaactaatttaactttctcagaagtactaagttagaaaaactgattatttgagacagaaatattaagttatttaaaggcagttttgtttctgagagtttcatttgtgtggtgtctttcaccattttaacatgttgctgctagaattcttaaggtatttaatgtctgttttgtcttctaaagcagatatacttctctgttcatatcttaagatatgatacattacctgtattcatgtgttactaagtaatatgttagatttcagtggacattgaaggtgttctggtccttcctcctgtttgtccttagaatgaaccttcactcttccaaagatgtaggcatttttgtctgtctttgtaactgcatctatgtctcttgtcatcatatttgcttaatgcgtgtttttcatgctttccacttctctaagagctgttacctgagcccttgttatcactttattgtgctgcacttggctgcatttctgagtttctggttcttgcaagtttgtggaaacagaggagtctttaacccacatcaattttgattcaaatgtaccactttaaagttcgtgggatctggagctcctggtctagcaagccatgaaaatgaccaataagtgttttaataataaagctttaattaaactacccattttgttcgaccttgaagctttactaatatgctgaagaacaaacagccgatgccagtgaatattcgggcttcgatgcagcagcagcagcagctagccagtgccagaaacagaagactggcccagcagatggagaatagaccctctgtccaggcagcattaaaacttaagcagaagagcttaaagcagcgcctgggtaagagtaacatccaggcacgtttaggccgacccataggtaccctggccaggggagcgattggaggaagaagcctacccataatccagagaggcttgccccgaggaggactacgtgggggacgttccaccaggtccctgcttaggggcgggatatcgctccgaggtcaaaacctgctccgaggtggacgagccgtagctccccgaatgggcttaagaagaggtggtgttcgaggtcgtggaggtcctgggagagggggcctagggcgtggagctatgggtcgtggcggaatcggtggtagaggtcggggtatgataggtcggggaagagggggctttggaggcagaggccgaggtcgtggccgagggagaggtgccctcactcgccctgtactgaccaaggagcagctggacaaccaattggatgcctacatgtcgaaaactaaaggacacctggatgctgagttggatgcctacatggcacagacagatcctgaaactaatgattgaagcctgcctgcctgcccgcctgttagactcttgttaaagtcaccacatctataaaataatcttgagaaaacatgagaagaaacctgattgatgctggaaggacctatcacaataggctgtggacttacctgccaccagttggcacatttagtctgttccgtctactttttgatactgtgttatatgaaaccctattttcctttgatttggttgagtttgttttgttgtttatccagtcacccagacttctgtttgaacaggaatgcattggccttgtgagtgaacatttttccagcctctgcctcacctgtcatatactctgacattttaatatttcctttgttcatctttatgatcccagaaggatcctgtgttgtcaataatgtgtggtcactgggatagagttctacatcttctttaaagacttcctgttaataactaaaactaaaggtgtgtctgctctgttgttggtgaaggtagtaaattggaaatgctggtattgcttctgggccaggaatggcttgtacatggtagtgactttgatttggtcaaagttggtgctgcctacattgatattacataaatggtagctgacatgctgagtttccacataactggctttatttgaccctcctgaaggtttaaagttcaaccatattttgtcagctgttcagtttcagtggaatcttgtatttttggtcattataacaaattgttctctcaaaa

SEQ ID NO: 808 - DNA, 2583 bp, Cricetulus griseus
gatgaagaaattgagacacaaattatttggactagataatgtcttcatggtagaaccaggatccacagttgcacagtctcacatcagaatctgtacttgtaactactatactgtgcatatccttcggtaagctccaaaagatgagtcgtgggtatccagaaaacaataattttctgaataataataaccaaatggtactggatatgatccttatccattaattggaattcctcagaccatcaactgggaaactgtggcaaggcttgtgcctggttaacacccaaagagtgtgcaaaaaggtttgactgagctgaagagcagtggaagctcacctgttgacaaccagtataaccccttaatggcggctggggagggtcctgttgagtctttagccacttacattaaatcttctcttctggaaaacacaaggagattttcaggagaatccaagttgatgaagatacagttttatagcttccacaaggaattgttcttcagaaagtgaaaattgtactactcgtaatgctggagaaaagactgaagaatctgaaggccaaatatggtgatccatgtatgtgatgaagcaaaaaacttgaaagaagattttatttgcccacgagatcttttggtatcggaaatgaagtactttgctgaatatttatctatggatgcccagcgctgggaagaggtggacatttcagttcattgtgatgttcacattttcaactggttgaataaaatatagttaaaagaaacactaaggagaataaagattgtgagattcccactttaacttttttgtaagaagattgaaagactatttgatgctgagtacgtgaatccagattctcgaaataacgcagcaacattatatagatgctgtttgtgtaagaaacttttaaccagagaaacagaaagacgaattccttgcatccctggaaaaatcaatgtggatcgacatggaaatattatctacatccatataagagataaaacctgggatgtacatgagtatttgaatagtctttttgaagaattaaaatcttggagagatgtatattggcgcttgtggggaacgatcaactggctgacttgttcaaggtgttaccaggcctttctctgtattgaattctcacattgtcagtatcactcagaagtggtagtttattccaccacaataagttcactgagcactgtgggcactggaatttatccctgctgtaaccagaaggttcttcgatttgatcccactcagctcacaaagggctgtaaagtgagggaccacatggttattcttcatgatcaaggagaaaatgatgatttgctttcttgtccagctactagaatactggacgatctacacaagcacagagatgttattgttacaccttttttaaaagatgcagttagtgactctgggcttggctcctgtgatgaaaagggcctggaatatgatattttgctggaaccaaatacaccatggggccccaaaactggggagctcaatgctttcttgtcattaaaaaactggactctgcagttgaaacagcagtcattatttcagaggaagaagagtacaccactggatctgaggtcactgaagatgaagtcggtgatgaagaagaagtgaaccaagaaacaaaggaaaaaggaaaagccaaagaagtttactaagcaacccaaaaagcagctgtcttcaccctgttctcaaaagaaagaaaaggcaccggagaagtcaacttctagagatatgtctcctttcgttgtgagcgtgcagaagaataagtgggatgcctcaagatccttgagattcaaccaggatgcgcaaagagaagatgatcagcggcggatgtctgaaattacagggcatctaataaagatgagattgggtgatctggaccgagtcaagtcaaaggaatacaaaagaatttgcaggaggtatttattctaggcttgaagcacaagtcaaagcctctgcacctggcagtgcccggcagaacagctcagacaaaaaccccaggtctaaaagtcgttttggccaagggcgtcctgcataaagcaccctaaaatataaaaaagagagaaggcaacaactccgtagacgatctgaaattgtatgatgaaatgtccagtgatgcaatttaagatggtgtgaattttaaggagtgacagatctggaagctgtactaatagagtttcaaggtgaggttattccagtatcatgttgatccagaaggattcatcttttcaagttactgtgtagaaagcacagtgttagtcaagcctttgtttctttcagtttctcatgcttctctgttcattgtaataagaaggaaacctgctctttggattttactgacgataatgtgcacgttgcttctcccccaaggggactgaactactgattgatgctaacaaaccagactttattacaatctgactctatacagaatatgttttgttattttgtgtctgtctgtgatacatggacaggcatttcttctgccaagtactttaaggatttccttacattaaatctgagttttcacttctttaattgaaaataaatggcaatgacaaaaa

SEQ ID NO: 809 - DNA, 2582 bp, Cricetulus griseus
gtttcattgagctcaaggtctggctgctgcagcagtattcaggaatgacccacgaagacatcgttcaggaatccaagaaatactggcaacagatggaagcccatgcagggaaggccagcagcagcttgggtgctccaaggacacatgggcccagcacctttgacttgcagatgaagtttgtgtgtggtcagtgctggaggaacgggcagggtggtggagccaggacaaggacctcaagtactgcagtgccaaggcccggcattgctggaccaaggagaggcgtgtccttctggtgatgtccaaagccaagagaaaatgggtgtcggtgaggccactgccatccattcgaaacttcccacacgcaatacgacctctgcatccatcgcccagaatggccgcaagtgccagtatgtgggggcctgcccagatggagacaagtgccgctgtgcccatggacaagaggaactgaacgagtggctagaccggcgtgaggtgctgaagcaaaagctggccaaggcccgcaaggacgatgcttctgtgtccaagggatgatggacttcggcaaatacaacttcctgctgcaagaggatggggacaccactgctgccaccccagaagcccccattgctgcaactgctactgctgccaccaccaccaccaccggggagtaggaccagatctcagctgtgggcaaagtcctggggttgggggtgggttgggggacaggggaccaccccatcaggcactctccagtcccctgtcccatcctttccacccccaactccccaggtgtgcgtatgcaggtcatgtactacagccccaagttgtcccagggtccttgtcctgtcaaaatggggacagcccctccccaagtgtagatctcctggttggagagggaggggcctggcctggggagcctggggtcccacttgaatctgcagcaggagggtccttctccctttctacttcacgtctccctttccctggagtagatcaggacacagcagagggcaggaggccctcattagcttaaaatatagtgagatggagttggagacactatactggttacttgctacctggggcctcagttttctgctttgtgaaaggggcaagggtgaaggtagatgataatctgaagctagaccaaggactctaggtgctcctaacagtcatcccatacccagccatctttgtgagccactattgtagacgtgaagatctggtcaaaagaccccacccattagcaactggagcctctgggctcctcagccccatgtagcatacctggcaaccaagaaagggctgctgagacaagagctggtcttgttagcactatggggggatgttggtggggtaagtggcagagcttgtatttccaaaagctttcacagataggtggcagaatacaggcaccatgagctcaggttctgtacaaggttcaaagcatggagagagtccaggtaatattaagatcagggaggtgatccatgggccactatgggccatagcctctctttcctggggacctactgtagtcttctccaaaagacccaaatatactattatgcctgtctatcccagcccccctttatcccactccccatgagtagacacagcctcccctggctcccctgagacattccagaatgctccacaccactggccataagaaatggggggcctccagaaggaactagaaagtaaggctatcaaggagtgagatggaatgaacagactcctctttttcctgcagccagggttgctagtgtttgatggcataatgataggcacctggggcacaaagggcccattcctcatgctgccactgcccaaccttctcccagtaaccatggcatgcatcttttcctctccctgccccgttttccctgccctcagctggccagcactgcagagcttgggtgctggcagcgtggctggaggggaggtgggaccacatccaaggtggggactgtggctgtgaaagtcgatgatacttgttctcctgacctgtggtgttgcagtctgtcgtcaccagccttgtttttagtgtgtatatatgttgcccctgtgatgcatatatacacgggtattaaatatatcgctctatataatattatatatgtgtgtggtatccaagggatctcttctaatgagggctaaagataaagaatttggcaaaaaaaaaaaatagcagacatccctgtgagttttgggtactgatgaggtcatctggctatttaggggactggtactggagccatggctcagaaatgatttaaggcagaaacggcatggtggcccaccacctggcctctggctggaaggctcagagttgaatcgggagcctaggaggcaagaatgagacagcatatcagacatggattggggcagtgggagggatgctgcatttctcagctgggcagtaatcaacctaatggacctttttaaatgtctgtgttaaaatttaagaataccacactttaatattaaatatcataaggtctagtatcttgataataatgtagatgttttaataacaatttttgtccttcttaaaataaaaccagagagaaacttgc

SEQ ID NO: 810 - DNA, 2582 bp, Cricetulus griseus
cccgggagcagatctccaggtccacacacagcaacctctccaagactacacccaaagcacttgtagtaggcaaagaccatgagtccaaaaacagccagctattggctaccagccagaagttcaggaaaacacagccccatctcttgcaaaccgcaagaacatggacctcgccaagtcagggatcaagattctcgtgcctaagagccccgtaaagggcaggacctcggtggacggctttcagggggagagccctgagaagctggaccctatagagcaaggtcccgaggacaccacagcaccagaggtgactgcagagaagcccgttggagctttgctgggccctggtgcagaacgagccaggatggggagcaggccccgaatacatccactagtgcctcaggtttctggccccgtgactgctgccatggccacgggcttagctgttaatggaaaaggtacatctccgttcatggatgcgctaacagccaatggaacagccaccatacagacatctgttacaggagtgacagccggaaaaaggaaatttattgacgacagaagagaccaaccttttgacaagcgcttgcgtttcagtgtgaggcagacagagagtgcctacagatacagagatattgtcgtcaggaagcaagatggcttcacccacatcgtctttgttgtggtctggactttatttattttatacggcgtctcacggacgacagaaagagagaaagcactaagatggcagatgctatcagaaacttcgtgaatactttcattcagtttaagaagcctattattgtagcagttaatggcccagccattggactaggagcatccatattgcctctttgtgatgtggtttgggctaacgaaaaggcttggtttcaaacaccctataccaccttcggacagagtccagatggctgctctaccgttatgtttcccaagattatgggaggagcgtctgcaaatgaaatgctgctcagtgggcgcaagctgacggcacaggaggcgtgtggcaagggcctggtctcccaggtgttttggccagggaccttcacccaggaagtcatggttcgcatcaaggagctggcctcatgtaacccagttgtcctggaggaatccaaagccctggtacgctgtaacatgaagatggaactggagcaggccaacgagagagaatgtgaagtgctgaagaagatctggggctccgcccagggcatggactccatgttaaagtacttgcagaggaaaatcgatgagttttgattggcaggctgagcaggacatcagtggctcccacttgccatggccatcctcaacagtaactcatgcttggaagcaggactagaagcatccaagctatttattaccgaggagtttttaagtactgtaactttaaaataactacaaagcttctttgtccaagcgtctttatttatactcatgtatacacagtataaaaatgtaattgagcaccaggctgctcttagaagctctaattttcttgtaagctagttgtgggggtttgtgttgtgttttttttaaaaggaattatgttttcattttggatgacagaagagtttgcaataatgtttgttttactcatttggttttttttaaatctagatcacagaccctaaagagtgctagccagcctcaccccccccctctgcctagacagatgcagaaatatctgaaacatgttccttcatctgggggagatgggggggtgcaagtacctcgatgctagaaaaaaaattctaatcaaaatgaaaaccaactttgtaaggaaaggcatcattgatgaaaatcccacaccatgcagagcccagtgtctggatgagtcactccataacctgagtgctacttgctaagttatgaattagcattggtgggcttaaatcgttttttctgacccttttgaaaaaataactacgtaagtgcttcttgtggctgggtgaggaatactactttgcatagttttgtctgtctatctgcaaatatgattgatgtattacaccaaaaagtatttttatgtttataaagtgtaatttttaggttcacttagaatatattttatttaatttaaaattctcttggcacactattaaatacagaaactcctttcaaaacagaaaagaactaccttatatttgacctttattgtttgcggtctctgcttttatgtctgccgtatactgtgcacagtatcgtgttcacgagtaccccatggagtggggactgattcctgactacaggcgcctattactagttaggcttctgggcttgcaatcatattgaatgtatgaagattgaaataaaatcgaaaccttatttttgtacagttttgaagtttatactcagaactgacgcctccccagcgtgtggagcgctgtgcagtgtgtaaatctgcctttaccgtggatgggttggtacagtatttttgcatctgtgggacctactcttttgttcagtagtttgaactatatataaactgtacaatctgtaaagtttttatagaataaatattcagctgtgaaaactggttaaataaaactaatatttcttaacacaaa

SEQ ID NO: 811 - DNA, 2582 bp, Cricetulus griseus
cgagccttgcctctacctccgtcgtttgcctcctagattttcggctggaagaccacagccccggctctcagccctcgctccagcttcgccagtagctcggccagcgacgcaagcaagccgtcgagcccccggggcaggcctgctgctagacgggccggggccggcggagccggaggtagccggccgtgccagtcaatcggaccagtcggcatcaagcatgggctatgaccagcgccacgggagcccgctgcccgcggggccgtgcctgtttcgggcctccccttgaatactgctccggcgggctactcctccggaggggttccgtccacctacccggagctccatgccgccctcgaccgactgtgcgctcatcggcccgtggggttcggctgccaggagagccgccactcgtaccccccagccctgggcagccccggagccctagccggagctgtggtgggaacagcggggcccttggagagacgtggggcgcagcccggacgacactcagttacgggctacggggactgcgccgcggggcccgttaccaggacgagctaacagcactgctgcgcttgaccgtggctaccggtgggcgagaagccggtgcccgcggggaaccctcggggattgagccgtcgggtctggaggagtctgctggtcccttcgttccggaggcctcccgagcccggatgagggagccagaggccagagaagattactttggcacctgtatcaagtgcaacaaaggcatctacgggcagagcaatgcctgccaggccctggacagcctctaccacacccagtgctttgtctgctgttcctgtggacgaactttgcgctgcaaggctttctacagcgtcaatggctcggtctactgtgaggaagaatatctgttttcagggtttcaggaggcagctgagaagtgctgtgtctgtggccacttgattttagagaagatcctacaggccatggggaaatcctatcacccaggctgcttccgatgcatcgtttgtaacaagtgcctggatggcgtccccttcacagtggacttctccaaccaggtgtactgtgtcactgactaccacaaaattatgccccaaaatgtgcagcctgtggacaacccatcctcccctcagagggctgtgaggacatcgtgagggtgatatccatggaccgtgattatcactttgagtgctaccactgtgaggactgccgcatgcagctgagtgacgaggaaggttgctgctgtttccctcttgatggacatttgctctgccatggctgtcacatgcagcggctcagtgcccgacagccccctgccaattatatctgagctgtacttcctgctgctaccatcacccctgtggagaaattctctggccagttgaggcaaggaatgcattctgcaatccttgtgaagagttctctggggaggccccaaaggccagagacccaaagatcctaacattccaaataggctgtggaggagggaccttctgattgccaggagggttggctggtcttccttgtgtgcagcctgggctgtgcaaatgcctcctagcacacacgagcgggtttcagtacttcccaacatcagattctgttgtatatctccagtgtatgtttctataaattcaagcaacgtcccagcgctggatcactcgagagggcatcacagaaaccacccccagtctgttgtaccctacacaaggggtcagccaggcctttcccacagtgccctatctttgcatgaagggctgggagccctggacttcatgatgagtcatttcttggctgtctccctaaggactagagagcttcccatatgtctgctgggactgggaccagctctgggggtgctgctgcccgtgttgcctgtttctcagggacctggggaggctgagtggggcctgtccttggttgctgttttgctcagatgggggaagtaatgagcaggtctctgggtgtgaagcttcctgggtggaatgtccaggaagcttcaggctggccccacgcggggttgaagtgcactgagccctctagcccagcatgtgtggatgcgtttgtatccgcgtgtgcctgtgcacctccctcggggactccttttttctcaggtgacttttacacttagttctctagcagtagcttatcgttggaggcccacacacatctagggattgagcattggatctgttacagccccacagctcaaggctttggggaagctggagagaacaaaatggtttgacttggttctagtccgcttggctgaggcttgaattcacctaagtctggatgtggcgaagtcagttcacttgctggctgaaagttcaattcatttgatgagccggttgccaagagctcgatccccttctgagtgttttatagccgcctaaatgttctattctcttcattacaccgagcagcattcagtggtctctgcctgttcatcaagagtctgtatagttctggctgtcctggaactcactctgtagaccaaggctggccttgaactcacagagatctgcctgcctctgcctcccaagtgctgggattaaaggctatgggccaccactgcc

SEQ ID NO: 812 - DNA, 2581 bp, Cricetulus griseus
  modified_base (2542)..(2542): a, c, t, g, unknown or other
  modified_base (2570)..(2570): a, c, t, g, unknown or other
gaacactcctgtccacgtccacataaaaaaactcccgaaaccgtcagcagccaacagccagaaatctcataagcgcggaatgaaaggggacaccgtgaatgtacggtggagtgtccgggtgaaaaccaaggtaccttggatgccccctggaaaatcatctgcccggcatgtgggatgcaagtgggagaatccacctcactgcctggagatcacaccaccatcttcagaaaagctggtctcggtaatgcgattaagtgacctctctacagaagacgacgattcaggtcactgtaaaatgaaccgttacgataagaagattgacagtctaatgaatgcggtcgttgtctcaaatctgaggtcaagatgcagaaaggagaacgtacaaatggaccaaaaggttcctaggaggagcggaaggaggagttggagggaggtggctcgatgaactggcagagacaagagcatgaaaacacagtgctcagacacaacattgagcgcatcaaggaggagaaggactttactatgcttcagaagaaacacctccagcaggagaaggagtgcctcatgtcaaaattggtagaggctgaaatggatggagcagccgctgccaagcaagtcatggctttgaaggataccatcggaaagttgaaaaccgagaaacagatgacttgcactgacatcaacaccttaacgaggcagaaggaacttctcctgcagaaactgagcacttttgaagaaaccaaccgcaccctccgagatctgctgcgagaacaacactgcaaagagaaggattctgagagactaatggagcaacaaggtgcattgctgaagcgtctggcagaggcggactcagagaaagcgcgcctgctgttactgctgcaagacaaggacaagggaagtggaagagcttctccaggagatacaatgtgagaaggctcaagcaaagacagcatctgagctctctaagtccatggagtccatgcgtggacatctacaggcacagctccggtgcaaagaggctgagaacagtcgcctgtgcatgcagatcaagaacttggagcgcagtgggaaccagcacaaggcggaagtggaagccatcatggagcagctaaaagaactgaagcaaaagggagaccgagacaaagagaccctgaagaaggccatccgagcccagaaggagcgagctgagaagagtgaggagtatgccgagcagttacatgtgcagcttgctgacaaggacctttatgttgccgaagctttatctactctggagtcatggaggagccgctacaaccaggttgtgaaagacaaaggagaccttgagttggagattatcgtcttaaatgaccgggtgacagatcttgtaaaccaacaacaaagcttggaggagaagatgcgggaagaccgggacagcctggtggagagactgcaccggcagaccgccgagtattctgcattcaagctggagaacgagaggctcaaggctagctttgcccctatggaggacaagctcaaccaggctcacctggaggtccagcagctgaaggcatcggtgaagaactacgaggggatgatcgacaactataagagccaggtgatgaaaaccagattggaggctgatgaagtggctgcccagctagagcgctgtgataaagagaacaagatccttaaagatgagatgaacaaagaaattgaggcggcccgccggcagttccagtcgcagctggctgacctgcaacaactacctgacatcctcaagatcacagaggccaagttggccgagtgccaagaccagctgcagggctacgagaggaagaatatcgacctcacagccatcatttcagacctgcgcagccggatcgaacaccagggggacaagctggagatggcgagagagaaacagcaggcttcccagaaggaaaataaacaactgagtctgaaggtggatgaactggagaggaaactggaggccaccagcgcccagaatgtcgagttcctacaggtgattgccaagagggaagaggcaatccaccaggctcagttgcggctggaggagaaaacacgggagtgcgggtccttggcaaggcagctggagagtgccattgaagatgccaggcggcaggtggaacaaaccaaggagcaggccctctccaaggagcgagcagcccagagcaaaatcctggatcttgagacccagttgagcaggaccaagacagaacttggccagctgcggcggactcgtgatgatgcggatcgtcgataccaaagccggctacaggatctgaaagaccgcttggaacagtctgagagcaccaaccgcagcatgcagaattatgtccaattcctcaagtcctcctatgccaacgtatttggggatggcccttatacatcctcttatctgacgagctcacccattcgctcccgatctccccctgcctgaggccacctgtccagagtctaaagcccttgcctgatgccaggaactgaggagttgccatcctatagctggcaagcccactggctttcattaattaattttttnttttatttttgtatcaataaaaaaaaanaaaaaaaaaaa

SEQ ID NO: 813 - DNA, 2581 bp, Cricetulus griseus
  modified_base (353)..(353): a, c, t, g, unknown or other
aaataagcctggttctgttaaacctgcacaaacttattgctgttaaggagactctgactacagagctgcagacaaggaaagaaaaggatacttcaaatgaaaatcgccagaaactaagaatattttatcagtttctttataataataatacaagacaacagacggaagccagagatgacctgcactgcccttggtgcactctcaactgccgtaagctgtatagtttactcaagcatctaaaaactctgccatagcaggtttatcttcaattatgtataccatccaaaaggtgctaggatagatgtctctatcaatgagtgttatgatggctcctatgcaggaaatcctcaggntatcaccgccaacctggatttgcttttatcgaaatggaccagtaaaagagaacacctgcttacctcttcggcctcaagaaatggaagtagatagtgaagatgaaaaagatccagaatggctgagggaaaaaactattactcaaattgaagaatttttctgatgtgaatgaaggagagaaagaagtaatgaaactgtggaatctccatgtcatgaagcatggatttattgctgacaatcaaaatgaatcatgcctgtatgctgttttgtagaaaattatggacaagaaaataaattaaagaaagaactttatgcagcaaaagctagaaaaaggagaatctgcaacccctgcaaatgaagaaataactgaggaacaaaacgggacagcaaatggattcagtgaaactaattcaaaagagaaagctttggaaacggatggtgtctcaggggttccaaaacagagcaagaaacagaaactctgaggtctaaccccatgatgtggacaaacactgaaattgcttctagggaattcagccttgaagaagagttgtggttttaggttgtttggtttttaatcatggatttggaacaggcagagttagatgaagtcagtgatttcagcatggaggctctgtgggttgcttcacttcattctcgagtgtttatcagctttagtgatacaatttggtttaagcctgaaaagcagtaaaatacttcaaggaattttttttaactgaaacagtcaatttatgaaatatattggattaatctagaaatttcacacctaaattataaggcatttgtgacagtctgtttttctgcttttttaattatgagaggttttctggggagggaaggttggggtgtcattctcttttagaaatggaggaatttttgtgtaaattgtttacattgccactttttcccaaaagttgacccttgattctagaaatcatttttaattaggtagtaccatggaaaattctcctgtgcacctctctgcattaggattataaagcaagaaaacagtttgagattttatgagatgctacttgggtgggtggggtgtgtgtccctgcgaatgaaccagatgttagaccttgtttccttgagatgtgctttatgattagaatatccaatgcagataagctgacttgaattgttttgagcgattttccctgtgttgtgtgttttatgcacatgtgtgcagttggattttctccaacagaaagcggtttcactactggcataggtttttattccaactccaagcactgtggttgaataacatcacctcaattttttattatcctttaaagatattgcattttcatattctttatttataaaggatcaatgctgctgtaaataactggtatttttaatgttttaatttcattccaccaccatcagatgcagttccctattttgtttactgaaggggcataagctttctcatggtgtcttcagagatttataaatgtaaatactgatttggctggtctttacgatgtgtttcactgtgaggctatttaaatagtgtggatgtgatttgtcatccagtattaagttcttagttactggtttttgtgtttaaaatatagagaagagggaaactgcagtgtcgctgcaaactccctgggtgtgaagctctcctcctgacttcactgagctgtcatttggcctctggttgtgggttctgagcatttttcttgggctttaatttgctaaagctgtgcacatatgtaaaaaaaaaaatagattattttagggaagatgtagatgtagaattattgcttatgtcatttcttaagcagttatgctcttaatgcttaaaagaaggctagcattgtttgcacacacacaaaaaaaattggtgatttccctcccctgaatagtaatgaaattacttctgttgagtaaactttttatgtcatcttataataaaagctgaaaaatccctttgttctatttataaaaaaaaaaagcttttctatatgtacccttgataacagattttgaagaaatcatgtaagatgataaagcatttgaatggtacaatagatgtaaaaaaattcagtttaaaagaaacgtttgtttttacattaaatgtttatttgaaatcaaatgattttgtacataaagttcgataatataaagctgttttcttcaaaaaaaaaaaaaaaaaaaaaaaaaaaaaaaaaaaaaaaaaaaaaaaaaaaaaaaaaaa

SEQ ID NO: 814 - DNA, 2581 bp, Cricetulus griseus
  modified_base (15)..(15): a, c, t, g, unknown or other
  modified_base (23)..(23): a, c, t, g, unknown or other
atcctggtgctgggngccatgcnagggctgcatgcagggaatcggtgccctatctaccggagctgatcccacacctcatccagtgcctgtcagcaagaaggccctggtacgctccattgcctgctggacgctgagccgctatgcccactgggtagtcagccagccacctgacatgcacctcaagcctctgatgacagagctgctcaagcgtatcctggatggcaacaagagggtacaggaggcagcctgcagtgcctttgctactttggaggtcatgacattgctcttccagtggcatgcaggattccatgcctgaggtccggcagagctccttcgcccttctgggagaccttaccaaagcctgctttatccacgtcaagccctgtatcgctgagttcatgcctatcctgggcaccaacctgaaccctgagttcatctctgtctgtaacaatgccacctgggccattggagagatctgcatgcagatggggcagagatgcagccctatgtgcagatggtcctcaacaatctggtggagatcattaacagacccaacacgcccaagactgctggggaatgtgctgcttccagaagtcactgtgccctggtccaggggggctagggaggagtgagtgggacctaaattcagatgctacctagtttgtgcatctgtccatctgttggtccacttgccccaccgggcctgacgagtgggcaggtgggtggggactcctcatcctacaaatagggaggggggtgggacttcttggtgggcaagagttctctaggctctaatctgggtcatctcaggcagcccattgggccagccatgtgggagggaggaatcctaaggcctaccgaatccggtgtcagataaggcaagggaattacaggtggggaggggggttccttgtagagaagcatacactcacatgtacacatgtggacacacgcatgtgcaggcaccacagccagctaggctgggccagcggccccaccatttcctcgactgcatggagacagtagaattagtgaacccccaaattatgcctatggccttctgtgtaccttgcatctagagtataagaagcttccgctgttttgccggaattggtggtgattgggagggctgggaggtttgggggacctcagctgggcccccaagggccaagggaggagggcggtcattttggggctaccctctcagcacttgcacactttggacctgctccatacacttcctgccagcttcatggcagcctcatttagtgtgtccccatctttgttacatcccagccagcagcagaatggggaccattggagctgctgggactggcttgaggctaccctataggcttttcctgtgctccaaaggtatttaaaggcataggcctgggactagttttccttaagagggctaagggcagccagagctgctggcatttcttggatcgctcttgaaacagtttcaaggatagttgagttctctgtccctgagaacttccttctcaagagctggggcaacagcgggtgattggtgaggacaaaggacaaaggtttactgggtccagcaagatttgaagtcttggaggagcagggtgtacccagggcctcaaactttgtcccttttgggatttaatgctcatcacagtgtccactggactcagaccccaccagattggtacactaattctaaaaatgcttgaagaaattggtaggggattccatcaaggtgggaggggcattctgaggaggggggcatggattatttccatattggctgtggaaatcagccttgcaaggtccctgaacgtttatcctccatccccttccttgcttcctactactttgggggcccattatattttgggctttgacccaagttctgccccttagggcctgttccatcatccctccaggacctggaccttatcccatccaggccacgtgtctgctctcaagtagggtcgggccctgcctctattcccagggacacttagtgcacattccataactcaactggtggcccccaatcccctccagcctcaaaattgagcaggtctctggaagccatttgtagggaaaaaaaattttttttaaagaaaaataccattagctttctggtaattccacttctttggagcatcctctgctggatcttggggtgtattgatggattgactgtctgatggtgttgtgaccacctctctgcccaaggtgggggtgccaaccaccttcaggaaagggggagcccaattcttgtattttcttttttattttattttattttattatttttttaaaataaattatttaattttttaatttatttttagttggttttttgcacaatgaagtttcagtttcttaaccttccttgcccagggctgcagatacagactgaccttgatctgcagtgccacccccaccccccatttccctgagactttcattaccattaccctgagggctcccaggtctgtccgtctgttactgtgctgtgctggggactagcgcctcggtggcgtgagattccacttgtgtagaactttgttgagtaaaggtcagtttcttgtagaaa

SEQ ID NO: 815 - DNA, 2579 bp, Cricetulus griseus
atgaaaaatacgtaaacagcatttgggaccttctgaaaaaatgcaattcaagaaatccagcgtaagaataacagtggtcttagttttgaggagctctatagaaatgcatatacaatggttttgcataaacatggagaaaaagctctacactggactaagagaagttgttactgaacatctcataaataaggtacgagaagatgtactaaattcattgaataacaactttcttcaaacattaaatcaagcttggaatgatcatcaaacagccatggtgatgattagagacatactaatgtatatggaccgtgtgtatgtacaacaaaataatgtagaaaatgtctacaatttgggattaataatttttcgagatcaagttgtacgttatgggtgtattagggatcatcttcggcaaactttattggatatgattgccagagagcggaaaaggagaagttgtagacagaggagcaataagaaaatgcttgccagatgttaatgatttttaggtctttgaaggaagatcagtctatgaagaagattttgaggctccttttttggtaaatgtctgcagaattttttcagatggaaagccagaaatttttagcagaaaacagtgcttcagtatatataaagaaagtagaggctagaattaacgaggaaatagagcgggtgatgcactgccttgacaaatccacagaagagcccattgtgaaggtagttgagagggagctcatttccaagcacatgaagactattgtagaaatggagaattctgggctagtacatatgttgaaaaacggaaagacagaagaccttgcttgcatgtacaaattatttagtcgtgtgccaaatggtttgaagacaatgtgtgaatgtatgagttcttatttgagggaacaaggaaaagctcttgtttccgaggaaggagaaggaaagaatcctgttgactatatccagggcttattggatctgaaaagtaggtttgatcgcttcctccaagaatccttcaataatgaccggctctttaaacagactattgctggggactttgagtatttcctaaacctcaactccaggtctcctgaatacctctcattatttattgatgataagctgaaaaagggagtcaaagggctaacagaacaagaagtagaaacgatattggataaggcaatggtcctttttaggtttatgcaagaaaaagatgtatttgaacgttattataaacaacacctggcaaggagactgctcacaaataaaagtgtttctgatgattctgaaaaaaatatgatttctaaattaaagacggagtgtggatgtcaattcacatcaaaactggaaggaatgtttagggacatgagcatctcaaacacaactatggatgagttcaggcaacatctacaggcaacgggggtatctttaggtggtgttgatctcacagtccgggttctcacaacgggatattggcccactcagtcagccacaccaaagtgcaacatcccaccagcaccaagacatgcttttgagatatttagaagattctacttagccaaacacagtggtcgacagctcacactccagcatcacatgggttctgcagatctcaatgccaccttttatggtccagttaaaaaggaagacggatctgaggttggtgttggcggtgcacaagtaactggttctaatacccggaagcacatactgcaagtctccactttccagatgaccatattaatgctctttaataatagagagaaatacacatttgaggaaattcaacaagagacagatatccctgaaagagaacttgttagagccctccagtccctcgcctgtggtaaaccaacacagcgggtcctcacaaaagaacccaagtcaaaggagatagaaagtggccacatatttacagttaacgatcagttcacatccaaactacacagagtcaagattcaaacagttgcagccaaacaaggtgaatctgacccagaaaggaaagaaacaagacagaaagtagatgatgacagaaaacatgagatagaagctgctatagtgcgaataatgaagtctaggaagaagatgcagcacaatgttttagtagcagaggtaactcaacaattgaaggctcgattcttaccaagtccagttgttattaagaaacgtattgaaggacttattgagagagaatatttggcacgaacacctgaggatcgcaaagtatacacatacgtagcataaaatgcattcagaaatttgatttattcttggactgtactcttcgcatggactgggaagttcttttaaatcattactattaagacgaccatctcttctgttaaattgcagtacatgttatagaccactcagatcaagcctctcctccctcttgagagttttcaacatcagttgattgagcttcaggctttccaacgttatccctgtagagatcatctttacagttcctcggggaaaatgtgaatgtgccgcgttttgttttcaatattgtatgaaaacaaggaaaaaaataaaacaaatttaagaaaacacagctacaattaaaataaaattgttaggaattt

SEQ ID NO: 816 - DNA, 2577 bp, Cricetulus griseus
  modified_base (2325)..(2325): a, c, t, g, unknown or other
  modified_base (2372)..(2372): a, c, t, g, unknown or other
ttctccaagtaccggcagcgtatcaagcagcatgccgatgcggtccatctcatctcgcgtgtgacattccattataagagaagcagtcttagttactttggaggtgtgtgttctcgcatcagaggggtcggtgtaaatgagtatggtcttccaatggcagtggcacaagtgttatcgcagagcctggctcaaaaccttggaatccagtgggaaccttctagtaggaagccaaaatgtgaatgcatagagtcctggggcggctgcatcatggaggaaacaggggtatcacactcccgaaagttctcaaagtgcagcatctccgagtacagggactttttacagaggggtggcggggcctgccttttcaacaggccaacaaagctgtttgagcccacagaatgtggaaatggatatgtagaggccggggaggaatgtgattgtggtttccatgtggaatgctatggagtttgctgtaagaagcactggagactcgggcaagtgcccaccaaatctccataaacaagatggctatgcctgcaatcaaaatcagggtcgctgctacgaatggggagtgcaagacaagggacaaccagtgtcagtacatctggggaacaaaggctgcagggtcagacaagttctgctatgaaaagctgaaacacggaaggcactgagaagggtaactgtggcaaggatggagaccgatggatccaatgcagcaaacatgacgtgttctgtggatttttactgtgcaccaatcttactcgagcaccaaggattggtcaacttcaaggagagatcatcccgacgtccttctaccatcaaggccgagtcattgactgcagtggtgctcacgtagttttagatgatgacacagatgtgggctacgtagaagatgggactccatgtggcccatccatgatgtgtttagatcggaagtgcctacagattcaagccctaaatatgagcagctgcccacttgactccaagggtaaagtctgttcgggccatggggtgtgtagtaacgaagccacctgcatctgtgacttcacttgggcaggcacggactgcagcatcagggatccagtgcggaaccccaatcccccaaaggacgaaggacctaagggtcctagtgccaccaatctcataataggctccatcgctggtgccatcctggtagcagctattgtccttgggggcacaggctggggatttaaaaacgtcaagaagaggaggttcgatccaacacagcaaggccccatctgaatcagccgcactgcaggcatgccaccttgtactgttgggttctgggtatgacatgtttcaaccatgctgccagaactcttaagtctaataaacaagaccaatgggtggtaatgaccatggagctcaaatgtgggaatggggatggggtacaagacaactgcccctttagaaaataacttcaaagtaaaccctcctatccacctgtcaaacgaaagggggagggagttaaggaccatgtacaattaaaaaaacaaagagcagacatcttgattgctatatactaccccagaccataacctaacatcttaatcctcggatggctttctgagaaacaggtgctatgcaggtatgcagtcttttgcttgaacttgctgtttgcttatatagtgataacagggctatctataaggtttattggccttattcctggttttataagacacaggttgacccttttactgaatggcagtggcttagcttggaggaagtttggaggaaactcagatgacttggtatctctccctgttgttgcattgcttaggggtccacttcactatgagataccaagcagctgccaaccacaccgtactcatttccctactattttcaaggcaccgtggtgacttttatgtacatacgacaaatgtcagtgtaactttttgttacactgtcagtttcataggtacaaacctatgctccaatggttaaatttatctgtgtgtatgtgtaaaatgcagaagctttaaactatgcgtgtatggacatgaagggtagtgcaatcatactgtacacaatgggttcgaatcattttcagtggcattaggttatgtggtttcagcctctttgcttcattttttcttgcacatgccattcatttgcttattttgtgatgtgaatactttttcttattaatttgaattcaaagcacaagcccaccattgtttaatattacccaacaagagtgttaagtgatgaccaagttcccgtttcacttgctatccttttgctgcgataattaatgacgcttggatggggaggtgtgcgctaacttctttttttttntttttcttcttttttttccttttcttcttcttcttcttttttttttnttttttttactataggatgttgtagctttgtgcattgattggtttttcttaactcttgtttctgtgtgttcttgcatcattggttaaatggccacgtgtctactattatctgggattcagcagtctcaattaaaggctcactaaaaatcaaagcagtcaatggagcaaaataaaatctctggttatcagtaaacatgttctagga

SEQ ID NO: 817 - DNA, 2576 bp, Cricetulus griseus
ggaagacctaccctactgtcaagatctgtaactatgagggaccagccaagattgaggtggacctggtaacacacagtgacccacctcgtgcgcatgcccacagtctggtgggcaagcagtgctcagagctgggggtctgcgctgtgtctgtaggacccaaggacatgactgctcagtttaataatctgggtgtcctgcacgtaaccaagaagaacatgatggagattatgattcagaaacttcaaaggcagcggcttcgttccagtccgcagggccttacagaggctgagcggagggagctggagcaggaggccaaggagctgaagaaagtaatggacctgagcatcgttcggctgcgcttctccgctttcctccgagctagcgatggctccttctccttgcctctgaagccagttatctcccagcccatccatgacagcaagtctccaggggcctcaaacctgaagatttcccgaatggacaaaacagcaggttctgtgcgtggtggtgatgaagtttatttgctttgtgataaggtgcagaaagatgacattgaggttcggttctatgaggatgacgagaatgggtggcaagcctttggggacttctctcctacagacgttcataaacagtatgccattgtgttccggacaccgccgtatcacaagatgaagatagagagacctgtgacggtgttcctgcagctgaaacgcaagcgtggggggacgtctccgactccaaacagttcacctattaccctctggtggaagacaaggaggaagtgcagcggaagcggaggaaggccttgcccaccttctcccaacccttcgggggcggatcccacatgggtgggggttctgggggctctgctgggggttatggaggcgctggaggaggtggcagcctcggctttttcccctccttgacctacagcccctaccagtccggcgcggccccaatgggctgctaccagggtggcgggggcggagcgcagatggccggctcagggcggggcgtggatgccggggaggtggccgaagatccgagcgcgcccccgaggtcccccagggcgagccgccggccctagacgcgctgcagcgagctcgcgagtacaacgcgcgcctgttcggtctggcgcagcgcagcgcccgagcgttgctggactacggcgtcaccgccgacgcgcgcgctctgctggcgggacagcgccacctgctgacggcccaggatgagaacggagacacgccactgcacctggccattatccatgggcagactggagtcattgagcagatagcccatgtcatctgtcatgcccagtaccttggggtcatcaacctcactaaccacctgcaccagacacctctgcacctagcagtaatcactgggcagacaagggtggtgagcttcctgctgcaggtgggtgcagaccccacactgctggatcgacatggagactcggctgtgcacctggctctgcgggcaggtgctgaagccctaggcctgttgcaggtgctgttgcatagtggggcccatgctgtgccccaaatattgcacatgcctgattttgcaggactatatccagtacacctggcagtgcatgcccggagccccgagtgcctcgatctgctagttgacagaggagctgaagtggaggcagcagagaggcaagggggccgaacacccctgcatctagccacagagatggaggagctgggtttggtcacccatctgattaccaagctccatgctaacgtgaacgcccggacatttgctggaaacacacccctccacctggcagctggacttggatccccaaccctcactcgcctcctcctaaaggctggtgctgacatccatgcagagaacggggagcctctgtgccctctgccctcaccccccacctctgggagcgactctgactctgaagggcctgagagggatacccaaagaaacttccgggggcatacacctctcgacctcacgtgcagcaccaaggtgaagactctgctgctaaatgctgctaagagcaccatggagccacccctgaccccacccagccctgcagggccagggttgtcactcggggatgcagccctgcagaacctggagcagctgctagatgggccagaagcccagggcagctgggcagaactggcagagcgactggggctgagaagtctggtggacacatacaggaagaccccctcacccagtggcagcctcctgcgtagttacaagctggctggtggggacttgggggatctgctgaaggccttgaaggacatgggtatacacgagggagtgaagctgctggaaggtcccgagacccgagacaagctgcccagcacagaggcaaaagaagacagtgcctacgggagccagtcggtggagcaggaggcagagaagctgtgtccaccccccgagccaccaggagggctctgccacgggcacccccagcctcaggtgcactgatggtgccaacgtcttccacctggacccctctgtacagcacccctgcttcatctgtatcttatttaacacctcaagccacacctcagtgggccaaataaagg

SEQ ID NO: 818 - DNA, 2576 bp, Cricetulus griseus
ggatatcgacgtcgtgatccagaagtccagagccgagaaagactgcctgtttgcagatttcagatactcagattccacctttactttcacctacgttggcggccccaaaagtgtgtcctactcagtgcacgtctcagaagattatccagacaatacatatgtgtcaagttcagaaaatgatgaggatgtcctagtcactacagacccaattcctgtcatttccatagaatagcaacagaattaagaaaaacaaatgatattaattgttgtttatccataagatccaaattacaaaaggaaatgggaggagtcaaggcagaacagtacagtggaagaagactctgagggtgacaatgactctagaagaatttattaactacactgttcacttacacagtatttaaatggcccagtgcccacagttgatgtctttcagatctctacaaaagagcgattcggattgggacatcagctaaaaaagatcatgcagaccttcgttactcagcagtggaaacagagcaaagagaagtccagttgcctgcacggtaagaagctgtcagagaagaaggtgaagtctcctctgcatttgttttctaccttgcgcaggtcgcccagctatcctccccctggttgtggcaaaagtaaatccaaattgaaatccgaacaagatggcatctccaaaacccacaagctgctgcggaggacttgctccagcactgtcaaagctgatgacgtgtgcgccaagtcgcacaggacctttgggcgctcgctgtccagcgaccccagggccgagcaggcgatgtccaccatcaaatcgcacaaactcttgggccggccctgccccacagcgggcaagcaggaggactgcctcacgctcaagtcgcataagttattgactcgctcttgctcgggtgacccgcgatgtgagcacaataccaacctgaagccccacaaactgctaagcaggtcttactccagtaatctcagaatggaagagttatatgggctgaaaaatcacaagttactcagcaagtcttactccggcgcccccaagtcatcgaaaaacgagcatttcaaggaacccaacgcagagggcaggaggctctcgcttacctcagggcttatcggtattttaacaccatcatcgtcttcttcccagcctcctacaaatggtgcaaaatgcattccaatccgagaccgaggcttcctggtgcagacaattgagtttgctgaacagcggatccccgtattgaatgaatactgtgtggtttgtgatgagccacacgtgtttcaaaatggccccatgcttaggcccacagtgtgtgagagagagctgtgtgtatttgcttttcaaaccctgggggtgatgaatgaagctgctgacgagatagctactggagctcaggtggtagatctactcgtgtccatgtgtagatctgcattggaatctcctaggaaagttgtcattttcgagccatatccttctgtggtagatcccaatgaccctcagatgttggccttcaaccccaggaagaagaactatgatcgagtaatgaaagctctggacagcataacttccatcagagaaatgacacaggcaccctatctggaaatcaagaagcagatggataaacaggacccccttgctcatccacttctgcaatgggtcatctcaagtaacaggtcacatattgtgaaactgccagttaacaggcaactgaagttcatgcatacgccacaccagttcctcctcctcagcagtccaccagccaaagagtccaacttcagagctgctaaaaagctcttcgggagcacgtttgcatttcatggctctcacattgaaaattggcactctatcctgaggaatggtcttgttgttgcctctaacacacgtctgcagctccacggtgcgatgtatgggagcgggatctatcttagtccaatgtcaagcatatcgtttggttactcagggatgaacaagaagcagaaggtatcaaccaaggacgagccagcttcaagtagtaaaaacagcaatgcatcacagtctcagaagaaaggacagcaatcccaattcctacagagtcgtaacttgaaatgcatagccttatgtgaagtgatcacatcacctgacctgcacaaacatggagaaatatgggttgtcccaaacacggatcatgtctgtacacgattcttttttgtctatgaagatggccaggtgggagatgctaatatcaacacacaagaaggaggcattcacaaagagatactccgagtaattggtaatcagactgctactggctagagaaccaccacttaccaggatttgaaagcttcctcgggttcaaagctggattttgaactgaagaagatgataaaaataatttattgttattataaacaaaattaaccctttgaataccaatttttcttttcttagtatttctaaatatttcattaaatacctaaaatggtttaagatttaccaattgtagggttatggaaactagtaataaacattaaacagcccttaaacttaagtttgggttgcatacacaataaacagattagaaaaaaca

SEQ ID NO: 819 - DNA, 2576 bp, Cricetulus griseus
aaggggagcagcggggaatgcgagtgaggtctccgttgcttgcctgacagaacggattcaccagatggaagagaaccagcacagtaccagtgaggagctgcaggcaactctgcaggagctagcggatctccagcagattacccaggaactcaacagtgagaacgaaaggctgggagaggagaaggtcatcctgatggagtcgctgtgtcagcagagtgataagttggaacactttggccggcagattgaatatttccgctctcccttctagatgagcatcacatttcttatgtcatagatgaagacgtaaaaagcgggcgctacatggaactggagcagcggtacatggatttggctgagaatgcccgcttcgagcgagagcagctcctcggtgtccagcagcataccctatcaagaactgaacagccaagataagaaaaggaacttcaccctggctttccaagcagctgaaagtgttggaatcaaatccaccctggacatcaatgagatggcccgcaccgaacgacccgactggcagaacgtaatgctgtatgtcacagccatctacaagtactttgaaacctgagcacacgggaggagctgctgctaccaactagggacctctgcagtcaccaagtgacaccattagctagaacccctaaagctttcagcgactctgggcctcccctgcagggagtatgcctagctctaggcctctgcctaggaactggaactgcagaccagagctcttccacatggccatcctcgggagcaggaagcacagcacacagccagcttacttgcagagaccatcaagcctccatcagtgccctgaagtgtaaagttgttttattataagcaatattgggaaaatagctcctattctgttagtaccaaagttaattgtttcagcaagcatagaaattaaacacaaaatgtgggtgttagcatggcgagggtgaggattcatgcccgcaggggaaggagaaggcgctttagggagctggagattcaagtcacggatggctgcccctccagggcaggagttaagacagtgccttagccctgcaccaggacagccgagcccacaccttcatggagtcctgcatgttggtggggactctggtagagatggctccacgctgtgcctggggtatggggcctacatcacaagccaaggccttactcaattctgttgatttctggctggaatttagcagccccattttgggaataggaagcccttatctcacgtgcctgacacagaagctattctttgaacagtgtcaagacctgttatttccgggatacacttgtttgccacctgcaagacaccactgatggcggaagaccagccatcagtagaaatggggccacagcctctaactagatggatgctgggaatgtctcccaagaagcatgcccagttcaaacatggactgagtgaggttctgtgttcaagcataatgttatatactgggacctgggtgtgtctatgtaacctagagaagaaaggcctctccagtcgtcgttggcccaattctgttcttgctcttgttctgctgacgaagacctgtcagggtgaccatctatgtgagaatcaccatttccaaatgagtctcctctgaatctctgggcttccagtgtctactgtcatttgccttcactgaggcctgtccactgtgcaccagggtgtttgatagccaggctttatttattacatcataaagaagggttgtcttgttaaggagactttcctgggcttgccgttcacaatttctgtccctcgctggctatatgagcctagcctcgtgtcagagtagaagttgccagagttgtctgaaagtatttgcagtaagttggctgctgctgaaggggcttgtctataatagagataacattcctgttctggaatctgtggacttgggataggcctggagccagtagtagggacagacagatggtggcccagggggcctctcctccccccagactccggacacccatcacagccagggccaggctgcccacgtttgtgtgagggcccacaagtctacaggtaactccagaccattgctttttgccttctctaataggcgcctaaaagaacactgttggccctgtgggcaagcttgtagatggccatgtacttttaaaagtagtatttgggagttggtagagcgcctgtctacaatgcacgaggccctgggttgatcccccaccaccagataaactggtcatggtggtgtatgcctgtaattccagtacttgggaagtggaggcaggaagatcaggagtccagtgttactgtcgattatttgatgagtttgatgccagccttggcatgtaagaccctgtccccccaaaaggtgatatttggaggttctctcttattctagggctgcttcctgggaagttccaagatggaagtttacccgcctctcttccctaaagcacaagcttcactacaaagggccagttacctttctacttcctcaatcacgggcttctgctgatgaatgatactttgtcattttgttctagtaaatactcttgaatgtattaaattgtcatgc

SEQ ID NO: 820 - DNA, 2576 bp, Cricetulus griseus
tgggttacaggcgacaaccacaccagttacagcaggtgggcgcggcccaagaccaggagtctccactctgtggcccgctgtgcgtcacggtctcaacagcatagcagcagcaccgggtgagccggcctgggaggagcagcagtgtgagactgaagccgacagcttcctctgtgagttccacttcacaacgtcctgcaggcctttggaggtggatcccccaggtcccgaggctgcccacctctccatcacctacaacacaccattcggcgtccgtggtgcggactttcagactctgccaataggcagctcggctattgtggagtccctcggtttggagctagtgtgtagagcccagcttggaatttcggagggacactggtctcgggaagcgcctggagcctggaactgcagcgtggaaaaaggtggctgcgagtactcgtgcaaccacagcatgggcgagcccagatgcctctgccccacagacaccgtcctgcaggctgatggtcgctcatgcataaaaccggaggtgccctcgtgcactgacctttgcgagcatttttgcgtcgccaacccggacgacccaggctcgtacacctgtatgtgcgagactggctaccagttggcagctgacaaacaccggtgcgaggatgtggacgactgtaggcaggggcccaatccatgcccgcagcgctgtgtcaacaccaagggcggctttgaatgtctctgctatgatggctttgagttggtggatggagagtgcgtggagctcctggatccgtgctacggatctgactgcgaatatcagtgccagccagtgagtcccacagagtacatttgcatctgtgctgagggcttcgcacccaaacccggggaaccgcacaggtgtgaaatgttctgcaatgaaagttcatgcccggctgactgtgaccctaacactcctgatttttgccattgccctgagggctttattctggacgaaggtcacatatgcgtggacattgacgagtgcagtcaagaggaatgctcccgcaatgagtgtcgaaatcttcccggctcctatgagtgcatctgtgggcctgacacagctcttgctggccaggttagcaaggactgtgatcccacccctgttattgaatacaacgaggaccatggctctggggagcccccagtcagtccaacaccaggctctcccacaggtccgccctcagcaaagccagtgcattctggcgttctcattggcatctccatcgccagcctgtccctggtggtggcgcttttggcgcttctatgtcacctgcgcaagaagcagggagccgcacgtgcagagctagagtacaagtgtgcatcaccagccaaggaggtcgtactgcagcatgtaaggactgatcggacgctgcacaagttctgagggactttgctccagagaccccagggtgcctttgtctttcctggttcagtacctcttctctctatctctggcctcccagctgtgctctctggcaacttaaaagcctcctggctgacacaaaaactgataaccggagaggaccctgccccatcctcgtgagaagcaggggtgaggaggacttgaagcaggagagcccagcttcttccaagtggatacgggacacctgggtgggggtgacaaatacaaaactcttatgtgaaacagaaagaaaaaaaaacactaacaaagcaaaagttgtctttttcactggctttatctttattgttgaaagaacgagtctgggtatttttgttattgttgctgttgttttgatttagaatgacaaaacagtaattatttttaagctttttatacaggttcctatagtgttactaatttttgacagtgttgaaaatgtttggatgagtcttagtcctatgttttgttgttgcaataggacattgccatcttcagatgtattgggccacataactatcctgggatgtatgtggtccttaggctggacatatctgagactgacagatggaagcatcttccagcagttttgagttgtatgctttgtgcctagctgactttcaactgctctttgccacttatagtcccaaataaaagcagtgtgctgctttgggagatgtgggaacttgagaatgggcctggagggtgcctggttagggtcttgtcttaatgagctcttggacaatatcttctacttcagagggaccttctagccctggccacgggcctgtacacaagaattgggacctctcttgggatctggctagaattgcaaaatcagtttccaactttctggaggacaataaatgtcagttaataataagtagcaggccatgttaggccaattagtatcaagaaactgaggaatttttcactgcgtagctttgctttctggactaaaaaaaaactaagaatgaacttatatgtcagtgtaaggatcagatgtatcatatgtgtatcttttataagggaaggttttctttactgttttgtaagctcagcatatttgtatatagttatttattggagtttagctggaacacaggcaaagcctttgcttatgatgtcatatgtacaaaataaacagattaca

SEQ ID NO: 821 - DNA, 2575 bp, Cricetulus griseus
tgaggaggagcagcaagccaaaccagagaggcccctgaatggatccttggagaggcaggtcgtcaggacagcccacggttagcctagcagaagtgcttcagactggtctgcctgagaccctgaggatcaaactggagctggatggtgagagtcatatctcggagcttatacagaacagagatctaggtccctggccgcccaactctggtgtggtaccagcctgatggcactcgggtagtcagtgagggacacaatctggaaaactgctgctaccaaggaggagtgcagggtcaccctggctcgttggtctccctctgtacctggctccgggatcaggggtttggtggtcctgtccccagagagaagctatacactggagctgggacctggagaccttcagggtcctctcattgttgttctcggatccaagaccttctcctgccaggcctcacctgtgctccaagttggcatgcaaacttgtgcccactcaggatggaccagaccttctgggatggcaccgcattcacaggcttaagcgggattgtttgttaacagagaccaaaattattgagctggtgattgtggctgataattcagaggtcagaaggtaccccgacttccaacagctgctgaaccggacactagaggtggcgcccctgctagacacattcttccagccccttgaatgtccgggtagcacttgtgggcctagaggcatggacccaccacgacctgatagagatgagctccaacccggctgtcctgttagacaacttcctccactggcgccggacagacctgctgcctcgactgccccatgatagtgcccagctggtgattggtacttccttctctgggcccatggtggggccattcagaactccatctgttctcctgacttctcaggaggtgtgaatatggaccactccacaagcatcttaggagttgcttcctcaatcgcccatgagttgggccacagcttgggtctagaccacgattcacctgggagcagttgtccttgtccaggtccagccccagccaagagctgcatcatggaggcctccacagatttcctaccaggtttgaacttcagcaactgcagccgacaggccctggagaaagccctcctagatgggataggcagctgtctctttgaacggctgtccaccctggcccctatgtccccgttgtgtggaaatatgtttgtggaccccggcgagcagtgtgactgtggcttcccaaatgaatgcactgacccttgctgtgactacttcacctgccaactgaggccaggagcacagtgtgcatctgatggaccctgttgtcagaactgcaagttgcacccagcaagttggcagtgccgccctcgcagggacgattgtgacttgcctgagttctgcccaggagatagttcccagtgcccccctgacctcaggctgggggacggtgagccctgtgctagtggagaggctgtgtgtatgcatgggcgctgtgcctcttatgcccagcagtgccagtcgctttggggaccgggggcccagcctgctgcaccactgtgcctccaaacagccaacactcggggtaatgcctttgggagctgtgggcgcagccccaatggcagttacgtgccctgcactcctggagatgccatttgtggacagttacagtgccagaggggcaggagccagcctctgctgggctcagtccaagacctgctctcagaggtcctgggagccgatgggacgcagctggactgcagctgggtgcacctggacctgggcaatgacgtggcccagcccctcctggctctgcctggcactgcctgtggccccggcctggtgtgcattgaccgtcgctgccagcccgtggatctcctgggagcacaggaatgccgaagcaaatgccatggccatggggtctgtgacagcagcaggcactgccactgtgaggagggctgggcacctcctgactgcatgactcagctcaaagcaaccagctccctgaccacgggcctgctcctcagcctcctgttgttattggtcctagtcctccttggtgccagctactggcaccgtgcccgcctgcatcagcgactctgccagctcaagggatccagctgccaatatagggcagcccaaccaaatcctcctgaacggccaggacctccacagagggcacagcagatgccaggcactaagccagctagtacgtgcatctttccggtgcccccctccaggccgctgccacctaaccctgtgcccaagaaactccaggctgagctggctgacagatccaatccccccactcgccctctgcccgctgaccctgtggtgaggcacccaaagtctcaggggcctaccaaacccccacctccaagaaagccactgcctgccaacccacagggccggcacccatcaggtgacctgcctggcccaggagatggaagcatgcagctggtggtgccctccaggccagctccaccacccccagcagtatcctcgctctacctctgacctctctggaggtttggttgcctcctgcccagatttaaggcttaaaggaagtgaaatctctg

SEQ ID NO: 822 - DNA, 2575 bp, Cricetulus griseus
cccgctgcactggcgagcccgccaccatcgtagcgccacggcccactccctcagccttgatcccggcgtggctgccgggggagctcctgcaagctccctgaagtcgcttctccgggcagcgactcaggcttcgcctgggccacctgccggggatctggctctgtgctgcaaacagcgactagtctccccgcgtccgccctcctggcggtgagtcttcgagaccctggtcccagacccttggacctgggactagactgatccaaaacgccagcctcaggctaccacaaaccgggctctgtgtcgtctctgctatgtcaccgaccatctcccacaaggacagcagtcggcagcggcggccaggcatgttcagccacgctcgggcattcccctaggcctggcagggagcatccccctcattttgcagagcaaaaatgttagctatacagaccaggtctttcttcagttttgtcttctggcctttcagccttaagttgctctgggcgcccttggttgatgctgtctactttaagaacttcggtcgtcgcaaatcctggcttgtccctactcaatacatactaggaatcttcatgatatatttatccactcaagtggaccatttgctcggaaatactgatgacagaacacccgatgtcgttgctcttacagtgacattcttcttgtttgaattcctggctgccacacaggacatcgctgtggacggttgggcgttaacaatgttatcccgggaaaacgtgggctatgcttccacatgcaattctgtgggccaaacagcaggctattttttgggcaatgttttgtttttggctcttgaatctgctgacttttgtaacaaatatttgcggtttcagcctcaacccaggggaatcgttactctttcagattttcttttttctggggaactgtatttttaataacaacgacattagtagctcttttgaaaaaagaaaacaaggaagtgtcaacagtaaaagaagaaacacaagggatcacagatacttacaagctgctgtttgcaattataaaaatgccagcagttctggcattttgccttctgattctaacttcaaagattggcttttcagcagcagatgccgtgacaggcttgaaactggtagaagagggagtgcctaaagaacatcttgctttacttgctgttccaatggtccctctgcagataatactgccgctgattatcagcaagtacactgcgggtccccagccactaaacatattttacaaagccatgccctacagattattgcttggattagaatatgccctacttgtttggtggactcctaaagtagagcatcaaggaggattccccatatattactatattatagtgctgctgagttatgcattacatcaggtcacgctgtacagcatgtacgtgtcaataatggctttcaatgccaaggtcagcgatcctcttattggaggaacatacatgacccttttaaatactgtgtctaacctgggaggaaactggccttctacagtagcactttggctcgtggatcccctcacagtgaaggaatgtgtaggagcatcaaaccagaattgtcgaacacctgatgctatcgaactttgcaaaaaacttggaggctcatgtgtgacagctctggatggttattatgtggaatccattatctgtgttttcattggatttggttggtggttctttcttggtccaaaatttaaaaagctacaggacgaaggaccatcttcatggaagtgcaaaaggaacaactaatgccaacattaccggacattctagaaggtaatcgtagtttagttttattgataaagctatgataatcagtgtgtaggagtataaaatattgtttaattttaatttaaagtgtcaaatagttgaaaagtagaaatttctttgtatgtttgatcatatttttccttgccttatcaatgtatttaacgtttacttaaggccaggaaacaactctgttggttgtattacttgatttctgttaatttactgaccaaaacatattttaagctgcagtggaatgggtggtcaccatgctgccaagtattgttgttagtacctgtcattgagttgtatttaacattttggtacaatgtatcaagtgggacaaaccttaatatctaggtactaactaactagtttgaccttatgttaattctcactttaaattgtaaatttgtaaaaatttatgtggactccgttgcaaagaacatgtagactattaaaacattgagttgtttttctgaccataaccacattatacaaatgaatctgttaaaaataactattttaaatgtaatgtttgcttttgtaagcatgaaagatttataagaagattattcaaactatttttttataaatgaaagctatggtttttaatttaattagatttccctgtccctccttttgggagctattttgattttttcttgtttaactcttgccctaggtttatggtatgattttgtcacaagtgtgtcatggcacacagacaactaatgaggggggatcaacttttgttttttttgtgtttatggctgagtt

SEQ ID NO: 823 - DNA, 2574 bp, Cricetulus griseus
  modified_base (2348)..(2348): a, c, t, g, unknown or other
ccaggcggcagcggccgtggcccagcagcagcagcaatgcggcggcggcggcggcggcggcgccaccaagccggcggcctcgggcaagcagggcaacgtgctgccgctgtggggcaacgagaagaccatgaacctcaaccccatgatcctcaccaacatcctgtcgccgccctacttcaaagtgcagctctacgaggctcaagacctaccacgaggtggtggacgagatctactttaaggtcacacatgttgagccatgggagaaaggaagcaggaaaactgctggccagacggggatgtgcggaggggttcgaggtgttggaacaggaggcattgtttctacagctttttgcctgttatacaattatttaccctgaagttaacgagaaagcaagtgatgggtctcataacacatacagactctacatatatcagagccctttggattttatgtatataaggtatacacaacccccctacacgacctgtgggactggtttgagcccttccttgatgatgaggaggacctagatgtgaaagctggcggaggctgtgtaatgaccatttggagagatgttcttcgccccctttctcacaaaactggagtggttttctactttgtttccaagaattccagttccagttcagaagaatattgatcagcagattaaaactcggcctaggaaaatgaagaaagatggcaaggaaggagttgaggaaatagacagacatgttgagcgaaggcggtccagatctccaaggaggtcactgagtccacggaggtctccaagaagatcgggaagtagaagtcatcaccgggagggccatggatcttctagtttcgacagagaattagaaagagagaaagaacgacagcgactagagcgggaagccaaagagagagagaaggaaaggcgaagatcccgaagtatcgatcggggtttagaacgcaggcacagccggagtagggaaaggcacagaagtcgcagtcgaagtcgtgataggaaaggggatagaagagacagggatcgggaaagagagaaagagaacgagaggggtcgaagacgagatagagattatgataaagaaagaggcagtgatcgagaaagggacagggagagatcaagagagcggtccaaggagcagcgaagtagaggtgagggagaggaaaaaagcacaaagaagacaaggaggataggcgacacagagacgacaaaaaagaattcaagaaaaacacagcagaagtagaagcagagaaaggaaacacagaagtagaagcagaagcaaaaatgcagggaagcggagcaggagcaggagcaaagacaagtcaagcaaacataaaaatgaaagcaaagaaaagtcaaacaaaagaagtagaagtggcagtcaaggaagaactggcagtgttgaaaaattgaggaaacgagaacacagccctagcaaagagaagtctagaaagcgcagcagaagccaagaccgctcccacaagagagatcatggggatggcaaggaccagtcagacagacaggatcatcagagaagccagagtgtagagccagagagccaagaaaaagaacataaaaacaaagatgagactatgtgaagattttgtaaaattggatcacattgaatcctataaatgttgattaaattctgctttttttccccccaagttgagattgtgcagtagttccgcactctttgagctccctgtaggctgtgttttctttcttttgtgtagggaagtgcctttgtaatcccatttattgcattgatgtttccacccccttgagttgacacataatgcacagattgttcttgcatttttgtttgtttctaaaatgtacagtctgtacatatgtcctgaaaatgttttaattcctttggcatggttgccatgttggttaaatttgtataaggcaataaactgccactaattctatttttgttttgtaggcgtgggattatggttgtgtactgaagttagcatggctgtgcttttcataatagaatgctaaagactttgggaatggatcttggatgtttgttttaggagaattacgtgctttcaatatacatgaaggcaacagttgtagggttaacattcttgtccactgtatattaccttggaagctcttgttaatatgttatacttaatattctccacagttaatattggagagaatttatgagaggttaaattaggctgtgatttgatcaaaggtccttttagcattctacctcaaagggacactgttagtatgcctaaaattaattcacttgacttttgagggtggggcacatgggcagaaaagcattcaagcctcaagcttccaaagcatttttanaaatggagaatacttaaattatgaaacagcttgataaagtatcctttttaaaaattctaactttttttattgataatgaagactgctgtttgtagtttttaaacttaatctaggacagaagtattaacagtaatgcagagctgcgttatttaagactatcagcaaattattgatagattgttcttatgtacttgtatttctgtatttcaagaaaaccatcatgagt

SEQ ID NO: 824 - DNA, 2574 bp, Cricetulus griseus
agcaaattgatgcgaagtgcaagtttcaatacagacccctatgttcgtgaatttggaatcatggtcaaagatgagatgacagatgtgacagggcgtgttctgcagccgccctccatcctctatgggggcaggaacaaggcgatcgccacccctgtccaaggtgtgtgggacatgagaaacaagcagttccacacaggcatcgagatcaaggtgtggccatcgcctgctttgccaccccagcgccagtgcacagaagttcatctgaagtccttcacagagcaactgaggaagatctcgagagatgccgggatatacgctggcctgcagctggtggtggtcatcctgcctggcaaaactcctgtgtatgctgaagtcaagcgtgtgggagacacagtgctggggatggccacacaatgcgtacagatgaagaatgtgcagaggaccacgccacagaccctgtccaatctctgcttaaaaatcaatgtcaaactgggaggcgtcaacaacatcctgctgccacagggcaggcctccagtgttccagcagcctgtcatcttcctgggagccgatgtcacccacccaccagctggggatgggaagaagccttcgattgctgcagttgtgggcagcatggacgcacaccccaaccgctactgcgccaccgtgcgcgtacagcagcaccgacaggagatcatccaggacctggccgccatggttcgggagctgctcattcagttctacaaatcaacacgcttcaagcccacccgcatcatcttctacagagatggcgtttctgagggccagttccagcaggtcctccatcatgagctgctggccatccgagaggcctgtatcaagctggagaaggactatcagccagggatcacattcatcgtagtgcagaagcgccaccatacacgcctcttctgtacagacaagaatgagcgggttgggaagagtgggaacattccagcaggtacaaccgtagacacgaaaatcactcatccaactgagtttgacttctacctgtgcagtcatgccggcatccaggggacaagccgtccttctcactaccacgtgctttgggatgacaatcgcttctcttctgatgagctgcagattctgacctaccagctgtgtcacacctatgtgcgctgcacgcgctctgtgtccatacctgccccagcctactatgctcacctggtggccttccgcgccaggtaccatctggtggataaagagcatgacagtgctgaaggaagccatacctctgggcagagcaatgggcgagatcaccaagcactggccaaagcggtccaggtccaccaggacacactgcgcaccatgtactttgcttgacatgttgtagtgtttagcgattgtgtatcaagttggattcacacgagaccagctacactcagaccaacagatgcccagcccttctgtgacagccagcatcgaacatgagatgtctttggttttattagatcctccattttccagaatgccttccgtcccagatttcaaacttggattttgagctgcaggcctgtatgagaccccattgtaggaatcgtggtttgccaaaacttataagctgctcactgaaagagtcccctgtttcctaaaaacaaaacaacaacaaaatgtcctaaagcaagtctatgaactctcagggctttaaaacatttttaatttatttggtcattcaatttactcatttttaacacctgattctcaatgaaatcgatgggctgtgacggctctgagcatgagagcaacacaacaccatcgccactggggttttaaagcctgaccctaagaagttgtcactaatgttcagttctaagggatgccacgtgctctgcagccccagggcaaatggctgctaggtatccatggtgtctctcacctgccactgcctgcccttgaggccaaatgaaggcatagtggcagcagagaggatggtcacgtgtgtttacagcagtgacaggtccgagagattggcagataagtgccattttgataaaaatttatttaaaagagagaaaaaaagacaatatactgacagtctaatcataagatttgtcctgtaggactgtgacatttattttccaaagtttctaaagaatacgggtctgtggtgataaatacagtacaatcctttttcactgttatgtctttaatgtaagagaagaatatatatatctggtttgcagtaccccagtgtgaactgtgtagcctgtacctctggggaaggacagtgtgcttgccagtaattaccgtccttccctgcctcatccatgtgtgtcactcagccaatgaagcacaaatggaatttatttattcttccattgctgggaaacaagctctctcgtgttaagagtgcacctctttcggtgtgcagttttggaaggtggctttcataggatctatgcactgactcgagagagatccgccggtggtggctctgctggcacagaactgacaggtaggaatggggcatgcccgaggaactgatggtgggcaaggccagcagggaaggcacagaatactctgggtggtatctgcttc

SEQ ID NO: 825 - DNA, 2573 bp, Cricetulus griseus
ggagcggatggatgtttgtgagacacatcttcactggcacacagtcgccaaagagacgtgcagtgagaagagtaccaacttacatgactacggcatgctgctgccctgcggcattgacaagttccgaggggtggagtttgtgtgctgcccgttggctgaggaaagcgacaacatcgattcggctgatgcagaggaggatgactccgatgtctggtggggtggagcagacacagactacaccgatggcggtgaggacaaagtggtagaagtagcagaggaggaggaagtggctgatgttgaggaagaggaagtcgatgacgaggaggatgtggaggagggggatgaggtggaggaggaggctgaggagccctacgaagaggcaaccgagagaaccaccagcatcgccaccaccaccaccaccaccaccgagtccgtggaggaggtggtccgagttcctacaacagcagccagcacccctgatgctgtcgacaagtacctggagacacccggtgatgagaatgaacatgcccatttccagaaagccaaagagagactggaagctaagcaccgagagaggatgtcccaggtcatgagagaatgggaagaggcagaacgtcaagcaaagaacttgcccaaagctgacaagaaggctgttatccagcatttccaggagaaagtggaatctctggaacaggaagcagccaatgagagacagcagctggtagagacccacatggccagagtggaggccatgctcaacgaccgccgccgcctggcccttgagaattacatcaccgctctgcaggccgtgcctccaaggcctcatcatgtgttcaacatgctcaagaagtatgtccgcgcggagcagaaagacagacagcacaccctgaagcatttcgaacatgtgcgcatggtggaccccaagaaggctgcgcagatccggtcccaggttatgacacacctccgtgtgatctacgagcgcatgaaccagtccctgtccctgctctacaatgtccctgcggtggctgaggagattcaggatgaagttgatgagctgcttcagaaagagcagaactactccgatgatgtcttggccaacatgatcagtgaacccagaatcagttacggaaacgatgctctcatgccatctctgactgaaacaaaaaccaccgtggagcttcttcctgtgaacggggagttcagcctggatgatctccagccatggcatcctttcggggtggactctgtgccagccaatacagaaaatgaagttgagcctgttgatgcccgccccgctgccgaccgaggactgaccactcgaccaggttctgggctgacaaatatcaagacggaagagatctctgaagtgaagatggatgcagagttcggacacgattcaggatttgaagttcgtcatcaaaaactggtgttctttgcagaagatgtgggttcaaacaaaggcgccatcattggactcatggtgggcggcgttgtcatagcaactgtgattgtcatcaccttggtgatgctgaagaagaaacagtacacatccatccatcatggcgtggtggaggttgatgctgccgtgaccccggaggagcgccacctctcaaagatgcagcagaacggatatgagaatcctacctataagttctttgagcagatgcagaactagacaaccgccacagcagcagcctccgaacttggacagcaaaaccattgcttcactacccatcggtgttcatttataaaataacgtggaaagaaacaagcccttctggtttattatttactcatcatcgccttttgacagccgtgctgtaacacaagtagatgcctgaacttgaattaatatacaaatcagtaatgtattctctctttctctctttatattctggtctctacactacattattaatgggttttgtgtactgtaaaaaaaaaattagctgtatcaaactagtgcatgaatagattctctcctgattatttatcacacacatagccccatagcccgttgtatattattcttgtggtttgtgacacaattaactcctacttgaaatacgctttaaaaatcgatgggggatgcttcgtgtgaacgtgggcatttagctgcttctctgtctaagtgttcttttcccgatcactatgcattttaaacattgttgagtattccaaatgatttaggaaaatttttccatgattgcatttactgtacagattgctgcctctgctctgtttgtggcatagggtgcgaggatacacattgatttctttgtgcctgttttatgtgcacacattaggcattgagaatttgaactttttttttgtccatgtacctttggatctttgataaaaaaaaattaaaaaaaaaataccctgttcatcgtcagcacttttacgggtggggggagggagtgttctgctggtctcaaatcaccaagaattctccaaaaataattttctgcaggatgattgtacagaatcattgcttatgccatgatagctttctacactgtattacataaataaattaaataaaataactccaaaaaaaaaaaaaaaaaaaa

SEQ ID NO: 826 - DNA, 2572 bp, Cricetulus griseus
cgggcgaacaaatcagcggcgccctagaaagccatgtcggactcggcgcccagcgcccaagcgctaacccgctgaaagtatctctgcaaaacctccgggaccacctggaccccgcccagaggagccgcttttgagtgagatggtcgcagaggcccggagcagcggactgcaagcccagcaactctttacaaacctatgagctgagccacaacgaatactttgcgctccgtgtgcagactcgagaggatggcacgaaatacgcagagctggtcctggagcgcgccctagattggggaacgggagccaaatgtccagttggtgctgactgcggtggacggaggaaccccagctcgctccgccagccttccaattcgtatcacagtgctggacgcgaatgacaatgcgcccaccttcaatcagtctttgtatcgggcgcgcgtccgggaggatgccaccccccccggcacgcgcgtcgcccaggttcgtgcaactgatctggatgaaggcctcaacggagaaatcgtttactccttcggcagccacaatcgtgccggggtgcgggagttattcgccttagaccttgtaaccggggtgctgacaatcaagggtcgcctggacttcgaagacaccaaactctacgagatttacatccaggccaaagacaagggtgccaatcccgaaggagcgcattgcaaagtactggtagaggttgtggacgtgaatgacaatgccccggagatcacagtcacctctgtgtacagcccagtccctgaggatgcccctctggggactgtcatcgctttgctcagtgtgactgatctggatgctggcgagaacggcttggtgacctgtgaggttccaccgggtctccccttcagcctgacttcttccctcaagaattacttcactttaaaaaccagcgcagccctggatcgcgagaccatgccagaatacaacctcagcatcacagctcgagactcgggaactccctctctgctcacataaacgacggggtaccccgtcttggccaccaacgttagcgtgaacatatttgttacagaccgcaatgataacgcccccaggtcctgtatccccggccctggccagagttcggtggagatgctgcctcgaggtacagctgcgggccacgtggtctcacgggtggtaggctgggacgctgatgcagggcacaatgcctggctctcctacagcctcttgggagcccccaaccagagcctttttgccgtgggactacacaccggtcagatcagcactgctcgcccagtccaggacacggattcacccaggcagattctcacagtcttgatctcagacaatggagaaccattgctctccacaaccgccaccctgactgtgtcagtaactgaggagactccagaagcccgggctgagttcccctccggctctgctcccgagaacagaataaaatctcaaccttttacttctttctctaatcttggtctctgtggggttcgcagtcacagtgttgggagtgatcattttcaaagtttacaagtggaagcggtctagggacctgtaccgagccccagtgagctccctgtaccgaacaccagggccctccttgcacgcagacgcggtgcgaggaggcctgatgccgccgcacctgtaccatcaggtgtacctcaccacggactcgcgccgcagcgacccgctgctgaagaaacctggtgccgccagcccactggccagtcgccagaacacgctgcgaagctgcgatccggtgttttatagacaggtgttgggtgcagagagcgccccccctggacagcaagccccgcccaacaccgactggcgtttctctcaagcccagagacccggcacaagcggctctcaaaatggtgatgaaaccggcacctggccccaacaaccagtttgatacagagatgctgcaagccatgatcttggcctctgccagtgaagctgctgatgggagctccactcctggggaggggggcgcgtggcaccatgggtttgagcgctcgatatggaccccagttccaccctacagcacgtcgcctgacggggctctgtatgtacccagggtactggcccaaccccccaattctagccatagacaaactccaggccagacccctccaccctggttcagcctgggcagcttgggctgagccaccaggaccaatagatttaagctggcatttcagtccaagaaggcttctaaagtggatttaggacctgagaggaagaggggcctctgtgggtgctgggtactccagaggtgcccctggtggaaaagggtgggtcagtggtcctagcaggaagggagacccagcaaggccattcttgctgggttgagtcaaggagctagaacaagggaccaagtggctgtaaagtctcaagccaatgatggggcttctccactgggctcctgtagtcctcaagtccctggcctccaccttaccaggtgccacttctcagaaggccactgcccaggcccccaggccgccccttcgtggccagagactggttaaagccccccagtgcctccttgtgcatagaacttcctctg

SEQ ID NO: 827 - DNA, 2572 bp, Cricetulus griseus
tcagaggcaattaagggtgcagttgttggtattgatttgggtactaccaactcgtgtgtggcggttatggagggcaaacaagcaaaggtacctggagaatgctgaaggtgccagaactaccccttctgttgttgccttttacagcagatggagaacgacttgttggcatgccagcaaagcgacaggctgtcaccaacccaaacaatacattctatgctacaaagcgtctaattggacgtcgatatgatgaccctgaagtacagaaagacactaagaacgttccccttaaaaattgtccgtgcctctaatggtgatgcctgggttgaagctcatggaaaactgtattctccaagtcagataggagcatttgtgttgatgaagatgaaagagactgcagaaaattacttgggtcacacagcaaaaaatgctgtgatcacagtccctgcttatttcaatgactcacaacgacaggctactaaggatgctggccagatatctgggctaaatgtacttcgagtgattaatgaacctacagctgctgccctggcctatggtctggacaaatctgaagataaaatcattgctgtgtatgatttaggtggtggaacctttgatatttctatcctggaaattcagaaaggagtgtttgaggtgaaatccaccaatggggacactttcttaggaggtgaagactttgaccaagctttgttgcggcacattgtcaaggagttcaagagggagacgggggttgatttgaccaaagacaacatggcacttcagagagttcgagaagctgctgagaaggctaagtgtgaactctcctcatctgtgcagactgacatcaatttgccatatctgacaatggatgcttctggacccaagcatttgaatatgaagctgactcgagctcagtttgaaggcattgtcacagacctaatcaagaggactattgctccatgccagaaagctatgcaagatgcagaagtcagcaagagtgacataggagaagtgattctggttggcggtatgacgagaatgcccaaggttcagcagactgtgcaagatctttttggcagagccccaagtaaagctgttaaccctgatgaagctgtagccattggagctgccattcagggaggtgtgttggctggtgatgtcacagatgtgctactcctggatgtcactcccctctctctgggtattgagactctgggaggtgtttttaccaaacttattaataggaacaccactattccaaccaaaaagagccaggtattttctaccgctgctgatggacaaacgcaagtagagattaaagtgtgtcagggagagcgagagatggctggagacaacaaacttttaggacaatttactttgattggaattcctccagcccctcgtggagttcctcaaattgaagttacatttgacattgatgccaatgggatagtacacgtttctgccaaagataaaggaacaggacgtgagcaacagattgtaatccagtcttctggcggattaagcaaagatgatattgaaaacatggtaaaaaatgcggagaagtatgctgaagaagacaggagaaagaaggaacgtgttgaagcagttaatatggctgaaggaattattcatgacacagaaaccaagatggaagaattcaaggatcagttacctgctgatgagtgcaacaagctaaaggaagagatttccaaaatgagagaactccttgctcgaaaggacagtgaaacaggagaaaacattagacaggcagcatcttcacttcagcaggcatccttgaaactctttgaaatggcatataaaaagatggcatctgaacgggaaggttctgggagttctggtactggggaacagaaggaagatcagaaggaggagaaacagtaacagtggcagcacattgtcaagccagaagagcacaacataccatgaagcttgggagtaaagggacttcctgagcagaaaaggggcaaatttcagtctttttactgtgtttttgcagtattctatatataatttccttaatatataagtttagtgacaattagctaactcatttaatgggtggtaaattcagcagtagcaggttcatactgttctgtcactagcctgttatttttcagccgcatgaaaaggggttgggtggggctgtataccaatcattattaaggtatatccggtttgtgctgaaatggccatgtttctaggtatgaaacccatttcacatgcatgttggccaagagtactgctataaagaatgacctatgtgtatagggattggtccttcaactgaggccttgcatgacagctacctgtgccatggtttgtaggtgcaaagctaggtcagtggataacagctgtgttaactatagcttaaagagacaggggagagatgaagtctctcttggtcctaaggcatatctttctagctaccctcttggttggcctgtgtcttggaacctgtatccttgatgattgttcttttcatccattctggattttttaaataaaattccaaaagcatctataaacaaaaaaaaaaaaaaaaaaaaaaaaa

SEQ ID NO: 828 - DNA, 2571 bp, Cricetulus griseus
ctctggaagttgtcccgggtgttcgccgctggagctccgggtcgagaggacgaggtgccgctgccgccggcccccggagcccagccctttcctagcccggtccagttccagctgccacctcctgaccccgccgcagaccccatcgttaccatgaatcctgccgtcttcctgtctttacccgacctcagatgctccttgctgctgctggtaacttcaatttttacacctataacagcagaaataacaagtcttgattcagagaatatagatgaaattttaaataatgctgatgttgctttagtaaatttttatgcagactggtgtcgtttcagccagatgttgcatccaatttttgaggaagcatctgatgtcattaaggaagaatatccagataaaaatcaagtagtgtttgccagagttgattgtgatcagcactctgatatagcccagaggtacaggataagcaaatacccaaccctcaaattatttcgcaatggaatgatgatgaagagagaatacaggggccagcgatcagtgaaagcgctcgcagactacatcaggcaacagaaaagtaacccagttcaagagattcaaagtatagatgaagtcaccactcttgatcgcagtaagagacatatcattggatactttgagcagaaggattcagataattacagagtttttgaaagagtagcaagtattttgcatgatgactgtgccttcctttctgcttttggagatgtttcaaaaccagaaaggtacagtggagacaatttaatctacaaaccaccagggcgttctgtgccagacatggtatacttgggatctatgacaaattttgatgtaacttacaactggattcaagacaaatgtgtccctctggtccgagaaataacatttgaaaatggagaggaattgacagaagaaggactgccttttctcatactcttccacatgaaagaggatacagaaagtttagaaacattccagaatgaagtagcccggcaattaataagtgaaaaaggtacaatcaatttcttacatgcagactgtgacaaatttagacatcctcttctgcatatccagaaaactccagctgattgtcctgtcatagctattgacagttttcggcatatgtacgtgtttggagactttaaggatgtattaattcctggaaaactcaaacagtttgtatttgacctgcattctggaaaactgcacagagaattccatcatggacctgacccaactgatacagccccaggagagcaagaccaggatgtagcaagcagtcctccagagagctccttccagaagctggcgcccagcgagtataggtatactttattgagggatcgcgatgagctgtaagaactcgagaacactgcaagcctttcaacagcagcattggcttatgtgggtggaaatagtaaacctatattttcataattctatgtgtatttttattttaaataaactgaaagaagttttgggtttttaatttttttttcctccccctgattcaaatgcattgtcatttaatacagcctctttttaaaaaatttgctagggattaaaaacataaaataaaaaccagaggcctatctccactttcaatctgtcctgcacagtttttataatgcaagcggaaggtggcattgccagaaacatgccattaactcacactaccactgtaaaggcaagagaatccggcctggttcctgtgtgctgtatgcgtttcttccttcttttcttttttacatgaccaattctattggtatttttattaccacagttctgaaagctaaggggatatatattctagagacttgggagcggaataaattaaagtcttcacactgtactgtgttgtactgattggttgggcattgcttatgaaaattccatagtggttcttctcagattcctaatgtgtaacttaagcatactctgaagaggaggagagccataagccagagctgttggcaaattaaccctgaaatcaggaaagtagagataccagtggagcaggttactagtgttgatctagaaactttcaaagctctgtgtgtctagaaatttccattttcaaagagaaactgtatttcaattattgtaagcctccttctgtcttttgtagttttgttatagttacgtagatcaaagacaaagatgttaaggaacgtaacattttaaattctcccattttcaactattgtgaattgttagagggtctcgccctctagcttccctgatttcccatgtctgcagtgtgcagtcagaaggtccctgccaggcctcagtactaccagggataaaagcagagggagaggaccctcagcattatatcaggaatcccagtgccagaggtcagacaggctgaaatttgactttcctcagggcctggtgtggtgctataggccaagggtcatttatccttgggataaaagtcagtcccagtttggggagatattttaagacttaaaaggttgacatgtgccattttatgtagtatgtgatatgtgtaacatcttccagaccttttaaataaaatgaatatttataatagga

SEQ ID NO: 829 - DNA, 2571 bp, Cricetulus griseus
tctggggagtaccagcaacttcgatgactatgaagaagaagaaataccgtgtctctataacagaaaatagtggaaagaattttgtgaattttagggagggaaaaggatggcctcgagctcacactagtctttgcacgctgtggaggtggaaggtggagccgagccctgctcattgaagcagttaccaagttccttcattccagcaactgagtgaggtccgtatcgcatcatcagtgtgcactctgcaaccacctgtgtaccagggcaccgctccgcacgcattgtccgtgccatgacacagtgtgcaccactttcctactgttgagttgtttttctccaccctcctacattcttttcattatcttctctgaccagtactccactttattttctccgtgtttcaggtggcagtgttatggctgtgtgatatttaaaaggaaagctacgtgttgcttcttgtagtttttgagcgatatttttgctgaccagtggcttgaagataaactctctaatgattatttttattttgagtagctcggactcagttttgccaaaactcttataatttttgaagatggaatgtcttatcaccaagggaatatgcataagtgaagataagcaaagcttaagaaactgccacatttgtagtttaattttgaggtgtgatattatctttagatacatcggaatttctaacctcttttttctttgtagacagagtatatgatcatgcagatacagttttaatatttgtgtttccttaatttttttatactttttgccaattgacttcacaatgttgccatcatgaggaaatttcaagcactcttgcacatttagttcagtgttctttgtgaataaatggcttaactttttttaactattttttccattgcttttattttcctgtctcattttctctctgtttcagtgacctaccttaaatgatcaactcacccaaatggtttaaaatgttccattttgtgagcaatctacaagcatataaggttgttttaaatcaaaacaagccctaatgtgtatatatatctgcttccttactggtgcaggtaggtcattgacgccacccctgttcatatgcacccacccctcactaaacccttgaagacactgagaagtcctacaagagaccttctctccacctatctgcatgtcttttggttgtcaagtgtttctgcatggtagtgtccacaaagacaaatgatgatttcagttggtccacctgtatttaaaatgtgcaagaaaaattgaaatactctgctgtagcaagttttatgtaacaaagatatatcgtcgtcgtgttaataacttaaatgcatcatttgtacaaaatactttagttttttgtatttcatttaaacccaagaacatgctaatcattgtgttttatgtatgctacaaattctctggtagaattgttgtatattattgtaaaattatttcaataaatcatggggatgacaatttgattattatactttagttttcaaaattgaacagatttctatgaatcctaaaaatattttttctatgaaatcattagtacccagctagagtccgcccaggtatggcccctagacataacattggtttctgcggcttctcagccattccatttcactgtctgtttgaagtacatgagcgaactgtcagatgtgtcaaaggggtctatttctgactaatcaagtgcactaaatcagaatattcttagcatactgagagttcccatttttagccacagggtagccaaaaggattttctttaaaacttaaaataataagtcagtggcaaaaaccagtgtttaactcaaattatattacacaaaacagaagaaattatgtttttgcccagaaaataaagaaacagcgtggtgcaggaaggagcctggatgacagtgaaacttactggagtgttgtcagttgcagacagcagaagagctggacaggcactttctgggtcctttccaattccccatgttaggtcaaggtcccctctttatctgatacccttaagggacaacatactctgaagtaagtttctgtacagtgatacatttctgtgcatccttcctcttacctcttacactatcctgaaaatcctttgactatcataagacccttgtctgtcccgttccatactcccccactgatgctaatatacacttgatatcaaactgtcagcctaccaaaaagatattgtggcttatgggtattgctgtcttgttcttggtatgttcctatactgattgcccctcagtctgaaaaaaaaaaaaatgctcattgtaagcctaaaactagatgattttgctttcccactcactgttttttctttccttctgcttgttgtaagaatccaatgaaataatgtatgtaaaagcaccttgtaaactgtaagctttcggtgtaagatgtaaggtgtgttgttttttcattaattctttgtttagagtggaatttcctatgcactactatagctaggaaatgctgaaaatgtgttttttaattcatcaataaccgcaaaattaaagtatctttaaagaaaaaaaaaaaaaaa

SEQ ID NO: 830 - DNA, 2569 bp, Cricetulus griseus
  modified_base (714)..(714): a, c, t, g, unknown or other
  modified_base (742)..(742): a, c, t, g, unknown or other
aaccgcatcaaggctgaactcagagcggctgtgttcttggctctggaagagcaagaaaaggtggagaacaaaactcctttggtcaatgagagcttgaaaagtttttaaatacaaaagatggtcgtttagtggctagtctcgtcgcagaatttcttcagttttttaaccttgacttcactttggctgttttccatcctgaaactagtacacttcaaggtcttgaaggtcgggagaacttagcccgagatttgggtatcattgaagcagaaggcactgtaggtggacccttattgttagaagtgattcgacgctgtcaacagaaagagaaagggcctgccaatgcggaaggtgcattggatctgtctgatggacatcctccatcaaagtcacccgaaggaaaaataagcgccaactctaccccaagtaagaagaccaacagcgagagcagtcagagcgagcccagtagtatctccttaagccaaggagcaagagcagccttcactccctggcccaggagacacgaatcgcgtccttcttgagcagcagcactttagatgcaaaagacaaaggtgttctttgtggggaggaagatgatgcagaaggagactctttctttgatgatcccattcctaagccagaaaaaacctatggttggagaaatgaacctaggaagcacgttggaagtctggcctcactctctgacatacccccttnaggagtggtctcagctccctggcaggancccttcattaacagatactgagagtaaaagggaagcaccgtcctaaaggatctgaagttggtcagtgagaaaatcggatcacttgggctaggaactggagaagatgaagattatgttgatgattttaatagtgccagccatcgctcagaaagaagtgagttaagtattggtgaagaaattgaagaagacctttccatgggatgtagacgatgtcaacaccagtgataaactcgatgacctcactcaggacctgactgtttcccagctcagtgatgtggcggattatctggaagacgttgcatagacaggaaaaggaagtattctgaccaacagaagagaacagacttgtcggctccgtggcccccagtcagtcactcttgctggaatgtacgctcctgctggtgccttgcatttcaaagactgcagatatttttaaaagttaacttttcagttttaagtaaaacaaaaattacttcctatatgagcccatgtctaggaggttaatactcttcatttggtttagctgtatatcgccaaggagcttgtctatattcaggtgcattatagcaaggaaacccctgaaataccagtgttaaagagcagaaagcggggtcagtacagccgcagtttgtcactgtatctctggctgctgcagagatctccccacttaatgtacatgaggtgagttagcccgaagttggcgaactgacctgataaatctgtgatgctgaagtgtatcagttcaaactaaattggatgtgtgaactttattttgtatttccttccatttggaaggtctgttagaccattaaggttatattataagtactctgtgctattagttttgcttgttttaaactagaagtggttaggacgtagttcatagacttgtcaataacagttaaagtttaaggtcacatttcatcctgctgtctgtaagcaactgtagacacagattacttcattacagtcttaatttatttctaaagatgccttgaaacattcagtaccaaaatgcatctgaaaccattaagcaatgcttttatttcagatctgtaagttgattatatttaaatccaaattggaatgaaatagtagtaatggcctaagaccatgtatatcctgtttgacaaactttgtatactgtacataattgcatcgtagtcctttaaaaatagagccaataatagaatttctggcatatttagatcatattgtagtagagtttcagggatgtaggctgctggtgtttgtaatgctaaaatacttaattgtgcaaggaggaaactcagtcctattcatgtacagtcataacgcagctaagtaaaatttaggagttgtgaaactttgatacattttatttcaattgtgactgttaaaaagttacctttacatgctgtactcttagaaacagtgctgtatgaggacactgtctgcttgttagaaactgcactaccctgtgtcgtctcttcactgctttgtaagcacactggagccggtgggcccctggggtctggagcagctgtatgatttaatagttggtaggcactacaagtgagtgaactgaccttcaagcatggcaggatgtggctttttatatttgaggaagactttccaacagtcagatatgaaatttgtcactttctattacccagtgactgacattttgctaattcttgagaacgtggagtgaaaaagccaaactgcaactttgtggtcagcactacataaaggtattgaataattctgaacaatgtgaaattcaacaagcaggaagctgtttccaagtattccctgcctaggtattgttaacctgttaaaccttaa

SEQ ID NO: 831 - DNA, 2569 bp, Cricetulus griseus
gcgggccaagtacctagcggccaagaaggcagtgtggctggagaaggaggagaaggccaaggtgcttcgggagaagcagctccaggagcgccgccgacggctggaggaacaacggcttaaagctgagcagcgccgggctgccctggaggagcggcagaggcaaaagcttgagaaaaacaaggagcgctatgaagcagccatccagcggtcagtgaagaagacatgggctgaaatccgacagcagcgctggtcctgggcaggggccctgcaccacagctcccccggacgtaagaccagtgggagcaggtgctccgtgtcggcagtaaacctgcccaaacacgtggactctataatcaacaagcggctctcaaagtcctctgccacgctctggaactcccccagtagaaatcgcagcctgcagctgagcgcatgggagagcagcattgtggatcgtctgatgacgcccaccctctccttcctggctcggacaccccgaccgcactcatccctctggcagccgtgccagtgtgcccacgctcagcctccgccagcccgctaacgccttgtagcgcccctcggagcgcgcaccgctgcaccccgtccggggagcgcgccgagcgacgcaagcccggtgccggcggcagccccgcattggcccgccgccggctggaagctgctccggtgcagaaaaaggagaagaaggacaaggagcgggaaaatgagaaggaaaagagcgccctggcccgcgagcgcagcctcaagaagcgccaatcgctgccagcgtctgtgagacccaggctctctaccggggctgagcacagccctaagtccaaggcccggccatcctctccctctacaacctggcacagacctgcctccccctgccccagtccaggaccaggccatgcccttcctccaaaaccaccatccccccgaggcaccactgcatcgcccaaggggcgggttcggaggaaggaggaggcaaaagagagcccgagcccatcagggcctgaggacaagaaccacagcaagagcagaaccattgaggagaaggagccagtggccctagtgtcaccagcgccctcaccggtgccctcacccaccccagcccagcctcagaaagagcagccctcaacagagactcctgcagacaccgctgtcccgactgccccccgactgcccctcctactgctgctcccccggtaacccctagcaaacctatggcgggaaccacagaccgagaagaagccacccggctcctggctgagaagcggcgccaggctcgggaacagagggaacgcgaagaacaggagcggaaactgcaggccgaaagggacaagcgaatgcgggaggagcagctggcacgggaggccgaggcccgagctgaacgcgaggccgaggctcggaggcgggaggagcaggaggctcgagagaaggcccaggctgagcaggaggagcaggagcggctgcagaagcagaaagaggaagctgaagctcggtcccgggaagaagctgagcgccagcgcctggagcgggaaaggcacttccagaaggaggagcaagagagacaagagcgaagaaagcggctggaggagatcatgaagaggactcggaagtcagaagctgctgaaaccaagaagcaggatggaaaggagaccacagccaacaattccggcccagaccctgtgaaagctgtagagactcggccttcgggactacagaaggattctgtgcagaaagaggagctggcccctcaggagccacagtggagtctgccaagcaaggagatgccagggtccctggtaaatggcctgcagcctctcccagcacaccaggagaatggcttctccccaaagggaactgctggagagaagagtctgggtcgaacaccagagggactcctcccatttgcagaggcagaagccttcctcaagaaggcagtggtgcaacccccacaggtcacagaagtcctttaagcaattgccttggacccgggtgcagcttgaaggttcctatgtatcagctcttgggtgtctggaagagaaagagaacaaagatggaagtggcctgggcccctcgggttgggtcctttctgttgtttttaatctgcaccttctagactgatgtgtctttggcgggaagcagactctgcccctcagtgcatctgtgtgctcacacactcagacacccatcttccccatacacacatacactcacagcctctctggcctccccctggggaaggaccacttgtagtatttgccttggtttggtggggtacagtggatgtgaatactgtaaatagcttgtgctcggacacctctacatggaggaggtgggtacaggaggcagtccctcctcccaaggctccctggtcatcttcctctatttaactgtaaccgagggagaacccaggtctgggaacgaggggggcaccttgggccacacaaatactggttgcttcggggtaatgccctctgtcctcgcctggaatcagtgttactacatctgatcaaacttctccagaaataaagtgaaaataattctgaccaaaaaaaaaaaaaaaaaa

SEQ ID NO: 832 - DNA, 2568 bp, Cricetulus griseus
aagaccttttcaagttatctacaatgtaaagaaaaaggaagaagaaagaaaaaggtcgaagaagccagcaaagcagaagagaatgggagtgaagccctaatgaaccttgatgatcaagctaacaaactgaagctgtcttcagcgaaatgacttgcttgcatctgacatctttgcctcagaacctccaggccagacgtcacccacaggacaacctgcagcccctcagaccaaccctttggatctcttcaaaacaagtgctcctgccccaatggggccccttgcaggtctaggtggtgtctcagtaacacccccccaagcaggaccttggacacctgttgtcttcagtccttctacatctgtggtcccgggagccataataagtggccagccttcaggttttggtcagccaattgtttttagtgcaaccccagcagttcaagtttggaatcagccttcatcgtttgcagccccagcttcccctccgccccctgcggtctggtgtcctcccgcccctgtggcacccaatgcttggtcatccacaagccctctggggaacccttttcagagtaaccaccttttccgcctccctgccatgccctctcaggctactcctatgctgtcctctgttctggccacacctcctcaaccacctcccagaaatggccccctaaaagacatccccagtgatgctttcactggcttagacccacttggggacaaagaagtcaaggaagtgaaggaaatgttcaaggacttccagctgcggcagccacctgttgtaccctcaaggaagggagagacacctccaactgggacttccagtgccttctccagttacttcaacagtaaggtcggcattcctcaggagcatgtagatcatgatgattatgatgccaatcaactgttgagcaagattaatgaaccaccaaagccagttcccagacaaggtctcctctcaagtaccaagtctgctgacaattcactcgagaaccccttctctaaaggatgcttcagttcaccacagccctctgtggcttctcagcctgcctcttctgatgcccacaggagcccttttggaaatcctttcgcctaacttccgaagctgtaatgctgactattcagagggacaaaagactggcttgagccaaggacaaagctgagagccagaaacgtgctgacctctgtccttgttccacctttggcatagtatctgttgccttacttgtctctgcctctcgtaaaatgcctttcactttctgtctaggctgaagctaaactgaaactatggctttacggaaattaagctcctaaactctcttgctcaaatataaatgaagtagcttccctgccaaagccttgtctgttgtacccctagaaccttccagaatactcccccctctaccctccagctgggaggtctggccactttagcccttcatatcatactgccttgagtaaatgtccaaatcctcatacctcaaagtcatttggtattcttagtgtgcagcttaaacctaaacattctactaataggacagcagacatcttgcttcccatccccactcagaaagaactttttgagtcaattgaaagcaagactaacttctcaaacatttaccaatcctgcccccaagaggtgcttacagtagacttgaagaggaggaaattctatctccaaacataaggcattattcaaagcttataaaacaattaatttctccctggggcctcaaattgttttcattccagacattttgcagctgtttgaccctggtgaccttatggcctgaattttccttgatgatcctagtttcatatcatgtgatttttttctcaataaagatgattattgtgtgcattacttaaaaaaaaaaagtataatttctcttcattctgatgatttctcccaggacctgggctattccactttcaatctcctgctattttaaatgagataatagagctgtttttttctccctgtctttgtctcaaaatctgcctgcaatattttcctcataaccttggaaacctatgcagtacgctgtccttttcagtctttttgataatcaggattgaagagtttgttcttgctgaaccctttagtttagtttaaattgagtatttttttttaaatgttatctcttgagccttaatgctcaggtcttgtgggtgttaatacaatcttatgtttcggtggaagaagatgactgctcaaggtttaaacaagaagctggtcttgtgagcccctgttgattagccccaaatgatccaagctgaattcctgtgggtttctgtttaatgctaatcattaattatctacggcatgtgttttttttttcctgtctaacttcctattcagtcattataaacagagacttgaaatcatactttaaaattccaaatacctaaagatgtgctaaactggaggtaactatttctagatggccgaacttttgaaaacgatgatcagctacacacccgttttgtatgtacctgtcttcttgtgcacgtttctgtatgcaaataaagctatacatttactcattcaataaactggaatgacaaaaa

SEQ ID NO: 833 - DNA, 2567 bp, Cricetulus griseus
gcgagcaagcgagctgcaggcttcgggcgggcggcggcacagcgccgagccggcgcgggaggagttccaaggcgatggggccgcggccggggctgacgctttgacagctggaaaagagcgcggagccagcgccggggagggagggagcgcggcgagcggagcgcgagcgagcgggcgatcgccgggagggggccgggagcagggcagctcgggagaccggacggtagcggcggcggcggcggcgggctcggagccctcttctctgcaagccatgtttgccaaaggcaaaggctcggcggtgccctcggacgggcaggctcgggaaaagttagctttatacgtctacgaatatttactgcacgtaggagcacagaaatctgcacagaccttcttatcagagattcgatgggaaaaaaacatcacactgggagaacctcctgggtttctgcactcgtggtggtgtgtattttgggacctttactgtgcagctcctgaaaggagagacacttgtgaacattcaagtgaagcaaaagcctttcatgattatagtgcagcagctgccccaagccctgtgcttggcaacattccccccaacgatgggatgcccggaggccccatcccaccagggttctttcagggtcctccggggtcacagccctcgccgcacgcacagcctccacctcacaatcccagcagcatgatgggaccccacagtcagccttttatgtcaccgcgatatgcaggcggccccaggcccccgatcagaatgggaaaccagcctccaggaggagttcctgggacacagccattgctgcccaattccatggatcccacacgacaacaaggtcaccccaacatgggaggatcaatgcagagaatgaaccctcccagaggcatggggcccatggggcctggcccacagaattacggcagcggcatgagaccaccacccaactccctcggccccgccatgcctgggattaacatgggcccaggagctggcagaccctggcccaatcccaacagtgctaactcaatcccgtactcctcctcatcacccggtacctatgtgggaccccctggtggtggcggccctccaggaacccccatcatgcctagtcctgcggattcaacaaattccagtgacaacatctacacaatgattaatcctgtgccgcctggaggcagccggtccaactttccaatgggtcctggctcagatggcccaatgggaggcatgggcggcatggagccacaccacatgaatggatccttaggatcaggagacatagatggacttccaaaaaattctcctaacaacataagtggcattagcaaccctccaggcacccctcgtgatgatggcgagctaggagggaacttcctccactccttccagaacgacaattattctccaagcatgacgatgagtgtgtgacccccctccaagacgctgagagccggcattgcaggcagaagatgccagaaattatgcaagaagaagtgaggtgtcgataccaggagctgggggagggtgtctcctgctcccctccaccccccccatccactcccccacctttcccaattttagtttcatgcaataaaaaggccaaactttttattccgtaaaacatgaaggacaaaactcaaaaaatgtatttcaagtcaacaatcagaaaaatcccaccctctcctcaccctaaaggacctttcctgtacatgacacttttttgttgtttttgtttgtttgttcgttttgggattttaccattgcttgggtattttttaatttggtttttttggggggtttcttttgggggaaaaatttttttaagtggtaagtctttctagcaagccctacaccccaccccattcaacctctttgcaggagaggccccaccaacgggatggcttcgatctgggacatggaagtgacctccacattttggtccccagatcctcacgtagtacgcacaggctgggcgggctgctgaagtggttttctttttttctcctgttcgtcctttttcaaagatgggtattggttaggatcgctctgtatttgcttggaactggatggacagacttcggtattgctgtgggggtgggggagcaccagcaaccaaacagacactgtttctggtcctgtttttattttcaaaaaccgacaaacctgatggtggagccatcccctcctaggaggggtgacttggctgccctggcctcgccccatggcaacctttgtgtcttgccctgaagacactgaattctttgtacatttacaccctcctcgtgccccacccacccttgtagctggtctttgttttcttacctcccctttctgacccatgtatatcatattatgtgagataccatctgcctgaaaaaaagaccttgtgcggattcttgggaacattgtagctgtttctgttgttttttcttaccttgtagtctggttctgaattatgagaaggaaaaaaagtaattatgatacattgtagtttgtgtacgatatatgttgattaacgttttaattaaagggacattctttttacaaaaaaaaaaaa

SEQ ID NO: 834 - DNA, 2567 bp, Cricetulus griseus
ctggtcttattaacctgggaaatacatgttacatgaacagcgttttacaagcattgtttatggctacagattttagaagacaagtgttatctttaaatctaaatgggtgtaattcgttaatgaaaaaattacagcatctttttgcctttttggctcatacacaaagggaagcctacgcacctcggatattttttgaggcttccagacctccatggtttactcccaggtcacagcaagactgctctgagtacctcaggtttctgctggacaggctccatgaagaagagaagatcctgcgagttcagtcctcacaagagccttctgaaactgaaggtctgggctgcactgacacttctttaacaagaagtagccagtaaggcagctgcaggaacagagtctcctggcacaagtgacggcgagaaaaccttaatagagaaaatgtttggagggaagctacggactcatatctgctgtctgaactgcaggagcacctcacagaaggtggaagccttcacagacctttcactggccttttgtcctgccccttcaagatgatggcctaaatggcaaaccaacctgtggctgacccagaggaagaaccagaggttttataatccagcaacagctgctttcgtctgtgactctgttgtaaatcaaagaatattaggcagtcctcctgttgagtttcactgtacagaaaactcttctgtccctagtgaatctgcaaaggttgtcatcagtaaagatgtacctccaaatcccggaggcgaaaccacaccttcagtaactgacttactcaactatttttttggctcctgagattctgactggtgacaaccagtactattgtgaaaactgtgcctctctccaaaatgctgagaaaactatgcaaatcacagaggagcccgagtaccttattcttacgctcctaaggttctcatatgatcagaagtaccatgtgagaagaaaaattttagacaatgtgtcactgccactggttttggagttgccagttaaaagaactgcttccttctcttcttccttgtcagaaagttggtctgtagatgttgacttcactgatattaatgagaacctagctaaaaaattaaagccttctacgactgaagaagctttctgccccaaattagtgccctacctattaagttctgttgttgtgcactctggtgtgtcctctgaaagtggacattactattcttatgccagaaacatcacagggacagagtcttcataccaggtttgcccccagtctgaacgtctggcattagcacactcccagagttgtttactagggggagaaagccccagtacagtcattgaacaggatttggaaaataaggaaatgtcacaagagtggtttttatttaatgacagcagggtgacatttacttcgtttcagtcagtccagaaaatcacaagtaggtttccaaaagacacagcttacgtgcttttatacaaaaaacagagcagtgctaatggcttacgcagtgacaatccagccagtggcgtctgggtcaatggagatccaccactacagaaggagctgatggatgccataacaaaggacaacaaactgtatttacaggaacaagagttgaatgctcgagcccgggccctccaagctgcatctgcttcatgttcattccggcccaatggatttgatgacaatgatccaccagggagctgtgggccagccggtggagggggcggaggaggaggatttaatacagttggcagactcgtattttgaccctgagagaattgaaaatgcatctggtcacaaaacatctaatactatggctgttaaaatgtcaggctgtaaccaatagcatatcttttatttttcttttcattagacctgaatactttaagaaacacactcaatggttgttttattttcttgaaatacaaaatgcatcatggaaaaaaaaaatctacctcttaaacttccatttgcatttatggttagacgtgcttgaccaaaaatgttcaagaggaaaaagttatacctggtccctaattaagctgcattaaatttggtagaaggatttaaatggtgtagtttcagttttactgaacaaaaaaatccatttagcattctttataaaagaattgatgctaagtgaatttacagaaggtgcatggccctatagggcagtgttttttaacctaactttgtagtatttccagttgtccatggactttaaaatcctgtttcagggagtgtatgtatctcctgtgtatttcaaaggaggtgagtcctgtatgtgccttgcagtactgtattcaaaaataggtatatttggctgcagaaagttttctaaaacaaaatgttaggaagtaattttgtgctaacattaaaattataatttttaaaggtattagattttttcagaagtaaaatctgatggttctaaagcagtaagtataatggtaaatttctaaactttttagaaaaaatttcagaggaatgaaagctaagtttaaagtaaaaaaatacaattgatttgttacttaatcctcaaaacattaaacattgataacatttt

SEQ ID NO: 835 - DNA, 2567 bp, Cricetulus griseus
tggaacgacagattctcagatatatacgctctatgcgtagcctatcccgaaccacttggagaaagactttatgcggaaacaaagacttttttggaaaaacacgttgagcatttgcacaggagagttctggagtctgaagaacaagtgcttgttatgtatcataggtattgggaagagtacagcaagggtgccgactatatggactgcttatataggtatctcaatacccaatatattaaaaaaataattgacagaagccgatttacaatatggctacggtggagtagatatgaatgaaccacttatggaaataggagagctagcattggacatgtggaggaagctcatgattgaaccccttcaggacatcctcatccgaatgctgctcagagaaatcaaaaatgatcgtggtggtgaagacccaaaccagaaagtaatccatggggttattaactcctttgttcatgttgaacagtataagaaaaatttcccttaaagttttatcagggaatctttgtgtctccctttctgactgaaacaggagaatattacaagcaagaagcttcaaatttattacaagaatcaaattgctcacagtatatggaaaaggttctaggtagattaaaagatgaagaaattagatgtcgaaaatatttgcatccaagttcatatactaaagtgattcacgagtgtcagcagcgtatggtagcagaccacttacagttcttacatgcagagtgccacaacatcattcggcaagaaagaaagaatgacatggcaaatatgtacgtcttgctccgtgctgtgtccagtggcttacctcatatgattcaggagctgcaaaatcatattcacgatgagggccttagagcaaccagtaacctaactcaggaacacatgcccaacactatttgtggaatcagttttggaagtacatggtaaatttgtccaacttatcaacactgttttgaatggtgatcagcattttatgagtgctttagataaggcccttacatctgttgtaaattacagagaaccccaaatctgtttgcaaagcacctgaactgcttgctaagtactgtgacaacttgctaaagaagtcagcaaaggggatgactgagaatgaagtggaggacaaactcaccagcttcatcactgttttcaaatacatcgatgacaaagacgtttttcagaagttctatgcaagaatgctagcaaaacgtctaattcatgggttgtctatgtctatggattctgaagaagccatgatcaataaattaaagcaagcctgtggttatgagtttactagcaagctgcatcggatgtacacagatatgagtgtcagtgctgatctcaacaataagttcaacaatttcatcagaaaccaagacacagtgatagatttggggattagtttccaaatatatgtccttcaggctggtgcatggcctctcactcaggctccttcgtcaacatttgctattccacaagagttagaaaaaagtgtacaaatgtttgaattattttatagccagcatttcagtggaaggaaactgacgtggttacattatctctgtacaggtgaagttaaaatgaactatttgggaaaaccatatgtagctatggttacaacctaccaaatggcagttcttcttgcctttaacaacagtgaaactgttagctataaagaacttcaagacagcactcagatgaatgaaaaggagctgaccaaaacaatcaaatcattacttgatgtgaaaatgattaaccatgattcagaaaaggaagatattgatgcagaatcttcattttcattaaatatgagcttcagcagtaagagaacaaaatttaaaattactacgtcaatgcagaaggatacaccacaagaactggaacagacaagaagtgctgtagatgaagaccggaaaatgtatctccaagctgctatcgtccgcatcatgaaagcacgcaaagtgcttcggcacaatgcccttattcaagaggtaataagccagtcaagagccaggttcaatcccagtatcagcatgattaagaagtgcatagaagttctgatagacaagcagtacattgagcgcagccaagcaactgcagatgaatacagttacgtcgcgtgacaccgtctctgatgtgggtgttgaggtcattgccatcaccatttggtgtgctcctgtgggaaaaagcaggcctgtgcctccatactttggtcatttggcagcccctgtttttctgctgtttacaacatcaccagtgccacgtcatgagcgtcaaagaaaatgcctagagatatttcaagctcatgtcattatgacatttcttaaaactttattaaaagaatgagtgaagtattgctgaaatgtggaatttggttgggtaccatgctttctccccttcacgtttgcagttgatgtgtttttttttttaattgtatcttaaaggacataaaataaaaacttaaatattgtaatatgacagataacctaataattgtatctacattaaaatgacaaacatgatgttgctgcttgtcaaataaaaaaaaaaaaaaa

SEQ ID NO: 836 - DNA, 2567 bp, Cricetulus griseus
  modified_base (354)..(354): a, c, t, g, unknown or other
  modified_base (378)..(378): a, c, t, g, unknown or other
gaactactgactggcgagattccctacaaagacgtagactcctcagccatcatctggggtgtaggaagcaacagtctccacctgcctgtgccctccagctgcccagatggctttaaaattctccttcgccagtgctggaacagcaaaccacgaaaccgcccatcattccgacagatattactacacctggatatcgcctcagcggatgtgctctccacacccccaggagacttactttaagtcccaggcagagtggcgggaagaagtcaaactgcactttgaaaagattaagtcagaaggaacatgtctgcaccgcctagaagaggagctggtgatgcgaagagggaggagctnaggcatgccctggacatcagggancactatgagcggaagctggagagagccaacaacctgtacatggaactgaacgccctcgtggcaagacccgtcaccgaaaggccagtgccaagggcagctgtggagacctgcctgggcttcgagcaacattgccgccccacgaacctggaggactaggaggcccagggggcctaggagtgggtccttcagcttgggatgcctgcccccctgctctccgtggactccaccatgaccttctactgcgaaagatgtcatcatcatccccagatcttctatcagcagcactgggagcccgaggccgaggagccacagggggagctcgggatcctggctcacctcctccaccccagggcgatactcctccaagtgagggatcagctcctggttccaccagcccagactcacctgggggggccaaaggggaaccacctccaccagtaggacctggtgaaggtgtggggctgctgggaactggaagggaagggactgcaggacggggaggaagccgggctgggtcccagcacttgaccccagctgcactgctgtacagggctgctgtgactcgaagtcagaaacgtggtatctcatctgaagaggaagaaggagaggtggacagtgaagtagagctgcccccaagtcagaggtggcctcagggcccgaacatgcgacagtcactatctaccttcagctcagagaacccatcggatgtggaggaaggtacagctagtgagccttctcccagcggtacaccagaagttggcagtaccaacactgatgaacggccagatgaaaggtctgatgacatgtgctcccagggatcagaaatcccactggacccccctgcttcagaggtggtccctgaccctgaaaccagctccttgcccattcaacaccaggacagggccccaatcctgaggactcagactgtgacagcactgaattggacaactccaacagcattgatgccctgccggcccccacgccttcccttcctccatgaaagacactcttattccttgtacatagagaaatatttatataaataatatatatgcgccacataatcaacagatagatggggctttcttaagccttaaagtcaggcttcagaatcgaaggacccccccctgaccaattaccaagttctagggaccctggcagctgtggaaatgaatgattccaagtaacaccctagagctacgaggaaaggaaactggtccctccttgcttcaccccattccttatgttcagcaggcaactaggcaatagaaaagccaggcttgtctctacactgtctaaccctaaacactgggggacaggagaggatccacttaagactgcacttttattttccgtttactgtttacacattttgcacttgggaggagggaaactaaggctgggtcctcccctctgaggtctctcaggtggcaatgtaacccatttctttgtccctctgtttctctgcccaagccctggcttggggcccagagctgaaaactggggtgctgtgtttaagtccctactgttaccctggtgcctggtagggcggggactatcatattgtaacccctgtgaaaaaccctgaaatataaccactccatgcaggcccatctgtcgagggtttttcttgatgaatgaaaaatggagtggtaaaacggaagaaaataccttaattctattcaaacccaaccagggctctgtgaaggtttaaaggtataaaaataacatcaagacaggaataaaacccacataagtcactgtgccatccagtttctattcacaaagaaaaagctccagtccatcttttaattttttttgaaaaattcctgacattacagaactaaactgaaatgtattaatattccactcttacatttccatgacaaacaaaaattcatgagccaaaaaaaaacaaaaaaaaaagaaaaaaagggggagaagcttataaaactaaatatggatatctcagcataactgctgaacagagaaaggaattaaaacgctttgaattaaaaaatcatgagtggatgataaagtgtgtagaaactgaaaatttacaaactatttaaaacctggaatcgctgactgttgagaaactacacagatggatcatgggtggtgaagagcaggaagggatcatggatgaacctgcactgctctagctgctccccatgccacctgtctcc

SEQ ID NO: 837 - DNA, 2566 bp, Cricetulus griseus
atctggatggctatggtgaaagtcttctcaggccgaaagcccatgctatacagtttccagacatctctgccgcgcctgcctgtcccagccgtcaaagacactgtgagcaggtacttggaatctgtcaggccactgatgaaggaaggagatttccaacgcatgacagcgctggcccaggattttgctgtcaatctcggacccaaattgcagtggtatttgaagctgaagtcctggtgggccacaaattatgtgagtgactggtgggaggaatacatctacctgcgaggccgagggccgctcatggtcaacagcaactctacgccatggacaatacctcccgcatccctggagaggagacagacaccatccaacacatcaaggacagccggcacattgtcgtgtaccacagggggcgctacttcaaggtctggctgtaccatgatgggaggctgctgaggccccgagagctggagcagcagatgcagcagattctggatgacccctcagagccacagcctggggaagccaagctggccgccctcacggctgcagacagcgggcgccggcatcgaccgccacctcttctgcctctatgtggtatccaagtatctcgcagttgactcccctttcctgaaggaggttttatctgagccatggaggttatccacaagccagactcctcagcaacaggtggaactgtttgactttgagaaacaccccgactatgtgtcctgtggaggtggctttgggccggttgctgatgatggctatggtgtttcgtacattattgtgggagaaaatttcatccacttccatatttcttctaagttctccagccctgagacagactcacaccgatttgggaagcacgtgaaacaagccatgatagacattatcaacttgtttggcctcaccgtcaattccaaaaagtaacccccatgagccacagggaaggaaaacggactcttgtaatacaaaccaaatgaataggtgttgctcctgattgtaggattggcagaaaattgctcttatagaactcagttttccttccagaaggtttaccatctgtctccctagaacaacagtagtttccactgtgtgaagcacgaccctgctacatccagagatgccctggctccgggaatattgggcacagttccctgaaatcttttgaatcatcctggatgaaggcattaaaatactggcgaattcctggactactggggttgtagcttcacacttgttggtgacaagacttcctcggggacaaactataaatacctgggactggaaggtgcctgactccacccaggcaggacagacatcaacttgtgggaagaatcttcagagccagtggaggtgacaactgaagctaacacatgtaatgcactaatgggattcttgggcctggggattaaggttctgctgtgggtgacagccatcatccctttgggagtcacatttccaagaagcagaataccacctcttcaatgtcaccatcctcacacgtcttcaaaacccagtgccttaaagacggaagccccttggtaagtgggggcattagagaagactaatttgagaagtcttagggtgaatgtgtgaggatgttgcttcccctcagtggtttcctacgtagagatgcccctaagtaagcacttcccctactcccagaagaccaggcccctggtgaaggcagtgatgctgagtctcattgcctgccagttccattaagcaacaaaatgacaggagtgtgttaacagagggtgttgaggggcttggtagtcacaggctccatagctggagaccagctggagagtgtggcttccatagaagactaggtcattttggtgacagactcaggggtctcaagtgatgggtgctttgtacccaaatgccatccctcaatgggagtgcctttcttgacagtgcgccctctggccttgctcagttcctgcccctgtgctagcagtagcacaaaagtgggggcagggtgaccagaagtgccaagaagtgctggctgaacagcttatgcatgtcttacagacacacatgtataattttgtaatctaaaacacaaaagggccaaagattttcttcctcttaaaagcaagaaaacaaaagacataaatacaaaagcagaaacaaacagtaagccagagacacctaaatctcactgttgatgaccactgactaacctgtgttacccgaggagccctgctagtgtccaagcgttacactcctctctcaggtttccagtgtccttgctgctcctgagcagttaccaatgcaatttcatattccttacaaggaggaagggtgcgctttcacagtgtacgtcgaaaggaggaggtaagactattatatttaatttaatgtggaacaaaacagtcttaccgcagccaaggtttgattttggtatcctaatctgtccatttcctgtaaataaataccatatgctgtctggatataaatcttagaaatgcatgtgtggatgaatgtagctggccattaataaattaattaatcctgtctactaaaaaaaaaaaaaaaaaaaaaaaaaaaaaaa

SEQ ID NO: 838 - DNA, 2566 bp, Cricetulus griseus
acgtcgttgcaggaccgtcccaatgctgcgctttccgacctgtttcccatccttccgggtggtgggagagaagcaactgccacaggagattgttttcctgtgctggtcacccaagcgggacctcattgctttggccaacacaacaggcgaggttttacttcatcgacttgcaagttttcattcgggtttggagttttccaccaaatgaaaatacaggaaaagaagtaacctgtttggcctggagaccagatggcaaacttttggcctttgctctcgctgataccaagaaaattattttgtgtgatgtagaaaagcctgagagcttacactctttctctgtggaggctccggtttcttgtatgcattggatggaagtgactgtggaaagcagtgtcttaacgtcattttataatgctgaggatgaatccaaccttctcttgcctaagctgcccacattgccgaaaaataacagcaacacctcaaaaataatttagtgaagaaaattctgatgagattattaaactcttgggagatgtcaggctgaacatccttgtccttggaggaagctctggatttattgagctttatgcttatgggatgttcaaaattgcccgagtaacagggattgctggtacttgtcttgctctgtgtttatcgagtgatttgaagtcattatcagtggtcacagaggtttccagtggtggtgaagcagaagtttcatattttcagcttgaaaccaatctgctatattccttcttacccgaagtaactcggatggccagaaagtttactcacatttcagctctcttacagtatataaatttgtcactgacttgtatgtgtgaagcatgggaagaaatactgatgcagatggactctcgtctcactaagtttgtgcaggaaaaaactaccacgacatcagtgcaggatgagttcatgcacttattgttgtgggggaaagccagtgctgaacttcagactctcctgatgaaccagttaacagtgaagggcttaaaaaagcttggccagtctatagagtcatcatattccagtatacaaaaattggttataagtcacttacagagtgggtccgagtctttactgtatcatttgagtgaacttaaaggaatggcttcgtggaaacaaaaatatgaacctctaggactggatgctacaggcattgaagacgccattactgctgtgggctctttcatcctcaaggcaaacgaacttctccaagttatagatagtagtatgaaaaacttcaaggcatttttcggtggctatatgtagcaatgctgagaatgacagaagaccatgtgcttcctgagctgaacaagatgactcagaaggatataacatttgttgctgaatttctcactgaacatttcaatgaggctccagacctttataatcggaaaggaaaatactttaatgttgaaagagttggtcagtatttgaaagatgaagacgacgaccttgtgtcaccccctaacacagaaggaaaccagtggtatgacttcctccaaaacagcagccacctgaaagaaagtcctttgctgtttccttattaccctcgaaaatcattgcattttgtgaaaaggcgaatggagaacattattgatcagtgtttgcaaaagccggcagatgtaattggaagatcgatgaatcaagcaatttgcattccattatatagagatgctaggagtatggactctgcccgcagattgctaaaattcccatttctgtggaataataaaacttcaaatctacattatcttctttttactattttagaagattcagtttataaaatgtgcatcttaaggagacatactgatatttcccaatctgtaaataatggactaattggtattaaatttgggagctttacatatgccacagctgaaaaagtcagaagaagcacttacagttgtctagatgcccagttttatgatgatgaaactgtaacagtcatccttaaagactcgatgggacgagaaggaagagacaggatcttggttcagttgccattgtccttagtgtataacagtgaagatgctgaagaatatcagttcactggaacttactccacaaggctagatgaacagggcagcattattcctacacgcaccatgcacttcgagaagcactggaggctcctggaaagcatgaaagcacagtatgttgctgggaatggccttcgaaaagtgtcctgtgtgttaagttcaaacctccggcatgtgagggtgtttgagatggacatcgatgatgaatgggagcttgacgagtcttcagatgatgaggaggaggctggtgggaagcccatgaagatcaaggaggaagtgttgtcagagtcagaatcagaggctcaccaagatgctgctgccctagacccagacaatagtcatcaaagtggagaaacttgaccctgagttggactcatgacccagtttagtagtagtatgttacttaatatgacaaaaaaacttactgggtggaaccaagatggtatgggtcacattgaattatctgtgtaaacaaaagaaataaatggtaaaattta

SEQ ID NO: 839 - DNA, 2565 bp, Cricetulus griseus
aggaagttcgctgcagaaccccagatagcggtagagagggactcggacccaatggcgacctcagaggcctgcggcagcggcgggaatgacgagggctgcgacccctccgtcaagtactaccggctggaggaggtggcgaagcgaaactccgcggaggagacgtggatggtgatccacgggcgagtctacaatattacccgcttcctcagcgagcatcctggtggggaagaggttctgctggaacaagctggtgctgatgcaactgaaagctttgaagatgttggccactcccctgatgccagggaaatgctgaagcagtactacattggtgatgttcatccgagtgaccttaaacctaaaaaaggtggtaacaaggatccttcaaaaagcaggacatccaaaagttgctgggcatattggattctccccatcgtgggcgctattcttgtaggtttcctgtatcgtcacttcacggccgacaacaaatcctcctgaggagacgagaccatgagtgtgggagtgcgtgctcctggaattgagaagttgagacttactttggaggctgcaccccttggagccaagatgtttgactagatatctatccttcagtctaggaccagggtctttcaccagccagaggctgatgcccaaagcacctgctcatgttgtgtccttgccagggtttcttctcactggcttccacctgttcccttcatttcagagtttatgttgatgactatagagttcctgtgttgtagagacatggcctttggggacagtatataatttctgatactctcagttcacattaggtatatttaagggaacagtactctagttttgaatcttttccccatttttcttttaagtaaatttattttttaattctgatttaattttgtcatttatcataacgggttttcatgaagttaagatgtgtctgtcttatttaaaacacagctgccaaatgatcctatttatgattattaaagtaaggggaagcaagatagaccattgggtaaaagcaattgctgcaaagcctgatgacctgaatttgattccctggacacacacggtagaaggagacaaccagttcccaaaagttgccctctgacctccacatgtatggtatggcttggatatgtatttcattggagagcagttaatcatttaaaattactgtttctccttggtccgggcattttcctggcttctttgacttttattcttttccctgtgggagtacctgacagtttcccagttattttttacccattatctatgattttcctccacatcctttgttcattaccaatctgcttctggactgttgtcatgtccagcaggaagccattgaattctagaaagaccagaaatgctgggaagtgtctcctgcctcccttccagcttgccaggggcttgacgggacaggaaactgcacattaaaccagtctgcccatgcaaactatttaagaaaaagttcagcccaggacttttattctgtgatttagcaattgaataagttcagaattcatcaaaataacattagccttttccttgaatactcggatatgatattttaatttctagatgatttctatatatcagggatacagacttaatcacttttatctttagaaattttgtaatatacaacacacacacaacaaaaaaagaactgtaagttttttaaagtaaaatcgtgttttgatatttctatagtaaacatcaatacaaaaatggtgtttttctatttcacatctatgttcttttcctgcttttatctgagcttgtttcttctactgagagccagaaggaaaaaaatttcctactttgtctttgccatttatgtaatccatctaatacccagggcttcttttgaactactgataatgtgatatcatattatactttaatcccagcacttgggaagcagaggcaaacagttcttgagttgtaggccagcctggtctacatagcaagctccaggccagccaaagccacatagtgagactctcccatctggctgaagtccacctgaggtgactgaagcacagaacatgaatgttctttgcttcctacccaagggaaatggagtcagacatgtcatgtctcaacaagaaactgaagttttgaagctatgtgattcagttgccaaatatctcaaagtaacggagagctccgtcatatttggccagctttggaatttatgggggtggccctggagggggttctgaagaagcagagatgtgccagtcacctgccttatgcccagtgtcttactcatgaatttcagtggcccgtccttgcccacgcctacatcgcctacagtggctgctcaggcagaacatcatttcagttatttaacttgctttttactgcaccctcaactgtgagtgactaatattaacattccttttgtgtattcaatgatggagtttgtttacctatttgatttcagcttattttgaacaaagatctttgtctctttctactggaatgtgcacacagtgaatgtttgttagaactacacaataaagatactgttttccttttcttgtcctg

SEQ ID NO: 840 - DNA, 2565 bp, Cricetulus griseus
gcagcagcagcagcagcggcagcggctcgggcagcggtagcccgagcaccggtagcagcggcagcagcagcagccccggggctcggagagaaggaaagcatggaggacacaaggaatgggaggagaggaggaatttccggaggctccttcttcacgtggttcatggtcattgccttgctgggcgtctggacgtctgtggctgttgtgtggtttgaccttgttgattatgaggaagttctaggaaaactaggagtctatgatgcagatggtgatggagactttgatgtggatgacgccaaagttttattaggacttaaagaaagatctacttcggagaggtcattcccagcagaggaggccaagccaccggctgagctggaggagcaggcttctgactttgggacagaagtccagaatgttgaagatgaagtaaaagaacaaattcagtcccttcaccaggaatcagcacacacagaatatgacttgaagctggaagcagatgggccagcagaaccacagccagagatggaggacttcctcacagtaactgccggagatgacagatttgaggtcctggaacctgaggcagttcatgaagaaattgaggataattaccatatggaagagacagcatcacaggaccatccaaatgatatggaagagatgatgagtgagcaggaaagctcagatcccagtgaagcagtaacagatgcactggctacactgaactggtgaagtctttagagagaaactggaagttaatccgtgatgaaggcctcatggtgatggacaaagccaagggtctcttcctgcctgaggatgaaaaccttcgagagaagggagactggagtcagttcacactgtggcagcaaggaaggaaaaatgagaatgcctgtaaaggagcccctaagacctgtactttactagaaaagttctctgagacaacaggatgcaggagaggacagatcaaatattccattatgcaccctggaactcatgtgtggccacacacaggacccacaaactgcaggctccgaatgcatctagggttggtgattcccaaggaaggctgcaagatccggtgtgccaatgagaccagaacgtgggaagaaggcaaggtgctcatctttgatgactctttcgagcatgaggtgtggcaggatgcctcatctttccggctgatcttcattgtggatgtgtggcaccccgagctgacccctcagcagagacgcagccttcctgcaaatttaaaaaaaaaaggacacagagccttgggtgctctccagggagactgcctttccacttttcttggcctgtggagacagaagttcaagcgccatggttcttccaacctcttgccttgtggctaaagaccgctaaggttccttctggatcactgggaggagtatttgccttactgcaatttatttaggaggccccttgcttcaagtgactcatgacagaacagaacttctacctggattgaaggggtgtctacattgctagccaaagatatttttctacctagaatagtgttcacatctatgtacactgaggatatacaacatgtagaaactgaatgaatcactttagtttgtaatttttctatgcagttatatttttctaggtaactaaactattctgtcaccatccacccccaagtttttgttgactttaatgacaagaagtataaatgctttacttcttactgttaaatagtaatttccctgaaaaattcagacataattctttttagaaaaaaaaaacactgtgaagaaggcaagtttactttcctaacataaatgggaagttactccaggatgtataaattgtgccaacccttgcccttgaatctacctgtgtgtcttcatttagcatcagtgtcttcccctttctctgtgctaataagaagctttctgtacctcatttaacgagcaattctttgacattggaactgatactttttcttgtagcttaaggatattagctcttcgtagaaagtttacaaaatatgtgtccattcttaaaataggtacttttcccttcttttgccaatgttcaaaaattcttctaaaacagatggcaaaggcatggaagggaaatatcaaatcattaccaaattccagaaaagaaaacaaacttgtagaaaacaaaaaaaagtagtttgtgttcttcagtatttattaaatggaggaacttactgacaaaaggcaatacaatccagtgttcatgtagtaacactcagtcgcctattgagtttggttctcctacatattacatacatataatgaaatgcaaaccatatgttctcattgttaaaccatcaccttatattcatgtaataaaatggtggaaatgaatgaaaattagcttttgacttagtaaatataatgttgtttttaaaatatggtcatcacagtaggattctaactattgtcatgtgaaaagtcagaagaaccttattacatgagttggcagtcagtgatgccaacagcattggagtacttggatcccacatttgttttatgaacccaagcaattaaaagattttctaattcactttaa

SEQ ID NO: 841 - DNA, 2564 bp, Cricetulus griseus
gataatctgcaagctgaactgaaccgcctccaagcagaaaatgatgcctctaaagaggaagtcaaggaagttctacaagccttagaggaactggctgttaattatgatcagaagtctcaggaagttgaagacaaaactaaggaatatgaattgcttagtgatgaattgaatcaaaaatctgcaactttagcaagtattgatgctgagcttcagaaactgaaggaaatgaccaaccaccagaagaaacgagcagctgaaatgatggcatcattactaaaagaccttgcagaaataggaattgctgtgggaaataatgatgtgaagcaaccagagggaactggtatgatagatgaagagttcactgttgcaaggctctacattagcaaaatgaaatcagaagtaaaaaccatggtgaaacgctgcaaacaactagaaagcacacagactgagagcaacaaaaaaatggaagaaaatgagaaggagttagcagcatgccagcttcgtatctcccaacaatgaaatggaaaaggagcacttaaacaaggttcagactgcaaatgaagttaagcaagctgttgaacagcagatccagagtcacagagaaactcaccagaaacaaatcagtagtttgagagatgaagttgaagcaaaggaaaaactaatcactgatctccaagaccaaaaccagaagatggtgttggagcaggagcgcctaagagtggagcatgagaggctgaaagccacagaccaggagaagagcaggaagctgcatgagctcacggttatgcaagacagacgagagcaagcaaggcaagacttgaagggtttggaggagacagtggcaaaagaacttcagacattacacaacctacgtaagctctttgttcaggacctggctaccagggtgaaaaagagtgctgaggttgactctgacgacactggtggcagtgctgcacagaagcagaaaatctccttccttgaaaacaatctggaacagctcaccaaagtgcacaagcagttggtacgtgataatgcagatcttcgctgcgaacttcctaagctagagaaacgacttagagctactgctgagagagtgaaagctttggagtcagccctgaaagaagccaaagaaaatgcatctcgtgaccgcaaacgctatcagcaagaagtagatcggataaaagaggcagtcaggtcaaagaatatggccagaagagggcactctgcacagattgcaaaacccatccgtcctggacagcatccagcagcctctccaactcaccctgctgcagttcgtggaggaggcacagttgttcagaacaaccaggcaatagcgctacgaggtggtggaggcaagcaggcataaacattgacacatcacaggtgttgaaaagtaattgaagtttgaagaggacataaaatcaaacagtctttcaataactataacctctacccccttgggattatagaaatttaattttttaatgtgtaaattattcctaacctgtacagctgtttcctatccttgtaaactctgctggttcccaacactagagtgcaatgttgatgtcctgggagggagatgacagtttacaactgcagccctatttattatagtttgtctttcatgttttcactgtgccgagtaactacattacaggactgtgctccttgtgattgccttttctgtgtgtgtttaatcttggtttacattacctagctgctattgcttttcatttttcttttcctactaaaatgtcttttggttttaaaggaaatatggaatatttagattaaatgtcttaaattttaccacttacaatactacatgccacaaaataatatcaggtcagtgagtactgtattttaaaaatcccttcagcagggtgtggtggcacacatgtttaatcccaggcagaggcaggtggatatctgccagtttgaggtgccctgcttcattctgttatacttgctgcctgctagagcaagaattggacagatgctaatgtcatccatctttaatactaggaaataaatggattaagacattatagaattaaacagtttttaattgttaaataattgcattggctgatataaatttatagcctttgaaaaatgaggaaaaattgtgacaggacagataaaccatatacttaaaaatggttaattttgctctgaaatcttgaaggtggttttcacctgctacactaagtcatatactataatttgtttagttagaaatagtaaattgtttgcaaggcactaataatcttcaaaaaagttatattgttggccatagtgcataattttataattagaactgtgcgtatatatttttgccactcacttttcaggtgattaaactcgatcaagtttattttaaggatctataaaagaaacaggtggtggcgcacacctttaatcccagcacttgggaggcagaggcaggcggatctctgtgaattccaggccagcctggtctccagagcgagtgccaggataggttccaaagctacacagagaaaccctgtctacgaaaaacaaaaaacaaaaaaacaaaa

SEQ ID NO: 842 - DNA, 2563 bp, Cricetulus griseus
gctggccgagagacgccctccaccacggcccccatggtcactgtcccacagataccctcttacaggttgaacaagatctgtagtggtctgtcctttcagaagaaaacccagttcatgcagaggcttcacaactactggctgttgaagcggcaggctcggaatggcgctcccctcatcaggcgcctgcactcgcactcacagtcccagagaaacgcggagcagcgtgagcaggatgagaagacaagtgccgtgaaggaagagctgaagtactggcagaaactccggcatgacctggagcgggcacggctgctgatcgagctcattcgcaaaagggagaagctcaagcgggagcaggtcagggtgcagcaggctgccatggagctggagctgatgccgttcacggttctgctgaggacaacctggacctgcttcaggagaacggaccctgcacacatcatagttgccaactgcatgaagtataatgctaaagacacaattttccaccgagcagctgtccgcctgcgggacctgggaggggccatcctgcggcatgctcgtcggcaggcagagaacatcggctatgatcccgagaggggcacccacttgcccgagtcacccaaattggaacagaagcctcctgatgccctttgaagaccgcggagacctggagcccctggagctggtgtgggccaagtgccgaggctacccctccctaccctgccttgatcatcgatcccaagatgccccggggagggcctcctgcacaatggtgtccccatccctgtccctccactggacgtgctgaagctgggagagcagaagcaggccgaggctggagagaagctctttcttgtcctcttctttgacaacaagcgcacctggcagtggcttccaagggacaaagttctgccgatgttggaaggccgcaagaccagcatccgaaagtcggtacaagtggcctatgaccgtgcaatgatccacctcgagccgacgtacggggaccccactccttcgtcgcttccacctacctgtaagagtggaactgggcctgcatctgcctgctttgcctctcctcctgtccccgaggcataagaagcctcgtctgcccctgccaagtgtctggccggcagcttctttctcatggcaggccctgactggactgggtctccaagggcaaggcccagtgttgaccaatcatgtggttcccctggagggccgctgtgtgccaaaaactcccacccgaggtccctggggatattccactgaagaaccactttgaagtagaaacagctgagagtcttggccggccagggaggtggacctggcccacagagcaagaggtcctaggctgcttttctggggccaactgctccctccatgcctctcccagctaaccatacctcagggcaggcaaggttctgatactgatcccagagatgtgccagggtccctcgggaacccactgagcttccctcccctctcattttccacacccagcccagcctctcctccccaacatcgctctcctttctcccttgtgccaaactgacagcaacgtcaccaaattgatctttttctttgatgctcatttccttcctggccagctgctatgttagatagatgtctgccaggcacctgagccacaggtagaagcgatcccacgtgtaagaatcctttccctcactcgcagtcactccctcacctccaaaaggaaggaaaaaaaaactagtgaataaggaatgctgactgacaaaccaacgcaactttcagaggcttctgctcttgacgttacttttcacttcctaagcaccaaagccgcgggcgggtttgcgggccgctgattggcattttgacttctaccttgatgttatttttagttgttttaaaacttttcataggggagttttgggcaaaacaaaggccctggggagatcactgccatttttacatactcagactttttaaaatacagccaaccaaccaccaacttcttacacatttgggacatgagccagagtttaaaagggaccaacagaattcatagagagggcgggattctgtccagtaaacattgcagcaacagctgggacaggacatggttgtaagttattcaggcctatactctccattatcggaaccctccactgtgcagccacacagtgtggtctagttaaaggagccgatgcgtccccctctccccaggtagttggtcagctgtggactctgtgatccttgtctaaacctgtgttgtaagatctcggggttttctccccaacccctctccttctcccaacactgagtcccatttgaaaacctgctcttttagaacaggtgcagctcagatcctgctgtggcacggggcctcgtgtctctgtcgcgtccgctgtgaagcacacgatgctctatttattgtagaaagtgactttatttgccttctagaattgtttataacagatggctataagagaggtaataaacagaaaaatctatgcctgtaaagaatacgagagttaattttacctactataatatgacgtcttattttctctctgagaaataaatg

SEQ ID NO: 843 - DNA, 2563 bp, Cricetulus griseus
tcggaactcccaaagcaggggaaactggctccggggccacgcaaaggtgaccaagcagaagccgagctatgttaacttgtacagcatctcccatgggcactccaaggacccgaagccctttgagatggtggcagagaggcccgtgtcctatgtgcagacctacacggccgtggacattcgggctgactctctggaagccctggacttcccaccccagacaccaaaggtgcttttgaggcccacgtccgagaaaagttcaatcgcatggtagaggctgtagacaggaccattgagaagagaatcgataaactcaccaaagagttggcccagaaaaccgcggaactgttggaggtccgggcagccttcgtgcagctgactcagaagaagcaggaagttcagaggcgagaacgcgccctgaacagacaagtggacgtggcggtggaaatgattgcggtgctgaaacagcgcctcacacaatccgaggaggagctcctgaggaaagaggaagaagttgtcacattcaaccatttcctggaagcggctgctgagaaggaggttcaagggaaagcaaggctccaggacttcattgagaacctcttgcaacgggtagaactggcagaaaagcagctggagtactatcaaagccagcaggcctccggcttcagccgtgacactagcaagcacgtgctcacagacatctcatcgaataggaagcccagatgtctaagccgagggcacgcacattctgtgtgtaaccacccagagctgagggcccatttccacctgaaggggaggagctatctgaagaaagccaaggaagaaagagccgggatgcagcctgccaaggccattcacgaacaggctgagtctccaagagaattcttcagaccagctaagaaaggggagcatctgggcctgagccggaaaggcaacttcaggcccaaactggctaagaagaagcctacagctattgtgaatatcatctagagcttaacttctaaaataattggctcagtctccagcagtcctggcatctgggcttctatgcagtggtcattagtacttgggccacacaagatgccaggctctggtgtccactgctctctgaattatggggcaaggaatgtgactgtgaggttctactttttaatatatatatattggtgttttgagacagggcctggctctgctatgtagccccggctggcttggaacttgatatacaccaggctggcttggaacttgcagtaatcctcctgcctctgcctcccgagtgctgggattacaggtgtatgccaccacacccagctgggagtgtaaaattctggtgagagcagtgaaatgaatgatttctgttcttgtttgtgtttaaaatccccttgatacatttgaaagtctctctagtaaaagttctgactacccctgagtgtcctggttaatcaagactttaatctcccgggtggtttacggatgtgttcagttagacctcagttctcactttgccagatgtcttttaggttctttgattcagatctgggttccttcagagcacattcattcagatttgggcgcacccacctgccttcttcggctaagcacgccgcaccctcagagctgtctgccagcctctatctagatagctgctaaaacccttggggtgagcagcatcactgatgggatgtccaagtgcttgaagtgccagaggagggcacatgcagtgtaccaggaacatcctggacatgctgaactctcaagaatctcccatttttaaatgttcttctagaaggagatttcttgttttttccttaaaccgtacaataccatcaggtctctagagtatacacatgctgacatccttcctaaaacagggatcatgttgtccataagtatatacatatataatacatatactatatatatacatgtcaagcatattaataatttattttaaatactcatggaagaagtgtgtgtttgtggtgggtggcttttaaactatataactttgcttctgtaaatcaaattcttttactttaaaaatgaaagctgtaacctaattaacactagtagaattattgttattgcaacaagcatctgaatagcattacattaaaaatagataataaagcagttacttaggatgccagtacattgaaaaggagaactcatcatcgtcagatactttgagcctctcctcatggaaaggctcatgcttgagtcctcactgacttctggcttctggggggcagatcttctgtgtggtgtatataggcagataccaagtagggagaagaacacagctgtggatgtcactgttgaggctgacgtttttgggcactacaatgttatcatttttttggataagaaatctcctccatggttatttattattgattgtttattgtcatgattgcattttagctttctccagactgaagatgttactgggtgattgtattgcatgctccctgtgccctgtagtatgtgctcaacaacacccatctacacacacacacacacacacacacacaataaagtcttacttttgactaaaaaaaaaaaa

SEQ ID NO: 844 - DNA, 2563 bp, Cricetulus griseus
cctgggctcaggagcagacggggtaaggaggagaagtccaaagcaaaggccaagcctcaaaataagtttgcagccctagacagtgaggaggaagatgatgaagaaaaacaactgaagagaaggagcctcccaagccagggaaggacagagaaaaggccaagaatgcagagcagggtgaagaggaagagggagaagaggaagacgggaggacgaagccaaacgacccctatgccaaccttagcaaaaaggaaaagaaaaagctaaagaaacagatggattatgaacgccaggtggaatcattaaaagcagctaatgctgcggaaaatgacttctccgtgtcccaagcagaggtgtcttcgcggcaggcgatgttagagaacgcatctgacatcaagttggaaaagttcagcatctcagcccacggcaaggagctgtttgtcaacgctgacctgtacatcgtcgcaggccgccgctacgggctggtgggacccaatggcaaaggcaagaccacgctcttgaagcacattgccaaccgcgccctgagcatcccccccaacatcgatgtgttgctgtgcgagcaggaggtggtggctgatgaaacgccagcagtgcaagctgttcttcgtgccgacaccaagcgactcaagttgctagagcaggagcgacagcttcagggacagctggagcagggggatgacacggctgccgagaaattagaaaaggtgtatgaggagctgagggctactggcgcagcggctgcagaggccaaggcgaggcgcatcctggctggcttgggctttgaccctgagatgcagaatcgtcccacccagaaattctctgggggttggcgcatgcgcgtctccctagccagggcactcttcatggaacccacactgctgatgctggatgagcccactaaccacctggacctcaacgctgtcatctggctcaataactaccttcagggctggaagaagacgctgctgatcgtctctcacgaccagggctttctggacgacgtctgcactgacatcatccaccttgacacccagaggctccattactacaggggcaattacatgaccttcaagaagatgtaccagcagaagcagaaagagctggtgaagcagtacgagaagcaggagaagaagctgaaggagctgaaagctgggggcaagtccaccaagcaggccgagaagcaaaccaaggaagtcctgactcgaaaacagcagaagtgccgacggaaaaaccaggacgaagagtctcaggagccgcctgagctcctgaagcgacccaaggaatacaccgtgcgtttcaccttcccagatccaccgcccctcagcccacctgtgctagggctgcacggtgtgacatttggctacgagggccagaagccactctttaagaacctggattttggaatcgacatggactctcgaatttgtatcgtgggccccaacggtgtagggaagagcacccttctcttgctgctgactggcaagctgacaccaaccaacggggaaatgagaaagaaccatcgtctgaaaattggcttctttaaccagcagtatgcagagcagctgcacatggaggagacccccactgagtacttgcagcgcagcttcaacctgccctaccaggatgcccgcaagtgcctgggccgctttggcctcgagagccatgcccacaccatccagatctgcaaactctctggtgggcagaaagcccgagttgtgtttgctgagctggcctgtcgggagcctgatgtcctcatcttggatgagccgaccaataacttggacattgagtctattgatgccctgggggaggccatcaatgagtaccagggggctgtgattgttgttagccacgatgcccggctcatcacagaaaccaattgccagttgtgggtggtggaggagcagagtgtcagtcagatcgatggtgactttgatgactacaagcgagaggtgttggaggccctgggtgaagtcatggtcaaccggcctcgggattgagctcccctcctggaaaccttctgagacaagctcctgtggctggggtctcagccacatgggccatgaaggtggagtgttgccttgatgcgtgtgacacaggatccgtgtggattgtgtccttcccaccgaaggactgtgtctccttcagataacagaactggcttaccctcagcatctcttgccagacagaggtgacctttgctgtggtccattcttctcaagccaagttaaggtggcctcttgtctcaagactctggccactcaggactgactctgcctggtccctccttttggaagggtcctcactgacacaagcagccggaaccacagcacggctggaggccagtgtctgagacctgttgtgtcaccaacccaagatctggtgcttgtggtggcttgtctggtgggggcttgagggcaggaaagggagctgatgaagtgcagtctcctttcagagggggggaaataaagcactggggttgctgacaaaaaaaaaaaaaaaaaaaaaaaaaaaaaaaaaaaaaaaaaaaaaaaaaaataaaaaa

SEQ ID NO: 845 - DNA, 2562 bp, Cricetulus griseus
  modified_base (56)..(56): a, c, t, g, unknown or other
agactactttattggatttaatggatgccctccccacgctcatgccctgttacccngaaaactgaaccctggggtccagggacctctgctaaccagaccaacccctggggtggaacagcggctcctgtgaatatttccaacccctggccatcatttggtaccaagccagctgcttctgtggacccatggggagtgcctaccacagccagcacacagtctgtcccccaagaacccagacccctgggcagcctcccagcagcctgcctccaatgctgggaaaacagcagatgcctggggagctgccaagcccagctctgcctcagggtcctttgaactcttcagtaatttcaatggtacagttaaagatgattttctgaatttgacaaccttcgagcttcaaaaaagccagcagagtcgggggcctcagtaccacccaagacagcagaaaatcccttcctggcaccaggtgctgccacctcaacccctgtcaaccccttccaggtcaaccagccccagccactgacactgaaccagcttcggggaagccctgtccttgggagcagtgcatcctttgggtctggtccagggatggagcctgtggcacccgtgacctcagtagccccaccctcagcattgggggccagtggctcttcattgacaccactaggccctacagcaatgaacatgtgaggtcttgaacaaggaggtgttaccagtgttgctcaagattctgggatgctgtctagcccaggacttggggcagtcacatgtgtgccccacccccagtgtcctcagggtgtggacaaggtgaagctctggccccactccacaatgactgttgagaagtggttgtgcatattttattttcctttgactcgtgggagtctaaggtaaacaccactagtgtggggcttcaagctgaccagagcacagccctgccctgtggctctgtgcttgtgcacgtttgcacattttgttgagtacagtttcatatttgagtttgcagaattatctaatagtcttttttggctaatattttataatgtggttcttatttaactgtctagttttgatagaattgaccaagtctggctgaattaaggtcttggcatgtattattttagtggtctaatttctcttatttatggttttaactgtaagaaaactttaaaagaagagatatttggatgacaaaaatatgccttatggaaaactaagcaaattctttaataaaaaaaaaaaaaacagaatttgattacacaaaaccaattttattaaaacaacaaaaacttccaacaggaacgaaaacctgcagcctctagttgcctttttcctttcttcagctctttgatgaattaccaaatctattgacccttcagcctttttgcctagatcctgagaggctttttgctactagtatattgacatcttaatgttaaaaggaaaaacgaacaacgcatgattgtgacttgccagtttttatcaactactacttcctttctttgtacctggcacatagggattgccaggaacttgtgtttactgcacaccagaagtgcagctggctgccctattatcatgctcaggctaatgagattgtgtgaaaatgggggtggctgtcctcttctgggctcataggtcaccaggttggtccccaagctgagttaggagagagactgaccctgatgtgtctgttgccagctccagctcaggccgttgaccaggaagtgatcatatcttactttggagacaaaagaatcctcacatggcatcaatttttaacagacgtgcactgatgctcttttctcacccaacctcctgaaccctcactctactcactgttaaggaaagtattaaatcctgaattagaaaccacagacttgcttttcttcagagaaaggacctccccttcttggtcctggcagtctgtgtcaagggcacccaactgcctgccagcccctctctgcatccagagagaattttggtcctcaacacccacgtttgactcagtagtcaaactatactcaaactatactcaagcccctcttgagtctgagagtccacatgctgctcctaggctccacaagccaagggcccttcctaactacctacttcccccaggactagaggcctagaggtaggtttgggctctgctaatcaggaaggctgatgactaggctcctgcctgggagaggtagagacatcatgggacaggggaggcggggcagtgtttcagattgtacttccttcagattgtacaggccaggtccagatctgcctgctgggggccggtgattctgctgcagaagatgagagcccttctgactgaaggccccaccctactagccactgggttccctcctcccacacggccataccagcgcatgtccctgtgccactggccactgccatgtgtgttgcacacatgccaccatgcccttcccgatgagtaccctaaggaagtcatccagctgtttctcagtcccagggctggtggttggttttggatttgtgttgactgttgatacttatttactgtataaatataatttatcatttgta

SEQ ID NO: 846 - DNA, 2561 bp, Cricetulus griseus
tgatgatgaagaaactgaagaaaaagctcgttggctgaaaatgataattactgtaagcacagcacaattatagtccctgaaaatgctgcacatcaaggtgctactagaacccccttagaaaaccatgaccaaatgtctgtgaactgcagaaggctacccgctgagtcatctggtaagctccaaattgaagtttcaacggaccttacagcaattaatggtctttcttacaacaaaaacctagccaatggcagttatgatttagttaacagagacttttgccaaggaaatcagctgaattacttcaagcaggaaatacctgtacaaccaactacctcatatcccattcagaatttataccattatgagaaccagcccaagcccagcaatgaatgtactctactgaagtaataaataccttgatggaaacgctaacacatctacctcagatggaagccccgcggtgtccacgatgcctgccgtgatgagtgctgggagagcactcaaggacaggatggattctgagcagagcccttctgctgggtactcctcaaggactcttggccccaatcctggactgattcttcaggctttgacactgtcaaatgctagtgatgggtttaacctggagcggcttgagatgcttggcgactcctttttaaaacatgctatcaccacatatctcttttgcacttaccctgatgctcacgagggcatatttgatcctcctgtgaattggcttcctcctggttatgtggtcaatcaagacaaaagtaatgcagagaaatgggaaaaggatgaaatgacaaaagactgcttgctggctaatggcaaactaggtaaggactgtgaggaggaggaggccctgacgtggagggctcccaaagaggaggctgagtatgaagacgacttcctggaatatgatcaggagcacatccagtttatagacagcatgttaatggggtcaggagcctttgtgaagaaaatttctctttctcctttttcaacctccgattctgcttatgaatggaaaatgcccaaaaagtcctccttgggcagtatgccgttttcctcagacctcgaggattttgactacagctcttgggatgcaatgtgttatctggatcctagcaaagccgttgaagaggatgactttgtggtgggtttctggaatccatcagaagagaactgtggcgttgacacgagggaagcagtccatctcttacgacttgcacacggagcagtgcattgctgacaaaagcatagcggactgtgtggaggccctgctgggctgctatttaaccagctgcggcgagagggccgctcagcttttcctctgctcgctatgtttgaccatccagatgcagagaaaaccctgaaccacctgatatctgggtttgaaaattttgagaagaaaatcaactacagattcaagaataaggcttaccttctgcaggcttttacacatgcctcctaccactacaacactatcactgattgttaccagcgcttagaattcctgggagatgcgattttggactacctcataaccaagcacctttatgaagacccgcggcagcattccccagggtcctgactgacctgcgctctgcactggtcaacaacaccatctttgcatcgttggctgtgaagtatgactaccacaagtactttaaagctgtctctcccgagctcttccatgtcattgacgacttttgtgctagtttcagcttgagaatattatttgtctgtggcttttttttttcctatttgtaaagtgaaagcatggcagaaatttgttgactgaacacttaattatgcttttaaaatgttttggttacatttttttttttttgtttgtattatgtgaaatgattaaatttcaaatgacctctaacactcctataattatcctttaaaatactgatgtttttattttattgacagtaacccgtcctcagaaagatacagactgctgtctgatgatcagggacttgaggctgctttgttctgctgttcagttcctgtgcgcagtcacttaacaacgcctaagaacctatagttcccacctgctgattactcttctggaatttaactatttctcaataaattttgtattttatattgtacatgagacattttaaagatatgttttaagaccaaggatagttaaaatgattgtaaaagttatgtgtctggcatggagaccatgtgctgtccactagcagggaaaatgaacacctcaaactaacttgcatatattattttactcattatttttttcttgttccgttttttctttgaagaacaaccacggacagtttaaatgttacagatgccccagaattcacctcagctgctggttctgtagcaaaagtgcagaggtggatgggaagaacacatctgcctttgctgtaaataaagggaatgactaaggtgaagtcagactgacggttccgctgacaatagacaatggccatcacatgctgcagctaattttaaagaaacgtagttcgtgcacatggctgtcactgcagatctgcggtcagcaccttacggatcac

SEQ ID NO: 847 - DNA, 2561 bp, Cricetulus griseus
cctgtcgatggctgctgtgttattcattttctactcgtctctttgctgtcctgagatttgaaagtgttatccatgagtttgacccgtactttaattatcgtatacccggtttctggctgaggaggggtttttataaattccataactggtttgatgaccgggcctggtaccctttgggccgaatcattggaggaacaatttacccaggcttaatgatcacctctgctgcaatctaccacgtactccattttttccatatcaccattgacattcggaatgtctgtgttttcctggcccctctcttctcctccttcaccaccatcgttacataccaccttaccaaagagctcaaggatgcaggagctgggcttcttgctgctgccatgattgctgtagttcctgggtatatttctcgatctgtagctggctcctatgataacgaaggaattgctatcttttgtatgctgcttacttattacatgtggatcaaagcagtgaagactggttccatctattgggctgccaagtgtgcccttgcttatttctacatggtctcttcatggggaggttatgtgttcctgatcaacttgatccctcttcacgtcctggtgctaatgttaacaggccgtttttctcatcggatctatgtagcctactgtactgtttactgcctgggtactattctttctatgcagatctccttcgtgggcttccagcctgtcctttcttcagaacacatggcagcctttggagtatttggtctctgtcagatccatgccttcgtagattacctgcgcagcaagttgaatccacagcaatttgaagttcttttccgaagtgttatctccctggttggctttgtcctcctcacagtgggagcactcctcatgctgacaggaaaaatttctccctggacagggcgtttctactcattgctggatccttcttatgctaaaacaacatccccatcattgcatctgtgtctgagcaccagcccacaacctggtcctcctactattttgatctgcagctcctcgtcttcatgtttccagttggcctctattactgctttagtaacctgtctgatgctcggatttttatcatcatgtatggtgtgaccagcatgtacttttcagctgtaatggtgcgtctgatgctggtgttggcacctgttatgtgcattctttctggcattggtgtctcccaggtgctgtccacatatatgaagaatctggatataagtcgcccagacaagaagagcaagaagcaacaggattctacttaccctattaagaatgaggtggcaagtggaatgatactggtcatggctttttttctcatcacctatacttttcattcaacttgggtaaccagtgaagcctactcttcaccctccattgtactgtctgcccgtggtggggatggcagtaggatcatttttgatgacttccgggaagcatattactggcttcgtcacaatactccagaggatgcaaaggtcatgtcatggtgggattatggctaccaaattactgcaatggcaaatcggacaattttagtagataataacacgtggaataatactcatatttctcgagtaggacaggcaatggcatccacagaagaaaaagcctatgaaatcatgagggagcttgatgtcagctatgtgcttgtcatttttggaggtcttactgggtattcctctgatgatatcaacaagtttctttggatggtccggattggaggaagcacagatacaggaagacacatcaaggagaatgactactatactccaactggagaattccgagtggatcgtgagggttctccagtgctgctcaactgccttatgtacaaaatgtgttactaccgatttgggcaggtctacacagaagccaagcgtccgccaggttttgaccgtgttcgaaatgctgagattggtaataaagattttgagcttgatgtcctggaggaagcatataccacagaacattggctggtcaggatatacaaggtaaaggacctggataatcgaggcttgtcaaggacataaatgttacattgtgccctgatatgcttcgcactgagtgcgtcatattgaggacgccgaagattttttttatatgcagtttataagaacagagccggatgggattagaattgtctggaagttttgccctggacagttatgagctgggccaaatgaaatgatttttataattctgagcaggttaccaaatgaaatgtcatggctttactttggtcaattaaaggggggggttttttttttttaaatgtgccttatttgttttgacttaaatcggctgatttgagaatcacagaagtgaatggatggaagaccatatccatgctctaggtccccagatgaaccaaacaggagcattttctttctcccatcagcaaactcaaggactagctgtggttttacaaatataaaaacttttgtcacattttttgttttatagcaccctggtacaatgctttgcatataatgggtgcataataaatttttaacaaataaataaaatgcttctgggacc

SEQ ID NO: 848 - DNA, 2561 bp, Cricetulus griseus
caaatactgctttccaaactatgtgggcagacccaaaacatgttcgtgtcatggcaggagccctcgaaggtgacatcttcattggccccaaagctgaggagcaccgagggctgctgtctatccgctaccccatggaacatggcatcgtcaaggactggaatgacatggaacgtatctggcaatatgtctattctaaggaccagctgcagactttctcagaggagcatcctgtgctcctgactgaggctcctttaaaccctcggaaaaaccgggagcgagctgcagaagttttcttcgagaccttcaatgtgccagctctcttcatctccatgcaagctgtgcttagcctttatgccacaggcagaaccacaggtgtggtgttggactctggggatggtgtcacccacgcagtcccgatctacgaaggctttgccatgccacattctatcatgcgaatcgacattgctggccgagacgtctctcgcttccttcgcctctacctccgtaaggagggctatgatttccactcctcctctgagtttgagattgtcaaggccataaaggaaagagcctgctacctgtccatcaacccccagaaggatgagacactagagacggagaaggcccagtactacctgcccgatggcagcaccattgagatcggcccttccaggttccgggcccctgagctgctgttcaggccagacttgattggtgaggagagtgagggtatccatgaggtcctggtgtttgccatccagaagtctgacatggacctacggcgtacacttttttctaacatcgtcctctcaggaggttctaccctgttcaaaggctttggtgacaggctactgagtgaagtgaagaaactggctccaaaagacgtgaagatcaggatatctgcaccccaggagagactgtattccacgtggattggaggctcaatccttgcttccctggacacctttaagaagatgtgggtctccaagaaggaatacgaagaagatggtgcccggtccatccacaggaaaaccttctaaagctgagaccgcaccttcacctctctctgaagttaactccacttgaaaactcgctttcttgagttggggtgttggagaggaactgcctgtgtgtgtgagtgagtgtgtgggtatgagtgtatgcacatggcgagtgtgtgcggcccagggatcccgggcccagaaaggacattgaactactcacggtggtgatggcctgaggcctggggttgactactaactggccccttccaggagagagccctggcagaggcccactcctttctcagctaggcctttgtctggctgtgtggaactatggtcactaccatagagagaccttgctgctgccaatctaggctgggctggccccaccccaccccagagtgccctgaggctggaggcagctgcctcccctcccgtcattctgctgtccatgcctctggatcagactgagaactgaggctggggttaggttctgtctggctttgtttcggtttgggtttgggagactgaaaaagcaccccagcagtggttgtagactgggctcgggagagagcagggtacactcatgtctacctgggaaccaggtaggtccacactgggcatgggaggacaggcgctcgctgcggggttaatttaccagccccagccacatccaggggtcttgggagactgtaaggacctgtgggctccagggcctgttatctgcttctcatccatccttgtttcaatgccatcttcagttttatttatggaagtgtttgttgggtaaagggactacagagagggctcactgtcctctgcccaccgggcaccttgcttacactaatgtttataacacctaggctttgcatagcgtccagggcatcacccttcctgatggtaaactgacagtattcccaggcctcaggaccctgcaggattggaggctgcacataagggaccccagccagcctcctcttttttctttcctccacttgctcactgccctggaaccaccaggctggttgcagttagattttccaaaacaggaaatagcatcactctttggcagaggccccttgcgagggaggtgtattggagatctagaccctttaaaactaagaaagctgcagttaaccatgttgcttttcaccactctagctgaccaggaatggcagggaggtcccttctgggttagtcaaagtgccaagaactgatgggctcaggtctggctctcagaagtggtccaagggccttgtacccagacagtacaaagctagggtaagcctgtcttcaccggcaccctcaccagtgatgcccagtcccacctcggttccagattccagacagtgttctttctctctcaccatccaatgaccaaaggcccctgccagatgtaagctgaagccggtgtgtgtgaaatcaatgtggcaacccaaggactgtagtgcgcttaactagctcacctctcttagcccaagcctgtcccttgcacagcctcgaaaagccacgttgcctgttggggcccagtgtacttaaataaagtcgttccaatag

SEQ ID NO: 849 - DNA, 2559 bp, Cricetulus griseus
agacatttcgtctttggaatcatcacagaagaaaaagaaaaaatctagcccgcagtctgccgacacagcaatggacctgttgaaagctatcacctccccactggcagcaggtgccaagtcctccaagaaggcaggggagaaatcctccagttcttcaagccatttggagagcagaaaggaacaccataagaagaagggcaacggaagcagtggagaactctccctggaggacagcagtgcgcacaaacccaaaaaatgaagccactctatgtgaacacagagacactgactcttcgtgagcctgatggcttaaagatgaaacttattctctcaccaaaaggagaagggaggcagctcagtggaggaggaggcttttcagtatcctgcccaacaagcttctctgaaaaagtcctccaagaaattggctcgggatgagcaaggtgctttactcttagggcaggagctacagagcctcctgaaaacagccaggaagaagcacaagtcatcctcagactcacactcctctcctggccctgaaggctgtggggctgatgcctcccagcttccagaaccccacagtgctaacctcgacgttacaggacttgaccccattctagtagagtcagagtcatcctctggtggggaactggaagctggtgagctggtaatagatgattcttaccgagaaatcaagaagaagaagaagtcgaagaagagcaagaagaagaaggacaaggatagacacaaggagaagcggcactcccggaccaagagaagctccattgcttacatcatgcctggactgtgacctccaagaagcctgggacagaaacctgtctaccccttcgctagtttatgtatatatgactgttccagatcctccactgatctctgggtgtaggtttttaatttttgtatctatctatacatatatataatgtacagtatatacataggattataactactttgcttttaataattttatgaaatggcaagggtttagctgaaaaggaaactttggcatgaatgtgggtttgggattattttttgtgaaaaaaaaaactagccttaaaaatcagtgtaatttggggactaggggcttattctgggtgccatgtgtatctcgttatagacagctaaaatgtgatttttttttcccccaagcttggttgtacctccagacccatcactgaccatttgccttacctgtcttataattggaaatatagtaaagattatgggaggagaccagctgactacaaactatttgactcaaagtgacctgaggggaggtagagatggcttaggcggactaataggggactcattccatttctactaaacaggtatctgtgtctccaattttattgtaaccattgttaccacagagtcattgataccactgatagccttagttatgtgattcttggcagcagagaaatagcttggagaggccaaagctgttggtgccacctttgagcctacattggctggccaagaaggcttggtctataaaaaccaaagctggtatcttttgttttgttggttggccaccaaatcctgagagattctgcagcttgttcttagttcagctctggttcccctgatgggcagattgtgctctgcattcctcacacatgtggatcacaaaggaaccctcggttctcaatggggttatctatgtgtgtatgtgagcatatattttaattatgtgtatttaactctttagaatttttagattttaatttatcctgtaaatttctgtatatataatttaataacaagcctccaccagcagtagcatgtggagcatacagacttgtcatttcttcgtgtctgtctaaaagctccaggtcatccatatgttaaggtgttatgactcagaaaggagcttcatggccctcaataatgttagcaaagtgaagtagaaagaaatgtcacaattcccaactgcccttattcccaaagacctcagttcagagcagtgttgagatgtattctgggaaatggagaaagaaacaggaatatgtgggaactgaatcaagaagaaccaaaatttaaatttcagctaacaggtcagaatctcatttgaacctgcagaagtttcctttaagaaacagggtgtgaaggagaggccaagaaggcacacatagtgcaggaagcagccagtcctctgttgtcattgctacagacagcagtgaactcctggtgataaccggctttttcgtgttcattttcctctgaaacctagccctgttgtatttgtattaaagatttgtacacatttgtataataatctgtaacttgtggtatttggtactattagaagaaaaactttggattcaggccttcttgctgtttttatatcattgttttattttgttttttaaataaatcctagtggtttgataccaaatcttacagttgtataaaaaacaaaattttgtacttatattaaagagctcaatttttaataaaaaaaaaaaaaaaaaaaaaaaaaaaaaaaaaaaaaaaaaaaaaaaaaaaaaaaaaaaaaaaaaaaaaaaaaaaaaaaaa

SEQ ID NO: 850 - DNA, 2559 bp, Cricetulus griseus
cagctggcatcctgagtgctttcgatgtgacctctgccaggaagtgctggcagacatagggtttgtcaagaatgccggcagacacctgtgtcgtccttgtcataatacgtgaaaaggccagaggccttggaaaatacatctgccagaaatgccatgccatcattgatgaacaacctctgatcttcaagaatgacccgtatcaccctgaccacttcaactgtgccaactgcgggaaggagctaactgctgatgcccgggagctgaagggggagctgtactgtctgccatgtcatgataagatgggggtccctatctgtggtgcctgtcggaggcccattgaagggcgagtagtgaatgccatgggcaagcaatggcacgtggagcattttgtttgtgccaaatgtgaaaagccatttcttggacatcgccattacgagaggaagggcttggcctattgtgaaactcactataatcagctatttggtgatgtttgtttccactgcaaccgtgtcatagaaggtgatgtggtctctgccctcaacaaggcctggtgtgtgagctgctttgcctgttccacctgcaataccaaattaacactcaagaataaatttgtggagtttgacatgaagccagtctgcaagaagtgctatgagaaatttccactggagctgaagaaaaagacttaaagaaactagatgagaccttaggaaggaaataagttctggtttttgggggtgttgttggttctctcttctagccaatattacttcatttgatccactctaaaggtgtatcaaagcattagagagaatggttttcttcatttccctttgctgatttaaaagaaaaaaatagtttattcctatgtaaaacacagatgaaatcaggactttaaaacaaaaacaaacaaaaaaaaaaagttaatttttcatttcaaatgtcataattgggtttatctactataagatagtaaaaaggtgtaaatgagacttttagattgaaagagggtagtaagaatattaactttaggtaaaaatcagttctgttttataaaaatttttatcctgaaatgtctgggccattctttttatataaactcactatgcaaaagtatgaacattttaaaaatgtttctgctgctaacatgttactttttttttaagttatcaagatgtgtatatagccaacattgctggctatggtgactcccatagtagtctcagcacttgggaggctgagacaggaaggttgtcatgagttagaggtcattcctaggttacggtgtgagatgctgtcccccaagacatccccacaagcagaaacactatttattgctttgccataaagggttctcaggggcctggaaagagctcaattggtaaagtacttgtcacaccagccttaggacctgagtttgaacctggaggcaagcagatccctggattccctgggtggccaacccaacctaactgatgagccccagatccaaggggaaaacctgacactaaaaggatatctcaggatgctattactctgccattaaaagtctgtaattatgaaattttaaaaaaattaattatgacgttatgcacatacatttctgttttcagataactaacttgtaaccagctactttattttttaatattcttttgggattaagaaaatcataaatgattaaaaacaatacatgctttgtgtttgtttagcagtttaaaattgtctttgacaagaagaaccaaaatttcttcagtgtgcctttgtcagctaataatggcaagcagtgaataccttaaaagtatttatgaagtattatacacgaatttaggcaagtgtaacttgtagtctagggtcttgatgctaagttcttaacggacctcactggaaatagagagcagaaaagcaagcatttacatgcttccctcatactctggagatacatggcctgagcctgtgctgacccatctcacatgtcatcacacacagcccccactgctgtctttgctcagtcctcttcagacaggaatattcctgcaagtgtgacttggtaataacatgatacttgagctagagatggcacctctctccgtgtggatgtcattggagcccttagtgtggaagatggagagttttaagtgcaaagacaaagacttggtgtagttcctgtttgttgttgtgtttcactggctgcatttgccagtgaacatctccatttgaatttttaggggcaatctgaaataataatgcttatcaatttctaagtgcccttttggtccttagttatcctaatgtaatggggaaaatgggtacagataaaatattttttgtgtggtgttcaaagcattattaacactttgcctgaaacaggtcactttgcctcatccatttgccaaagtagctgattccaagttaaggaaactttgacataggctgataatattcttgtattttattttagattgtaagcttaatggcaggaaattgtatcaataatgtgctttttatatagcagccattgctgtatacctttggtgcttaataaatgttcatgattattca

SEQ ID NO: 851 - DNA, 2559 bp, Cricetulus griseus
ccatgaggcccgtgcgccccgccgccggtgcagacgagacggagctcccggcccccgcggaggagcggaggatcaatgcggttcaggaatcgattccagcgtttcatgaaccatcgggccccagccaatggccgctacaaaccaacttgctacgaacatgctgctaactgctacacacatgcattcctcattgttccagccattgtgggcagtgccctcctccatcggctgtctgatgactgctgggaaaagataacagcatggatttacgggatgggcctctgtgccctcttcatcgtttccacggtgtttcacatagtatcatggaaaaagagccacttaaggacggtggagcattgtttccacatgtgtgacaggatggtcatctatttcttcattgctgcttcctacactccatggttaaatctccgtgaacttggacccctggcatctcatatgcgttggtttatctggctcatggcagctggaggaaccatttatgtatttctctaccatgaaaagtataaagtggttgaacttttcttctatctcacaatgggattttctccagccttggtggtgacatcaatgaataacacagacggacttcaagaacttgcctgcgggggtttgatttactgcttgggagttgtgttcttcaagagcgatggcatcattccatttgcccatgccatttggcacctgtttgtggccacagcagctgcagtgcactactatgccatttggaagtacctttaccgaagtcccacggactttattcggcatctatgaccaatccgtgctaggtcttcaaatcagtattatcagagctgagtgttgcacagggaagaagaatgagcaacttgcactgacttcctttaatttttttgaatctaattactgtgaaagtataaaagctgtgccctggagtttttctcctcacagccaacaaataaggtagtgaattaattcttcattccattccactatcatgaaggactctgggtagacttggccaactgatgtttacaaaccagaattttgtattttcgttttacagattttactagatgatttttctaaattactaggccaggctgtcaaagtcagtgcggtaacacaacttcctttttaagaaaaacaaaagttgtttctatcgcttttcccgttcactgtgtaaagaatcatggaaacggaaacggaacactactttttaccatgtttcatcttgacataacatggctatttttttaaaaagagactttagttgttttgtaaatttttaaaaaactactccattgacctgcacccacacggttcctcagtcatgtgaagttttgcagcaagcggtcaacattccacaaacacatatacctcttctgatggttttattaagtgtggagaatttgccaattttttccaaacctttctgccaatatctgaccctgaattcagtgctgctgtggggttgtaatacttgacctggtgtggtccaccagggatgagaaagtattttgatatcatcaactttttcagacaacgtcactttcctctctgcctttgccatgttttctccagggtctctttccacatcgaggaggatcctgtgtgtattataatagtattgttgggctggccatctgccagacacttctcatgagcattctgaattatggtgaattgttgtactgtcactttggtggccaacagttcagtcatcgtggttaagtcactgaactttattgtatcagtttgatattcattttaaattgtgggactagatatatgaattcacatttctgccttttcctctgcatttctcaatatactattttttttcataccatatataaaactttgattgacaggtagaaacttgttatcagtagtccatggttttatgctgactcagtggaatagtatttatatattatttctagttttctctcaatgtcttatattaagattgatgtattacttgctttgttgtgtatctttcttggtgtttaaaagacatgaaatcaccttgcctttagatcagatgttaatataacctgtttgtctagaaataggcttgctcaatggagctgtcagattgaagatacactttattaattgaaattctgtaccattgtaattttaaaagaaagtttattttgtgtgtctgttcaggctctggttttggtaaattgttgaggatacttgctggtgatttcttcagtaggcaagggtacccaaggataacaccagccgggccattctatatgcatgatactgaacatttagctgcctgttgttttactgtgtaaaatattttactttaaatatattaacttttgtggattcatttaaactctgcccataagcaacactgtcaaaaccacttaaatgtatgtaaaaacttgtgctgtagattagaataaagttgttacttgggttgaaaaaaaaaaaaaaaaaaaaaaaaaaaaaaaaaaaaaaaaaaaaaaaaaaaaaaaaaaaaaaaaaaaaaaaaaaaaaaaaaaaaaaaaaaaaaaaaaaaaaaaaaaaaaaaaaaaaaaa

SEQ ID NO: 852 - DNA, 2558 bp, Cricetulus griseus
cgtggactttgagatccggttcatggtggatgctgacatcgtgggctgcaactggttggagctcccagctgggaagtatgttttggaggacagagaagaaggctacacagtgccagctggaggtggatgtgttgtggtcagatgtcatcagtcacccaccagaagggcagtggcagcgtattgcgccccttcgtgtacttagctttgacatcgagtgtgctggccgcaaaggcatcttccctgagccggagcgtgaccctgtgatccagatctgttccctggggctgcggtggggagaaccagagccgttcttgcgcctggcactcacactgaggccctgtgcacccatccttggtgccaaagtgcagagctatgagcgggaagaagacctgctccaggcctgggccaacttcatccttgccatggatcctgatgtgataactggctataatattcagaactttgacctcccatacctcatctcgcgcgcgcaaaccctgaaggtggaccgcttccctttcctgggccgtgtgactggtctccgctccaacatccgagactcctccttccagtcgaggcaggtgggccggcgggacagtaaggtggtcagcatggtgggtcgagttcagatggacatgctgcaggtgctgctgcgggagcacaagctgcgctcctagaacgggaatgagcagacacgccgccgcctggccgtgtactgcctgaaggacgccttcctgccacttcggctgcttgagcgccttatggtgctggtgaacaatagtagaaatggcgcgtgtcacgggtcggtgcccccttcggataccctgctccagccggggccgaacaggtcaaggtcgtgtctcagctgctgcgccaggccatgcgccaggggctcctgatgcctgtggtgaagactgagggcggtgaggactacacgggagccactgtcattgagccccttaaagggtactatgacgtccccattgccaccctggatttctcctctctgtacccatccatcatgatggcccataatctgtgctacaccacactgctacggcccggggctgcccagaagttgggccttaaaccagatgagttcatcaagacacccactggagatgagtttgtgaagtcatctgtgcggaagggcctcctgccccagatcctggagaatctgctgagtgcccggaagagggccaaggctgagctggctcaggagacagaccccttgcggcggcaggtcttggatggacggcagctagcactgaaagtgagtgccaactctgtgtatggcttcactggtgcccaggtgggcaagctgccatgtttggagatctctcagagtgtcactgggttcgggcggcagatgattgagaaaaccaagcaactagtggagtccaagtacaccctggaaaatggctacaatgccaatgccaaggtggtctatggtgacactgactctgtgatgtgccgatttggtgtctcctctgtggctgaggcaatgtctctgggtcgagaggctgcaaactgggtatctagtcacttcccatcacccatccgactggagtttgagaaggtttacttcccatacctgctcatcagcaagaagcgctatgctggcctgctcttctcctcccagcctgatacccatgacagaatggactgcaagggcctggaggctgtgcgcagggacaactgtcccctggtggccaaccttgttacatcctctctgcgacgaatccttgtggaccgggatcccgatggggcagtggcccatgcaaaggatgtgatctcagacctgctgtgtaaccgcatagacatctcccagctggtcatcaccaaggagctgacccgagcagccgcagactatgctggcaagcaggctcatgtggaactggctgagaggatgaggaagcgtgaccccggcagtgcgcccagcttgggtgaccgcgtcccctatgtgatcatcggtgctgccaaaggcgtggctgcctacatgaagtcggaggaccccctgtttgtgctggaacacagcctgcccatcgacactcaatactacctggagcagcagctggccaagccactgctgcgaatttttgagcccattctgggtgagggccgtgcagagtctgtgctgctccgaggagaccacacacgctgcaaaaccgtgctcaccagcaaggttggtggcctcctagccttcaccaagcgccgcaactgttgcattggctgccgctcagtgatcaaccatcagggagctgtgtgtgaattctgtcagccccgggagtcagagctctatcagaaggaggtgtcacacctgaatgccttggaggaacgcttctcgcgcctctggacacagtgccagcgttgccagggcagcttgcatgaggacgtcatctgcaccagccgcgactgtcccatcttctacatgcgcaaaaaagtgcgcaaggacctggaggaccaggagcggctgctgcagcgttttggacctccgggcccagaggcctggtgactcgacgagggacacggaataaagttcagactttttgctactg

SEQ ID NO: 853 - DNA, 2558 bp, Cricetulus griseus
ctcgctccccgcgctcccttcccgccaggttccggagttggtcccgccatggctcttctcactgctgcagcccggctcttgggagccaagaattcatcctgccttgttcttgctgtccggcatgccagtgcttcttccacgaatctaaaagatgtactgagcaatctgatacccaaggagcaggccagaattaaagccttcagacagcagcatgggaagacggtggtggggccagatcaccgtggacatgatgtatggtggcatgagaggcatgaaaggacttgtgtatgaaacatctgttcttgatcctgatgagggcatccgttttcgaggccacagtatccctgaatgccaaaaactgctgcctaaggctaagggtggggaagaacccctacctgagggcttattttggctgctggtaactggacagatgcctacagaggaacaggtgtcttggctctcacaagaatgggccagaagggcagctctgccttctcatgtggtcaccatgctggacaactttcctactaatctgcaccccatgtctcaactcagcgcggccatcacagcccttaacagtgaaagtaattttgcccgggcgtactcggagggcatcaacagaaccaagtactgggagttgatttatgaagattgtatggacctgattgcaaagctcccttgtgtggcagcaaaaatctaccggaatctttaccgggaaggcagcagcattggtgccattgactctaagctggactggtcccacaattttaccaacatgttaggctatactgaaccacagttcactgagcttatgcgtttgtacctcaccatccacagtgaccacgagggtggtaatgtgagtgcccacaccagccacttggtgggcagcgccctttcagacccttacctgtcctttgcagcagccatgaatgggctcgcagggcctctgcacgggctggcaaatcaggaagtgcttgtctggctgacacagctgcagaaggaggtaggcaaagacgtgtcggatgagaagttgcgagactacatctggaatacactcaactcaggacgggttgtcccaggatatggtcatgcagtactaaggaagactgacccacgatattcctgtcagagggagtttgctctgaagcatctgcctaacgaccccttgtttaagctggttgctcaactgtacaagattgtgcccaacatcctcttagagcaagggaaggccaagaatccttggcccaacgtggacgctcacagtggtgtgctgctccagtactatggcatgacggagatgaattactacacagtcctgtttggagtgtcgagggcactgggtgtgctggcacaactcatctggagccgagccctaggtttcccactagaaaggcccaagtccatgagcacggatggtctgatgaaatttgtggactctaagtcagggtaaaacgggagattgggggaaactgactataagaaaatgaggaagcttaaaaataaagtataattttgttttgtttcaggggcctttaagacttaagattaaactgtatctgaggcactgaaaatacatttgaagttaaaatataaataaaagatagaaaagtcgaccccttctcccctcaccagtcctggtatgagttgcccaccaactgtagagcgaccaggactaattaatgcatgtggtcaggttagagctggctgcccaccatctccagagtgagagtctggctcctcttgtttaggtcaaagcaggttacaggaaagctgcagtcactgaagcttctgcttctaatccaccagcctccacaccatcgaggccagggccaggccccctttgtttccataggaatcctgttgggtgtcagctgtgtcaaacctagggccttttcccatgtacacaagcacctcctagcaagatctgttggctagctggaaactccttggcaactttttatgctatcggttaccataagtggcatggtatttattgtgactggtacccagcatatgattctatttctctttttaaattataccattgaaatgaaggtctggaagtgtctacttccttccagacttcctatacctgctgtgcctcagctgaggatgccctgggtctccctgtcctagcctctgctaggtccttctacttagcaggtctgtgacctgtggtcttcccagtcattaggctttatcagacttaatgtgaactaggccttttacttccatggaacataagccactctgaccttgatttctcctgttaatatgctctggcacacagaacaagggctcaggaatggccagcctcttcatggtctggtcccaggggttctagcctttctttttgaacagttttagcagccccatttgcacaggttttcagtgactcagaatgctccactgccttttctctgagaaagggttgagatacactcctgttgtgccccccttgccccaaaattcctgcctgagtttgtgtggaacccaaacctcagtaccacactttttgagatggacacactgtaaacccctgggtaactgttaagtca

SEQ ID NO: 854 - DNA, 2557 bp, Cricetulus griseus
agcaggagcaagagctacaagccctgcatgcagagctgtcccaggtgaggtgcagcactgagggagcccacctagagcatgcagagctacaggaccagctgcaccgagccaacacagacacggctgagcttggcatacaagtctgtgccctgacagctgagaaggataggatggagaggaccctggccagcttggcccaggagctccaggactctaaagaggcagcactacaggaacgaaagggcttggagctccaagtgatgggactacagcaagagaaggagcgcttgcaggaaagctaaaggaagctgaggaagcagctagttcattccctgatctacaggcacagctggtccaggctgagcaagaatattaataacaaactactgccaggaggtaaaaacagggaaaggaatgaccagaagatgctggcagacctagacgacctgaacagaaccaagaaataccttgaggaacggctgatagagctgctcagggacaaagatgctctctggcaaaagtccgatgcactggaattccagcaaaagctcagtgctgaagagaaatgtattggggacatggaagccaaccactgccatgactgcaagcgggagttcagctggatcgtgcggcggcaccactgcaggatatgtggccgcatcttctgttactactgctgtaacaactatgcagtgactaagcccagtggcaagaaggaacgctgttgccgagcctgcttccagaagtttggcgaaggccctggatcccctgatagcagtggctctggcactagccaaggagagcccagccccatggtttcaccagctgaagcaggctcccagaccataggaaaccaaggagcaaactcagtctgcagaccaccagatgatgctgtgtttgacatcatcactgatgaagaattgtgccagattcaagaatctggctcctccttgcctgaaacacccaccgaaactgattcaatggacccaaatatggctgaacaggacaccacatcaaactcactaactcctgaagacactgaagacatgccaatggggcaggatgctgaaatatgcttgctgaagtcaggagagctgatgatcaaattgcccctcacagtggaggagatcaccagctttggggagggtaacagggagctgtttgtgaggtccagtacctacagcatgatccccatcaccgtagccgagcctggcctcactatcagttgggtcttctcctctgaccccaagagcatctccttcagtgtggtcttccaagagacagaagacacacctctcgaccagtgcaaggtcctcattcccaccacccgatgcaattcccacaaggagagtatccggggccagctaaaggttcgaacccctggcatctacttgcttatatttgacaacacctttttccagatttatctccaaaaaagtgttttaccacctgactgttgaccggcctgtgatctacgatggaagcgatttcccatagcatcagtaactgaacttttgatagctcatcatcatccaaggaaacactactactcctcactcatctcattaaacatcaacacacaccacacacacacacacacacacacacacacacacacacacacacacacacacacacacacacacacacacacacacacacacacacacacacacacacacacacacacacacacacacacacacacacacacacacacacacacacacacacacacacacacacacacacacacacacacacacacacacacacacacacacacacacacacacacacacacacacacacacacacacacacacacacacacacacacacacacacacacacacactctgagcactaggctactagagagcatttagccctgtgtaagtgtgcctttcacgtgtagctttattattttaagtagttcccaattttaatgaggtttagtcattagagtaactttttcaaaaatgcaaatgacaattgaggaatcactgaggaagatggtggcccagttggacttaattacactaaaaatcgtaaggagacatccttgagatcctgggtcattcttttccgggagggcagctcctcctctaatgactcagctccctcatagcagccatagtagtgttgtcagctgcctgttttccagtgccactgaagcctctactagacttcacccactgtgagaattctttatactgagaaaacattcttggctcagaggttttggaaaaggaggcagagaggagccatctttggtgctcagaaccagggaatgcaacacaaagaccatcgagtgctgctcatatttacgaaagcaaacactacttgatagaatcttagcacaatttcctcatctgcttaatttcttccaacaaaacaggaaagctaattcaaaatttccttttccctctcaagcacttttgaaatttccagagacctctctgatcagggggtgtttttagagccttttgatgtgtgtttaatctagatggcctgcttttagtgactacagtgacactgagcctctgtggggagg

SEQ ID NO: 855 - DNA, 2557 bp, Cricetulus griseus
actggaggccatgtgcacaaggaagaagcctcccgaaattcttgcccatctcatcaacaccccagccagagagaaggcaaccaccccagaggcgccattccattgaaaaggaaacacctacgaacgtgaggccagtttctgccaccatccaggcagagctctcgctcccttgaggaattctgctacccagtggagtggcctggctctcactgtggaggaagtgatgcatattcgtcaggtcctggtgaaagcggagctggaaaagtaccaacagtataaggatgtctacactgccctgaaaaaggaaagctctgcttctgttgccgaacacggaggttttccttcttcacgtggtcttacacctgtcagttctgtaagaggccggtgtgttcacagtgttgcaaaaagatgcggctgccctccaagccatattccactctacctatcttctcattgggaccttctgctttgcaaaggggagaaagttgtccgaggccagaaaaatcctccactgctcaccatcggccacttcgaagtatcgccaggttttcctcaaaatcaaaatcagtggacaaatcagatgaagaactccagtttcccaaagagttcatggaggattggagtacaatggaggtgtgtgtagactgcaaaaagttcatttccgaaatcatcagctcaagccggcgcagcctggtgttggccaacaaaagagcccggttgaaaaggaagacacagtctttctacatgtcctcagcgggcccctcggagtactgcccctcagaaaggactatcaatgagatctgagccctgtgccttccctttgctgttgtttcagaggcggcctcagtgcagtagtgctgcaggactctgcagaggttttccttgacaggctccatctgcagcaggtcaggtttgtgctgcactgaggcacagactcaaggctctgtttatacccatgggttgacgggacagggcaggtcagccagttgctcatttgcactcagaaagcctaaaacttgattttgtgtgtgtgaatagggaagccagaaacttccttagttcgttcctcaatgttcttcacataatttcctgactaaggcagagcccttcttgtgtgtgaattcagtctgacagagtgttgatgttggcacagttctcagcagtaagtcatattggcattccacttgacagtgttcctatccatgtacataatgctccaaagccctaggcacaccggctccctggggcgggccaggttgactactgtctcacagcacaaacctagaaggccttgctgatgattctctgaatgttttataatacatgtttaagaattaaaattttgtggatgtttgagggaaaaggaagactaagattttgtcaagcagctaagtgtgttttggtaaactgacagaccgtgaccatagagaggccgtagaaaagagctacatctcatacagttttagcaacattttccataactttatagcgtggccattgtgacgaaattaaccacagtttggtacctgagtctcaaactggtttatttttataaatgaattttaaaagaaaaatcctggctgtttaaaatttcaagaaaattgacctgctgcaatgcgtaatttttggatgctttttgcactagttatcttgtgaatgttcctgaatttctggtgaagggcaattgttggcaggtagtgttgtgcacctgaaattattcagttcctgtgacacatactatgggctgtccctcatttccatatgcttagaaataaccagtcaatcaaatcactaatgttcagaaaatcagtgaaggcacaatcacagtaattcctgaaagcttttaagaaaccctgtcatggtcaccaccgataacagctccatttaataaaaggcatgacagttgcatttcataccaacatcaagacagagtaacatttccacattcaattgacagtgacacctcagaaatgctgcagtagtcatttctaatgcattgaaatttatagattagtaaatggctttaaattacttatactgatgaaataaactttaccaattgactaaagcaatgccttaattactagatttcaagtctcagccctttcaaattaaaacagaaagttgttattgcagtagttttaaaaatgatctgtgttgaagaggtgtgtggttactaccatgaactcaacactatgaaatttgtaaggtttttatttttctaactactaagagaggactgacatttagctgaatgtaggaaacatgaaagttttaaattacgttgctatttgttaaaataaaacagaaaaattttacacattgaaggaccatgaagaaatctgtaccactgactggtctgtgacctggcttccagatgtgtaagcagagtattgctttcattccaacgtaatgacagtgctaaatgtgttccataagagtattttattttagctaggtatgatgccacataccttttaatcccagcattccagaggcagaggcagaaaatctctgatttcagggccagcctggtctacacaatgagaccttgtct

SEQ ID NO: 856 - DNA, 2557 bp, Cricetulus griseus
tacctcaacctgaacctcctcttcatgaatacagatactgcaccagcctctccctgtccctccatatcctcccagaactcaagctcctgctccagtttccaggaccaaaagattgccagtatgttcgacctgaccccggagtaccggcagcagcactttctcacggggctcctcttcacagagctggctgtcgccctggattctggaaggggatggaatcagcagagtgcagagacttgctgtttgaggaggaggtggtaacagtgtgctgacctgtgccagagggtgctgcaccactgcagcagcagcatggacgtcacacggagccaggcctgcgccaccctctacctcctcatgcgtttcagttttggagccaccagtaattttgtcaagagtaaagatgcaggtaaccatggctctagcatccttggtaggcaaagcaccagacttcaatgaagagcacctgagaaggtccttgaggacaattctggcctattcagaagaggacacggctatgcaaacaactccttttcccacccaggtggaggaacttctttacaatctgaacagcattttatatgacacagtgaaaatgagggaattccaggaagaccctgagatgctcatggacctcatgtacaggatcgccaagagctaccaagcgtctcctgacctgcgtctgacctggctccagaacatggcagagaaacacactaagaagaagtgcttcacagaggctgccatgtgcctggttcacgcagccgccttggtggccgagtacctgagcatgctggaggaccacagctacctgcctgtgggcagcgtcagttttcagaatatttcctccaatgtgctggaggagtctgcagtctctgacgacaccctgtcacctgatgaggacggagtgtgctctggtcggtacttcacggagagtggcctggtgggcctcctggagcaggctgcagagctcttcagcacgggaggcttgtatgagacagttaatgaagtctacaagctggtcattcccatcctggaagcacatagagatttccggaagctgacctctactcacgacaaactgcagaaggccttcgacaacatcatcaacaaggaccataagaggatgtttggaacttacttccgagttggtttctacggatccaaatttggggatttggatgagcaggaatttgtgtacaaggagcctgcaattacaaagctcccagagatctcacatagactagagggattttatggccagtgttttggtgcagagtttgtggaagtgataaaggactccactcctgtggataaaaccaagttggatcctaacaaggcctacatacagatcacttttgtggagccctactttgatgagtatgagatgaaagacagggtgacctacttcgagaagaatttcaaccttcgaaggttcatgtacaccacccccttcaccctggaggggcggcctcggggagagctgcacgaacagtatcgcaggaacacagtgctcaccaccatgcatgccttcccctacatcaagaccaggatccaagtcatccagaaggaggagttcgttttgactccgattgaagttgccattgaagatatgaagaagaagaccctgcagttagcggtggccactcaccaggagccccctgatgccaagatgctgcagatggtactgcaaggctctgtaggagccactgtaaaccagggaccgctggaggtagcccaagtgttcttggctgagattccagctgacccaaagctctatcgacatcacaacaagctgaggttatgcttcaaggagttcataatgcgatgtggcgaggccgtggagaagaacaggaggctcatcacagcagagcagcgggagtatcagcaggaactcaggaagaactacaacaagctgaaggacagtctcaggcccatgattgagcggaaaatcccagagctctacaaacccatattcagaattgacagtcaaaagagggactccttccacagatccagtttcaggaaatgtgaaacccagttgtcacaaggcagctgaaaaaagccacctttgcccagagtgactgaggccctactacccggaaggactcgctggtccatgacagcagccaccaaagactgactacacagtccctgctcagccagtgctctggaaccttcagagtccatgaccatggaatgatacccaagtgtattctggaatatcttggccatgccagggattggggtggggtaggtaaatgaggcataactgtatttattaaagtatgtttcacaatgctatacaagcaaaacctaagatgtttctgctgagtggctggtcactgtccacctatgaagtgacttcttctgacctgcatttgaatttctaaggtaaactcaaattgtggacggaagagtggaaaactgtcctgtggcctattccaagtgaatttcactggtcccttggtggggaggaaagataaactccagaaaagtgaaacattttccagtatgtctgtgagatcccatcactcaagagacagagacaggtggatct

SEQ ID NO: 857 - DNA, 2557 bp, Cricetulus griseus
aggattacctcagtgtgggataagagactttgccaaagctgactcttcaatcattgtccatttctgctgccacaaggcgaagatgtggaaaaagtttggatgaatggaaggaatataaaatgggagtgccaacctatggtgcaatcattcttgatgagacacttgagaatgtactgctggttcaggggtatctggcaaaatcaggctgggggtttccaaaaggaaaagtaaacaaagaagaagcacctcatgactgtgctgccagagaggtcttcgaggaaactggttttgatatcaaagactatatttgtaaggatgattatattgaacttcgaatcaatgaccagcttgctcgcttgtacatcacttccaggggttccaaaagatacaaaatttaaccccaaaaccagaagagaaattaggaacattgagtggttctccattgagaaattgccctgccatagaaatgatatgactcccaagtccaagcttggcttggcacctaataagttttttatggctattccctttatcagaccactaagggactggctgtctcgaagatttggagactcctcagacagtgacaatggtttttcctcagctggtagcacaccagccaagcccactgtggaaaaattgagtcgaacaaaattccgccacagccagcagctgtttcctgaaggttctcctagtgaccagtgggtaaaacacaggcagccgctgcagcagaagcctcacagtaaccatatggaagtgtcatcagaccctttcaaagcaaagaatcaaaatatgagagggaatggcagaaaacagtatcaagattcacctaatcaaaagaagagaacaaaacggagttcacagtcaaccaagctaaaagcaaacagaaatcccttgatgaaaatgtgaaaagaagctgcatccacgaaaacttcaggacaactttgagacagatgctgcatatgacttgccttgttctggtgaagacccattggtagaacatgttgaaggacactctgtggcatgcaacggacattgcaagttcccattttcatccagaaccttcctgagtttcaagtttgaccaaaacgctataatagaaaatacttggacctttgatagcagcaagtgtattgcgatcagagacctgttgcatttgagtgtgtctcctcaagccttacctttctcaggtatctgaaggaaatgcagggaggcagtttctaaagagattttctgtacagaagagaaactagaaagaaacaaaagtttgcactgtaaatgcatttagaactttttgtatggatttaccgtttcagtgttcagaacctacgttttatgtgtggaaaactacattcttagttttatattgtatctcagtgttgatctgtggaagctgatgttacattaggttccagtttgccataatagcagagtgacatgctttttattaatatcttgaagcccctgagttataaagtgagaaaagaaggggttatgcaatatacccggtacaaataaatacagcgtgttgctgggggaccctttaagtaatgtacttagctcacacctaagaatgtattttgtattttgcttcctttgggattcttaaatccaaacaaggatgacaatgctattttacaagggtcacctgtaactgaggacaatcaccagagctttaaggaggcaaatagcattttggctgcatctgacctcgctgagaagagagagagagagagagagagagattcttcttaaatgagtactttggtcagtctctggtgcctatagaggttggatttttcagctctcaatactaaagcaaaagtgacgttgttaccagaagtatggcctctaaagttgttgactctaagaaccatcaaatgctgtgctgcttcatttaatgcactgtggaacaaaacaaggatatggttgggatgcaattatggtaacttcgaactttagtctctcacttcactgttcaggttatatgagagactatggttagcacaggactggatttcttctctgaactgtgttagcatttcttcatagaatctgatgatgaagatgctgaatattgtatttgtggggtgggactttgaaatcgcttttaaacatctttaggacccaaccgcatgtgttccaaggtgcagtgcactgtgaatctttttaagtctaagtttgtaggtgcttttatgtgtgatttcagtggtttgaagaatgttaaataactttgtccttacacattttactccaagagacaaagaatacagtttacatactttctgtaagtttttgttacaaaatagtgaatgaatgactctagggtttcaaacagtgattccgtcctgagacatgcgcatttggaggagcctgaaaaacctaatagaccaggtagcttggatgaaattggttaaacatgttgaaagatctaactagattttggtatcaatatacaacaaatagtctcccaacactgtcacaggaattgtggtcactgcttgctgttttgacctttgaatatcattatttttatattaaatactaattagtaatt

SEQ ID NO: 858 - DNA, 2556 bp, Cricetulus griseus
agcaaagcctaccggggccgccgcccgcgctcctccaggagcagaggattttgatttcaaaggaaggaaggaaggaaggacaactcccagcctccccgtcccgccctctccgctccggcggcccggccggccatgcccaggaaggcggcgacagcccggcagcggggacttttctggtaggctcgtggcgaggggcgcggactggtagtctgccgtgccccggctcacggttccagcgagcgtgcagcacagcaccccgaagagcttgtcgcgggcttgggcccgccccaagacgcccggcccccggccgccgccaccccgatcccctgtgcccgccgcggtgggtggcatgatggtgcgcggaaggcagcgcggccctggccagctgagtcgcggcggcggtggtagtgggctccccagcggcatgccagtgccccctgggcgcgatggctagcggcagcgccgggaaacccactggtgaggcggcttctccggctcctgggagcgccgtcggcggggccagctcacagccgcggaagaggctagtgtctatctgtgatcactgcaagggcaagatgcagctggtggccgacctgctgctgctgtctagcgaggcgcgcccggtgctcttcgaaggcccccgcctccccgggcgctggtgccgagtccttcgagcagtgccgggacaccatcatcgcgcgcaccaagggcctgtccatcctcacccacgacgtgcagagccagctcaacatgggccgcttcggagaggcaggggacagtctcgtggaactgggcgacttggtggtatcgctgaccgagtgctctgcacatgcggcctacctggcggccgtggccacgccgggtgctcaacctgcacagcctggccttgtggaccgctaccgtgtgacacgctgccgccacgaggtggagcagggttgtgctgtgcttcgagccacccctctggctgacatgaccccgcagctgctgctggaggtgtcgcagggcctgtctcgaaacctcaagttcctgacggacgcgtgcgccctagccagtgacaagtcacgggaccgcttctcgcgcgagcagttcaagctgggcgtcaagtgcatgagcaccagtgcatctgcactgctggcatgcgtgcgcgaggtgaaggcggcacccagcgagctggcccgcagccgctgcgcactcttcagtgggcccttggtacaggccgtgagcgccctggtgggctttgccaccgagcctcaattcctgggtcgtgcagcagccgtgagcgctgaaggcaaggcggtgcagaccgccatcctgggaggcgccatgagcgtggtgtccgcctgtgtgctcttgacccagtgcctcagggatctggcgcagcaccccgatgggggcgccaagatgtcggaccacagggagaggctgaggaactcggcctgcgccgtgtctgaaggctgcaccctgctatctcaggctttaagggaaaggtcttcacccaggactttaccgccagtgaattccaattctgtgaattagcacccacaccacacaccacccccacccccatacccattttccaccccaggctaaaggaagacacttattcctcccctctccatttataccaaagaaatcataggtgactccccctcccccatattaaatgctcaagaggatttttccagaaggcagggccatgcacacaacttacatgtacacagtgggcccaggtgtctaccagcccactgtagagactcagatgcagaagatagatgggaagtctgtgggctgcaggattacccctacacactccaacccttcaactctattaattgggcaggaaagacgtcatgagttcatttcttcttatttttaattaaagaaaggttacctcagttttcactccttagacatggatgtagctacctttttgtatgttgttatttttgttgaattagagtatacatggtgtgataagagtatgactttgccatgtgatttgcaagtggggggaaagctactgtgagcgtgtgttttattttttaatttacactatagagtgatttttccccccaatgtcaagtttttaccctgcatgtactggagtatttatttcatctattaaattgttatgtttctcagatggctttttttgcagttctatattttcactaactctgcatgctgcctgtcatctgtgggaaggggctgccagggaaaggtttacttcagttgtcaagtgaatccccggtgcccaccctttttcactattgtgttgattgaaatcatgtcatggtagtttgtcttttgggtagacataaagggattggggatgggggttgtaagggagtgtgtagtttgttgaagacactgttgagtagttcttattaaaagaatgacaaacctatttacagtcttgaagcctggaagagccacacaggcaaaaggactcctacagtctttaaatgtatcgtttatgtttttcttgggatttattgtgcttaaaccttggtggtgcccacaaatctgaaaagttttcactataaaatatcagca

SEQ ID NO: 859 - DNA, 2556 bp, Cricetulus griseus
gatggcggcgtgcgcccggagcggctcggcccggcagtagtggcgggaccgcactcgccgctggggccgcccgcccccctgagtggctgctgcagcgccgggagtcgaggatggtaaaatgacccaggggaagaagaagaaacgggccgcgaaccgcagtatcatgctggccaaaaaagatcatcattaaggacggaggcacgcctcaaggaataggctcccctagtgtttatcatgcggttattgtcatcttttttggagttttttgcttggggactactgacagcacccacattggtggtattgcatgaaaccttccctaaacatacatttctgatgaatggcctaattcaaggagtaaagggtttgttgtcatttcctcagtgccccacttattggttgctctttctgatgtttgggccggaaatccttcttgctgctaactgttcttcacatgtgcccccattcctctaatgaagatctagccctggtggtactttgctgttatctctgtttctggggttttgcagtgacattctctgtggtatttgcatatgtagcagatataactcaagaacatgaaagaagtatggcttatgggctggtttcagccacgtttgctgccagcttagtcaccagccctgctattggagcttaccttggacgagtgtatggggatagcttggtggtggtcctcgctacagcaatagctctgttagacatctgtttcatcctcgtggctgtaccagagtcattgcctgagaagatgcggccagcatcttggggagctcccatttcctgggagcaggccgacccctttgcatctttaaaaaaagtgggccaagattccatagtgctgctgatttgtatcacggtgtttctctcctacctaccggaggcaggccagtactccagcttcttcttatacctcagacagataatgaaattttccccagaaagtgttgcagcctttatagcagtccttggcattctgtccattattgcacagaccatagtcttgagtttactcatgagatcaattggaaataagaataccatcttattgggtctgggatttcaaatattgcagctggcatggtatggctttggttcagaaccttggatgatgtgggctgctggggcagtcgcagccatgtctagcattacctttccagctgttagtgcccttgtttcacgaactgctgatgctgatcaacagggtgttgttcaaggaatgataacaggaatccgaggattgtgcaatggtctgggaccagccctttatgggttcattttctacatattccatgtggaacttaaagaactgccaatcacaggttcagacctggggacaaacacaagccctcagcaccactttgaacagaattccatcatccctggtccccccttcctctttggagcctgttcagtactgctggctctgctcgttgccttgtttattccggaacatactaatttaagtttaaggtccagcagttggagaaagcactgtggtggtcacagccatcctcacagtacacaagcaccaggagaggccaaagaacctttactccaggacacaaatgtgtgatgatcgaaatcaggaagacttttctatcagcacccaggtcttagttttcacctatagttctggatgtacattccatttccatctacaatgtacttttaagattgtcttaagaaatatctgcatgaactccgtgggaactaaagaaagaactggacagttttccaaagatgttacaatttctttctaaaagaaaccttttgtttattagcaccaatctcttgccactaaactgttttattatacatctttaattaaaggctatatatgtaactcattgtaaaatcttgggtcaaataattcaaagccttaacgcagatgcactaggataaagaaatggtaaagaattgtttgaatttaaagcaacaaaaacttgtgaaaattgtagaaaaccagaatcatgttccaagcctgtttgccataattttatttaaaacattattcactactgttttgaagtatggaaatatcagccacttagaatttaaattggggtggtcagagcctatgttctgcttcttataccactattcttttgatgtttccataatcataaggacctcaacacttgaatacataatctaaaaattatatagtaaagctggtagccttgaaaatgtcaatgtgatatctctatgtagataaatatatatagtggcctttcaggactgtcacagtaacactttatttacagagctaatgtttgtcctaaattttcaggaccctagaagagagctttatacaattactgatgtgaatttctctaaagtgtatatttttgtgtccagttatattatttaaaaaagtgttactttgtaaaaattgtacataaagtattgtatagtttacactgttttcatcttgtgtgtggttactgcctaatgctttttaaacttggagcattcactatgattaaataaggtctcaaaatgtaaatattctgttaataaaattaaatattttaatga

SEQ ID NO: 860 - DNA, 2555 bp, Cricetulus griseus
tccttggattcagatagactgtgagctgcctctcccagtgaaaaagaaagatgtggaaagcttccgcaggccacgccgtgtctatcacccaggacgatgggggtgctgatgactgggagactgaccctgattttgtgaatgatgtgagtatcagctgttggccatgagtaccagtcaaaactttctaagcattgctcacaagtggactcggtccggggcttcggaggcaagtttggtgtccagatggacagggtagatcagtctgctgtaggctttgaataccaggggaaaacagagaagcacgcctcccagaaagactattctagcggcttcggtggcaaattcggtgtgcaagctgaccgtgtggacaagagcgccgtgggctttgactaccagggcaagacagagaagcatgagtcccagaaagattattccaaaggttttggtggcaaatatggaatcgacaaggacaaggtggacaagagcgctgtgggctttgagtatcaaggcaaaacagagaagcatgaatcccagaaagactatgtgaaagggtttggaggaaaatttggtgtgcagacagacagacaagacaagtgtgcccttggctgggaccatcaggagaagctgcagctgcatgagtcccaaaaagactataagactgggttcggaggcaaatttggtgttcagtccgagaggcaggactcctccgctgtggggtttgattacaaggagagattggccaagcacgagtcccagcaagactatgccaaaggatttggcgggaagtatggggtacagaaggatcgaatggacaagaatgcatccacctttgaagatgtggcccaggtgccctctgcgtaccagaagactgtccccattgaggctgtgaccagcaaaaccagtgatatccgagctaactttgaaaatctggcaaaggagagagagcaggaggacaggcggaaggcagaagcagagagagctcagcggatggccaaggagaggcaggagcaggaggaggctcgaaggaagctggaagagcaagccagagccaagaagcagacgccccctgcatctcctagttctcagccagctgaagacagaccaccctccagccccatctacgaggatgcagcgccgttcaaggcggagccaagctaccgacctgagcctgtgtacagcacagaggctgcaggtgtccttgaggccagcagccagcaaaacttagcttacacctcagaacctgtctacgagaccacagaagcccctggccactaccaagcagaggatgatacctacgatggatatgaaagtgacctgggcatcacagccatcgctctgtatgactaccaagctgctggcgatgatgagatctcttttgaccctgatgatatcatcaccaacatagaaatgatcgacgatggctggtggcgtggggtgtgcaagggcagatacgggctcttcccggccaactacgtggagctgcggcagtagggcagccaccagtgcctaccagccccagcagagggttcattcacactgcagaccatctgcgcacatttgagttggtttctgttggtttctgtttttttttttttccgaaggtggggaggggatatacatattgcctttatatttaatacttctgctgatgcttcagggcatgtcttgccacagaatttgctaatatctgataatcatgttcatagagaacttggggtgattactttgagccatcccaggtgtttccttttctgccaagttgactgtggtatgtagccacttcagggtctctgcttctcctgaggttggtggtatatgtggccttgtgccccccacccccatggctgttgggatcccccaagatggagactgctcctggagtgggtgcccagtgaggaggctctctagggtccagtgtttggaagacaggaaaggggaccaagggaaagtgagtctcctgccttgccttgaagtgttaccttctcctatctgcattcaagacccatagcacaaagcatgtcttagcgacatgctggcagctatcctgggcttggcctgcaatgtgggagggtgggggtgggtcccaagaggaactcaaacccctgagcagcctggaatgtgctgtgtgtggccagccacttggctagctaggcagatagatacctttccactgcaagcttccagaagcatgcttgattgattgatgtggctgaaaataggactgtgagggggctgaggctcccacctgggtgcctgccacagcttccttcagcagctgtccctaagatgcttttaagtctctgagacaccaggaggctgggccacactggttgctcacattcaggcagatagcatgtccttgtagacaagtctccacttttgggacacatgagaactgatgcccatctccatgtgctttcctgcagaatccttgcctttccgttgttaggttgggttttctatgtgaattatcatctggaattctgtagcacacctcattagatacggaatttttttaaattaaatactcagaataaacttttttgatccattta

SEQ ID NO: 861 - DNA, 2555 bp, Cricetulus griseus
cggtggcggcggcggcagctgcagtgacatgtccagcatgaatcccgaatatgattatttattcaagttacttctgattggcgattctggggttggaaagtcttgcctcctcctcaggtttgcagatgacacgtacacggaaagctacatcagcacgattggtgtggatttcaagatccgaactatagagttagacgggaagacaatcaagcttcagatatgggacacagcaggccaggaaagatttcgaacaatcacctccagttactacagaggagcccatggcatcatagttgtgtatgatgtgacagatcaggagtccttcaataatgttaaacagtggctgcaagagatagatcgctatgccagtgaaaatgtcaacaagttgttggtagggaacaaatgtgacctgaccacaaagaaagtagtagattacacaacagcgaaggaatttgcagattcccttggaattccatttttggaaaccagtgctaagaatgcaacgaatgtagaacagtctttcatgacgatggcagccgagattaaaaagcgaatgggccctggagcaacagctggtggtgcagagaagtccaatgttaaaatccagagcactccagtcaagcagtcaggtggaggttgctgctaaaatttgcctccgtccttttctcacagcaatgaattcgcaatctgaacccaagtgaaaaaacaaaattgcctgaattgtactgtatgtagctgcactacaacagattcttaccgtttccacaaggtcagagattgtaaatggtcaatactgacttttttttttattcccttgactcaaagacagctaacttcattttcagaactgttttaaacctttgtgtgctggtttataaaataatgtgtgtaatccttgttgctttcctgataccagattgtttcccgtggttggttagaatatattttgttttgatgtttatattggcatgtttagatgttgggtttagtcttctgaagatgaagttcagccattttgtatcaaacagcacaaccagtgtctgtcaatttccatgcataaagtttagtgagacgttatatgtaagatctgatttgctagttcttccttgtagagttataaatggaaagattacactatctgattaatagtttcttcatactctgcatataatttgtggctgcagaatattgtaatttgttgcacactatgtaacaaaactgaagatatgtttaataaatattgtacttattggaagtaatatcaaactgtatggtgataagtattgttttaattcttatggttaaagggaaatagggatttgcattatactcaacagccaatttgtgtgtgcaacaagggcactgtagacctatctaataatagcacagcatccagtatttgctttctagtaatagacctgctaagtgacctagagaagcttctgtgctgtgtagactgaaccaaattcattggttcaaggagctcactgaagtggcttcactcaaactttcttcatgcatctgtggtagagatggagagcagcacatgctttactccccaggctttttattttttgcttttagagacagggtttctctgtgtagttctggctgtcctggaacttgctccgtggaccagactggcctcgaactcagggatccacctgtctctgcctccaagtgctaggattaaaggcatgcaccaccatgccccctttattttttctttcttttttgagatagggtctcactatgtaaccctggctggcctgcaacttagtatgtgcagcaggctggcccctaacagagatccacctgccttttcctcccaagtggtgggattaaaggcatgtaccacaagactgcacatgttttttgagacaatgtctcatgtagctcaagaggcctcaaattcacttgtaaccaaggatggccttgaattcctgatcctcctgactccacttctaggtgtcaactttttattctttccaattgtataactcatgttggaggagaggttaaactttagaatagaaagcaggaaatgttgattgccctaattgtagaaattaaatccccccaaattaactgaaaacatggatgctagatgggaatgatgagagaaataatatatttatttcggtgaaatttttgcatgtgtggaagttttgttgactgggaccttcaaggtcctagactttgcttttgtctcactgtgggaaaccaagtctctttcagacgctagcatttaaggtgacagaggtcagaggttgtttcctttggtttaaacaagcaggcaaacattcttttaattgggggcttaggatgttgctgctgacaacacattttattatggggtctttaatgataaaatattaaactaaaagtaagccaaaaattacaggtttctttatttttcactaaacagacgattgaaatacatggtacaaaaataagtggtaagattattgtaaaatgaaaatggacagactattcaatttaattttccatctatgagaatttcacaataaaatcatagtttactttgtattata

SEQ ID NO: 862 - DNA, 2554 bp, Cricetulus griseus
gccagatggtatgaatggctggatccaagacattaaaaaaactagagtggtctagagaagaggaagaaaaactagttacacttggccaagctgatgccaacgcagtggaggaccattgctccaatcattggaagaacagcagcccagtgtttggagcactatgaattcctcctggacaaaactgcccaaagggacaatgaggaggaaacaacagatgacccccgaaagcttaaacctggagaaatagacccaaatccagagacaaaaccagctcggcctgatccgattgatatggatgaggatgaacttgaaatgctttctgaggctcgagcccgcctggctaatactcaaggaaagaaggctaagaggaaagcaagagagaagcagctggaagaagcaaggcgccttgctgcccttcagaaaagacgagagcttcgagcagctggcatagaaattcagaagaaaaggaaaaagaagagaggagttgattataatgctgaaatcccaatttgaaaaaaagccaagactcttggttttatgatacttctgaggaaaattaccaagcccttgatgcagacttcaggaagttacgacagcaggatcttgatggagagctaagatctgaaaaagaaaaaggaaaaaagaatccgatttaccgtcagctattcttcaaactagtggtgtctctgagtttactaaaaagagaagcaagttagtgctgcctgctcctcagatttcagatgcagagctccaagaagttgtcaaggtaggccaggccagtgaagttgctcggcagactgcagaggagtctggaatcacgaactctgcttccagcactctcctgtctgagtacaatgtcaccaacaacagcatcgctctgagaacaccaaggacaccggcctcccaagacaggatactgcaggaagctcagaacctcatggctttgaccaatgtggacactccattgaaaggtgggctcaataccccactgcatgagagtgacttctctggtgtgaccccacagcggcaggttgtgcagactccaaatacggttttgtctacccctttcaggactccttctaatggagctgaagggctgactccccgaagtggaacgacccccaaacaagtcactaatgctaccccaggtagaacaccacttagagataagttaaacattaatccagaggatggaatggcggactacagtgacccctcttatgtgaagcagatggaaagagagtctcgagaacatctccgtctagggttgttgggcctccctgcacctaagaacgattttgaaatcgttctaccagaaaatgctgagaaggaactggaagaacgtgaaatagatgacacctacatcgaagatgctgctgacgtggacgctcgaaagcaggccatccgagatgctgagcgtgtaaaggaaatgaaacgaatgcacaaagcagtacagaaggatctaccgagaccgtctgaagtaaatgaaactattttaagacctttaaatgtagaaccacctctaacagatttgcagaaaagtgaagaactgatcaaaaaagaaatgatcactatgcttcattatgaccttcttcatcacccctatgaaccatctgtaaataaaaaagggaaaagtgctggatttgctaccaataattcagatcacattgcctatcttgagcatagcccttatgagaagttctccaaagaagaactaaaaaaggcccaggatgtgttggtacaagagatggaagtggtgaaacaaggaatgagccacggagaactctccagtgaagcctacaaccaggtgtgggaagaatgctatagtcaagtcctgtatcttcctggtcagagccgctacacaagggctaatcttgctagcaagaaggacagaatcgaatcacttgaaaagagacttgagataaaccggggtcacatgacaacagaagccaagagagctgcaaaaatggaaaagaagatgaaaattttgcttggcggttaccagtctcgtgctatggggctcatgaaacagttgaatgatttatgggaccaaattgaacaggctcacttagagctacgcacttttgaagagctcaagaaacacgaagactctgctattccccggaggcttgagtgtctaaaggaagatgtgcagcggcagcaggaccgagagaaagagctccagcagaggtacgcagacctgacggtggagaaagagactgtgcaggccaagttctgaagcacgcacagcaggcactctcctcagaagaaccacttgagggttcatgtccgcaaggcgaaactgatgtttctcttcattgacacatttacccagcacctgtggtttctcagttgtttcgaatgataccaccaatcttgcgtgttctgtgttacagacttggactccaggataatgaggtcgaaaattatccagacgctcattctttgcccacgtcatgtttgcaaaatttcgtagtttaggcctgtaatttaaaagcctgactttaaatattgcctgtgagtaaacctttgaataaaagaatatgtagaaaaa

SEQ ID NO: 863 - DNA, 2553 bp, Cricetulus griseus
cacctacatgctattccaccaactttggccatgaatcctcaagcccaagctctccgaagtcttttggaggttgtagtattgtctcggaattctcgagatgcgatagctgctcttggattactgcaaaaggctgtagagggtttattagatgccacaagtggtgctgatgctgacctattgctgcgatatagggaatgccacctcttggtactaaaagctttgcaggatggcagggcatatggatctccatggtgcaacaaacagatcacaaggtgcctaattgaatgtcgagatgaatataaatataatgtggaggctgtggagctgttaattcgaaatcatttggttaacatgcagcaatatgatcttcatctagctcagtcaatggagaatggcttaaactacatggccgtggcatttgctatgcaattggtaaaaattctgctggtggatgaaaggagtgttgcccatattactgaggcagacctattccataccattgaaaccctcatgaggattaatgctcattccagaggcaatgctccggaaggattgccccagctgatggaagtagtgcgatccaactatgaagcaatgattgatcgtgctcatggaggcccaaactttatgatgcattctgggatctctcaagcctcagaatatgatgaccctccaggcctgagggagaaggcagagtatcttctgagggaatgggtgaatctataccattcagcagcagctggccgtgacagtaccaaagcgttctctgcgtttgttggacagatgcaccaacaaggaatacttaagactgatgacctcataacaaggttttttcgtctttgcactgaaatgtgtgttgaaatcagttatcgtgctcaagcggagcagcagcacaatcctgctgccaatcccaccatgatacgagccaagtgttatcacaacctggatgcctttgtccgactcattgcactgttagtgaagcactctggggaggccaccaacactgtcaccaagatcaatctgttgaataaggttcttggtatagtagtgggagttctcctacaggatcatgatgttcggcagagtgaatttcagcagcttccctaccataggatttttatcatgctgctgttggagctcaatgcacctgagcatgtgttggaaaccattaatttccagactcttacagctttctgcaatacattccatatcttaaggcctaccaaagctcctggctttgtatatgcctggcttgaattgatctcgcatcggatctttattgcaagaatgctggcacatacgccacagcagaaggggtggcctatgtacgcacagctgttgattgatttattcaaatatttagcgcctttccttagaaacgtggaactcactaaacctatgcaaatactctacaagggtactctaagagtgctgctagttcttttgcatgatttcccagagttcctttgtgattaccattatgggttctgtgatgtgatccctcctaattgtatccagttaagaaatttgatcctgagtgccttcccaagaaatatgaggctcccagacccattcactcctaatctgaaggtggacatgttgagtgaaattaacattgcacctcggatcctcaccaatttcactggagtgatgccacctcagttcaaaaaagatttggattcctatcttaaaactcgatcccctgtcacttttctgtcggatctgcgcagtaacctacaggtatctaatgagcctggcaatcgctacaacctccagcttatcaacgcactggtgctctatgtagggactcaggccattgcacacatccacaacaagggcagcacgccttcaatgagcaccatcacccactcagcacacatggacatcttccagaacctggctgtggacttagacaccgagggccggtatcttttcttaaatgcaattgcaaaccagctgcggtacccaaacagccacactcactacttcagctgcaccatgctgtacctttttgctgaggcaaacactgaggcaatccaggaacagatcacaagggttctcttggaacggttgattgtaaataggccgcatccttggggtcttcttatcaccttcattgagctgattaaaaacccagcatttaagttctggaaccatgagtttgtacactgtgccccagagattgaaaaattattccagtctgttgcacagtgctgcatgggacagaagcaggctcagcaagtgatggaagggaccggtgccagttagatgaactgtatatcccttgccagaggcatcagccttggtcccagtggaccaagttcataaactgaagaatcctcctgactttcccagccctttggttctcgggtgtctgccccatcaactggtggggttggcctcctgtctatgtgggcaagttccaaagtttaaatgcattttttttttgactcttggccaaaatttagaagatgctgtgaatatcattttgaacttgtgtaaatatatgaaagaagaaaacttttgtctagaaacttcatggctttttgtaaa

SEQ ID NO: 864 - DNA, 2552 bp, Cricetulus griseus
gcagaggactgacctttgaaaatatgtatttgggagataatcacgttctattgaataccttgtgctggtgctgccatcgaaaaatactggttacagtctggggagggcctgctactgctgcaggactgatccacctcggccctgagatgagtgtcccgacagagcaggcgcatcatgaatagatacacaacgatcaagcagcttggggatgggacctatggttctgtcctgctgggggagcagcatcgagtctggagaactgattgccaattaaaaaaaaatataatgtatcagatattgcaaggactggcattcattcataaacacggcttcttccaccgggacttaaagcctgagaatctcctctgcatgggaccagaacttgtgaaaattgcagactttggattggcccgagaaatccgatcaagacctccgtacacagactatgtgtctactagatggtatagggctccagaagtcctcctgaggtctaccaactacagctcccccattgatgtctgggcagtgggctgcatcatggcagaggtgtacaccctccggcctcttttccctggggccagtgaaatcgacacaattttcaaaatctgccaagtgttgggaacaccaaagaagaccgactggcctgaaggctaccagctgtcgagtgctatgaacttcctctggccccagtgcatacccaataacttaaagactctaattccaaatgctagcagcgaagccattcagctcctgagagacatgcttcagtgggatcccaagaaacggccaacggctagtcaggcacttcggtatccttacttccagattggacatccactgggcagcgtcacacaggattcaggaaaacagcaaaaagatgtccaagccaagacaggactgcctacttacatcaagccagcccctcctgcccagcccccaaccaaggcacatacactgatttcttcacgaccaaaccaaaccagtcagcctcctcagcattttgtgtacccctacaaaaggtgaagcctccagggcagatcagcccagccatcttcaggagggcaagccaagcccaacgctcttcccgtcccttcacaataagaatcttcagccaaaaatcctagctggtgtggaacacaaaaatggtgaaaatcaagccaaagaccaggagaagatggggtctcatttccaggtcaacaaagggttctgacgattgggcggacttggatgacttagatttcagtccctctttcaccaggatagatgtgaaaaacaagaagagacagagtgacgaccccctctgcaggtttgaaagtgttttggacctgaagccatccgagccggtgggtacaggaacgagtgtctcaacgcaggcttcctcccagaagagagacacgccaacccagcggtctgcggcaaagcagcactacttgaagcactctcgctacttgcctggaataaatgtaagaaatggcgtgctcccgaatccaggcaaggactttcctccatcaaatccatggtccagttctggtttgtctggaaaatcttcaggaacagtatcagtagtgagcaaaataacttcagttggctcaggctccaccagttccagcggactgactggaggttacatcccttccttcctgaagaaagaaatcggttctgttatgcagagggtacagctgacgcctctcgccgaccccgcccctggctattcttccctgaaggccatgagacctcacccggggcggcctttttttcacacccagcctaggagcactcctgggttgattccacgacctccagccgcccagcctgtgcacggcaggatagactggtcttccaagtacccatcccatcggtgactgtcaaagccccgaggccattctccttcagctgattccgttgtacctgcagaaccacctggtggtgtaaaagcacccaagcttacagctgttctgaactaacacatttcaatatttcttttaaatttttttttaaatattgatttgacgcaataccctcttttgtataaaattattttattctaaaatcactgtatgaccagaagcaatatgtttataagaaaacatttgacatactcattgttttaagcatactgtagcaatgtgtttgtttaatatatgtgggtaggtattttttagaattgttttataatttccaaccaaatgtactgtatatttgtataatttattgggatgacctgctcaagtaaattatcaagataaaataggggcatgtgtcatcttaattggtattggtttttccttaaatgctgacaatgtgacttgatctccgcctggatgaagcctctgatttccccgtatctcagtacagaatttggtctagttccactgattttgattagaaacccatcttcccttaactagaaggcaaatgacgggaagtaaagaaagacccttctgaaacaaaataataatttctgaatggtctctcctaagaagtttgatggtgttgacatcaatatatatggaaacttacctactcccaaataaacttacaacttaaagaaa

SEQ ID NO: 865 - DNA, 2552 bp, Cricetulus griseus
tcgtggaaggcgttcggcgagcgatggcggtaacgcgtgtgggaccttgcgcccgcgagattttcacgacactggagtacgggcccgtgccggagagccacgcatgcgcactggcctggctggatacccacaaccgcctcttgggccactatgtcaatggaatgtggctgaagccagaacacaggaatccagtgccttgccaggatcctatcacaggagaaaagctggccaactgccttcaggcaaaggccgaggacatcactgcagctgtggaggcagcaaggacagcattcaagacctggagccaactccctggagctgctcgagcccaacacctaagccggttggccaagactctccagaagcatcagcaactgctgtggaccctggagtctctggtcactgggcgggctgttcgggaagtacgagatggagatgtcccactggcccagcaactgcttcagtaccatgcggtccaggcgcatgcccaagagaaggccctggcaggctgggagcctatgggagtcattggcctcatcctgccaacttctttctctttcctggatatgatgtggagggtctgccctgccctggctatgggctgcaccgtggtggcccttgtgcccccagccctcccaacacctctcctcctggctcagctggcaggggagctcggctttttcccagggatcctcaatgtggtatgtggccctgcctcactggggcctgttctggcctcccaacctggagtccagaaggtggccttctgcggagctgtggaggaaggacgtgctctgcgacggaccttagcaggcaagggggccaagctgggcctggccctgggcacagaatcactgttgctgctgatggactcagcagatgtagactcagctgtggagggtgttgtggatgccatctggtcagaccgcagcctgggggggctcaggctccttatccaggaatctgtatgggatgaagctatgaggcgactccgggctaggatggcaaagctgcggagtggacgaggactagatggggctgtggacatgggggctcgaggagctgctgcccgagacctagcccagttttttgtggatgaggcccaaagccaggggggacaggtattccaggctggtgatgtgccctccaacagtccattcttctctccagtcttggtttctggcctgcctccagctgccccatgtgcccaggccgaggtaccgtggcctgtggttgtggcttcccctttccgaacaaccaaggaggcactaaccctggccaatggaacaccacggggaggcagtgccagtgtgtggagtgagaggctagggcaggccctggagctgggctatgggctcaagatgggcaccgtatggatcaatgcccatggcctccgagaccctgcagtacccacaggtggctgcaaagagagtgggtcttcctggcatgggggcccggatggtctgtatgaatacctttggccctcggggacaccttcctgggagcctgccctttgcgagagtctcaactatgacacgtttggccttgccgtgccctccagcctggtgtcagggccagaaacggggctcagcccagtacccccctatgggctgtttgttgggggccgtttccaggctcctgggtcccgaacctccaggcccattcaggattcttcaggcaaacttcacagctatgttgctgagggtggagccaaggatatccgaggtgctgtagagactgctcatcaggctgcccctggctggggggcccagtctccaggggcccgagcacgcctgctgtgggccctggcagctgcagtggagcgtaggaagccagctctggcctcacaactagagagccacggaatagcccctatggttgccaagactgaagtagagctgagtgtgaggcggctccagatttggggcaccaaggttcaagaccaaggccagacactgcaggtaacagggttgagaggacctgtgctccggcttcgagagccacttggagtgctggctgtggtgtgcccggatgagtggcccctgctggcctttgtgtcactgctggctcctgccctggcccatggcaatgctgtggtcttagtacctagtggggcctgtcctctgccagccctggaggtctgtcaggatatagccaccctgttccctgctggtctggtgaacgtagtgacaggagatcgggaccacctgacccgctgcctggccttacatcaggacattcaggccctgtggtacttcgggtctgcccagggctcccagtttgtggaatgggcctctgcaggaaacctcaagtctgtgtgggtaaacaggggcttcccaagggcctgggatgaagaggtccagggggaaggaccagagctgagtctgcatgcagcacgaaccaaggccctgtggctcccaatgggggactgatgcctgaagctgtccactccatcttgggtgcccagagataccagatgtttggaatttttctctcagatttcccatggtttccaataaactgagtgacttttactgaaaaaaaaaaaaaaa

SEQ ID NO: 866 - DNA, 2552 bp, Cricetulus griseus
  modified_base (1000)..(1000): a, c, t, g, unknown or other
ttgcttagagagcgtgaaggaccctgatccgctacttgcggcatgaggatgagacgagagacgtgcggcagcagttgggagctgcacagatcctgcagagtgacctccctgccccatcctcacccagcaccgccaggacaagcctctcttcgatgctgttatcaggctgatggtgaatctgacccaaccagccttactctgttttggcggcgtgcctaaggaccctggtgtgcggcaccatttcctgcaggttctaactcacctgcaggcctacaaagaggcatttgccagtgagaagactttcggagtcctcagtgaaaccttgtatgagctgctgcagctgggctgggaggacaggcaggaagaagataacttgctgattgaacggatcttgctgctggtcagaaatattcttggcatggacgacttgctcctctttctgtccagctcatctgctgagcagcagtggagtctccatgtgttggaaattgtttcccttatgttccgagaccagaaccctgaacagctagcaggagtagggcagggacgcttggctcaggagcgaagcacagacatggcagagctggaggtgctacgccagcgggagatggcggagaagagaactcgcgccctccaaagaggcaacaggcactctcgatttgggggctcctacattgtccaggggttgaagtccattggggagagggatgtcatttttcacaaaggccttcacaatctccgaaactacagttcagatctggggaagcagccccggagggtgccgaagagtcgccaggctgccccaggagctgtccgttcaccgccgctccgccctcaacgtgaggctcttcctcagggacttctgctccgagttcctggagaactgttacaacccactcatgggtgcagtcaaggaccacctgcttcgggagagagccccaacagcacgatgagacgtactacatgtgggctttggccttctttatggcctttcaaccgngctgcctccttcgcctggctttgctctgagaccctgagtgtccgtaccttccacttcgtggagcagaacctcaccaactactatgagatgatgctgactgaccgcaaggaggccgcctcctgggcacgccggatgcacctagctctaaaagcctaccaggagctgctggccacagtaaatgagatggacatttgcccagatgaagctgtgagagagagcagtcgctaccggcagaacagcgctcacaccaaccattgtgtttgccaagatgctgcaccggctggcccatgaccttgggaatggaagccctgctttttccagctgtccttgttctgcctctttataggctgctgagtgacccggctgctggagcctacaaagagctggtgacttttgccaaatacatccttggcaagttcttcgcattggctgccgtcaaccaaaagcttttgtggagctgctgttctggaagaacactgccgtggttcgagagatgactcagggatacggctccctcgacagtgggtcttccagtcacagagccactgcgtggagccctgaggaagaggcccagcttcaggaactatacctcgcccataaggatgtggaaggtcaggatgtagtgggaaccatcctcgcacacttgaaaactgttcctcgaacacgcaggcaggtcatccaccatctggtgcggatgggactggccgacagtgtcaaggacttccaaaggaaagggacccagattgtcttgtggacagaggatcaggagctggaactgcagcgtctctttgaggagttccaggattctgatgatgttcttggtcatatcatgaagaatatcacagaccaaacgttctcgggctcgaatagtagacaaactgctggccctggggttggtgtctgagcggcggcaactgtacaagaaacggagaaagaaagtggcaccctcttgcacgccaaatggaggcgtgtccctgaaggatccttggcaggaagatacggaagaggaagaagaacacttgccagaggaagaggaagaggaagaggaagacttggaagcagaaccagtgcatagtagttcatttctctctgctggaaaccttggtcagagcctccatcaggaaggcctctctgctcccctcctgtggctccagaactgcctggttcgtgcggcagatgatcggcaagagggcggctgctcccaagccatccctctggtgcctctgacggaagaaaatgaggacgcaatggagaacgaacagttccagaatcttctacgaaagctagggatccggccgcccaccccagggcaggagaccttctggcgaatcccagccaagtggagctccatccagctccggagagtggccgctgctttgagtcaacaagaagaggaggaagaaagggaagaggagccagagctccatccaggagctcctggagagcaccgtcccgatgaagagcaccgagctaaggccctgagagccctcttgtcagcccgtaagaggaaagcaggcctttttaaaaaaagaaaaaaaaaaaaaaaaaaaaa

SEQ ID NO: 867 - DNA, 2552 bp, Cricetulus griseus
gaatgccaaatgggtataggaaagagatgatcaagattcccatgccagaaccagagcgctctcagtaccccatggagtggggcaagactcttctggcctttctttatgcactttcctgttttgttctcactacagtgatgatctcggtcgtccatgaacgagtacctcctaaggaggtgcagcctccactaccggacacgttttttgaccattttaaccgggtgcagtgggccttttctatttgcgaaattaacggcatgatccttgtaggactctggttaattcagtggctgctcttaaaatacaagtctattattagcagaagatttttctgcatagttggcacgctgtacctgtatcggtgtattacaatgtatgtaactacactcccagtacctggcatgcatttcaactgttctccgaagctctttggagactgggaagctcaagtgcggagaataatgaagctcattgctggaggtggcttgtccatcacaggctctcacaacatgtgtggggactatctatacagtggccacacggtcatgctaacgctcacctatttatttatcaaagagtattccccgaggcgactctggtggtaccactggatttgctggctccttagcgtcgttggaatcttctgtattctcttagcgcatgaccactacactgtggacgtggtggtggcctactacatcaccacaaggctcttctggtggtatcacacaatggccaatcagcaagtgctgaaggaagcttcccagatgaacctcctggccagggtgtggtggtacaggccatttcagtactttgaaaagaatgtccaaggaattgtacctcgatcttaccattggcccttcccctggccagtagtccaccttggtaggcaagttaaatatagccggttggtaaacgacacataacagctctacaaagtaggggaatgaggaactgtccgaagtgctaagaactccatgagagaagatgccataaataaacacctccctactgctattatctttcaacagttaccttgacttaacctattgagttacctggtcagcactgtgatctttttttttctctccaaaggacctgcgttggacaccaataaagaaattaccttatcatgcactgtacacatttcctgttgttaaacctggggcttctctaaccagcagccaccgtgttcctctgtgtaatccagcagcaccactgtgcgcttccatatcataagctctggcctttccagccacatctggaagtaaagtgtgttattttcttgggaaaacatacttttcatatctcttgccccaaagacagggctgtaagccattttctagcaaatgtctctatgaagggttctaagtgtctgtgtggggtttggttcagaaatctctgcctgctgcactgactgaagatggtaggtgtggagaggtctgctcacttgggggttttataaaatcagcagagatggtgtatcaaaaactgaaaaaaaaaagattctgttataaagtgatttttctaagtatttcctaactttatttttcaaaatgatgttgtgaaaaccaaatttaaagatttttacatgtcacagaagagttaaaatttaaaaatgcttcttgggagagaaatttgtctatgtttctagtgcctttcttgtcttgattgtatggtcggtaggcaatcttaaatgtttttatttattccatgaaaatataaatgtatgtatacactactaaattttgcatttatagctaaattaaatcaaaagactgctaatggtcttaaaaatgttttgaattaacgaataggggtgtgaattaagagtacgtgcccaatcacagattgtgagcaggcagccatgacacatgccactgaaattatttcatctatttggtagttcagttttaactactcaataaaaacagccatgaatatctttttttaaagagagttttgaaaatcatttaacctaaaacttgaaagctataaactagttatccatactctcatgacaattttgttggtgaacaacaacaaagagatctatttctttaaaatatatttgtgcagaaactgcatgtaactcttgagttttactcctgacatacggttgtttggggaagtattctactctatacttgccaacgtggagaacaaactagttttctaagaacgaagaagtatatatatatataaaatatccattctgtattttatgtgcagcagaattaccttctgtaggttttgtgtgtatgtgtgtgcagaagcatgtgtgtgtgtgtgtgcgcgtgcgtgcgtgcgtgcgtgcgtgcgtgcgtgcgtgcgtgcgtgtgtgacttacaaggtgatatttgtattgtaaaacaataatggtgaaggaaataaaaaggcttttaaatttttgtttgttttaaatctttgtaaaattattattccagagcgtatactgatatcttacagcttacctaaatcataacttaatcaaaatgcactttttaataaaaactgatactgaaaaaaaaaaaaaaaaaaaaaaaaaaaaa

SEQ ID NO: 868 - DNA, 2551 bp, Cricetulus griseus
tgacacctccaacttctctgactacatccgtggaggcatcgtcagtcaagtcaaagtacctaaaaagattagctttaaatcgttggcagcatcactggcagagcctgactttgtgatgactgactttgccaagttttctcgccctggccaactgcacattggcttccaagctctgcaccaattctgtgctcagcataaccgaccacctcgaccacgaaatgaggaagatgcaacagaactggtggccctagctcaggctatgaatgctcggtccccatctgcagtacaacaggacaacttggatgaagaccttatacggaagctatcttatgttgctgctggggatctggcacccataaatgccttcattgggggccttgctgcccaggaagtcatgaaggcttgctctgggaagttcatgcctatcatgcagtggttatactttgatgctcttgaatgtctcccagaggacaaagaggctcttacagaggataagtgcctcccacgtcagagccgttatgatgggcaggtagctgtgtttggctcagacctccaagagaaactgggcaaacaaaagtacttcctggtgggtgcaggggccattggctgtgaattgctcaagaactttgccatgattgggctaggctgtggagagggtggagaggtcattgtcacagacatggacaccattgagaaatcaaatctgaaccgacagtttcttttccggccctgggatgtcacgaagttaaagtctgacacagccgctgcagctgttcgacagatgaaccctttcattcaagtgacaagccaccagaatcgtgtaggtcctgacacggaacgcatctatgatgatgattttttccaaaacttggatggtgtggccaatgctctggacaatgtagatgctcgcatgtatatggatcgccgctgtgtgtactatcgaaagccattgctggagtctggcacactgggaaccaagggcaatgtgcaggtggtgatccctttcctgacagaatcatacagctctagccaggatccaccagagaaatccatccccatctgcaccctgaaaaactttcccaatgccatcgaacacactctgcagtgggcccgggatgaatttgaaggccttttcaagcagccagcagaaaatgtcaatcagtacctcacagaccccaagtttgtggaacggaccttgcggctggcgggtacccagccattggaggtgctggaggctgtgcagcgcagcctggtgctgcagcgaccacagacttggggtgactgcgtgacctgggcctgccaccactggcacacccagtactgtaacaacatccggcaactgctgcacaactttcctcccgaccagcttaccagctcaggggccccattctggtctggacctaaacgttgtccacatccacttactttcgatgttaacaatacactgcatctggattatgtgatggctgctgccaacctttttgcccagacctatgggttgactggctctcaagaccgagctgctgtggcctcacttctgcagtccgtacaagttccagagttcacccccaagtctggtgtcaagatccatgtttctgaccaggagttgcagagcgccagtgcctctgttgatgacagccgtcttgaagagctcaaagctacattgcccagcccagacaagttatcaggatttaagatgtaccccattgattttgagaaggatgatgacagcaacttccacatggatttcattgtggctgcgtccaatcttcgggctgaaaactatgatatttcccccgcggaccggcacaagagcaagctgattgcaggaaagatcatcccagccattgccaccaccacagctgctgttgttggccttgtgtgtctggaactgtacaaggtagttcagggacaccaacaacttgactcgtacaaaaatggtttcctgaacttggccctgcccttctttgggttttctgaacctcttgctgcacctcgtcaccagtactataatcaagaatggacattgtgggatcgctttgaagtacaagggctgcagcctaatggtgaggagatgaccctcaaacagttcctcgattactttaagacagagcacaaattagagatcaccatgctgtcccagggtgtatccatgctctattctttcttcatgccagctgctaagctcaaggaacggttggatcagccgatgacagagattgtgagccgtgtgtcaaagagaaagctgggccgccatgtgcgggcacttgtgcttgagttgtgctgcaacgacgagagtggcgaggacgtcgaggtcccttatgtacgatataccattcgctgatggctgtgcattctcctaagccccagtccttccccagatcccttccagtactggtttccatttggcctctggcaatggtccatctagccaagtttggtatttaccatccagcaaccctagaccctctcaccactgctttgtaccttctttggaacctaaatcccaataaaaagataacaacccaaaaaaaaaaaaaaaaaaaaaaaa

SEQ ID NO: 869 - DNA, 2551 bp, Cricetulus griseus
ggcctggcctggcctggcctgtcagggcgcgggcggcggcggtccagcaccatgtccctgcagtacggggcggaggagacgcccctggccggcagttacggagcagccgactcgttccccaaggacttcggctacggtgtggaggaggaggaagaggaggcagcggcgggcggcggtggtggcgcgggggccggcggtggctgcggcccgggcggcgctgacagctccaagccacggatcctgctcatgggactgcggcgcagcggcaagtcctccatccagaaggtggtgtttcataagatgtcacccaatgagactctctttttggaaagtacaaacaagatttataaggacgacatttccaatagctcctttgtgaacttccagatttgggactttcctggacagatggacttctttgacccaacctttgactatgaaatgatcttcagggggacaggagcattgatatatgtcattgacgcacaggatgactacatggaggctttaacacgacttcacattactgtttctaaagcctacaaggttaacccagacatgaattttgaggtttttattcacaaagttgatggtctgtctgatgatcacaaaatagaaacacagagggacattcatcagagggccaatgatgaccttgcagatgctgggctagaaaagctccatcttagctttatttgactagcatctatgaccactcaatatttgaagccttcagtaaggtggttcagaaactcattccacaactgccaactttggaaaacctattaaatatctttatatcaaattcaggtattgaaaaagcttttctctttgatgttgtcagcaaaatctacattgcaacagacagttcccctgtggatatgcagtcttatgaactttgctgtgacatgattgatgttgtaattgatgtgtcttgtatatatggattaaaggaagatggaagtggaagtgcttatgacaaagaatcgatggccattatcaagctgaataatacaactgtcctttatttaaaggaagtcactaagtttttggcactggtttgcattcttagggaagaaagctttgaacgaaaaggtttgatagactacaacttccactgtttccgaaaagctatccatgaggtgtttgaggtgggtgtgacttctcacaggagctgcagtcaccagaccagtgccccgagcctgaaagcattggcacacaatggcacgccgaggaatgccatctagtgtgaatctcagcaatcgaggcccagtgccagctcactcctcactccagggtcagatgccatgtgctgcaggacataggagctgctgcctatgggagtctggagacgatggtggagtttctcgcttagatgaaagctcttcggccggctctgtgcacctgaagctactatctcttttaaactacggcacaaaagaattacagagacctcagaactcagtgtgtctttcttctctttgggtcctaccttaaatagttggagtaatttggacctggagatgataccagttatccatctttaccagtgaatgttgctgtcaattccagcctaaaacaataggaaaaccgagttttatacgcttcctttaggctttcacttgagtagtgtctaaagaccttgctttgcttacgttctaacactgcctctcagagctcagatctcactgtacctctcagaccgtggaagtgcattagcttgttgcctcagaagatgcagcaaaggatgtttctgaagaaaagaggcggtgtgtgtgcgcggcgtcggggagagccaggctcagccagggctgcgtcagctccctggaggtgctgaggaagacactgcaaggagagaatttccacacctgggtttgggtggcagacgatgcgctctcgtcatttgatcatgatcatgcacaatgtcgcaaagggaatttaagacagaaagttctccccagcgtcccctatagtgaggggacaaactcattatgtcactgaactacttagctcacttttctttaattttgatgccatgccttttattctatgctgtgtaggctctttaagaattgtttttgaccacaggtgaccctgaagtctctggtggactgcccactgtgggctggaggaggcattcaggggacagtgtatgttatttacataccctgtctctggtattctgacaccaagtgtcagctgtggtcctttcctttgcctgggatatgaattcataattgtttctcttgttcatggctgatacctttcccattgattttttcattactgcacatgcccagtagtcacattccaaagccactgggccactcgagcgcatcagcgtcgctgttgagtaacatgtactcaggtctgtaacctagcagtgagacttggagcgcttcctgcagatgactgactcttgagtatttacatggaccatggtgatatccaaaggaaaaatgcttttatatttatagattatttcattgaactatatgtaaaatgggtatcaataaatgtatttactccaaaaaaaaaaaaaaaaaaaaaa

SEQ ID NO: 870 - DNA, 2551 bp, Cricetulus griseus
ctcgataaagcaattgacattttggatagaagctcaagcatgaagagccttaggatactactgttatcccaagatagaaaccataccagttcctctccccactctggagtgtccaggcaggttcggatcaagccttcccagtctgcaggggatataaataccatctatcaagctcctgagcccagaagcaggcacctctctgtcagctcccagaaccctggcagaagctctcctccacctggttacgtacccgaacgacaacagcacattgcccggcaggggatcctatacaagcatcaacagtgaaggcgagttcatcccagagaccagcgagcagtgtcaaagactacaatgatggcagaagaacatttccccgattacggcgcaaggcaacctattcactctggtcccctcaagtcgctccttgagcacaaatggcgagaacatgggtgtagctgtgcaatacctggacccccgtgggcgcctgcggagtgcagatagtgagaatgccctctctgtgcaggaaaggaatgtgccgaccaaatctcctagtgctcccatcaattggcgtcgggggaagcttctgggtcaaggtgcctttggcagggtctatttgtgctatgatgtggacacaggacgtgaacttgcttctaagcaggtccagtttgacccagacagtcctgagacaagcaaggaggtgagtgctctggagtgtgagatccagttactgaagaacttgcagagcgcattgtgcagtactacggctgccttcgggaccgtgctgagaagatcctcaccatcgagagtgtgactcgcaagtatacccggcagatcctggagggcatgtcatacctgcacagcaacatgattgtgcatcgagacatcaagggagccaatatcctccgagactcagctgggaatgtgaagcttggggattttggggccagcaaacgtctacagaccatctgcatgtcagggacaggcatgcgctctgtcaccggcacaccctactggatgagccctgaagtcatcagcggcgagggctacggaaggaaggcagacgtgtggagcctgggctgtactgtagtggagatgctaacagagaaaccaccttgggcagagtatgaagcgatggctgccattttcaagatcgccacccagcctaccaatcctcagcttccctctcacatctcagaacatggcagggacttcctgaggcgcatttttgtggaagctcgtcagagaccctcagctgaggaactgctcacacaccactttgcacagctcgtgtactgagctctcaaggccatgctgctgccagctgccacctgctgagcggacaaagggccgctgtcagctgtcaggctcagtgaagttgctgcttcttccaggcaaggctaaggacagtggagcttgggtccagtcattgtttgtctgtgccccttctgtcactgggactcaaagccaggatgggatagctgtggcatcaagactgggagcccagcctgtaagacccaagagctccagcatcctaagcacaatgtggaaggaaaggggctgggaacagtatgcaagacagccatggcctcaatgtgtcctaacactgcagtcagcactgaagccaggagggactggggcacaggacttactcaagggtatgaatagtgttatttcattcagagtgttactttgattctcctcccagtgtctggagactgccagaatgtctcgtgggctgcaagcctgaggtaaagcccagcatacctcatccatcagaattctggtagaggtgtgggctgcccttactgagagcctccaggtgtgctttgccaggcctgtctttttaccaaagatgaatgaagcaaatgttatgctgccttattctggggaggaggagcctggccccataagcagggcctgagaaatggggctgcctccagtaactggggagatccagtcttgtcaatgcaatcatctgttttacaagtcggagtcactcttatgctgttcccagtttctaaactggagactttgccctctgagctctggagacccatgtgggcttgggccttgggctagactggaaagagctgataggatggcctctgccctggcctctgccccctcactggagcagagaagttaggcagcacaaggaagggcagctggctctgggcagttcaggaaaagttcaggggaatgtctcaggctatctgcatctcaagcctgttgggctgtgcccactccactgggtagagaggaaagtccttgtgctgccaccaactatgaccaaagccaccagctctgttccttggcctgccctgcccatttgtgttctcagcctcattccttgtttccccccacaagggaggatgccaacaggggttgaggaaagactccaagcagcttagagttggccatatttacctcagcctgggcgctggtcctttcttccagccccttccttcccctccaaatgtgcctattgctacagctcctcccttccaactcccatttcttaggagttgtcatcaaaggaaaaaaaaaaaaa

SEQ ID NO: 871 - DNA, 2550 bp, Cricetulus griseus
tggattgactgatgaagacataaagccagttacgctctatgtttttttttgtaggtggagtgagtggttttcttcacttttttaaatggccaaatgacagcttgacccagtttgctttccaatcaaagggctatttttttgaatgtctctttgtggcgcaagagccaacgcaaaaatgatggcggcttacaatggcggtacatctgcagcagcagcaggtcaccaccaccaccaccatcaccaccttccacaccttcctcctcctcaccttcaccaccaccaccaccctcaacaccaccttcatccggggtcggctgctgctgtacacccagtacaacagcatacgtcttcggcagctgcggcagccgcagcagcggctgcagccgcagcaatgttaaaccctgggcaacaacagccgtatttcccatcacctgccccgggtcaagctcctggaccagctgcagcagccccagctcaggtgcaggctgctgcggctgctacagttaaggcgcaccaccatcaccactcgcatcatccacagcagcagctggacattgagcccgatagacctattggatatggagccttttggtgttgtctggtcagtaacagatccaagagatggaaagagagtagcactcaaaaagatgcccaacgtcttccagaatctggtctcttgcaaaagagtcttccgggaattgaagatgttgtgttttttaaacatgataatgtactctctgcccttgacatactccaacctccacacattgactatttgaagaaatatatgttgtcacagaattgatgcagagtgacctacataaaattatcgtctctcctcagccactcagctcagatcatgtcaaagtttttctttatcagattttacgaggtttgaaatatctccattcagctggcattctacatcgagacattaagccagggaatctccttgtgaatagcaactgtgttctaaagatttgtgattttggattggccagagtggaagaattagatgaatctcgtcatatgactcaggaagttgttactcagtattaccgggctccagagatcctgatgggcagccgacattacagtaacgctattgacatctggtctgtcggatgcatctttgcagaactactgggccgaagaatattgtttcaggcacagagtcccattcagcagttggatttgatcacagatctgttgggcacgccatcactggaagcaatgaggacggcttgtgaaggtgctaaggcacacatactcaggggtcctcataaacagccatctcttcctgtactctacaccctatccagccaagccacacatgaagctgttcacctactttgtaggatgctggtctttgatccatcaaaaagaatatccgctaaggatgccttagcccacccctacctagatgaagggagactaagataccacacgtgtatgtgtaagtgctgcttttccacctcgacgggaagagtctataccagtgactttgagcctgtcacaaaccccaaattcgatgatacctttgagaagaacctcagctctgtccgacaggttaaagaaatcatccaccagttcattttggaacagcagaaaggaaacagagtgcctctctgcatcaacccgcagtctgctgcctttaagagctttattagttccaccgtcgcccagccgtctgagatgccaccgtctcctctggtgtgggagtgacagtggaagacactgtactactgaagatgtaatgtagctttcactggagtctgggatttgcaattctggagagttaatcatgcttgtactgtaattttactaatgaagttttaaattaacaaccactacttgtatgatatgaataatatttagaaatgttactagacttttaatcttgtaaagtggttgtgcttttagaagaaaaaaaaatattttacccagagttgcacatggttaaagaattcagtgcagctgtatggctcgcctcagaacaaatgagaattgaaccaaatttgggcgtttggggtttatgtttttgttttgttttccttttttatgaagtgagattgttcacatgtacacatacacacagagagacgacagtcatacattttgatatttgagccattcctaaagatttggggttttccttgtttacctccacacgctgatgtattgtactatttttttaagttcaatgtggagacttgaaacttgaatgtcccttccaacttttatattaaaaataaaaagacaagaaaattgaagagcgtttttcacctgtacaaggagtactaatggatcgtcttaaaagtggtctaggaaaaagcttggtgtgtgttatggacaattaactgttaaagttattgtaagttatctgtatgtagctgagtattttcatcttgagcgatctgagctgaatctgaagactattaagttatgttttggaagttttaacttcaatgaagtattatttgctgtgaaagaacaaacattgaattactaaacaaagatggtgcaatatcttttgtttttgtttttgtt

SEQ ID NO: 872 - DNA, 2550 bp, Cricetulus griseus
  modified_base (272)..(272): a, c, t, g, unknown or other
ctttttctttttcttttttttttcttttctttctttctttctttctttctttcttgaagccaccacatacgaggagcgagacgcatgggtccaagccatcgagagccagatcctagccagcctccagtcctgcgagagcagcaagaataagtcccgactaaccagccagagcgaggccatggcactgcagtccatccgtaacatgagagggaactcgcactgtgtggactgtgatgcccaaaaccctaactgggccagtctgaacttggganccctcatgtgcatcgagtgctcagggatcaccggaatcttggcacccatctgtctcgggtccggtctctagatcttgatgactggcccatggagctgatcaaggtgatgtcatccatcgggaatgagttggccaacagcgtgtgggaagaaagcagccaaggacggacaaaaccctcattggactccacaagggaagaaaaggaacccgcctgctccggaagtcacagcacgtgagtccctcagttccctccctcttcctggtggtcactaccacccacctgccactcacacactccacaagaaatctccaaacctggacaccctcgaggggagaagaggagactggaggccacaaaaccgaactctttttcccacactccgaaagccacgcaggagggaccgaccacctcccagcggctttgaggatagcacacgatcgacgggggacccctgttccagtgacctggagcacagggggaggggcagcaaggagaaggggcatcttcccctaactggcagttaagcacatcagtacatttcacctcgaccaaaaggaggcttggatttcacgtctcctctggggagcttgacggcataaatcagaagcaagcacagtttgtcaggtctgaagcccctatgatggtcggtgtcaaatcatttggagctaatctgtccagggagaatactggcttcattacacttgtgtagtcgagttcctccagcattaccgctgtttaatagaacgtgattagtcatcaccgggaagaaggcatattagccgaggaggtagttacacggcacgctctggtgattgccacgatgtgattgcagtgcgctgagaagcatcgtatcatcccagacatgtctctccagcccttggagccctcctttctaaattcactgtcataatttagtatctgtttaatttttcagtccaaagagaggaaaccagttgccgggtattatttgactgcaatctccttccttggtgcaaaaacaaaatggggaaaaaaataaataaataagaataacttggaaaattcaaaaagaaatcatcaatccagctgaaaaatagcttctcaagtatgctccaaaaataagtaaatatgtaaaatgctatttttttttcctaagagagatttttctgtcctgtggccacaatggatgtgtcaggcctcagtcaaaaaaaaatctaaagtagatgggaacaaaagtcaagctttagacagcgtttatctgtgggtgagcgtctcgtggagatctccagtcgcaacacagctggggccaaccagtataccaaaaatgtcacaggtttgaaagttagtctgagacggctgcactcagtgccacaagccctacgctgggttgttcatcctgctgtccatcactgtgtcgtcactttaaatgtgaatagagaaaacaagctgtcatggcctatttttgaagaatgcattagcacccagccctgcaacccgagtccgcttccacgtagcctttaccatagacttctatagagaacacagattttcagtgtggtcaattcccactagaggagtgcttttatcctaggggagcctacttgagagaggaaatgggatcctttgcaaggcttctcttcggggtgtatatgagtgtgtacatagtactatgtgtttataataataggatattttcccgaatgactccttgtctcacgtcaccctccactgcctgaatgctcagttgctcgctctgcctccctccctccctccctgctgggaaagcccctctaaatttcttgccttgttttacagagaagagctaagcactgctctcccggcatccccaagtgtcactcaagcctaagatgaggctcttctcctccaaccttttacctctgctcttggctcatcaaggctgacacagttctgggtgggggcaaagaaagccatgtcacctgcctagacacatagaaggtagaagcacagtgggggcttctccagaggtgagtggtccgtctggggcattatgatattacctcattccataactttatgtttcctgatgactgatgctttatttatgctgtttgtcctgtaattaaaccatacacagacatttcgctttgcttgttcgttcatgcgaccttgttcgggttaaatatactggtttgtattttcctgcctttggggatttttgtgtcaggtgtacagtattctaaggggaaaagaaaggaaaagtgtaaagtaacagagagaggtggctatagtgtagagacctctttctaataaatgaaaa

SEQ ID NO: 873 - DNA, 2550 bp, Cricetulus griseus
cagcattcttgaagatcttctaccagacatgcagagcagtgcagcacatgcacaggcagaaaccacccatcatccacagggacctcaaggttgaaaacttactgcttagcaaccaggggaccattaagctgtgtgactttggcagtgccacaaccatctcccattatcctgactacagctggagtgcccaagaagcgagcaatggtggaggaagagatcacgaggaataccacacccatgtacagaacaccagaaattgtagacctgtattccaacttccccattggcgagaaacaggatatctgggcactgggctgtatcttatacctgctgtgtttccggcagcatccttttgaggatggagcaaaacttcggatagtcaacggaaagtactccatccctgtgaatgacactcgttacacagtctttcatgaccttattcgtgccatgctaaaggtcaacccagaggagagactgtccattgctgaagtggtccgacaacttcaggaaattgcagcagactcaccgcagagcagcggcacggacaccaaccactttcttcacacgctggattggcaggaggaaaaagaaccagacactggtgcagacaattcctctcctaaggagagtcagtctgtcctgattgcggacagagatggaagcgaagtatcagatgaagaagagcctccattccccagtgaggcgagggagccagggtctggagaagacataccaaggctggcagctgggaccaggcagcaagacttactatttgatgtgggcatgctggctgccccacaggagcctgctcaccaggaagagggtgtcgatctcctgggcctacactctgagggtgactcggggcctgctgccccttgcaggcttgtagggtcccctccagcaacactgacttgttgagctgccttcttgaaccatctgatgcggctcaagtggggcctcctggtgacctgctcagtggtgaggctcctctgcttctggaaagcccagtttctcttcttggggtgcaaagctcccaacaaggaagagtctctgacactgtggacccatttgatcagctcctactgtcatccagctcggacacccagccctgctccaagcctgatctttttggagagtttctaaaccctgactctgtagcttcctcaactgccttcccatccacccacagtgctccacccccatcctgcagcactaccttcctgcacctgggggatctctcagcagagcccaacaaggtgatagcttcatcaagccacccagatctgctaggaggatgggatacctgggctgagactgctgtccctgggtcagcctccatgccagtaccagaaggtaccctcttctcttctggaagtcacccggcccctacgggttcccaccctagccaaaccaagtctcagagccgagacccatttgctgatctcagtgatctcagctctagcctccaaggcctacctgctggacttcctccaggaggctttgttgccacatcagcctccactcccaaaagcagcagctcctggcagacaagtcgtcccatggcccctggaacctcatggacccccccggccaagccagcccccagagcctctgaacagccaaggtctcacttcagtgtgatcggagctcgagaggagaggggtgtccgtgtgcccagctttgcccaaaagccgaaggtctcagaaaatgattttgaagacctgctgcctaatcaaggcttctccaagtctgacaagaaagggccaaagaccatggcagagatgcggaaacaggaccttgccagagacacagacccattgaagttgaagcttttggagtggattgaaggcaaggagaggaacatccgtgcacttctgtccacgctgcacacggtactgtgggatggggaaagccgctggacacctgtgagtatggctgacctggtgaccccagagcaggtgaagaagcaataccgccgtgcagttctggtagtgcatccggataaggccacagggcaaccatatgaacagtatgccaagatgatcttcatggagctgaacgatgcatggtctgagtttgagaaccagggctcgaggcccctcttctgaggccagggattgctatggctgcaggagctgctcgtgaagcctgaatgctgctgacctgactgatgcacaaatgggaccatagcaggtgtggcaggtgatagatttggccccagtggcctggaccatctactcccagccatcctgcattcatcatggacaaataccattccatggctgggagagaaagcattcctcagatctgatatttgttgttttgtttttctttttcttgtcccagaggaaaagtgttgatttatactccttccacagctgtcacagtttgtggtttacttggtgtctggtgactgttacctcttgaatggtacatgtcgctggcactgctctcctgtcacttcttcaaatctggggtgcatccacacccactctgatgagtttgccaatcatctgtacataattaaactattttctgatggctggtgca

SEQ ID NO: 874 - DNA, 2549 bp, Cricetulus griseus
cacagctggcttgcgaatctcagatggggtggtccttttcattgatgctgctgaggggtgatgctgaacacagagcggctgattaagcatgcagtgcaggagaggttagcagtcaccgtgtgcatcaacaaaatcgaccggctgatcttggagctgaagctgcctccaacagatgcttattacaaacttcgacacattgtggatgaggtcaatggattaataagcatgtattccaccgatgagaacctgatcctttcgccgctcctgggcaacgtctgcttctccagctcccagtacagcatttgcttcacactgggctcctttgccaagatctatgctgacacctttggtgacatcaattaccaggagtttgctaaaagactctggggtgatatctacttcaatcccaaaacgagaaagttcacaaaaaaggctccaaccagcagctcccagaggagctttgtggagtttatcttggagcccctttataagatccttgctcaggtggtgggtgatgtggataccagcctgccaaggaccctggacgagcttggcatccacctgaccaaggaggagctgaagctgaacatccgccctctgctcaggctggtctgcaaaaagttctttggcgagttcacaggctttgtggacatgtgtgtgcagcacattccatctccaaaggtgggcgccaaacccaagatcgagcacacctacactggcggcgtggactccgaccttggcgaggccatgagtgactgtgaccccgatggtcccttgatgtgtcacactactaagatgtacagcacagatgacggagttcagtttcatgcctttggccgggtactgagtggcaccatccatgctgggcagcctgtgaaggtgctgggggagaactatactctggaagacgaggaagattcccagatatgtaccgtgggccgcctttggatctcggtcgccaggtaccacattgaagtgaatcgtgttcctgctggcaactgggttctgattgaaggcgttgatcagccgattgtgaagacagcaaccataactgaaccccgaggcaatgaggaggctcagattttccggcccttgaaattcaataccacatctgttatcaagattgccgtggagccagtcaacccctcagagctgcccaaaatgcttgatggcctgcgcaaggtcaacaagagctatccatctctcaccaccaaggtagaagagtctggcgagcatgtgatcctgggcactggagagctctacctggactgtgtgatgcatgatcttcggaagatgtactcagagatcgacatcaaggtggctgacccagttgtgacgttctgtgagacagtggtcgaaacatcctccctcaaatgctttgctgaaacgcccaataagaagaacaagatcaccatgattgctgagcctctcgagaaaggcctggctgaggacatcgagaacgaagtggtccagatcacctggaacaggaagaagctgggagagttcttccaaacaaagtatgactgggatctgctggctgcccgttccatctgggccttcggtcctgacgctacaggaccaaacatcctagtggatgacacgttgccctcggaggtggacaaggcacttcttggctcagtgaaggacagcattgttcaaggtttccagtggggaacacgtgagggacctctctgcgatgaattgatccggaatgtcaagtttaagatcctagatgcagtggttgcccaggaacccctccatcggggtggaggccagatcattcctacagccaggagggtggtctactctgccttcctcatggccactcctcgtctgatggagccttactactttgtagaggtccaggcccctgcagactgtgtatctgctgtttacacagtcctggccaggcgcagggggcatgtgactcaggatgcacctataccaggctcccctctgtacaccatcaaagctttcatcccagccatcgactctttcggctttgagactgacctccgcacgcatacccagggccaggccttttccctgtctgtcttccaccactggcagatcgtgcctggtgatcctctggacaagagcattgtcatccgcccgttggagccacagccagcccctcacctggcccgggagttcatgatcaaaacccgtcgtaggaagggcctgagtgaagatgtgagcatcagcaagttctttgatgatcctatgttgctggagctcgccaaacaggacgttgtgctcaattatcccatgtgagtgctggggctggcagctccttctgtggcctctgtggcctggctccattcccaaggaacagagaggagcttgggcccaggaaagaagaacgaacgagaacaggatgaaagcgtttaaccccaaggggcctgtcttcaggatttacatggaattttatttcttacaagttcaaccctagccatggtttgtaaatgaacagaacattctgccctctaaaaaaaaaaaaaaaaaaaaaaaaaaaaaaaaaaaaaaaaaaaaaaaaaaaaaaaaaaaaa

SEQ ID NO: 875 - DNA, 2549 bp, Cricetulus griseus
acaactctcgggtgtgcttctcggtctgctccggtgagtggtcacttctttgcagaatatggtcggtctccaaagtcaagcttgcccctcttatcatccccccaagtgacagctctggacatcgagaagaggatcaggttgtgtgtggttttaagaaactctcagtgaatgggatctgcacttccacacctccacttacacccatcaaaaactgcccttccccctttccctgtgcagccgtctgtgatcggggctctcggccgctcccaccattgcccatctctgaagacctgtctctggatgaggccgactgtgaggtagaatttctgaccagctcagacacagacttccttctagaagactgtgccccttctgacttcaaatacgacgttcctggtaggcgaagcttccgtgggtgtggacagatcaactatgcatattttgacaccccaactgtttctgtagcagatctcagctgtacatctgaccagaacagagctgttccagatccaaaccctcccccacctcaaagccatcgcagattaaggaggtctcactcaggaccagctggctcatttaacaagccagccatccgcatatctagctacacacacagggcttctcccagctcagatgaagacaagcctgaggtccctcccagggttcctatacctcctaggccagccaagccagactacagaaggtggtcagcagaagtgacctccaacacatacagtgatgaagacaggcctcccaaagtccccccaagagaacctttgtcacggagtaactcccgtaccccaagtcctaaaagccttccatcttacctcaatggggtcatgcccccaacacagagctttgcccctgaccccaagtatgtcagcagcaaagccctgcaaagacagagcagcgaagggtctgccagcaaggtcccctgcatcctgcccatcattgaaaatgggaagaaggttagttcaacacattattacctactacctgagagaccgccatacctagacaaatatgaaaagtattttagggaagcagaagaagcaaacccaagcacccaaatccagccattacctgctgcctgtggtgtgacctctgccacagaaaagctggcctccaggatgaaaatggacgcgggtggtcacatcaagcgcaaacacttatcctacgtggtttctccataactaaggggtcagggttcagcagaagaagttacgtggagaggatggctcccaatttgagtttcgcagaacaatgtcaggttgcagaatgacgttggtgaggtgctgttagctgggagcccctgacttaccagcggaggacgaaaggataatttaaagctgtgtagagaggagggaagaatggaaaacttttacatttgactacattatatacctatgtataaatgtgcggtgtaaccatagaccatagctgcaggataaccaattagtcactatcttagagtaatacatattcagggtacatcaagtcaggctggagaagcagctcctggctgaaaattgagcaatggaagaaagcagtattgttagatcaaattataaatttgttaagttcgaggattcttggcatttgggcctgctatatagtttgtgtgcccacccctccccccccccagcagtcgtctccatacaggacagggcatgctcttcaccaggcctgtaccgtcttgctgaaaccattctgtggcctaactcttccagctctagggttttgtcttgttgagaaggacagcagtttctggaccatgttatgacctgtgtacgtctcatatcttgaaaattgacagaattggtgaataacttccacactgttcctgcttttccccgtccattgaaatggcctgtcatagcaagaggctttcaggaaagtatggtggagtcgtaccagccatcagtgtcggggacgagagttttatagattaatgcagcaattagctgtgtgatagagagttcctgtgaggaggtatggtatgttgtttttgttttttagacttaataaacaagtacaacacaagctggccttgtgttgctggttcctgttcagtatttcctggggattgctttttaagtgaaacacttctgaccaatagcacagaatgtcttaatgccagaggtcacttcagcatcttcctgctttgaaaactcatggctggctgcttcactgccctgagactcagtgagacacgtagctttgctcagctttttccatcctctgatgcgtttatcttgtacagatgcgcacaaagagaaggtgcttgctagcagagggcaatgctgcgatgtccccgtgagctgtggagttgaaactgctgagtgacattatttgagctgtttacagcttactgtatgttagtgtgaactaaatgaaggttaaaacatgctttagaaaaatgcactgagctctgcactgtgtgtacagtattggacaaaggatttattcattttgttgcattattttgaatattgtcttttcattttaataaagttatattacttatttatgaaaaaaaaaaaaaaaaa

SEQ ID NO: 876 - DNA, 2548 bp, Cricetulus griseus
tgaaaggcaagacactagctcagaaggagtttccaccgtggaggaccagaatgactctgactctacgaccacccaaaagaaaactacggaagacagagaatggaatgtatgcgtgtgacctgtgtgacaagatatttcagaagagcagctcactgctgagacacaaatatgaacacacgggtaaaagacctcatgagtgtggaatctgtaaaaaggcgtttaaacacaaacatcatttgattgagcacatgcgattacactctggagaaaagccctatcaatgtgacaagtgtggcaagcgcttctcacactcgggatcttactctcagcacatgaatcaccgctactcctactgcaaaagagaagccgaagaaagagacgcggagcaggagcaggaagaggctgggctagaagtcctggaagtcctgatgaatgagcatgtgggtgcacgggcatctccctcacaggctgactcggatgagagagaaagtttgacaagggaagaggatgaagacagtgaaaaggaggaagaagaggaggaggataaagagatggaagagttgcaggaagaaaaggaatgtgaaaacgcacaggggaggaggaggaagaggaggaggaagaggaggaggaagagcagaaggcgagcgagagcagcgagcaactgtcggaagagaagacaaatgaagcctaggagtccttctagaaggaaattctacttggtaatgaaatttgctctatattacccacgcttttcattggaaacactgcccctgtgctgtgccccctgctcactactgggtaatgctcacaactgaaaaaaaaaacaacaaatacaaaaaaaaattacggtgtgcctgaacctcagacctagtaatttttctatgcagttttctagagttaggaacatgtatgtaacatgaagcagaatagaaaacttcaatgactgagaagcaggtttcttagcaggttacagggagctggatgggcatctggcatggttatcagtattatcactcttacgttggttcattcttaagctgtacaatgggagaaattttataatttttattggtaaacatatgctaaatccgcttcagtattttattatgttttttttaaatgtgagaacttctgcactacagaattcccttcacagagcagtagaaagcagttccaaccgtgctgactacctgttaccaagtcagtcaggaggtaggacctctatgttagacgccatgttgtcatttaacatgtattgctagccttaaggaagcagccgagagaagaactgaagtttcttactcatgtgattttaaatggagttcaaaggttgtcgttgagttctgactgcagggacgaacagtgttgatgtggcgaggacgacagagtcggcagaatcagtgttcgtgattgtgtttgcgtacgtggtagcaactatgaaggatctataggaagcgttgtgtctcctttggccttaagcaagacctgtgtgctgtaagtgccattctcagtatttcaaggctctaactgccttcattcagtgtgtggcctaaaataactagcatttgttgatttgtttgatgtttcaaaattcccaaataaaactcaaaaccactgactctgtcagagaagctggagcactggggcatctcataccttggttcctcagtattcattttacgttgattgactttcagagatctctacagaaacaaaagggaaattctctaaactacttaatccatgtgcttgcgtgtcagacatggataagccattggcatttggcttgcagccatttccaaatgttagttattacggacccagttgatgaacaacattagctgatttttacctatcagtattattttatttcttttagtttatagatctgtgcaacatttttgtactgtacgtcttcaagcctggcagtattaatacccttcttactgacacgtacttttagttttagaaaacttttatatttatgtgtcttatttttatatttctttatttattacacagtgtagtgtataatactgtagtttgtattaatacaataatatattttagtatgaaattttggaaagttgataagatttaaagtagagatgcaattggttctcgtgcattgagatttgatttaacagtgttctgttaacatttatactcgccttgggctgtagagcagagtttaaatgggaatgtattagttttacaactacaatcaagtcattctccctttacccagtttttaatatgaaactcttcactttgaaactcactgtgtgactcatagcatgatgctctgcagttcttctgttaagagttggcccagccataacccattcccttagcaagccaaattagaattgccttctgtaaacagtattgggaacaatgtttaacatgttgtgccaatttgttcctgtatccatgtatgtaagctaccgatccgactcttccttttaagttccttgttacaccatggtcattttctagttttttaccagactccccagctcacaataaaatgcatcaacaaacctga

SEQ ID NO: 877 - DNA, 2547 bp, Cricetulus griseus
agatgctgatcgcctgctactgaaaccaggaattagctgtctgcctgaggatgtggctgctgccttcgagagaagatacaggagaaatctgcagattgccagcttagagatgctgccgacggcttccagcaaaagaagaactttcgctgccagatacttcactcgctccaagagtctggtgatgggggaacataaccggagcccagggaggcccctggctccccacaaactgggccctgtactcaaggccggctggctgaggaagcagaggagcatcatgaagaactggcagcagcgatggttcgtgctacgtggagatcaactcttctactacaaagacaaagatgagagcaagccccagggatttatttctctacaagggacacaagtgaccgaacttcttccagaccctgaggacccagggaagcacttgtttgagatcacaccaggtggttccggggagcgagagaaggtgccagccaaccctgaggcgctcctgctcatggccagctcccagcgtgatatggaggactgggtgcaggccatccgccgtgtcatctgggccccgctgggcggagggatctttgggcagcggctggaggacacagtgcaccatgagaggaagtatggcccccgtctggcacctctgctggtggagcagtgtgtggacttcatccgggagcgaggactcagtgaagaagggctcttccgtatgcctggccaggccaccctggtgagggacctgcaggattcctttgactgtggtgagaagccactgtttgacagcaccacagatgtgcacacagtggcctccctgctgaagctctaccttcgggagctcccagagccagtcatccctttcgccaggtatgaggacttcctcagctgcgcccagctgctcaccaaggacgagggggaggggactctggagttggctaaacaagtgagcaatcttcctcaggccaactacaacctgctcagatacatctgcaggtttctggatgaagtgcaggcccattcaaatgtcaacaagatgagtgtccagaacttggcaacagtctttggccctaacatccttcggccacagatagaggatccagtgaccatcatggaaggcacttccttggttcagcatctgatgactgtcctcatccgcaaacatggacagctctttgcctcagcttcccttgaagaacctgcttccccacagggcacagcagagtggggctccgaagaggttcccagtgaccaccagggtgagcctggcagctctggcttgcccacacacaggacctcatctctggatgggccagctgcagcagtactctctagaacttctccccaacaccttggcagccagactggccctgcagccaccagccctgggaagaggatgcatactctgcctggctggaagtcctccttccggcaggggtcccggtcagagagcccaaagggggcagttcatccttagaggtacccatcatctctggtgggaactggctcataaatggactatcctctctgcgtggccaccgtcgggcctcatcaggggaccgtctgaaggatacaggctcagtacagagactctccacctatgacaacgtgcccccatccagccactttcctagcactgccagcatggccagcatgtcatggtctatagcctcatcatcccaagaggcctctgttagcagctgcacagcctgccgggccagcgactcttctgcctgtagctccttacacaccgagtgggctcttgagccctctcccctccccagtagcagtgaggaccacaggtcaccagacctgggccacagcctggatgaggcatgtgtgggcagtggcagcagtgagcccaatgacccaggcagccccacactggctcatgtccaccgctgccgagctctccagggccaagtggctgagctcagggcagagctgtgtcaacagaggactgagtatgagaggagcctgaaaagcattgaggagggcagtgctgacttgcgaaagcagatgtctcggctggaagaggagctggaccaggagaggaagaagtacgccatgctggagataaagctgcggaactcagagcgggcacgtgaggacgcagagcgcaggaaccagctgctgcagagggagatggaggagttctttgccactctgggaagcttgactgttgggaccaaaggggccagagccccagagtgaaaggagcaaaagtacatgcctgaatatgtctgctcactctccctgcagggctggccacaggctgcagaggaagccagaagcttcaagtttgggccaggctaccagcagggccatctgcccccaagcgccacatagaaagagcctgacagccccacaaggactatcaggatcccacatagtccaggcaggatctggatgcttctccaaacctatgggtcccagcaggtgtcagaagggacagtgccaagatcagcagtagcctcttatccaggaaaagtccccagtggccactcaaaaggatggcacctaagagcagggccaccaccaagaacttta

SEQ ID NO: 878 - DNA, 2546 bp, Cricetulus griseus
  modified_base (2197)..(2197): a, c, t, g, unknown or other
gttgaagtggtcacatagtttccatcattttgtgaagatggcacttaccaaaaatccaaaaaaaagacccactgcagaaaagctactacagcacccttttgtcacccagcctctgacaaggtctttggcaatagaattgctggataaagtgaataatccagatcattccacgtaccacgattttgatgatgatgaccctgagcctcttgttgctgtaccacatagaattccttcaactagtagaaatgtgagagaagaaaaaacgcgatcagagataaactttggccaggtaaaattcgatcctcctttacggaaggaaacagagccacatcatgaacttaacagctgttccccgcaggtgtacatggttatacgtgatgaacaattgcttactatcaatatctgtaaagcttctcagcctttattcccataatttaccagggctttttgattatgcaaggcagatgcaaaagttacctgtagcgattccagcacacaagctcccccgactagaatactgccaaggaaatttgctgtatcagcaaaaaatccctgaaaccaagtggtgtcagaagtgctgtgtggtaagaaatccttacacgggccataaatacctgtgtggggcacttcagactagcattgttcttttagaatgggttgaaccaatgcagaaatttatgttaattaagcacatagactttccgatgccatgtccactccgaatgttcgagatgttggtggtccctgagcaggagtatcctctggtttgtgttggggtcagcagagggcgagacttcaaccaagtggttcgatttgagactgtcaatccaaattctacctcgtcgtggtttacagaatcagataccccacagacaaacgtcacccatgtaacccagctggagagagacaccatcctcgtgtgcttggattgttgtataaaaatagtgaatctccaaggaagattgaaatctagcaggaaattatcatcagaactcacctttgatttccagatagaatccatagtttgtctacaagacagtgtgcttgctttctggaaacacggtatgcaaggcagaagttttagatctaatgaggtaacacaagaaatttcagataacacgagaattttcaggctccttggatctgacagggttgtggttttggaaagtaggccaactgataacccaacagcaaatagcaatttatacatcttggccggtcatgaaaacagctactgaagacatggtgttcttgacagtgatgtgtagagacaatgaccccggccactgcagcattcttggatatgtggagctatacagaagctgcaggcacctggcttcagttccttctaatttattgtggaatgagacagatgggagaaccttttttgttttaagtggtatgatatatttagcatattgaaccacacaagtgcttaattcattgttatgtaatctttgtacatataagcagtatttttctgtgaaacttcatttgctgaagacatacactaagaattgatgtagataatgtacttttatgagatgtaaaagtgtcttatctgtacagatgtaaatgttgattcaaatgcaactggggttaatattttaagaattctttagtatattctcgggtgtggttatattgcaaaatgggatgctggcaatgaaacaagacattaacactattgtatttttatcatatgtaatttagtaatatggacataaatcttgtaacttttaaaatggtaacgagctgtaatcattttataatcttgtttgtaattttaatgcaagtgcactggtatttctccttgcacagagtgttgatctgtgatgtactgagtcacagagaagctgtgacacaacaacttttttacatgtgttcggatccttttctatgtgaaacaaacggattaaccacctgttgtagtaactggtctttttatatttaagcagaatcgtgtaagattgcttgtctgtgcttaggatacatctttgacaaaaacttcaatcaccgaacggcggtaccatgctagaacactgcagttgttgtctgggtgacagtgtgcaccaagtctacactagcactgctagagtccacactagacatttcacatcatcacactgaaaaaatgtaacattccagagtgaagtgatcaaatttctcatggaaaacttttacttttgttggcctncattttatcaccactttcatatttcttttgattttagagtactaatactggccaaaatcatttagtttctacctcataacacatcacaggaacttcgtttggtgaaaatcatctttgattgtttttttcctaatggaatgtatctatcttatcgataagatagatatcaagttgtagcaaaatgcacacttctggctctttatggtatatgttctttgtattttgatgtatgtatacactaagaacaaactaaattgtgatttatgcttctcatttattttaattgataatggttttaaatatgttcctgattgtacatactgtaaaataaacattgttttttaacatg

SEQ ID NO: 879 - DNA, 2546 bp, Cricetulus griseus
  modified_base (41)..(41): a, c, t, g, unknown or other
  modified_base (2541)..(2541): a, c, t, g, unknown or other
tgtcctcacttcctgaagctagtggcaatgaagtaccatcngtttcaggaggcccaaataacatgccgtcacatttagtagtttctcagaatcagttaatgatgacagggccaaacctggaccatctcccctttcagcaactcaaggtgcaactccccagcaacctcctgtaaattctttgcctagctcccatggccaccactttccaaatgttgctgcaccaacccagacatctaggcctaaaactccaaacagagccagccccagaccctattatcctcagacacccaacaaccgccctcccagtacagaaccttcagaaataagtctgtcaccagaaagactcaacgcccccataccagcccaggccaaatttaaataggggcttttgatcaacagggtttaaatccaacaactctgaaagccatcgggcaagcaccttcaaatcttaccataaataatcctcctaactttgctgccccacaagctcataaattagattctgtggtggtgaattctggaaaacagtctaatcctggaacaacaaaacgggcaagtccaagtaacagtcgcaggtctagtccagggtccagtaggaaaactaccccaagtcctggaaggcaaaattcaaaagcccccaaaacttactctggcttctcaaccaagcacaaccctgttgcagaacatggaactgcctagaaatgtattggtctcccccactccaattgctaatcccactttatctggaagctttccaacaatagtgggcttaatcctcagaatctcagcgtgcctgtgcctgtgcctgcagtggggctgttctgaggataacaaagagagtttgaaaattcctgcaaccccattgacaaccaacagtggcctgatgcctccctccgtcgcagttgttggacctttacacatacctcaaaacataaaattttcttcagctcctgtagcacctaatgttccctccagcagtcctgctccaaacatacagacaggccggccgttggtccttagctcacgtgccactcctgttcagctgccttcccctccttgtacatcctctccagtcgtcgctcctaattcttctatccagcaagtaaaagaattaaatccagatgaggctagtcctcagatgaacacctcagcagatcagagcactctgctctcttcacagtccaccacagtagtttctccccttttgaccaatagtccaggctcctctgccaatcggcgaagcccggtctcatccactaagggcaaaggaaaagtggacaaaattggccagattttgctgaccaaggcttgtaagaaagttacaggctctctggaaaaaggggaagaacagtatggtgcagatggagagactgaaggcccagggctagagaccacaactcctgggctaatgggaacagagcagtgctccacagagctggacagtaaaaccccaacaccctcagcacccacgctactaaaaatgacctctagccccatgggcccaagctccacctcaacaggacccatcttacctggcggtgctctcccaaccagtgtacgctcaatagtaaccacactggtaccctctgagctcatctccacagcgccaaccacaaaaggcaatcatggtggcgtagcatctgagccacttgcaggtggcctagtggaagagaaggtgggacctcatccagagcttctacccagcatagccccttcacagactttagtcccaaaggagactccagccacagcactgcaggggcctgttgccagaccagaacttgaggcaaatgcagtcatagtctctggacaaagcagtgagccaaaagagatagttgagaagtccaaaaccccaagccgaagaaactctcgaactgaggagccaactgtggcttctgagagcgtggaaaatggacatcgaaaacgatcctctcggcctgcttcagcctccagctctactaaagatataactggtgcagtgcaatccaagcgaagaaaatccaagtaagcaagctggaagatgacttgatacttgtaaatgtgtgtgaattttacaaagagcaattttcagctgtgactttttaatctatttctgtacagttagtcattttaataactcaatccttttcctagtccctgaaacctgttgtctcataaagtgtaaaggggagcagcccttttggtgttgcaaaatgaagttcaaggcttctaaaatgttgccatgtattgaaaggagctaataccattataaatgttattagtttcacatttcttaagcagcctaaagtacagggtgagcatttgtagatcttctaatgatgtattgtgctgtggaagtactgtgtgtgaatagcagtagtggggcaaaaagcaatcttgtcatttggaaatgttgtaaataattttattatatagtgtttttggatgtatttgttgtagaaaaggaccagtgaataaagagaatctaagggtttgtacaatgtgaaatattgaacgtgttaaaataaatgtctttgtcaataaaaagaaaaaaaaaaaaanaaaaa

SEQ ID NO: 880 - DNA, 2545 bp, Cricetulus griseus
aaggctgcactctatggacagacttacccagcccagggtcctccaatgcaaggaggctttaacctccagggacagtcgccatcttttaactctatgatgaatcagattagccagcaaggcagctttcctctccaagggatgcatcccagagccagcatggtgagaccgaggacaaacaccccgaagcagctgaggatgcaacctcagcagaggctgcagggccaacagtttttgaatcagagccggcaggcacttgagatgaaaatggaaaaccctactggtggcgctgctgtgatgaggcccatgatgcagccccagcaggctttctttaatgctcaaatggctgcccagcagaaacgagagctgatgaaccatcacctgcaacagcagagaatggcaatgatgatgtcacagccgcagcctcaggccttcagcccacctcccaatgtcactgcttcccctagcatggatggggttttggcaggatcagcaatgccacaagccccaccgcagcagtttccatatccaacgaattatggaatgggacaaccacctgatccagcttttggtcgagtatccagtcctcccaatgcaatgatgtcatcaagaatggggccttcccagaatgccatggtgcagcatcctcagactgcacccatgtatcagtcctcagaaatgaaggggtggccatcagggaacctggccagaaacagctcctttccccagcagcagtttgctccccaggggaagcctgcagcatacaacatggtgcacatgaacaacagtggtggccacctgggacagatgaacatgacccccatgtccatgtctggcatgcccatgggtcccgatcagaaatactgctgacatctcgctagtgggacactgtacaaatgacactgcacaggatcattgggaggtaatgagtcattgtcaggcatccagcttggaagcaagggccagcttgaccatcagggtgttccaagtgctgtcatttgagtggaactgggtctcaagctgaatcgcactgtctacctgatgccctgcctctgtgtggcatggtgttctgcctcggtggggacgtgactctggagataggaacttcataatcacctctcccgtgtcacttccttctgcctcgccagccaaagtcttcacgtaatctaggtgcttagggtttctgccttgtgcactggacgagggtcctttacaggtgtagtccccagagtctgtcgtcttaggttttctcctgatgaggtcccaataccctgtaattctcaaggatttgtcattgatgttaaatggctttgcagaagggaaaatgagatgacgacatttaattttcccatgctaatgtgcagccaagtgcactttacttaagaaatcgtggagaaatgcaatattcccgagggcgtgaggaatggtgagccacattcctggtttttgtctgcactaatctgttaggacaagaacatgattgttttttgtttgtttgttgttttcaagtactggcgtcaccctttgcctatatggtagagcaataatgctttgaaataaacttgtgaaacccaaggccaggtactgcaccctcaatcagaagctcgcagcgtttctgtgaatagatttcctttttgtaaatatgatcttttaagatattgtattatgtaaaaatatgtacatacctttttttgtaggtcacagcagctcatttttatagagttttgtgaagctaaatatttaacattgtcaatttctgtaaactccatgcagtgaggctacaagcagaggagacatcgggaatgccacagcctggggggaagggcagcctgcagctttcccacctcaccttagaggcctcactctttgattctttcctcagcaccccagtgctaggctaactggttggccccccctttttgtatggggaaaattgaagtttattgtgtttttatattttctacttatttttattggtgcaaatcccaaattcagattttcttttaatagtcttgaggggataattagttgtttttacctgacttgccctttaaccttttttgggtcattctctttgtactcctgttgcctacctcgcctccccctcccactggcccctctttaaacctaggtgtcttttgagcaaacagtataagtaatctttccacctgcttttatgatgtgggacatttccagtacctactttttttttttttttttttttttttttgctgaatccaaagattatataaataaaaatatattttatgaagatcaaatgatattaaggaaacatgtttcttcaaaatttaatgtaactgtactgttgctgttggtattaggacgctctctctgaactgtgccctgtggttaacagccctactccattcgccaggattaagtacagagatgagctgggggcatgtagcagtgggtactggtgactcagttggagtgagctttgaaatgccttgctgactgtctaggatgttgttgtaaataaaggccttctatgtaagcctcaaaaaaaaaaaaaaaaaaaaaaaaa

SEQ ID NO: 881 - DNA, 2545 bp, Cricetulus griseus
agagcgccgcctgggccgggagcggccggagcagcccgagtcctgaccccggcccgggctcccgctccggggctcggccagcgggcgtgagggcgccgcgcggcccggccggggggatgtctcggcggacgcgctgtgaggagctggatgagctacactaccaggacaccgactcagacctcctggagccgagagacaacaagtgcaaggtcaaatggacacatgaggaggatgagcagctgagggccctggtgaggcagttcggacagcaagactggaagttcctggccagccactttcctaaccgcacagaccaacaatgccagtaccggtggctgagggttttgaatccagaccttgttaagggaccatggactaaagaggaagatcagaaggtcattgagctggtcaagaaagtatggcacaagcagtgccgtgagcgctggcacaatcacctcaaccccgaaggtgaaaaaatcctgctggactgaggaggaagatcgcataatctgtgaggcccataaagtgctgggcaaccgctgggctgagattgccaaaatgctgccagggaggactgacaatgctgttaagaatcactggaactccaccatcaagaggaaagtagacacaggaggcttcccaagcgagtccagagactgcaagcccgtctacctgcttttggaacttgaggacaaggaccgccaccagagtgcccagcccctggaaggccagggaagtcttatgactggctggcccctggcgccctctactgtgaaggaagaggagaacagtgaggaggaggctgcagcagctgctatttctgcttgagcctgtacctactgacctgggagaagtgcacaccccagagtccctggaatccctcaagcgtgaatatcaggaagactcctctccagaaaccagcttgccctacaaatgggtggtggaggcggcaaacctcctgatacctgctgtggggtccagcctctctgaagccctggacttgattgagtcggaccctgatgcttggtgtgacctgagtaaatttgatcttcctgaagagccatctgctgagggcagtgtcaacagcagcccagtgcagccccagacatcacagcagcagcaacaggcacagtcatcccaccagagcgccacaccaggtcccagcatgactgagtatcggcttgatggccacactatttcagacctgagccggagcagccggggggagcttatccccatttcccccagcactgaggttgggggctcaggcattggcacaccaccctcagtgctcaaacggcagaagaaacggcgtgtggccctgtcgcctgtcacagaaaacagtgccagcctgtccttcctggattcctgtaacagtctcaccccgaagagcacacctgtcaaaaccctgcccttctctccttcccagtttctgaacttctggaacaaacaggataccctggagctggagagcccctcgctgacgtccactccagtgtgcagccagaaggtggtggtcaccacacccttgcacagggataagacaccccttcaccagaagtatccatcgtttgtaaccccagatcagaagtactccatggacaacactccccacacgccaaccccattcaagaatgccctggagaagtacggaccactgaagcccttgccccagactccacacctggaagaggacttgaaggaagtgctacgttctgaggctggcattgagctcattgttgaggatgatgtgaggcctgagaagcagaagcgaaagcctgggctgcggcgaagccctgttaagaaagtccgaaagtctctggctcttgacattgtggatgaagatgggaagctgatgtcctcactgcccaaagctctgtccttgccaacaagtgtcccatccagctcctctagcttcaccctgccaggcagcaaagaggataacagcctgctcaaccaggggttcctgcaggccaagcctgagaaggtggtggccacccagaagtctcggggccacattccagcccctgcccctatgaccagcgcctggaagatggtggcctgtgggggcaccaaagaccagctcttcatgcaagagaaagcccggcagctcctgggccgcttgaagcccagccacacatctcggaccctcattctgtcctgaaggggcttgggaggctcaagcctgttgtcatgtttacaggggctagggtggtggggtgaggcattcagctgatcagcttcaggaagttgtctgctgccatcccctcagactactcaggtgtcagtagaagtggcacactatatcctgtccccaggtctagcttcgggatgtccctggtgctaacagaacagacacccactcctgggcctgtgtgtcctgtccccaatgcctaaaggagccctgttagtttctcccaagctcccatctggcctggcctcatctcagacccctacttaggatagggggcgtggctaggagtgttccttttctcatcccctcttggtacattctctccacaataaaatgccattttccctatgc

SEQ ID NO: 882 - DNA, 2544 bp, Cricetulus griseus
gcagaaagagtaaaaaaggagaagaaagaaaagaaaccaaccgttggtatatttgggatgtttcgctatgcagattggctcgacaagctgtacatggtcctgggaactctggctgctgttctccatgggacttcacttcctctcttgatgctggtgtttggacacatgacagatagttttacaaaagcagaaaccagtatttggccaaacatgacttaatcaaagtgaaatcaacaacacagaagtcatcagcggcagtctggaggaagacatggccacgtacgcctattactacacggggattggtgctggtgtgctcatagttgcctacattcaggtttcattttggtgcctggcagctggaagacaaataaacaaaattagacagaagttttttcatgctataatgaatcaggagataggctggtttgacgtgcacgacagttggggagctcaacacccggctcacagatgatgtctaccaaaattatgatggaattggtagaactaaaagttggaattgtttttcagtccattaggatttataagtggttggaagctaacccttgtaattttggctgtcagccccttattggattgtcatctgctatgtgggccaaggtattgacttcattcactaataaggaacttcaggcatatgcaaaagctggagcagttgctgaagaagtcttagcagccatcagaactgtgattgcatttggaggacaaaacaaagaacttgaaaggatcctcaccaagcgactccgatacatggttttcaaatccatgctgagacaggatataagctggtttgatgatcatagaaatagcactggcgcattgaccaccaggctagccagtgatgccgctaatgttaaaggggctatgagttcaaggcttgctggaattacccagaatgtagcaaatcttgggacagggatcatcatatccctagtctatggctggcagttaacacttttacttgtagtgattgctccactcattatactaagcggcatgatggagatgaaagtgttgtctggtcaagctctgaaagacaagaaagagctagaagtctctgggaagattgctactgaagcaatagagaacttccgcactgtcgtctctttgactcgggagcagaagtttgaaaatatgtatgcccagagcttgcagataccatacagaaatgctctgaagaaagcacacgtctttgggatcacattctccttcacccaggccatgatgtatttttcgtatgctgcttgtttccggtttggtgcctacttggtggcacatcaaatcatgacttttgaaaatgttatgttggtattttcagctgttgtcttcggtgccatagcagctgggaatgccagctcatttgctcctgactatgccaaagccaaagtgtctgcatcgcatatcatcaggatcatggaaaaaatcccttccattgacagttacagcaccagaggcctgaagcctaattggttggaaggaaatgtgaaatttaatgaagttgtgttcaactatcccacccgacctgacatcccagtgcttcaggggctgagcctggaggtgaagaagggccagacgctggccctggtgggcagcagtggctgcgggaagagcacagtggtccagctgctcgagcggttctacgaccccatggccggaacagtgtttctagatggcaaagaaataaagcaactgaatgtccagtggctccgagcacacttaggcattgtgtcccaagagcccatcctgtttgactgcagcattgctgagaacatcgcctatggagacaacagccgggtcgtgtcccaggatgagatcgagagggcggccaaggaggccaacatccaccagttcattgagtctctgcctgacaaatacaacaccagagtaggagacaaagggactcagctgtcgggtgggcagaaacaacgcatcgccatagcacgcgccctcgtcagacagcctcacattttgctcctggatgaagcaacatcagccctggatacagagagtgaaaaggttgtccaggaagccctggacaaagccagggaaggccgcacctgcattgtgatcgctcaccgcctgtccaccatccagaacgcagacttgatcgtggttattcagaatggcaaggtcaaggagcatggcacccaccagcagctgctggcacagaaaggcatctatttctccatggtccaggctggagcaaagcgcttgtaaactgtgactgtttgaaatgctaagtgtttttaatattgttgcttaaatatggcacttaaccaaagtttaaaaaggtgaacactgttgatggtaatttcatcaagatgacagtcttcagaaacttcgtaatttaataattgcattatctgagacataaaagaaacttaaagaatttttaaaataaaatgtgtaattttgtttcagtttttaatttcaaccctactttgttaaatgattataaaggttgtaaaatgtacttaaatattccataaagtgcctataaaaactaaatgttcatataattgg

SEQ ID NO: 883 - DNA, 2544 bp, Cricetulus griseus
accctaccaatacaggctgcacagttacatgctcagccgcaagatcgccgagctgcgccatcgcacaatccagctccaccgggaaatcgtcctaatgagcaagtacagtagcacagagatccataaggaagacctccagctgggcatccctccctcctttatgcgctttcaagcccaccagcgagaggagatcctggaatgggaatttctaactgggaaatacttatactcagccactgatggccagcctccccggagagggatggactcagcacagagggaggccttggatgacatagtcatgcaggtgatggagatgatcaatgccaatgccaagacccgagggcgcatcattgacttcaaggagatccagtatggctatcgtcgtgtgaaccccatgtatggggcagagtatatcctggacctgctgctcctgtataagaagcataaagggaagaagatgacagtccctgtgaggaggcatgcatacctgcagcagaccttcagcaagatccagtttgtggagcatgaggagctggatgcgcaggagctggccgacagaatcaaccaggattctgggtctctgtcattcctgtctaattccctgaagaagcttgttcccttccagcttcctggctccaagattgagcccaaagagcccaaagaaaagaagatcaacattctgatccctttgtctggacgttttgacatgtttgtaaggttcatgggaaactttgagaagacatgtctcattccaaatcagaacgtcaagctggttgttctgcttttcaattcagactccaaccctgacaaggccaaacaggttgaactgatgagggattatcgagtcaagtaccctaaagctgacatgcaggttttgcctgtgtctggagggttttcaagagctctggccctagaagtagggtcttcccagtttaataatgagtctttactcttcttctgtgatgttgacctggtatttactgtggaattcttacagcggtgtcgagcaaacacagtgttgggtcagcagatctatttcccaatcatctttagccagtacgatccaaagattgtttatagtgggaaggtgcccagtgacaaccattttgcctttactcagaaaaccggcttctggagaaactatgggtttggcattacttgtatttttaaaggagatcttgtcagagtgggtggctttgatgtctccatccaaggctgggggctagaggatgtggacctctttaacaaggttgtccaggctgggttgaagacgttcaggagccaggaggttggagtcgtccacatccaccaccctgtcttctgtgaccccaatctggatcccaaacagtataaaatgtgcttggggtcgaaagcatcaacgtatgggtccacacagcagttggccgaaatgtggctagaaaagaatgaccccagttacagcaaaagtggtggtaatggctctgccaggacagcctgatccagccccactggaagaaggatgttttaattgcctaatttatttttcaaaaactttttgtatgatcagttttttgaagtccatacaaggatatattttccaagtggttttcttacacaggactcctttaagattgagctttttgaacaaaaatgtgatcgatgtttgcctttgaacacgtcttgctgaacattaagtagcacctgcctaaccctgacttgaaacatacctgaagaacaaaacttttataataattttttggcttttgcttttttacattccttttccagaccccccccccttttttttggccctatggcagaaaacgtgaacactcctaagaagtccccactgcaattccttggcctaaacagacgtggcactgaagtccacaaaggacttggcattttctctgcccctgctccttttctttagagagggtacattattatttaggttgacaaagaatgactgttagtagtgtaatggatgcaagctaaacagacaaacccctaatgaaaatgtgagggggaaaatttaggctctgttctcttcatcctgtgttgtgggtggagatggtcacttcatttttttaatcactgttttgttctatcttgtttatcttaaataactttaatttatttaatatccattgtttagatcttttccatttgagtacttgtcaattactagtatttatgtttaccatgagtgtggttagaatgttttatttgcagtaaaatgatctccaaagatttccttttgaaaatactttttcctcatctttagtttttacattcccatcttactaaatattaagtgttctttgataattttggtgctcatgtgttttggggacaaaagtaaaatgaatctgttattacaccagaatgtttgttttcaactcacagatcaaatgtgccttaataatttgatttcatttagatttcaagcagttgatagatttgccatttttaatatacatcattggagatctgcttatttgtaaatagcctattgcacatttgaacaaataaaccagtggacagtatttttctattgta

SEQ ID NO: 884 - DNA, 2544 bp, Cricetulus griseus
aggaagactgtttgtgactgggagacagggcacgaacccttcaatgacccagctctacggggcgagaaggaccctaagagtggctttgacatcaaggtgccacgccgtgctgtgggaccctccagcacacagctttacatggtgagaactatgctagagtccctcattgcagacaaaagtggttccaagaaaaccttgagaagtagccttgaggggcccaccatattggacatagaaaaatttcatcgagagtcattcttctacactcacttgataaatttcagtgaaacactgcagcagtgctgtgacctttcacagctgtggttccgagagttcttcctggagctgaccatgggcaggaggatccagttccccatcgagatgtctatgccctggattctgactgaccacatcctagagaccaaagaggcatcaatgatggagtacgtcctctactccctggatctgtacaatgacagcgctcactatgcgctgaccagattcaacaagcagtttctctatgacgaaatcgaggcagaggtgaatctatgttttgaccaatttgtttacaaactggcagaccagatatttgcatattacaaggttatggcaggaagtttgcttcttgacaaacggttacgatccgaatgcaaaaatcagggagccacaatccacctgcccccctctaaccgctatgagacgctgttgaagcagagacacgtgcagctgcttgggagatccattgacctcaatcgcctgattacacagcgtgtctcagcagccatgtacaagtctctagaactggccattgggcgatttgaaagtgaagatttgacatcagtagtcgagctagatggcctcttagaaatcaatcgtatgacacacaagctgatgagcaagtacctcacactagacagctttgatgccatgttccgggaagccaaccacaatgtgtctgcgccttatggaagaattaccctccatgtcttctgggagctaaactatgacttcttgcccaactactgctataatggttccaccaacaggtttgttcggacagtattaccattttctcaggaatttcaaagagacaaacagcctaacgcacaaccccagtatttgcatggatccaaggctttgaacctagcctactccagcatttatggcagctatcggaactttgtggggcctcctcacttccaggtcatctgccggctgcttggctaccagggcattgcagtggtcatggaagagctgctgaaggttgtcaagagcctgctgcaaggcacaatcctgcagtatgtgaaaactctgatggaagtgatgcccaagatctgccgccttccccgacatgagtacggctctcctggcatcctggagttcttccaccaccagttgaaggacattgtggagtatgcagagctgaaaacagtgtgcttccagaacctgcgggaggtgggcaatgctgtcctcttctgcctgctcatcgagcagagcctgtctttagaagaagtctgtgacctgttacatgcagcccctttccagaatatcttgcctcgagtccacgtgaaagagggggagagagttgatgccaaaatgaaaagactagaatccaagtatgccccactgcatcttgtcccactgattgaaaggctgggaaccccacagcaaattgcaatcgcaagagaaggggatttactgaccaaggagcggctttgctgtgggctatccatgtttgaggtcatcctgacacggatccggacctttctggatgatcccatctggcgggggcctctgcccagcaatggggtcatgcacgtggatgagtgtgtggagtttcacagactatggagtgccatgcagtttgtgtactgcattcctgtagggacacacgagtttacagtggagcagtgctttggcgatgggctccactgggctggctgtatgataattgtcctccttggacagcagaggcgatttgctgtgttggatttctgctaccatcttctcaaagttcagaaacatgatggcaaagatgagattatcaaaaatgtgccactgaagaagatggtggagaggatccgcaagtttcagattctcaatgatgagatcattactatcctggacaagtacttgaaatctggtgatggggagagtacacctgtggaacatgtacgctgcttccagccacctatccaccagtccttagccagcagctgagggctaagttcgaaacatacagtaactgatggcatgtttgtctttatgtaaactatattgagatttttaggggctattttgtctgaacctacttaagggggtgctttttgatccaaaagcttaactttataaaacttacttatttttctagactaaaattgtatatgcctttggaattgggaagtatgagaacctggttgccaattgttgccaattatggtcttaacaggtatttttatgttgaatgttccagtagctagctataaaatactgaattcactcatcctgtaagaagcataataccaactaattatattttaaaaa

SEQ ID NO: 885 - DNA, 2543 bp, Cricetulus griseus
ggagacacagaagagggctctaggaaaagttttggatgggattatgtggaaactaccctgcgattctccgctgccagagccggccaggcgctccaccgcagcgcagccttccccaggctgggctgagcctcggagtcgccgcttccccagtgaccgccgcgagtgagccctcgccccagtcagccaaatgctcctcctcggcctcctcctgctgacatctgccctggccggcctgagaaccgggactcgggctgagtccaacctgagcagcaagttgcagctctccagcgacaaggagcagaacggagtccaagatccgcagcatgagagagttgtcacagtatctgctaatgggagcatccacagcccgaagtttccccacacttacccaagaaatacagtgctggtgtggagattagttgcagctgatgaaaacatgcggatccagctgacctttgatgagagatttgggctggaagacccagaagaggatatctgacaagtatgattttgtggaagttgaggagcccagtgatggaagtattttaggatgctggtgtggttctgggactgtgccaggaaagcagacctctaaaggaaatcaaatcaggataagattcgtatcggatgaatattttccatctgagcctggattctgcatccactacagtattgtgatgccacaagtcactgaaaccacaagtccttcagtgttgcccccttcagctttgtcactagacctgctcaataatgctgtgactgccttcagtaccttggaagagctgattcggtacttagaacctgatcgatggcagatggacttggacagcctgtacaagccaccatggcaggttgtgggcaaagcgtttctttatgggaaaaaaacaaagtgatgaatctgaacattctcaaagaggaggtaagactctacagctgtactcctcggaacttctcagtgtccatacgggaagagctaaagaggacagataccattttctggccaggttgtctcctggttaagcgttgtggagggaattgtgcctgttgcctccataattgcaatgaatgtcagtgtgtcccacgtaaagttacgaaaaagtaccatgaggtcctccagttgagaccaaaaattggagtcaagggattgcataagtctctcactgatgtggccctggaacaccatgaggaatgtgactgtgtgtgtaaaggaaacaccggaggataactgcatcctccacagcagtgctcattcccactggcatcctgaatcccccactccatcccacatccccaccagcatctgcctcagggccatcagatgcttcggtcaactgtggtaaagatcttactcattgtctccatccaaaatctaagttgtttgctttcaacagccttccacagcaggatttaaaagtgttccaaaaagaagaggcaccaagaggagtcattagttgtcttgatatgggcaagtgatgtcaacacaagaaaatggtgaaaacgcacagttggattgtgaacaatgtagaaagacttggatttttcccttatgtttgcatatacaagtctaaatggtgtatgttctagaaactcagcttttagatagcagctatgctgctatgaggtaaatgtgctgataggaaagactggattttccacacttagtaacttctctgccatttggaagaagagaagtacagtcatggtttggaggaagcacaatcacacagaggagtggccttccctccttccctctgaggtgatgtatgtgtttcattgtgtacatttttatattttcctcttgactatacctgttggcttttctaatcatgttaaatatctctatttttaccaaaggtatttaatattcttttttatgacacatgagatcaactatttttagcttgataaatttttctaagcagaattgttatagccagaggaacaaagatgatataaaatcttgtttctctgacataaacacatgtatttctttcttgtatggtgctagagtttagagtcatctgtatttgaaaagatggaatggggaagtcaatagaattgataggtcacagagacattttgataacaactggattattatcaatacccacttctattcttagagctacaaataaaggagaatatgtgtatacactcacatggagacatttttaatctaacactttctgtgggtaataggagtggagctcggagaaacagagagacaccttcctggaacagagcgaccacttccagacacagtgctacactgcattgtatggacacatcctatttattgtgatgctagggtttttgtacctataaactctgctccatacacttgtacaaatacatgcatatttttatgtacagaggtatatcatttaaggagttcacttattttgtactctttggcaactgaaaagaaaatcagcataatacatcgcttgtaaaatgcttaatactgtgcctaggttatgtggtgactatttgaattaaaatgtattgaatcatcaaataaaagaatatggctattttaggga

SEQ ID NO: 886 - DNA, 2543 bp, Cricetulus griseus
  modified_base (764)..(764): a, c, t, g, unknown or other
aggctgcgaagagagagctagccaagctgatgaggattgaggacccctctctactgaacagcagagtcttgctacatcatgccaaagccggcaccatcatagcccgccaaggagaccaggatgtgagcctgcacttcgtgctctggggctgcctgcatgtgtaccaacgcatgattgacaaggctgaggaagtgtgcctgtttgtggcacagccaggggagctggtggggcagctggccgtgctcaccggggaacccctcatcttcacgctgcgagcccagagagattgtaccttcctgcggatctccaaatctgacttctacgagatcatgcgtgcacagcccagtgtggtgctgagcgcagcacacacggtggctgcaaggatcgtccccttcgtcgcgccagatggactttgccatcgactggacagctgcgctgttcgagacacggagctggccaagctcccggaggggcactttaggccacatcaaacgtcggtacccacaggtcgtgacccgccttattcatctactgagtcagaaaattctaggcaatctgcagcagttgcaaggaccctttccaggctctgggctcagtgtccctcaacactcggaactgaccaacccagccagcaatctgtccactgtggccatccctccctgtgtgtgctgaggtgcccatgatggcctttactctggaacttcagcatgctctgcaagccattggtccccacgctcctcctcaaccagtgacactcattcgcncacgcctgggagcttcagcactagatagcattcaagaattccgggaccaggaacccaccgtcggtctagctggagcagatgctggagaacactgccgtgcgtgccttgaagcagctggttttgctgcaccgggaggaaggcccaggtcccacgcgcacggtggagtggctcaacatgcgcagctggtgctcggggcacctacacctgcgctgccccgccgcctcttctcacgccgcagcccagctaaactgcatgagctgtatgagaaggttttctccaggcgtgcagaccggcacagcgacttctcccgcttagcccgggtgctcactggaaacactattgccctggtccttggtggaggcggagccagaggctgctcacatattggggtgctgaaggcattagaggaggcaggggtaccagtcgaccttgtgggtggcacgtctatcggttccttcattggggccctgtacgcagaggaacgcagcgccagccgtactaaacaacgagcccgggaatgggccaagagcatgacttctgtactggagcctgtattggacctcacatatcctgtcacctccatgtttactggctccgcctttaaccgaagtatccaccgtgtctttcaggataagcaaattgaggacttgtggctgccttacttcaatgtgaccacagacatcactgcctcggccatgcgtgtccacaaagatggctccctgtggcggtatgtgcgtgccagcatgacgctctcaggctacctgcccccgctgtgcgacccgaaggatgggcacctgctcatggacggtggctacatcaacaacctgccagcggacatcgcccgcagcatgggagccaaaacagtcattgccatcgacgtgggaagccaggacgagacagatctcagcacctatggggacagcctgtctggctggtggttgctgtggaaacggctgaacccctgggcagacaaggtgaaggttccagacatggctgagatccagtcccgcctggcgtatgtgtcatgtgtgcggcagctggaggttgtcaaatccagctcatattgcgagtacctgcgcccgtccattgactgcttcaagaccatggacttcggaaagttcgaccagatctatgatgtgggctaccaatatgggaaggctgtgtttggaggctggacccgtggtgaagtcattgagaaaatgctcacagatcggcggtctacagaccttaatgagagccgccgtgcagatatactcgcattcccaagttctggcttcactgacttggctgagatcgtgtcccggattgagcccccaacaagctacgtctctgatggctgtgctgatggggaggagtcggattgcttgactgagtatgaggaagaagcaggacctgaatgctcaagggatgaagggggctccccgagggcgccagccctagcactgcctcagaggtggaggaggagaagtccgtgcttcggcagcgacgctttctgcctcaggagaccccagctcagtagcagatgcctgaggaccttgacatgggagccctgttcctggaccaggttgtgagtgggccggagggggagctcacactcttattcctgctgctatactgtgacacgccctggaccccctcccccttggctccaaggcccacacactggactgacttgccctgtccccaaggggagggcagagctgcactgatgacctttgactaactatgttacctaacccctaataaactgtcacccctttgaaagcaaaaaaaaaaaaa

SEQ ID NO: 887 - DNA, 2543 bp, Cricetulus griseus
caaggatgtctcagtggtacgaacttcagcagctggactccaagttcctggagcaggttcaccagctgtatgatgacagttttcccatggaaatcagacagtacctggcccaatggctagaaaaacaagactgggagcacgctgccaacgatgattcctttgccaccatccgtttccatgacctcctttctcagctggatgatcaatatagccgcttttctttggagaattaattttttgttgcagcataacataaggaaaagcaaaacgcaatcttcaggataacttccaggaggatcccgtacagatgtccatgatcatctataactgtggatccaagtcatgtgcatagaacatgaaatcaagacgctagaagatttacaagatgaatatgactttaagtgcaaaacctcgcagaacagagaaagtgaagccaacggtgtggcaaagaatgaccaaaagcaagaacagctgctgctccacaagatgtttctaatgcttgacaataaaagaaaggaaatcgttcacaaaataagagagttgttgaatgccatcgagctcacacagaacaacctgattaatgatgagttagtggagtggaagcgaagacagcagagtgcctgtatcgggggaccacccaacgcgtgccttgaccagctgcaaagctggttcaccattgttgcagagagtctgcagcaggtccgtcagcagcttaaaaagctggaggagttggaacagaaattcacatatgaaccggaccctattacaaaaaacaagcaggtgttatcagatcgtacctttgtcctcttccagcagctcattcagagctcatttgtggtggaacggcagccctgtatgccaactcatcctcagaggccactggttttgaagactggggtacagttcactgtaaagttgagactgctggtgaaattacaagagctgaattataatttgaaagtgaaagtctcatttgataaagatgtgaacgagaaaaacacagtgaaaggattccggaagttcaacattttgggcacacacacaaaagtgatgaacatggaagagtccaccaacggaagtctggcagccgagtttcgacacctgcaattgaaagaacagaaaaatgctggcaacagaactaatgagggtcctcttattgtcaccgaagaactccactctcttagctttgagacccagttgtgccagccaggcttggtaattgaccttgagaccacctccctgcctgtcgtggtgatctccaatgtcagccagctccccagtggctgggcttctatactgtggtacaacatgctggtgacagaacccaggaacctctccttcttcctgaacccaccgtgtgcacgctggtcccagctctccgaggtcctgagctggcagttttcatcagtcaccaagagaggtctcagtgcagaccagctgagcatgctgggagagaaacttctgggtcctaatgctggccctgatggccttattccgtggacaaggttctgtaaggaaaatattaatgataaaaatttttccttctggccttggatcgacaccatcctagaactcattaaaaagcaccttctctgcctctggaatgatgggtgtatcatgggctttatcagcaaggagcgagagcgtgctctgctcaaggaccagcagcctgggacattcctgcttaggttcagtgagagttcccgggaaggggccatcacattcacgtgggtggagcgatcccagaatggaggcgaacctgacttccatgcggttgaaccctacacgaagaaagaactttcagctgttactttcccagatattattcgaaattacaaagtgatggctgccgagaatattccagagaatcccctgaagtatctgtaccccaatattgacaaagaccatgcctttgggaagtattactccaggccaaaggaagcaccagagccaatggaacttgatgaccctaagagaactggatacatcaagactgagttgatttctgtgtctgaagtccacccttctagacttcagaccacagacaacctgcttcccatgtctccagaagagtttgatgagatgtcccggatagtgggccctgatattgatagaatgatgagcgcagtataatcacgaatttctctcttctctggagacatttttttcccatctgtgattccctcctgctactgttccttcacatgctgtatttctagggaaatgcaagaaagaacaacacatttgttgcaccctgttgatagcaagtagctatttctctaattagaaacctgttactctgaaggacttcatgcatcttactgaaggtgaaacggaaagtcacttatgcaaaatagattctgtgaacaaaaaacagatccacccaaggtatcgggacttgaatgcgagtgttttgggaaaggtgaggaatatagtaacatctagtaaatgctgtgtagtcagtgcccaactgctacacatcactgctcacaaaaaaaaaaaaaaaaaaaaaaaaaaaaaaaaaaaaaaaaaaaaaaaaaaaa

SEQ ID NO: 888 - DNA, 2543 bp, Cricetulus griseus
ttttgtttctttaatgaagaagtaaatcatataaattgtcaacatgggacggagatcaacatcctccaccaagagtgggaagtttatgaaccccacagaccaagctcgaaaggaagcccggaaaagagaattgaagaagaacaaaaaacaacgaatgatgggccgaacctgcggttttgaagatgaaagatccaaacagattatccgggacatggagaaattggatgaaatggagtttaacccagtgcaacaaccacagttaaaatgagaaagtcctgaaagacaagcgtaaaaagctgcggggaaacctttgaacgaattctacgactttatgaaaaagaaaatccagatatttacaaagaattgaagaaagctagaagtagaatatgaacagaagagggctcaactgagccagtattttgatgctgttaagaatgctcagcatgttgaagtggacagcatccctctgccagacatgccgcacgctccttccaacatcttgatccaggacattccgcttcctggtgcccagccaccctccatccttaagaaaacctctgcgtatgggccgccaactcgggcagtttctatccttccgctcctcggacatggtgttccacgtttgccccctggcagaaaaccaccgggccctccacctggcccacctcctcctcaggttctgcagatgtatggccgtaaagtgggttttgctctagatcttccccctcgtagacgagatgaagacatgctgtatagtccagaacttgctcagcgaggtcatgacgatgacgtgtccagtaccagcgaagacgatggctaccctgaggacatggaccaggacaagcacgatgacagcactgatgacagcgacagtgacagatctgatgcagagagcgagggggatgagtttgggcaccgtgaggacagtgagcgcgataaccctgaggagaagaagtcaggtctgagtgtccgatttgctgatatgcctggaaaatcaaggaagaagaagaagaacatgaaggagctgactcctcttcaagccatgatgcttcgaatggcaggtcaggaaatccctgaggaaggacgggaagtggaggagttttcagaggatgatgatgacgacgagtctgatgattctgaagcagaaaagcagtcgcagaagcagcacaaggaggattcccactctgacggcgcgtctgctgccacttcgcagcagcaggctcctccacagtctgttcctccttcccagatacaggcacctcccatgccaggaccgccgcctcttggacctccacccgccccacccttacggcctcctgggccacctacaggcctcccacctgggccaccgccaggggctcctccattcctgagaccacctggaatgccaggaatccgagggcctttaccacggcttttacctccaggaccaccaccaggccgaccccctggccctcccccaggcccacctccaggccttccccctggcccccctcctcgaggacccccaccaaggctacctcctcctgcacctccaggtatccctcctcctcgtcctggcatgatgcgcccacccttggtgcctccccttggacctgccccacctgggctcttcccaccagctcccttgcccaacccaggggtgttgagtgccccacccagtctcattcagcgaccgaaggcggatgatgcaagtgcagccaccatcgaaaagaaagccacagcgaccatcagtgccaagccccagattaccaatcccaaggcagaggtcacacggtttgtgcccactgcactgagagtgcgtcgggagaataagggggccactgctgttccccaaagaaggtcagaggatgactctgctgtgcctgttgccaaagcagcccccagatctggtccttctgttccagtctccgtacaaacaaaggacgatgtttacgaagcgtttatgaaagagatggaagggctgctgtgacagcctctcatgctgcctcaggcttctgttgagagcactggtttgtggaacaagaggctctggttaaacttaggaagagcaacgtccactgtcagggtgttttccaagttgagttccaggagcctcctaacgcttgccttgctgggattccctgcacagggtgtttctttacaatagaccaggacggaagcactgctgctaacacccgttccctttgacaccaccatttcagcccctttcttcccttttccattttgggaattgtatcagagaagtcttagttatttgtttgactcgtgctatgggcactggagtagagatttctggggggaaaaaaggtttatttcatcttgacttttgtgtttgagttatttttaatattttcctgtaaatattttgtaatattttacttttagtgaaatggattacaatgtcatttcctatttcaaagcaggatatgtgggaagaaaatgtacaattcttggattaaagttatttcccacgacctaaactctcgagtgtttgatggagaaataaaatgttccataccaagaaaaaaaaaaaaaaaaaa

SEQ ID NO: 889 - DNA, 2543 bp, Cricetulus griseus
cgcctgaagggaagccttggcctccagagctacagctgcagcccagtgttgagctgagatggcccaagcctgacattccatgatctgggatcctgacctatgtgtacaggctgctgcttggtagcggatgatctaaaccaccaggcagtcctgggccaggagaggaggactctctgcctggatgtgtgggaactccctgccaacttgattgtcggatctgggggggatccaccccccaccccacagggaaagcacaatccattttgtgggtggggtcttgggtgccaccccctgaagcatggccacccctgtggtcaccaagactgcctggaagttgcaagagattgtcgcccatgccagcaatgtgtcctcgttggtgctgggcaaggcgtcagggcgactgttggccactggtggggatgactgccgagttaacctgtggtccatcaacaagcctaactgcatcatgagcctgacaggtcacacatcccctgtggagagtgtccgcctcaacactcctgaggagctcatcgtagccggttcccagtcaggctccatccgcgtctgggacctggaagctgccaaaattctccgcacactcatggggcacaaagccaacatctgcagcctggatttccacccctatggtgaatttgtggcctcaggttcccaggacacaaatatcaagctctgggacatcaggaggaaaggctgtgtcttccgatataggggacacagccaggctgtgcgctgtcttcggtttagccctgatgggaagtggctggcatcagcagcagatgaccacacagtgaagctctgggatctgacagccggcaagatgatgtctgagttccctggtcacaccggacctgtcaacgtggtggagtttcaccccaatgagtatctcctagcttctggcagctctgacaggacaatccgcttctgggacctggagaagttccaggtggtgagctgcattgaaggggaaccagggcctgtcaggagtgttctcttcaaccccgatggctgctgtttgtacagtggctgccaggactcactgcgtgtctatggttgggagcctgagcgctgctttgatgtggtccttgtcaactggggcaaggtggctgacctggccatctgcaatgaccagctgataggtgtggccttctcccagagtaatgtctcctcttacgtggtggacctgacgagagtcaccaggacaggcactgtgacccaggaccctgttcaggccagccagcctctgacacagcagacctccaaccctggtgtctctctccgccgcatctatgagcggcccagtacaacctgcaacaagcctcagagggtaaagcacaactcagagagtgagcggcgcagccccagcagcgaagatgacagggacgagcgcgagtcccgggctgagatccagaatgctgaggactacaatgagatcttccagcccaagaacagcatcagtcggacaccgccccggcgaagtgagcccttcccagcgcccccagaggatgacatagccacagcaaaggaggcctcaaaacccagcccagccatggatgtgcagttgccgcagttgccggtgccaaatctcgaggtcccagcccggtctccagtcttgactgccactcctacacccaagggcgagcctgccatcatccctgccacacggaatgagcccattggcctaaaggcctctgacttcctgcctgccgtgaaggtcccccagcaggcagagctggtggatgaggatgccatgtcacagattcgcaaaggccatgacaccatgtgtgtggtgctcaccagccgccacaagaacctggacactgtacgagctgtgtggaccacaggtgatatcaagacatcagtggactctgcagtggccatcaatgacctatccgtggtggtagacctcctgaacattgtcaaccagaaagcctccctgtggaagctggacctgtgcaccacagtgctgccacagattgagaaacttctccaaagcaagtatgagagctatgtccagaccgggtgcacgtccctgaagctgatcctgcagcgattcctgcccctcatcactgacatgttggcagccccaccttctgtgggtgtggacatcagccgggaggagaggctacacaagtgccgactgtgcttcaaacaactcaagagcatcagtggccttgtcaagagcaagtcaggtctgagtggccgccatggcagtgccttccgtgagctgcacctactcatggccagtttggactgaggagcctgcgggtgggagcaccagcagccctcacaccttacactccagttcgctgtacgcccaaggcccctgcgcctcagcttggcctccactcttgcccagatggccatcctggagacagcgtcgccagcccactgaccaccttcacagctggggactcacaacttcctctctggcagcagctgtgcagttttgcttctcagggcaactccagcctcggagctgctgctgtaacttatcaggcagatttattaaatgtataactgtt

SEQ ID NO: 890 - DNA, 2542 bp, Cricetulus griseus
ccatcatccaacaagcgtcccagcaacagcacaccaccccaaacccagctcagcaaaatacaagtaactcaggggggccccgacgatcgtccaagaaagaacgacggcaaagctcctcccgcttcaacctcagcaagaacagggagctacaaaagcttcctgccttgaaagattcgccaactcaggagcgcgaggagctctttatacagaagctacgccagtgctgtgtcctctttgactttgtgtcagacccactcagtgacctcaagttcaaagaggtgaagcgggcaggactcaatgagatggtggagtatatcacccacagccgtgatgttgtcactgaggccatctaccctgaggctgtcaccatgttttcagtgaatctcttccggacgctgccaccttcatcgaatcccacaggagccgagtttgaccctgaggaagatgagcctaccttggaagctgcctggccacatctccagctcgtttatgagttcttcttacgtttcttggagtctccagatttccagccaaacatagccaagaagtacattgaccagaagtttgtacttgcactcctggacctatttgatagtgaggaccccagacgagcgggattttcttaagaccattttacatcgcatctatggcaagtttttggggcttccggggcatatattcgtaggcagatcaaccacatcttctacaggttcatttatgagactgaacatcataatgggattgctgagctcctggagatcctgggcagcatcatcaatggctttgccttgccccttaaggaagagcacaagatgtttctcatccgtgtcctgcttccacttcacaaggtcaagtccctgagtgtataccaccctcagttggcatactgtgtggtacagttcctggagaaggagagcagtcttactgagccggtgattgtggggcttctcaaattttggcctaagacccacagccccaaggaagtgatgtttctgaatgagctagaggagattctggatgtcattgagccctcagagttcagcaaagtgatggagcccctcttccgccagcttgccaagtgtgtctccagtccccatttccaggtggcagagcgtgccctctactactggaataatgagtacatcatgagcctgatcagtgacaatgctgcccgagtcctccctatcatgtttcctgcactctataggaactccaaaagccactggaacaagacaatccatggactcatctacaatgccctgaagctcttcatggagatgaaccagaagctgtttgatgactgtacacaacagtacaaggcagagaagcagaagggccggttccgaatgaaggaaagagaggaaatgtggcagaagattgaggagctggcacggctcaatccccagtaccctatgttccgagctcctccaccactgccccccgtgtactccatggagacagagacccccacagcagaggacatccagcttctgaagaggacagtggaaacagaggcagtgcagatgctaaaggacatcaagaaggagaaagtgctgcttcggaggaagtcagagctgccacaggacgtgtataccatcaaggcactagaggcacacaagagggcagaggagttcctgactgctagccaggaggctctctgacctttccccttcccacagggttacagcccacccagccctgggacgcagcccagccctccaccctctgctccttattggctgacctggggcaaaacagcacctctctggctactctagaggatgcaggcactggaagcagggatgcccagagcgctccctcttctcccctaaatgtgttcatgcctccctgtggctagtacagacaggctgagcactgagtgctcagtgctcagacaacctgggggtgcctgtccccctgctccccaccccacagctacctgaaactgttgtgagaaacacaaacacaggggaatcacatgctcctccctccccttcatcctcatcaaaatgaggtgtctctcctctcccatgcagggtaaagcaggagattgtcaccaaagttacatcaagctccattggcccttggagtgaagagctggagaaccgacccccagcagcacaaataggcccctagccctagcattatgcaggcaggggttggtggtggtgtgttccttttatcctccacctaaccatgacaacacagaggtcagaaatgtatgttatggacactagatgaatataggcccagtggagctatggagaaggaagtaggagcagtgccccaggcatggctcctgcagcacctatttctttccttgcttatgctgatgctgggcaggccatcacctgtaccctttgggcactcagaaaagcaaggactggggagggctggaccaggtttcaggggcacaggcagtgtggcttctggctgtgtacatagggtgctttattctccacagaatgatacatgctaaggtgggttgggctcgggccaatgtccccatatgtacagaactgaataaagtgggtctctgaga

SEQ ID NO: 891 - DNA, 2542 bp, Cricetulus griseus
  modified_base (20)..(20): a, c, t, g, unknown or other
aagcagtcacgagagatggngttagaagacatgaaaaagctgcatgttgaaaatgatagaaatagagtcactgagagccgaatttcaatgcttagagcaaagccacctaaaggaattagaggatacaatgaatgtcaggcacacacatgagtttgagaaagttatgacagatcacaaagtgtctttggagcaattaaaaaaagaaaatcaacaaagaattgaccagatactagattacgcatgcctcaactatccaggaatttaagttggagagagaacttagttgaaaaagagttattagaaaagttaaacatcttgagattcaaatagccaaaagtactactgcctttgaatcagccagagaagattcgtcaagcctagttgctgaacttcaagagaagcttcaggaagaaaaagctaaatttctagaacagcttgaagaacaagaaaaaagaaagaatgaagaaatgcacaatgtccgaacatctttgattgctgaacaacagaccaattttaacactgttttaacgagagagaaaatgaggaaggaaaacataataaatgatcttagtgataagttaaaaagtacaatgcaacaacaagagcgtgacaaagatttgatagagtcactttctgaagaccgagctcgtttgcttgaagagaagaaaaagcttgaagaagaagtgagtaaacttcgcactagcagttttatcccctcggcacctgtgcttacagccccagagctgtatggagcctgtgcacctgaactgccaggggagacggagagatcagccatggagacaacagatgaaggaagagtggactcagcaatggagataagcatgatgtctgtccaagaaaatacgatatctgaagagaaacagaggatcatgcttctagaacggacattgcagttgaaagaagaagaaaacaagcggttaaatcaaagactgatgtctcagagcatgtcctcagtatcttcaaggcattctgaaaaaatagccattcgagattttcaggtgggagatttggttctcatcatcctagatgagcgacatgacaattatgtgttgtttactgttagccctactttgtattttctgcattcagagtctcttcctgccctggatctcaaaccaggtgagggagcttcaggtgcatctagaagaccctgggtccttggaaaagtaatggaaaaggaatattgtcaagccaaaaaggcacaaaacagatttaaagttcctttgggaacaaagttttacagagtgaaagctgtgtcatggaataagaaagtatagccacagaagaaattctacatctgataccgtttctgatttgtcctctagcgctaataaactcactccaaacaactttttacaaaagtcaacacggcagtatactacattggtggactacacttcccttttaagtggatatatcttaggaacaataaattcatcaaaatacttggctgaattgaaatggttttgttttgtttccacccaaataactagaaatgcggaccaaactagttactgttctccaaaggcagcgcctgcactgtggcttgtgactagcctcattaattgcctgttaataaacattagctgactagacaccagtgttgttgttaccagcatttgttctcttgtgaactcaagagtccttgcactctttaacgcgttctttataaagtgtataaatccttccaaactatttaaagagaagtgtactgcatgcagataatcataattttgttcgcctcagaagactgctaacacaaattctttaattttttaaaataaccctttgatgtttcaaaacataacaatgtaatttgactgactttaagttcagccataaataatgagcaatcttcaaaagcactttccacacagatcatcgaggctcccagggaagaagagtctgcaccactggaattttcaagtgcaggattcaaacttctcagcatcttaggactgtttgaaataatcatattgatgaatttgtaattcatggttgcgcttacaaaaaaagatattcattgtacattaacatttagaggtcatttaaataacaaaatactgtaaaggacctgtacaattttaagacaataaagaattgaaagtgtaaatacgtgtgcctttcgaaggttacatttttaatctatttgtgtgattgctggaagggtgaagaaattgttctgtatcaaagagaaacatgtttattacaaagatgttgtttgtatcctatgtaacagtgaagtggacttctgtggaagagaaccttgtaaactagggctttagaagctggcactgagccaatgtgctgaagtagctaggtgggttggaaagagcatcttcagggttgctgctagagagcagtaagaaaatgattctttttcagaaatatttaatttcttcataaaaataagttggataattttatatatatgtaacctaatagaatgaaataaacatcatagtgtatagaatactgaatttgacaacatattaatgaataaatgaacaaaatgatttca

SEQ ID NO: 892 - DNA, 2541 bp, Cricetulus griseus
  modified_base (1062)..(1062): a, c, t, g, unknown or other
tgccccacgccgtccctgactgagcctcagcccagcctggagctctcagactgtgacttacctgtccccagagggccagtgtctgaacctggagacccaggaggctgcacctgctctgggcagtacctgctatctagaagagacctgttctgaatcactcctgccaggcctggaggacccattggctggcatgaatgcactggcagctgcagccgagctgccccaggccaggcctctgccttctcttggtactggggtcccaaccggggagaagctggacacagccccagcctaggcctggaacacagcttccttcagggcatcaccctggtgagatagctgagctggaactggaccggaggggccaggaggttgcaggtgcagagccaacctgctggcagctagtcagccacatgctgaaggaggtactagacagccccttctcagacccactaaagaacttgcggctcccgcgtgaactgaactccaacaagaaatacagctggatgcaaaagaaggaggaacggatgtttgccatgaaatcttccctggaagacatggatgctgagcagcaagtccctgctgacatcagatgactatgagctgggaaccggaataaggaagagacacaaagggcctgaggaggaccaagatgccctcatcggcgatggggaaagcccggagcaggaaccagagctgggatgatcatgaatcctcatctgacttcatgagtcagctaaagattaagaagaagaagatggcgagtgaccaggagcagttagcaagcaagctagaccgagccctgtccctcacaaagcaagacaagctgaagtcacccttcaagttttccgacagtcctgggggaaagtctaaagctagtgggggctgtggcaggttcttgacaccatatgacagcctgctgggcaaggacaggaaagcgttggctaaaggcctcggcttgtctctgaaaccctccagagaaggtaaacacaaaagggctgccaaagccaggaagatggaggggggcttcaaggccagaggccagccatgaaaggcaaggcncgcaagctcttctacaaagccatcgttcgaggcaaggagatgatccgcataggggactgcgcggtctttctgtctgctggtcgccccaacctgccctacattggtcggatccagagcatgtgggagtcgtggggcaacaacatggtagttcgcgtcaagtggttctaccatccggaagagaccagcccaggcaaacagttccacgagggccagcactgggaccagaagtcagggcgcagtctccctgcagccctgcgggcctccagccagaggaaggactttcatggagcgcgctctgtaccagtcctccccatgtggatgaaaacgacgttcagacacgtgtccccaagtgcctggtggtgggcctggagcagtatgagcagatgctaaagaccaagaaataccaggacagcgagggcctgtactacctcgcgggcacctatgagcctaccacaggcatgatcttctccacagacggtgtgcctgtgctctgctgagcaccgcctatccagcggggcccacagagacccctccccaccactgccatggcgcgggaccatgtgtgttgtgtgcatgccagtgtgctcgtgggcgtgtgcatgtggccaggtggacgccccgggcaagtgcgagtgtgtacatgtgtgtgcccgtatgcatgcacgtgtgtgcacacatgtgcacacatctctagaccctttctggtcatcccctggtgccctcatgctgagacacccccccttccctcccagcactttgaatgcgcttgatgaggctgccctccaagctctgggcctgtgtagactttctgattctgtggatggggtgagggagagttccaaggacccaaactgatgcttggtatagaggtcaaccatacccagcatggagcccatcaaaggccttccaccgtgggccggggcatacacctttaaatggagtcaactttttaattatatatataaagataaatatatataaatatatatataaactttttaaaactgtgaaaaatagctatgaaattataaaaaaaacacattctgacgtgcagaatattattttttatttcctgttagattgtgagtgtctagcaccggcttcatgcctcccccaactcccctgcaccctcaccctgcccatgtgtactgtatgtgcccccaaatggacgagagatggagatagatggaggggccccgagcccagcccccagctcggcccgaagcacttaaccagcccccctgtgcctgccagaccccaatggggtccccggaggctttgagcagacaatcttgaaggaaggaaaagccagacttcggttctgttttgttttgttttggggggtaattactgttcctgatttcttttttaaacgtttcttttggaattttgtttgttggcaaattctgtgtgatctttttcataaaaaaaagaaaagaaaaaatttaattggaaaaaaaaaaaaaaaaaaaaaaaaaa

SEQ ID NO: 893 - DNA, 2541 bp, Cricetulus griseus
gcgagtgctgcccggcaggccgccatggcgaacgtggccgacacgaagctgtacgacatcctgggcgtccctcccggcgccagcgagaacgagctgaagaaggcatacagaaagttagccaaagaataccatcctgataaaaatccaaatgccggagacaaatttaaagaaataagttttgcgtatgaagtattgtcaaatccagagaagcgggagctgtatgacagatatggagagcaaggtctacgggaaggcagcggcggaggaggtggcatggatgacattttttctcacatttttggtggaggattgtttggcttcatgggcaatcaaagtagaagtcgaaatggcagaagaaggggcgaagacatgatgcatcccctgaaagtatctttagaagacctgtataatggcaagacaaccaaactacaacttagcaaaaatgtgctctgtagtgcatgcagtggccaaggtgggaagtctggagctgttcagaaatgtagtgcttgtcggggtcgaggtgtgcgcattatgatcaggcagctggctccaggaatggtgcagcagatgcagtctgtgtgctctgattgcaatggagaaggagaggttattaatgaaaaagaccgctgtaaaaaatgtgaagggaagaaggtgattaaagaagtcaagattcttgaagttcatgtagacaaaggcatgaaacatggacagagaattacattcactggggaagcagaccaggccccaggagtggaacctggagatattgttcttttgctacaggaaaaagaacatgaggtgttccagagagatgggaatgatttgcatatgacatataagataggacttgttgaagctttatgtggatttcagttcacatttaagcatcttgatgctcgtcagattgtggtgaaataccccctggcaaagtaattgaaccaggatgtgttcgtgttgttcgaggtgaaggaatgccgcagtaccgtaacccctttgaaaagggtgatctttacataaagttcgatgtgcagtttcctgaaaacaactggatcaacccagacaagctttctgaattagaagatcttctgccatctagaccagaagttcctaatgtaattggagagacagaagaagtagagcttcaggaatttgatagtacgcggggctcaggaggtggtcagaggcgcgaggcctataatgatagctctgatgaagagagcagcagccaccatggacctggagtgcagtgtgcccatcagtaaacggcaggcagctgcacaggtggattttctttccacatttgccggatttgccagctgctggagtacctgatgagtccagatgaactgatggacatctgttgatctatgtgtaacttctaaaattggtatagtatccacagagtgtataatttaaactaaccacaaagctttacatcttcatttcgactgttctgtagcagagtaaagcacttggaataagactccctttcacatgtgggttataagtttcagtcctggtatctgcttgatttttatcagttttgtgtagattttatgtttcatattttaaactcaaatccagcattgtaaagtttgtacaatttgtcctaaagctttgtgtttggctgcacctgcataagctgctacaaatagaataaagaattcatagcctgtatctatcatttagatgcatggaaaaatgggctttgcacacaatgggtttgaagctgactgggaacagtagaaacaaattacattagccatggttgtaaagtttttttgcttttttttttaaaccattttgtgaaaggtttctgaaacttgataataaaaagcagttggtgtaaattattctgtgtcacatttttagaaagaagaacatattttgaactgtaaaagtaaggagtgaatcttggttctgcgtgtttaaacagcccttaaaaatccattggcttgaagcttatgcttcaggtacctgcccattttatagtttacaaacactaagattggttgaaacaggctttattgacttcagttgatactctgtagcatcaagaacatccaagttatctaactcccaggtttccctgaaaattgggacaagcccaggcctctgttatcctttgtaccccactttttgaaaataagatactagcagatgaatagtagaaccatgtttacacaaacctgttaacgctgttttaattaaatattatgaaaaattgctctgtctcattaagttgaatatctgaatttgggtgtattataccatctctgagtctaatagcacttgagtacatttctagagatattagaacctggatggaaaaaaaatgtccccaagctaatcaagacctatgagggttaaatttttgccctattcactctacctccattgtacaaaaatattttgcaacaagcctgggcaagattcagcagcataatagttttgtatttgaggttatttcccccacaacactttaagcctaagcaatgcagtgataatataaactttgtagcctttccaataaaggtttat

SEQ ID NO: 894 - DNA, 2541 bp, Cricetulus griseus
cagaaatatagactaacttaggtaagaaattaaagaaacctagctgatattccaaacaggtttgaaatgaaactccacagaaacaacatatttgaagagtcctatcggaggatcatgtctgtgaaaagacccgatgtcctaaaggctagactatggattgagtttgaatcagagaaaggcttggactatgggggcgtggccagggaatggttcttcttactgtccaaagaaatgttcaacccctactatggcctctttgagtactctgccacggacaactacacacttcagatcaatcccaactcaggcctctgtaatgaagatcatttgtcctatttcactttcattggaagagttgctggcttggcagtgtttcatgggaaactcttagatggattcttcatccgaccattctacaagatgatgctggggaagcagataaccctgaatgacatggaatctgtggacagcgagtactacaactctttgaagtggatcttagaaaatgaccccacggaacttgacctcatgttctgcatagatgaagagaactttgggcagacataccaagtggatctaaagcccaatgggtctgaaataatggtaacgaatgaaaacaaaagagaatatattgacttagtcatccagtggagattcgtgaacagggtccagaagcaaatgaacgccttcttggagggatttacagaacttcttccaatcgatttgattaaaatttttgatgaaaacgaactggagttgctgatgtgtggccttggagatgtcgacgttaatgactggagacagcattctatttacaagaatggctactgccccaatcatcctgtcatccagtggttctggaaggctgtgctcctgatggatgctgagaagcggatccggttactacagtttgtcacaggcacctcccgagtacccatgaatggatttgccgaactttatggttccaatggtcctcagctgtttacaatagagcaatggggtagtcctgaaaagctgcccagagctcacacatgctttaatcgccttgatttacctccatacgaaacctttgaagatttgcgggagaaacttctcatggccgtggagaatgctcaaggctttgaaggggtggattaaggcccgctgcatcgggggcactgcccttccagcaagttctgcgtgcacttttgcatttgcctagcagacttttgcagagccggtggcagaagcagttgcctgggctggctctggaggccagcttgtccaggccgcacccaagttccgccagggaacgcagccccagctcaagtgccgccccctttcaccaccaattctcaactggttggcgtgtacattgattacatttcaggaagacttgttctatttatgttgtgcctctccaggcaaagcccttaataaatattttgcatactttctaatgacaatgaatggaattaatcacgatacaggtatagtattacaaaactcatgtttacttttaaaatgatttagactgattttcagattttatttcattacaattaaagatgtctcatgtacttggaaaatattaactttttttttttttttgtacaaagttaaggcttcttttccacatgctatcgagtaattataaaaacaattaacaatctctattcttgccttctggtgagatattttttctcctgtggttaacagatgttgggggcaggggtctttttctttttaataaccttctgtctccagaaccatctctctgttgcagagtgtgccaaagcctgagctgcaaggtgtattttgattgaagaagaaaccaaaatctgttctaagaactggggttctgtaactctgtaggctctagattgaaccacattattcactaaatacaaagagagaactgacttctacaagttgccctttaacccgaagtgggttgcaaaataatttaaccacttgtgcatctcacatgacctgttgctcatggtctcgccagattccagtttgttctgagagtcaggctcatgtgcagcaccttccacccaatgtgttctctattttctattcttgcatctcacctctgaaatttgaaagtctacaaagaaaagcctaggttgctcagctacccagccccaactccactttgtaccttagattttaaaactgggtagaaatgtgatatacattggaccacttttaaatttatataagccttaatgaacagtgtatacacatctgtgtatgcactccatcccagtgttttcagtgtgccagagaaagagccgtagtgttaggacatgagcctgtctagggttttctaagaaaggggtaactttctgtctgatatgaaatcttcctagaaaacttatcattcagcatctaccctctattgaaatgttaaccctcccaagcacgtgtttgaagcaacatgtctctttactggttttgtatttgtaaggagcaactgtaggaatctaagggcgtctgttggtgtgtgacctctcacacacacacacacacacacacacacacacacacacacac

SEQ ID NO: 895 - DNA, 2540 bp, Cricetulus griseus
catggcagatacccagtacatcctgcccaatgacattggtgtgtctagcctggactgccgtgaggccttccgcctgctgtcacccacagagcgcctgtatgcccatcacctgtctagggctgcttggtatggaggcctggctgtgctgctccagacctcccctgaagccccctacatctatgctctgcttagccgtctcttccgtgcccaagaccctgaccaacttcgacaacatgccctggctgagggccttaccgaagaagagtatcaggcattcctggtctatgctgccggggtctactccaacatgggcaactataagtcctttggtgacaccaagtttgttcctaacctgcccaaggaaaagttggaacgtgtgatcctggggagtaaggctgcccagcagcagccagaagaagttagggatctctggcaaacctgtggggagcttatgttctccctggagccaaggcttcgacaccttggactggggaaggagggagttaccacctatttctctgggaattgtaccatggaagatgctaagctggcccaggactttctggactctcagaatctcagtgcatacaacacacggctcttcaaggtggtcgaccaggaaggaaagtcccactatgaggtgcgactggcttcagtgctcaacacagatcctgctctagactctgaattgacttctaagatgaagagctatgagttccagggaagccatttccaggtcacccggggggactatgcccccatcctccagaaggtggtagaacacttggagaaagccaaggcgtatgcagccaacagccaccaggagcagatgctggcccagtacatggagagcttcactcagggctccattgaggcccacaagaggggctcccgcttctggattcaggacaaaggccctattgtagagagttacattggcttcattgagagctaccgtgacccctttggctcccgaggagagtttgaaggcttcgtggccatggtgaacaaagccatgagtgccaagtttgagcggctggtggcaagtgctgagcagctgctcaaggagctaccctggcctcctgcctttgagaaggataagttcctcacccctgacttcacctccctggatgtcctcacctttgctggctctggcatccctgccggcatcaacatccccaactacgatgacctgagacagacggaaggctttaagaatgtgtctctcgggaatgtgctggccgtggcctatgccacaaagcgggagaaactcacgttcttggaggaagaggacaaggacctgtatatccgctggaaggggccatcctttgatgtgcaggtggggttacacgagctgttgggccatggcagtggcaagctctttgtgcaggatgagaaaggtgcgttcaactttgaccaggatacagtgaccaacccagagactggggagcagattcagagctggtaccggagtggagagacgtgggatagcaaattcagcaccattgcctccagctacgaagagtgccgggccgagagtgtgggcctctacctgtgcctcaacccccaagtgctggagatctttggctttgagggagctgatgcagaagatgtaatctacgtgaactggctcaacatggttcgggctggactgttggctttggagttctacactccagaggcagccaactggcgacaggcccacatgcaggctcgatttgtgatcctgagggttttactggaggctggcgaaggactcgttacggtcactccaaccacaggttctgatgggcgcccagatgcccgtgtccatctggaccgcagcaagatccggtcagtgggcagacctgctttggagcggttcctacggagactccaggtgctgaagtccacaggggatgtggttgcagggcgggccctgtatgaggggtatgcaaccgtcactgatgctcctccagagtgcttcctcaccctcagggacacagttctgctgcgcaaggaatcccggaaacttattgttcagcccaacactcgcctcgaaggctcagaagtacagcttgtagagtatgaggcctcagctgctggtctcatccgatctttctgtgagcgttttccagaagatgggcctgaattggaggaggtccttacccagctagccacagcagatgccagattctggagggaccaggtcaaggaggccccagctggccaggcttgagaagattgtgtgtcattaggagtggggggtaggggtgggctctgactctggtgctacctcaactgagggtggtgatgctaacccttctatttgtcagcactttctggtttaccaagtacttcctcagttccttggtctgcgctgccatctttggagggagctccacaggctgcctagtccagtttcccacatgggacaatgcagttctgagaagtgactggtctaaatctggtagctggcatgtgacagagccagggctcaaagcgttctcaccaaatccaatgctcttcgtgtattacttttataaccagaaaaataaata

SEQ ID NO: 896 - DNA, 2540 bp, Cricetulus griseus
gccgccgccgccgccgggcagcccgcactcgccgccgccgccgctcacactccactgcaacatcacggaatcttacccatcttcttcaccaatatggtttgtggactctgatgacccaaatctaacatcagttctggaacgactagaggatactaagaacaacaatttgcttcgtcagcaattgaagtggttgatatgtgaactctgcagattatataaccttcctaagcacctggatgttgagatgctagatcaaccactacccacgggtcagaatggtacaactgaagaggtgacttcagaagaagaggaggaggaagagatggctgaagatatagaagatttggatcactatgagatgaaggaagaagaacctattaatgggaaaaagtcagaggacgaaggaattgaaaaagaaaatttggcaatattggagaaaattaggaagactcaaaggcaagaccatttaaatggtgcagtgtccgggtcagtgcaagcatcagatagactcatgaaggagctcagggacgtctacagatcacagagctacaaggcagggatttattcagtggaactaataaatgacagcttatatgactggcatgtcaaactacacaaggttgactctgatagtcctttgcacagtgatcttcagattttaaaagaaaaagaaggcatagaatatattttgcttaacttctcttttaaggataattttccatttgatcctccatttgttcgagtggtgttacctgttctctcaggagggtatgtgttgggtggaggagcgttatgtatggaacttcttacaaaacagggctggagcagtgcctactctatagaatcggtcatcatgcagatcaacgccaccttggtgaaaggcaaggcccgagtgcagtttggagcaaataagaatcagtataatctagcacgggcccaacagtcctataattccattgtacagatacatgagaaaaatggctggtacacacctccaaaggaagatggctaactacgctgacatatgtctgggccaatgttgctttaaagaaaatcgttccaacgtgcagacataagcttttgagtgcccgtataacagcagtaccgaagacattagctaatagatcatttagtggataatctgtcaactgacatccagatacagccttttcattttgctcactttaggtatcttggactgaacagtggggcctttactgtatttttcctgataagtacacacagtagccactccctaccacctctttcttgaaaagtgaaatcttttaagcaagcagggaagtcagcatcagtttactgcagctgtgaatttacagtaaccttcctatattgagcctatggggtatgaagatttgcaaaatcctgttcgtttagagccaataaaagtttaactgatggtcaatactggtttaggaattctaggtcttctaaaccatagcattttcaggtctgaaatttttttattgccaaaattatgacaggaagcctcttcattaaattgttaactttttcatggttgtgtgaagatttgaactgtttctggaagtatgatcttagttgtattgtatcatattaggtaaagctggccatttgtgagcagtaatttccactggggtggcagagtcctgctgggctgaacctgcctcttgctggttcagcatttcttgggaagagccacagtgtagagcctgaaggtctaaagtatgaggtcattttaccttttcacttattaacggggtgttgcaattgttgataaactaatacacttgtgaagtgattggcacaaagacaggactccttgagccaaagtataaaagatacctaaattggagattctgaaattttttgctgttgtcatacagtggcttttacatcaaaagaccagaaggaattcagcatatgttaattcttttataaaatgtgatacaaatcaatgtactttccattttattgccttacctaaatcagccctctttggttggtaattttttaatcccaactttgatttaaatataaactccagctattttaagcacttttaaaaagaagcccagaagcacattttcctgcacaaaccagtacattatacatttgattagacatttttttttttaactttgtaaaccacattcaggaaacttggcacttgtgcattttgtgtgtgtttttaatttctcatgattctcttctgttggttaagaggacaggttatgaaacctggtattcttgctcacttggttccctttaaataagtgattgccagtgctcacatagcaagtgacaaggcagaactcttcaaagcatcagaaagttccttaagcctaaggcaaaatcttgaatacattattgaattctttaatatcctaatggctagcagatttacagctgcacatttggcatgctttgttttttggattttatttttttttgattctatttttcattgtagatttatttggcaatgtacagtaaaatttgtaaacttgcatcaagtttatgaataaagaaccatttaaaaa

SEQ ID NO: 897 - DNA, 2540 bp, Cricetulus griseus
  modified_base (2181)..(2181): a, c, t, g, unknown or other
agaaaggccattacctttccatttctcacaattgggctgagcacaactgaaccatgggggaacacagtccagaggacaatatcatctctttaagggagaggaagatgactaaccccggatgacaagatgctcaggtttgtggatgacaacggactggtgccttcctcatctggaactgtctatgataggaccactgttcttatagaacaggaccctggcactttggaggatgaagatgatgatggacagtgtggagaacacttgccttttctagtggaaggtgaagagggcttcctaatagatcaggaagcaatgtcccagggttatgtacaacacattatctcacccgatcagattcatttgactataaaccctggttccacgcccatgccaagaaacatcgaaggtgcaacccttactctgcagtcggaatgtccagaaacgaaacggaaagaagtaagacccaggaccaggacctcagcacaatttcaccagcaatcatctttgaatcaatgttccagagttcagatgactctgtaattcaggatgaccctctgcagacagctgccttgattgatagttttaatggtgacgcagagtctatgatattccaccacctgcaggaaattcagcatctttatcccttccacttgtactgcagcctggcatctcacctccagaagtgcctgcgccaccccagaccctcgtaccaggactttctgttgttgctggggctcctgcatcagcagcgacggcagtggcatcagccgtggcagcaccagccccaccacaaagtactactgagcccctacctgcgatggtccagactctgcccctgggtgccaactccgtcctaactaataatcccaccataaccatcaccccaactcccaacacggcaatcctgcagtccagcctggtcatgggagagcaagaacttacagtggatactgaatggtgccaccagctcaccacaaaaccaagaacaaattcagcaagcatcgaaagtcgagcaggtgtattttaccactgcagtaccagtagccagtagcacagggagctctgtccagcagattggcctcagtgttcctgtgatcatcatcaaacaagaggaggcctgtcagtgtcagtgtgcgtgccgggactctgcgaaggagcgggcggccagccggaaaaagggctgttcttccccacccctccagagctgaacccccagcctcctgatgggcccaacctgcagttgccaccctagacatttccctcacccgcccccctcctcctccgctggaccctcttcctgtgagcaaagcagacaggctgaggctcctcagcccctctgaaatgttaagtgccatggatgtgtcagagttcctgtccctccagagcctggacatcccatccaatccagttcacagtgaagcactactgcaggggtaaaagagatgggcctggccagcagcttctcgaagggaagggcctgtgtgtcgcccctaacaggaacagggtgagcaggaattgtcaggtgtgatgctgcctgccatcatggggtcagaaattggaaggatgaagagatctgccatcacctttcagacatattttctttactcatatcccaggaacatccattttaaggaactgatctttggaggaaaacaaaaacaacaaaaacaaaaaaagaaaaaaaaaagttaatgttgttggcagttgtttctttccctagttccagtttggggaaggtagctggaaacaggcttttctggctatctggttcagaccggtccagaagaagccacaaattctcttttctaacacacactaatcattggccagtggtcttggtgacaagtttttaagacccaaatagttttatttggattatgtaaaagtatcaaatttattttaaatgtaaaacatgggaacaatggacttccactgagcgatatgaaaacgttacaggttcagtacttccaaaggaagaaacttccaaacccaaaaaagaataaaatacgaaatttgtatttttgaagaatgtgaaataatggtgtttgcttaattgctcattttgtataaaacttaatatttgtactttaaaatatctgctatgaagtagtaaaattttaaactttttggaattgaaaaagcaatattaaataactaatagaaatcttaattaaatgcttntttaaatctggtagtacatgtggcattacttcctgtccctggttgacattctctccccactccccactgcccagtcatcaagtcttggagggggacagaaaggaaagatcggtcatcaggagtctgcaggtttccttttaatcaagactctgcttaagtgttttgtggggcagagagccccaaagcatgaaatgaacatgtaataccacctggaacccccaaagcaggccagaccactctggccagcactgctggcctgccggaatccgagtcctcaagactggatattcgttggctacatttcaaaacagtactgccttcagccaggacaacgtgggagtggacccagctgccagtag

SEQ ID NO: 898 - DNA, 2540 bp, Cricetulus griseus
cacccaagacagcaagtaaagttccaggatctgtcaagtggtcctaaaggggataatttgctgaacacatcactacagctttcaggtagtgacttgtcaagcaactgggtaaaagactgtcatattcaagagctctgtagggaaagttccttccactctagtattgaagccatttgggaagaatgtaaagagattgtgaaggcctcctccaaaaagtctcatcagattcaggaactggaagagcaaattgaaaaattacaggtggaagtaaaaggctacagggatgagaacaatgaactacgagcaaaggagagtgaggataagcaaaaagatcaccagctgaaagaaaaagaaagtcttaatacatcagctcagagaagaactgcaagaaaaaagtgttggtctctgtgttcaagtacagcttttgtccgaaagagagcaagctctttcagagctaacccaggatgttgcatgctataaggacaaaaataaaggaaacttagaaatgatagtagagacccagaaagatgagtgtagccgcttagctgaattagagcaaggcaattttagaaaaagaatctgccaatcttaaagctagaagcaagtttgaaggaatttgaagcaaatcaccaggatcacatcaaaagcaccaaagatttcaatgaaaaagaaatcaagttggaagaagaaatcacacggttgacaaataatttgcatgatatgaaacagtcactccagttaaaggaagaagaaagacaaactagcagacaagaaacagaaaaattaaaagaggaacttgctgcaaactctcttcttactctggatctccaagcagatcttcagaggaaggaagaagattatgctgagctgaaagagaaactcactgatgccaaaaagcagattgagcaggtacagaaagaggtatctgtaatgcgagatgaagagaaatcattgcggattaaaattaatgaactggagaaaaagaaaaaccagtattctcaggaaatagatatgaaacagcggacgatccagcagctcaaggagcagttaaataatcagaaaatggaagaaacggtacagcagtatgagagagtatgcaaagatctaagtgtaaaagagaaggtgattgaacacatgagattgacattagaagagcaagagcaaactcaggtagaacaagaccgagtgcttgaggctaagttagaggaagctgattggctagccaaagaattggatacatggaaagaaaaattcaaagatctggaaactagaagtaatcacagggcaaacgaagaccccgaagatgacacagacatacttaggaagaagatcagtaagcttcaggacgagctgcaggaatctgaagagaaatataaagctgatagaaagaagtggttagaagaaaaaggaatccttacctctcaagccaaagaagctgagaatctacgaaacagagagatgaaaaaatatgctgaagacagggagcgctgcttaaagctacagagtgaagtggaaacactgacagcacagctggcagagaaaactgatgaccttcaaaagtggagagaggagcgggaccagctggtcacagctgtggaggcgcagatgaaggcgctgctctccagtaacaagcataaggatgaggaaatccagcagctaaaaaggactgctgtagagagcgcagggatggaaaaccaaaccatgaatctcaagcctgaacataatggttcttttgatcttggtggagttgaaactgaacctcaatcaaccagttttgaaatgtctaggaatgcagcagaggatggatctgtaattctcgactcttgtgaagtgtcaacagaaaatgtacaaagcactcgatttccaaaacctgaattagagattcagtttacacctttgcagccaaacaaaatggcagtgaagcaccctggttgtcctacaccggtcacaattaagattcccaaggcacggaagaggaagagtaatgaaatggaggaggacttggtgaaatgtgaaaataagaaaaattctacacccagaaataatgtgcacctccctgcttcagaacatagaaattcctctgtcaaaaaggaacaaaagatttctttatgtccatcatctaagaaaacatactctttacggagccaggcacctacagctagtgcaaacatagcctctaaaaaaagagagggaacactacagaaatttggagacttcttgcaacattctccaacaattcttcaatcaaaagcaaaaaggataattgaaacaatgagttctccaaagttctcagctgtagaagtaagtaaagaaaatgtgtctcagccaaaaaaagccaaacggaaattatacagaagtgaaatttcatctcccatcaacatatctggccaagtgattttaatggaacagaaagtgaaagaaagtgatcatcagattctcaaacgacgacttcgaacaagaacagctaaataaattgctttgggagactgtttcagtgtcaagtttttattcacaatcattgtaaattgtaagttttaaaa

SEQ ID NO: 899 - DNA, 2538 bp, Cricetulus griseus
tttggacaaacgagtcagtcagctactgatatgaagcctgatggaaaccctcagcaattgccaatcactgctcaatgcatgggagctaagctcaagccagcagggccacagtcaagagtgctgctgtctccgggtgcaccttcaggcggccaagaccaagtcctcctctccaggatcaaagcaagaaagtccacctgctgctgcagttcggccctttacgccccagccttccaaggacaccttccctcccagccttccgaaagccccagactgtggccacaagctcaatctattccatgtatacccagcatcaggcgccaggaaaaaacttccaacaggctgtgcagagtgccctgaccaagtcacaccccagaggcccccacttttcaagtgtatatggcaagcctgtgatagctgctgcccagaatccacagcaacacccagagaacatctattcctgtagccagggcaagcctggcagtccagaacccgagacagagtctgtttcttcaggtcatgagagtcatgaaaatgaaaggattcctcgaccactcagcccaacgaaactgctgcctttcttgtctaatccttaccgaaaccagagtgatgctgacttagaagccctgcggaagaaactgtccaatgccccaaggccgttaaagaaacggagctctataacagaaccagaaggccctaatgggccaaatatccagaaacttttgtatcagaggaccaccatagctgccatggaaaccatctcagtcccatcatacccaacaaagtcgccgagctcagtgacctgtcaacacggagaacccagtagaaatcccaaatccatatttacatgtggagccagagaaagacgtgggctcttcagttcctgaaccgttgtccctagaggagtatggggagtgccggtacagagaacagcgatgtgccagcaccttctccaggccttgactatgtgcctgaaggaggcacagacagcagtccaagtctccagaatagcacagaagacacaaacccagaggcccctcatttacttgaagtatacctagaagaatacccaccataccctccccctccatatccatctggggagccggaggggtctgaagaagactctgcacgcatgcgcccgcacgaaatcactgggcaggtgtctttgcctcctggcaaaagaacaaacttgcgtaaaactggctccgagaggattgctcatggaatgagggtgaaattcaaccctcttgcattgctcctagattcgtctttggagggagaatttgatcttgtacagagaattatttatgaggttgatgacccaagcctacccaatgacgagggcatcacagctcttcataacgctgtgtgtgcaggccacacagagattgtgaagttcctggtccagtttggcgtcaatgtaaatgcagcagatagtgatgggtggaccccattgcattgtgctgcgtcctgtaacaacgtccaagtgtgtaagttcctggtggagtcaggagcagctgtgtttgcaatgacttacagtgacatgcagactgctgcggacaagtgtgaggagatggaagaaggctacactcagtgctcccagtttctttatggagttcaggagaagatgggcatcatgaacaaaggagtcatttatgcactgtgggactatgagccccagaatgaagatgagctgctcatgagagaaggggattgcatgaccgtcgtccgcagagaagatgaggatgaaatcgagtggtggtgggcacgcctccatgacaaggaaggctatgttccacgcaacttgctaggactatacccaagaattaaaccaagacaaaggagcttggcctgaaacttgagtaactgaggaaataataggctagaagaaatactatcatcatccaggaaaaaaaatttcaagaaagacttactttaatgacagtgtagcttgaaagcaatgaaagaatgtgtcctggaaagaaaaatgaaaggatgaacccccaccactctgtgctggacaaagtgctcattgcagccacagccagcagcagcctgtctggttttgccaagaaatgggaccatttactgggctgtgggaaatcagcttcttgtcctgcttagggtgtttttggcactgttcctgtaccagtgtcctgccagaaaggaccagtgccatctggcaccatctccaactgtccccagcacccacaggctttgggagtccccagggctgcacacttgagtatcgtcagtgaagaactggtagctacttgtcagtgagcaataactattgtatgagttcctgtagcatttgaagaattatgcatatatttgaaatacttaaactaaacaatactacctaatctaaattagatttagaatcttgtttttaggttgaatttgaatatatatttattgtctttttgtatcttggaaattagagatttgttacagatttacctgtatttgtcaagatcatagctgattttaaaatgattgtaatgaaattaaattttgtctctaagccaaaaaaaa

SEQ ID NO: 900 - DNA, 2538 bp, Cricetulus griseus
gcggcaagcgcggcggtgagcagcccagagcgcgggaccgggcggagggagcacctgcaggcacaggcggcggaggctccaccatggcgattcgcaagaagagcaacaagaacccgccgctgctgagccatgaattcgtgctgcagaatcacgcggacatcgtctcctgcctggcgatgctcttcctgctggggctcatgttcgagataacatcaaaagcagccattgtctttgttgctctccagtataatgttacccgacctgcaacagaggaacaagctactgaatcagcatccctttattactatggtttcaaagatttggctacagttttcttctacatgctagtggcgataattattcatgccataattcaggagtatgtgttggataaaattaacagaagaatgcacttctccaaaaccaaacacagcaagtttaatgagtctggccagcttagtgtgttctaccttttttcttgtgtctggggcacattcattctcatttctgaaaactatatctcagatccaactatcctgtggagggcttatccccataacctaatgacctttcaaatgaagtttttctacatatcccagttggcatactggctccatgcactccctgaactctacttccagaaaaccaaaaaagaagatattcctcgtcagcttgtctacattggtctttacctcttccacatcgctggggcttaccttttgaacttgaaccacctgggccttgttctcctggtgctgcactactttgttgagtttcttttccacatttctcgtctgttttattttagcgatgagaagtatcagaaaggattttctctctgggcagttctttttgttttgggaagacttctgaccttaattctttcagtccttactgttggttttggcttggcgagagcagagaatcagaagttggatttaagtactggaaacttcaacgtgctggcggttaggatcgctgttctggcctccatttgtatcacgcaagccttcatgatgtggaagttcattaacttccagcttcggcggtggagggagcattctgccttccaggccccacctctgaagaggaaaccggccatgaccaaaggcaggtcttccagaaaaggaacagagaatggcgtgaatggagcggtcacatcaaatggagcagactcgccccggaacaggaaggagaagtcttcatagtggatgggaaactgacggattaatggcccccaaagaatctgctttctactctgtctttcagcactagcaatttttctgttcttgaaaatacagtttctgctctttgatttttgctgttgtactgttcctgcatttgaaagggcatttgaggggaggaggattactatgggtgagaaaatgttgtagcttagacttagctaccggccttcagaatagtttagggaccacctttttttctaatggtttggggaaagaccatttacaaaaacccccgcataaccagtgaaaatatttcttgctctcaccgattttttataatattagcaaggtgaccttttctaagaaggtcatattttttaagttgtctttcagggtaaaatggaaatactataaagtctgatgtcgaacttttaatgttttcagtgttctctaatttttaggagttttttgtagcctttacacctggaaaaaagatttgtaaaatcaccaaaataattgtgtgctttattttttaagtagtgattataggtgttacatcccattactgcaagatttattgccgtatattggagcagatgtctcattaacataagagtagtacttaggaagtgaagtccttttgtgcattttcaacatttatcaactggcaatcagaaaatgtttactgtgaagaggaatctccaacttacatagccctttttggtatgtttaataattcttaatggggcttgttgtaagtatgatatgcatagcatcttagtgaaatgccgtttaacgtgcaaacccttttagaacgtaatgcctacttgatttatatctataaaagaaaagggtgtcaggtaatttggaaaactaatgcactaactttaaagaaattgaaaattcaggtggttagtcttaacagaagacatgctttatgttatcctatagctttggacccatctttaattgagaaacatttatctgtataagacatatttttggataaatatatatatatatatatttgtatctacagaaaggctctaaaaagcatttgagtaaagcattggttcccttttctatttctcacttctgtcaccagctaaaaaaatgtccgtgccattttacataaaaagctgcggggctttgggcctgtggcttaagttgccatgctgctagaaagttgtgctttctctttccagccgttgacctaacttcctgggaaaagtagtagctctctgtagcattaccaagtgtctgtggaaccaaatttctgccattaaaactggcattatattgaacaatgcattgagaaatcaatcaaaataaaaaatttttactttcacaa

SEQ ID NO: 901 - DNA, 2538 bp, Cricetulus griseus
  modified_base (1170)..(1170): a, c, t, g, unknown or other
tggcagggaagaggagtaactaaggagaggagccagactctgccctcggaggagctgtgtaagccctcttctgcaaactctgcaatgtcaccttgaactctgctcagcaagcccaggcacactatcagggtaaaaccatggcaagaaactccgaaattattatgcggctaacagctgtcctcctccaaccaggatgagcaccgtggcagagcctgtagccacaccccttgttcctgtccctccacaggtgggctcctgcaagccagggggcagagtgatcctggccacagagaacgactactgtaagctgtgtgatgcctccttcagctcccctgcggtggcacaggctcactaccaggggaagaaccatgccaagagacttcgtctggctgaagctcagagtaactcgttctcggattccgctgccgaggcagggcaaaggcggacccggaaagaagggagtgaatttaagatggtggccaccaggagaaatatgcacacagtccagaacaattcaggtccttacttcaatgcccgctctcggcagaggattccacgagaccttgccatgtgcgtcactcctagtgggcagttttactgttccatgtgtaacgtgggcgctggggaagaagtggagttccggcagcatctggagagcaagcagcacaagagcaaggtgtctgagcagcggtacaggagtgagatggagaacctgggctatgtacagtgatgcctgtgctcgtggagaagctgggcctgcctgttgttgttgccttctggtcaacctgccttgctttgtggtccctttcttttttcttctctctctctctctttctttctttctttctttttttaaacagtggacttaagggcttgatgtgtttcaagcctcgtgaattcaggttctagtctcccagtgcccttaatggatgttagggacgcataagtgtggttcttttagaaagaaatgttagatttatagtgttatttctatattcctttgcactgaaaagagtgatgcatttgttctatgacactccagtgccaggttgcctacaataactcaacttgtttctaaactctggaagttgataaagtaattgtgaaagggtcattgtgaaaggttatgtggatgtctgaaacacttggaagatccctgggctgagtttntttttgtttgtttgttttttttttttgtttttttgtagacaagatttcttctgtattactttggaacactgtcctggaactcaatgtatagaccagactggcctccaactgacagagatccgactacctctgcctcccaagtgcaagcattaaaggcgtgagccaccaacgcccgtctctagtaccaaaaaaaaaaagtttgttgttttgtaaagttccatctagcccaggctagtcttaattctatctactatgtagccgaggatgaccttgaactccccaatcctcctgcctccacctcttggtgctgggtttacaggcctgtaccaccatgccaggctataatcgtagttaagtccaaaagcaattgctaaaatctcactgcactgttgaataccaactaatgcagtgtctgtctgatttctttttgtctttagatggctttcacgatcactctgtcaatgtaagttgcactctctacctgatcttttttctttttttaagaaaacaacttcatatgtcaagatgagtgatactatcttagggcaaagcccatacttgggaacaaacctcttggaagtggctggtcattgttctgccttttttggtacctgaatacctgccaaaggttctgtaagccagtgtgtcattttgtaagtctcatggtgactctctgctcacctgtggcccagtcaactgcagtgacttggtgggggtttggtgtggcctctttgaaatgccttactggatatgccaggctctgctgtcaagcatcccagctgtccactgagacccacatgtcctctttgggatgtgtgctcttgatccggaagcaaagctgtcctcactttcagtatcaagggtacatcttaatgcagtggttgtcttaagttagaagtagaaagctgagagagtttggaacgcttcacgtgatcacatggcaaactgtaaatgtgctttgctatttcaccagaaagaatgcagctaacaagtgcccgtccagaccagggaagtggggctgtgctgtgtaaggctctccacttgtctctcggggcttgaaggtctgagcaggctgccaggcatcgggtcagtctctgttggggttccagagctgactgacacattactgaattcaaaccaatcaactgtgaattgtgaaattgaaattgctcttttagttttattttcttccgcttcttaaatctagaagtctgaatgttatttacgcttctactgcttatgttgacggctcatcttggctgtgtatcctcacgtatgtactgattccttcctgaaaaaggcttgatgatactgtaacaagctttttgtgttcagtttaataaaatggttttgagttcttgtctcaaa

SEQ ID NO: 902 - DNA, 2537 bp, Cricetulus griseus
ctcctccattgttgttccagctaaccctgtggaggctctgccctctgtcactgctctttgtgacaccaccggtactaccttgggagatgccccactgcctgaattgtgtgaccctgatgacttgattactaaccagagccagccaacccaagtagtgaaagaggaaatagctgagaacccacagcaggactccaccttggctgaagcagtggagaggctgagcccagctccctcagtgcttacaggtgatgggtgtgagcaaaaactcttcctttacctcagcacagaggggtccgaggaggcagaggactcttccagaagctcgggcatctctgcagacccaatgcctcctcagcctgacaggaccactagctcttgtgaaggggctgctgagcaggtgacaggggagagaggtgacggaagcaaggtggtacccaaagttcaggagccttccccagccaaggaaaaggtgagcgagcctccggaaagtggatagaggacactatcgaagccggagagagcgttcctccagtggggagcctgcgagggatggcagggcccggacggaggaccgccaccgtaagaagcgacgctgttacagtcgagagcgtggcaagcaggaacgccaccctgctaatacatactgcaatggaggccagcacctgggccatggcgacagagccagccctgagcgccactccgcgagcagatacagccaccatcactcacgggttaggaatggcccagaacaggactggagccgataccaccatttggaaaatgagcatgcctgggtcagggagagattctacccggacaagaatgcgggtgggacaaatgcaggtattaccacgacaggtactcgtgagcatgaacgctctgcccagcttgggcgtccacacaaagacagctactggggccgtaaaagctgggagctgcaaccccgggggaaggaacgaccccacttccacaaccccagagaggcccctggccttgctctgaccctcgagaggcatccccaagagaaggccgtgctggatgtgcaggagagcacccacagtctccctgagcgctttcatgaacaccaaagtgtcaagccgaggaaacggaggtatgagacgctagaaaatgatagccgcttagagaaaaaagcccacaaaagtctggagaaggacactgtagaagagccaaggacaaagaagcacaaaaaatctaaaaagaaaaagaagtccaaagataaacaccgggatcgagatggcaggcatcagcaagaatccgacttttcaggagcatactctgatgctgacctccacagacatcggaagaaaaagaagaaaagaaaagacattcaaggaagtcagaggccttgatgaaagatgttgagatgcatttaccgaagccctcgaactacgaggctgtcggccatttccggagaacggagggcacctttctgctggctgatggcctggctctggaagacagcagctctttccgggagaaaaccaagcacttaagggtggaaagccggcctgacagatgctatctgtcagagtatggccagggtgattaaagccttggcctcataacaaaaaaaattacgattcaacattttcaacagaagccatcccaaacccagattaaattataaacatagaaaataactttgtccaaactgcgtggtgcttctttagtaaatactgtacagactttaccatggactaactttttttttttttttttaagtttttaccttttcttaattgcccttatccaacggatactttgtacactgctgaacattgtaaaattactgtgtacataaaaaccacactagaaaataactgccctggaatagaccatctcagatgctgcttaactacagactcaggttgactacttgtatttcatgtaatgttcctccaagctagacatctggtgcacggccaactgggaaccatggactcctaaaaggacaaaccaacagtgcgtctatttaatttaaagacttatttaaagacccaagctctcaactagaccttcgagggcttcctctgcaatgtctgatactagaaactaatttgcttcacattttagttgtattcaagatttgaagatgtattttatagacaagttctgtttttgaactttgtggaactattccaatcaatttaccagttatgatgagtatttgcattatgaatgtataatccagacattatttgtaaagcctacagtatgtttttattacctaacactttttatactgtgtctcgtcttgacaatatgatattggagtctgagtcgtcagcttgatcccttcaagtttctagttacagacaaaaaatcatactgtgattttatttttaatatggatatgctatcaaactgtgatacacttataattcactggtcctgcatcaggagacgggagtgggggaaaagactgtatttaatacagtgtgtatctgaataatctgtatggtttatacagtttgtgttgttctagagatgtctaaagttgatctttgtttttttaa

SEQ ID NO: 903 - DNA, 2537 bp, Cricetulus griseus
  modified_base (568)..(568): a, c, t, g, unknown or other
  modified_base (995)..(995): a, c, t, g, unknown or other
  modified_base (1638)..(1638): a, c, t, g, unknown or other
agctgtgcatgagtttctggccacattgaatcacaaagaggaagcaactggcagcacagctcccgatgatgagaagccggactcttctatcattacccaaggtgttcctgctcctggacccagtgctaatgtagccagtgatgccatgtcaatcttggaaaccataacttctcttaaccaagaagctaatgctgcccgagcttcaacagaaatgtcaaatgccaaggccaaatgagagaatacccagaaaactctcatctcagcccagcactgacatcagcactgacaaggagagaggctccgaggatgggggctgacagagaaaaaggctacccctgattctggagccgaggggatagaaactgctcccaagtcagaggaacctggtgatctcccttgtccagtggaagaaactagaaatcacacaaaagagaatagcttactttgcctgagtaaggatgctcagctgttctgtggctgaatcagaagacagagtagcaggtcccttggcagctcatacaattcaaactgaagctaatgtgaacagtgttacaacagaggaaaaagntgatgcagtaaccagtgcaggctctgaggaaaagtgtggaggttcttcatgtacagttgaggggactgctgcttttattggtgaagttgaaagtgatggagccgttacaagtgctggaacagaaataagagcaggatctgtgagcagtgaagatgtagttgggtcccaagaaaataggacacaagttggtcctaaaaaagaaacagaaggcactgtgacatgtactgaagccaaaggaagaagtgataacttcagtttctgcttggtaactggagtgggatcccaagagcaacgtgttgttacaggtgcagatgtggcccaagtaaatgatgataagcctagagaagcaagtgccaaccaagaaggagatggttctggaaatgatggaacagaaggtgagagtgcagtcaccagcacaggcattacngaagaagatggtagaagggtcagcaaattgtacaggctcagaagacagcagtgaaggcacagtggtacatggactagtgaaaggtctgctgaaaaacaggacatgttcctggtgcaagacagtcactccacagggaaggaaaccttgatgtcactgttcctcctgaggagaatgcatgtggcataggcaatgtggagtcaccaccaaaggggtataggagaatcaggactgtcagccaacttggcaactgagacatctgtgcattcagaggaagaaacaaattatggagttgcagcaacatctgaaaacccctgtgttggaagaccaagtggatcaggtgaacaggtgaaggatgcttcattggtgaataaatcacaaaatgttgaaaattcagactcaagaatcaatgaagaaattcactcacagaagccctaagcagttgcagtgttgaagcagatcctgaagaggttgaagaggaagaaaggcacatgtctaaaagaaacagaaagcagcattacccctcctcagaagatgaactagatgatagcccagatgtcctggtttccagaatagaaacagcacggagacagtattctgagactgagctgcatgacacaaaggaagaaaactctggagatctagnggagttctctaaaacaagttcaaagacagacagcgttgcactggaagacagagatgactttagcagcagttgcatgtgctgtaagttcctaggtgcaagcttgttcttattatgttttaaacagctttataaactattgttcatagacggtattaatgtacattcacttcagataaaggaagataagttactttgtatctgaactcagcaaagtaggtgtatattttaacagtggaaattgggatttcccaatgtgacacatcactaatgcaatccttccagctcatcagataccaggctgccccctggagatctgtgtatagtatataaacatgtaaaaataggctgtattttactcaatgtatgatgctaatcaatgaacactttatttattttacagagaaatcttatctgtgaactttactatatatctgtttattttattttattatttttaaatgaaaagagggttttaaatgctatgcagtcattagtagaagagttctaggactctgcctgccctgtaactatctgcatactctgcgggttcattcctcttctttgtgctgtccccacgcctctgccaccatctccatactgtctgtttcagtgaagagaaatgcttgaagatgagattgcaccagtctgttcagcttcaagatgtcatgttgttttatacagttatttcaggatagaaactggttttatcgccaggttcttttttaaacatgttttaactcccataatgaacaaactgtccaacttaagttttcataaaataacgttttcttaagatcagatctgtttcttgcaatggatatgatgagttgccaaatgattgagatcattttaaatgctctgttcatactcttgttttataattaaaatttacattcatt

SEQ ID NO: 904 - DNA, 2537 bp, Cricetulus griseus
  modified_base (2528)..(2528): a, c, t, g, unknown or other
ttacccatgggacagtatctgcaaacagagccaatttggtattgggggcctcctaatctaaggagaggattacctcaggttcctacttcagtctctacggagaccaagaaggtgcttatgaacatcacggctccagccttttccctgagggtcctactgactatgtcttcagtcatcttccactccactctcagcagcaagtccgagctcctatccccatggtgccagttggtgggatccagatggttcactccatgccaccggccctttccggtttacatcctccacccacattgcctctgcccatggagggctctgaggaaaagaaaggagcaccaggggaggccttcactaaggatccctacacccctccaaggcggcatgagaaacaagcccctcacgttttgcagtcatctggtctacatagttcaccctcctccccacggctattgatgaaacagagtacatcagaagacagcctaaatgccacagagagggaacaggaagaaaacatacagacttgtacaaaagccatcgcctcacttcgaattgccacagaagaggcagctctgcttggggccgatcagcccacatgggtgcaggagccccatcagaaacccttggaaagtgcacacatcagcattagacactttagcgggcctgagccaggtcagccttgtacctcagccgcccaccctgacttacatgatggtgaaaaggcagttttggtacatcacagactgcaatagctcactccacattttacagcaagagcagtggggatgagaagaaggcggattttcatagcagcaaggaattatctttaagcacagaggaaggcactgaaccttcatcagaaaagaatcaactacattgatctgagatgcatggacacattcatttccacatccccccttttttgttttgtttttctaggaatagaggtaagggagttgatagcatgcctgtcctaagttacagtagttggctattataaatacttttgttattttgaaaacaattagggaaattaacaagtcatctggagcctgaccaaaacaaaatttgaaattaacctattgggtctggtacttttaaaattgtacagatgtttgtgccttttctttactttgcttatattcttataagcattttttagcagtaatttgtacatattttagaatttgtgtatctgctttgtaataaatgtaatttctttcctcttttggacacttggatctaatggtgtaaagcaaaacagcatcaatatatatgtgaggttgcactaaaacatatttttatatgataaaaactgaacagcttttatgtacagctctgattctgtaatactaatatttattttgtttcataaattgtacattttttcttaatgttgtggattgcttttctatgtgaagcatggatttcctgttgcgtaactagaacagaaatgtccattgtaagcaagatatttaaactagaatatcttattctgcacttatgcattagttacaaaaaaaaagataaaggatgtatcagttggttcttaacttgtaaattctttttgtctcgtttgctggattgacaataacttaagtgctgattgtgattttaaatggatagtaccgtaaagcattaaagtaaacaatgtgctattgtgagttttttcaaagctttataaatcagttataaataatattaaaagtatttggtcttatgtgaacatgttgatctatatactcatctaaaaatatggaaaaacattccgccccatgtaaatacgtacaagtgcatcactggtacagttttgtgtaactcagttggacactaggttgctacagacctacgctagggtgtctttaaaaattacaatggcaaagcacatgggactgtgtagaatttggttatcggccggcccggtggcttggtaggcagtgctgtgcgctgcccatggaaaagacctgggcttaaaaaatcttggttcttggtgcacaggagagtgactggaactaaggctgcacggagggattgcacttggacttgagggttgggtgtggaagtagggaagggaggatggagacctgctccccagctcttcccatcagcctgtccttatggttacagggttaacatcagcattaggggatgccgccttgccctttgtacagggaaagagtgtcactcctggctgtctcagggggaatgaagaagagaagccttcaagagaaagcaactcttgggaggaggaagttttttgtatataaccttcagaatggcttttgatcagtgttgaaggtgggaagagcctttgcaggtccagaagagtggagcagagggaggggtacagcaacatgtgcacacgcatgcacatgtatgcgcatgcgcacacacaatctgggttatctttgtgctatatagtggattataattctgtgaaaccaagtttgtatattgaattacattaaggagtgttctttaaaaagagaaataaatatacaattaaataaaaacataaaaaaaaaaaaaanaaaaaaaaa

SEQ ID NO: 905 - DNA, 2536 bp, Cricetulus griseus
ctggctctggccgtcgctgccgcccgcttgtgtccgccccgagtcgcgccggggggcccgccgaggagccgttagtgggttcagggccgattgccgctcgtgggaagcagtgaccgccgtcgtccgcacccgtccccgctcgctcccggccgccgccatgctggcgctcatctcccgcctgctggactggttccgctcgctcttctggaaggaggagatggaactgaccctcgtggggctgcagtattccggcaagaccaccttcgtcaatgtcatcgcgtcaggtcaattcagttgaagataattgtattacccacggttgggttttcaacattgaggaaagtaactaaaggtaacgtcacaataaagatctgggacataggaggacaaccccggttccggagcatgtgggagcggtattgcagaggagtaaatgctattgtttacatgatagatgctgcagatcgtgaaaagatagaagcctctcgaaaatgagctccataatcttctagataaaaccacagttacaaggaattccagtactagtacttggaaacaagagagatcctccaaatgccttggatgagaaacagctaattgaaaaaatgaacctgtctgctattcaggatagagaaaatttgctgctattcaatttcttgcaaagaaaaggataatatagatatcacacttcagtggcttattcaacactcaaaatctcgaagaagctgagacatcttctgacgtcttccagttccttcttggctataatcctagaactactgtccgttcctctgaagtacttcccagaacatggtccttcctaaacccaagaaattgacctttctcaagagtttaatttctcatgtgcactgctgaatgtctagtgtggtagaggcctctttccttttctttttaaaaaacacccacatttttgaccatcttaaattaagaaaattacatattaccattctggtctttctgggccagatttttgtattggttttcagtaaatgtctacctatttcattatagagtccagtagcttatactggtactgacttgatgcagcatggaattcctagtgccacacacagtatttagaaaaacttcaagcctgactcatgtgggatatgaacatataatgtttatcccgtctcacatatgcatgtgaaatgtagacttacaccgtaggaataattggtctgccaagagttagcagaggcaccaggtcagcacagtgggttccttacactggagacttcctacctggtaaattttaaacattctgctttctgagactcctttgtcaccagatagcatttgggaagatgggaagagttacagcatgctcttttgtatctgtccagatcattagttgttttctcccttttaacacaggtttttaaagggtatgggaattgaagatttttttttttttctaaaagttttcatgaatttagagcattctagctagtgtaataaaacccattaagaatgtctgactttgtgtgaacacacatctgttctttgtctccagtcacccacctgtgctgctgcatgacaccctgactataactcctgactttttatatctagtcatgaagttgactttcagcacaaaggatacttataaacaaattcttagtttttttttcttaccattgtaaggtttggcactcttttcactggtgccactagacttcttgattgtgacaactctagacctgcctgcttaatctaatcatgcgcaacgtctacaggttgtttgatgatcggccatggagagaaccgaggaaccaatgctgtttattgtttgcttctatgatacagagctgtacaaaaacttacaatgatcatattttatagcttagtgatctccacgtacataaagggacatattaatactggttcagttgtaaaatgttactcatgccgatgtagtgataaaaccctgtgcttacatctgctcatgtgttgcctcacactgtgtgtgatttgtctcttctgttaagcagcttttacgtcgacagtacatattcagatgtgttgagcactccaagtgtagtcagcagtaaattcttttaataaatacccttttcatttatagactgccatggccttaaaaatattctgtacaaaaaatactgcactgtgttgcacagacactacttgtttctccattcacattggatatctaaaagctactaccaacattttcctgtgcataacctctgcatgttgaaaacttaacagttactgaactttgtaaatacgtaaatttttatttaggtgtggatgcattttttgtctgttttactgctcttctcagctttattcaataaacttgcattttgagggttgcattgacaattgtaccgtaaaatgggcatggtgatgaaaggcgtagatctttggaatggagtggaaagatgattacctgggctccacagaccatgtgctgggaagaagccgtcatctcagctacaaagcattgggttagtgggatgaaccagaaataaactttacagtatctaca

SEQ ID NO: 906 - DNA, 2536 bp, Cricetulus griseus
  modified_base (1912)..(1912): a, c, t, g, unknown or other
gacctccatggggaattactggagacctgtgttgtaaacattgctttaccaagcaggtcacggaagagtaaagtgtccgcgcgtaagattgggctgcagaagttatgggaatggtgcctggggattgtccagatgacatctctgccctggagagtcgtcatcggccgcttggggcgtcttggccatggggagcttaaagactggagtatcctccttggagaatgttcgctacagacaatcagcaaacagctcaaggatgtgtgccggatgtgtgggatctccgctgcagactctccttctatccttagtgcctgtctggttgccatggagccccaggggtcctttgtagtgatgccagatgccgtcacaatgggctccgtgttggccgaagcactgcgctgaatatgcagtcgtctcagctgaacacacctcacttcctgccttcccgtccactttgtggtgctcacgcagttgtacaatgccatcatgaacatgctctaactgggaagcgcttgtccctcctgcctcagctcctcccgcagcctcagccaaggagcctgctccactctacaaatgcccggcctttttcagatcactccccacagccctgcactgtgacgccttctgagcaggctcatgctcattctgcagtgttcattgccacagtgactccttgatgtgtctcaagaggacctgaaaatttccctaggaagggacttgagccaatgtgtgatgtgtgcagcctgcagtcaccaggaaatggtggctgttggtgacttaagagggaaacagaagacacactgtccttttgcacaagagtctgctctcagcctctgttagtgtcagtctgtccagccctctggatgcaatcctctagccaatggtggatgcctgtgggtcacccggactccataacctgggacgcgtcacaactaagagccagctccatccagtacaggatttagtactggggtctccacctctccagcctgtcaggagggctttggttggcagcacacctttgtagacacaggaggtctggagacagctgcatttgtttatttattttttgttttgttgtaaggtttttgctaactttcttttttcttaattctttgaggtaccaggtacagtcgctgaaacccaccaagacccaccataggattctctgactacatacctctgtcctagaagccagaaaaggagtgagaacaaactggggagaccagtcaggctcagccccaagctggaggcaaggaccttaatcacttctctatacagtcacatggaaacaccttttctagagaattcttacagaaacccaggtctcttctttcattagatcaaaagggattcgtgtacatatcacaaccaagtgtttgaaaccagttacaaacatggtgattttttttctggaccataggaatattgtttcaaagaaatagtacaactcaaccattaaatcagtacttgaagctgagcctctatgtgggactttaaaaaaaaaaagcctttttaaagcattaacagctgattgaagtatttttgactcccctcccagaccttagggttgactttgaagccctgtttctagcccttatgttgtatgtttctgtctgcgggtagtggatgtggactggcttccagagtcgcctggcgggccgggcactgagcccggcttccgtgggagagtcctgcaaactaagttcttccaagagactttcatgtcctggttattaacaaagaaaaaagaaaaaaatgtaataattgatatgattttgtaaaagtatttttcttgagataatctaacgtttaaaacattatattaaataacacatggtgggaatgtgaaagcagagaaataacttgtaaatgggtgattgttctctgtcccaccagctggggggggttnaactttccaatgtatagcttaaaaaaatctgatctatcaaaccatttgtatctaatgtgtacagtgtaaaattgacttaaaataccgcagtgctatttttcttatcagagaggaaaccctcaaggccttttgaagaacgtaagatgatggggatgtaaacttgtatagagtcaccccggtgaaaacggactgtaaagtacatatttgtaatcttttaccacttggggttgctttttctcagaattcatcagaactttgaatatctctctctcttctcttttttaaatgggctgtttttactgcaggggcttttcttccctagaaacccaactctacaacaaaaaaattttttttttctgtatttttttctttttgtttcctttttccttcaaagcatttttgcagtgagcttcttttatatatagcaggcaattggaaagaatacaaaaatatgtgatgttcatttaagaactacagctcagcgctggttcaatacactaaagactttgataaaaagaaacaatgataaaggcctccattttaaatgtcattcatatataccttgtggatgagagctatatacttttacacacttttttagaggaataaattattgaattactg

SEQ ID NO: 907 - DNA, 2536 bp, Cricetulus griseus
cagccagtgtgaagagctgcgcctcagcctcgagcgtgactaccacagcctgtgtgaacgtcagcccattgggcgtctgttatttcgtgagttctgcgccacgaggcctgagctgactcgctgtactgccttcctggatggggtggctgagtatgaagtgacccctgatgagaaacggaaggcatgtgggcggcgactaatgcagaattttctgagccacacgggtcctgacctcatccctgaggttccccgacagctggtgagtaactgtgcccagcagctagagcagggaccctgcaaagacctcttccaggagctgacccggctgacccatgagtacctaagcacggcgccttttgctgactacctcgacagcatttacttcaaccgttttctgcagtggaagtggctggaaaggcagccagtgaccaaaaacacctttaggcagtaccgagtcctgggcaaaggtggctttggggaggtgtgtgcctgccaggtgcgggccacaggcaagatgtatgcatgcaagaaactggaaaagaaacggatcaagaagcggaaaggggaggccatggcgctcaatgagaagcagatcctggaaaaagtgaacagtaggtttgtagtgagcttggcctacgcctatgagacgaaggatgcactgtgcctggtgctgacactgatgaatggaggggacctcaagttccacatctaccacatgggccaggctggcttccctgaagcacgcgctgtcttctatgctgccgagatctgctgtggcctggaggacttgcaccgggaacgcattgtctacagggacctaaagccagagaatatcctgttggatgaccatggccacatccgtatctctgacttgggactggctgtgcacgtgcctgagggccagaccatcaaaggccgtgtgggcactgtgggctacatggctccggaggtggtaaaaaatgagcggtacacattcagtcctgactggtgggcgctaggctgcctcctgtatgagatgattgcaggccagtcccccttccagcagaggaagaagaagatcaagagggaggaagtagagaggctggtcaaggaggtgcccgaggagtactcagagcacttttccccacaggcgcgctcgctctgctctcagcttctcagcaaggaccctgctgagcgcctggggtgccgtggaggtggtgcccgcgaggtaaaggagcaccccctttttaagagactgaatttcaagcggctgggagctggaatgctggaaccgccttttaagcctgatccccaggctatttactgcaaggatgttctggacatcgaacagttctctacagttaaaggtgtggatctggagcccaccgatcaagacttctaccacaagtttgccacgggtagtgtgtccatcccctggcagaatgagatggtggaaactgagtgcttccaggaactaaatgtctttgggctggatggatcagttcccccagacctggactggaagggccagccacctgcaccccccaagaagggattgttgcagaggctcttcagtcgccaaaggattgctgtggaaactgcagcgacagtgaggaagagctccccacccgcctctagtccccaggcagaggcccccaccggtggttggcggtagcagctactctcagtgacgtttacagttttgcacagtggtgttccccattgtccactcaagctgtggcctggggaacacagccggagctgtccccagtgtcctccatccctcaacccctggcccagctgagtttgacaaggcctgggtcatcttgggacaaaggtgcatcccttcagctctcccctgtggagctcgctcggggctttgtgtatttatgtatttgtatggatgtatatagctaccagagcgctctcaatgccaccctgggcccgacaccagcagagtatgggccaggtcagacctctgaccccagcgttgcactgctcaccaccagcctccaagtgagacttgtgcctgcctgtcgtggacttgggccatcacctctggttgcccagtgctgtcaccttttctcagcatttgtcagagctggagatgggggcattgtattctctatgcctggaccatagtataaccacagactgaactgactggggcccgtcagaccacaagaagggccgcctacctgccttccagctcccagagcacattattccttatactgggtcatgtcctaaagatacattttttcagaagtgccccagcataggccataggaggggttagaatgacccctccaacattccagaatccctcataaaagtagacatgtacccagcaatgatccacccttccttgtgtgtgcctggtgggggtgggggctggggtgtatcagtgtgtgaagagggtagggtgaggctgtgcctaagccaagaccctaccctggcctgtcccagattcatggccgtcctgatgctagtattcggacaacatgggaccgtagggccctggcttttccatatttaaagccaatgtgagctgcca

SEQ ID NO: 908 - DNA, 2536 bp, Cricetulus griseus
caagtgcatggccaccgagagtgtggatggagagctgtcgggttgcaacgccgccatcctcaagcgtgagaccatgcggccttccagccgagtggccctgatggtactctgtgaggcccatcgtgcccgcatggtcaagcaccattgctgcccaggctgtggctacttctgcacagcaggtaccttcctggaatgccaccctgacttccgtgtagcccaccgcttccataaggcctgtgtgtcccagctcaatggcatggtcttctgtccccactgtggagaggatgcttcagaggcccaggaggtgaccattccccggggcgatgggggaacccctccagctggcactgcagctcctgccccgctacccctggcacaggacgccccagggcgagcagatacctcccagcccagtgcccgaatgcgagggcatggagagccccggcgcccgccctgcgaccccctgacagacaccatcgacagctcaggaccttcgctaaccctgcctaacgggagctgcctctcagctgtgggtcttcccccagggccaggccgggaagccctggagaaggccttggtcattcaggagtcagagaggcggaagaaacttcgttttcacccacgccaactctacgtgtctgtgaagcagggagagctgcagaaggtgatcctcatgctgctagacaacctggaccccaacgtccagaacgaccagcagagcaaacgcacacccctgcatgcagctgcacagaaggggttcgtggagatctgtcacgtgctgctgcaggcaggagccaatatcaacgccgtggataagcagcagcgtacaccactgatggaggccgtggtgcacaaccgcctggaggtggcgcgttacatggtgcagcttggtggctgtgtctacagcaaggaagaggatggctccacctgtctccatcatgcagccaaaatggggaacttggagatggttagcctgctgctgagcaccggacaagtggacgtcaatgcacaggacagcgggggctggacgcccatcatctgggcagctgagcacaagcacatagacgtgatccgaatgttgctgacccggggtgccgacgtaaccctgactgacaacgaagagaacatctgccttcactgggcctccttcacggggagcgccgccattgctgaggtcctcctgaatgcccggtgcgacctccatgctgtcaactaccacggggacacacccctccacatcgctgccagggagagctaccacgactgcgttctgttgttcctgtctcgtggagccaaccctgagcttcggaacaaggaaggggacacagcttgggatctgaccccagagcggtccgatgtgtggtttgcactgcaactcaatcgaaagctcaggctcggggtaggaaaccgagctgtgcgcaccgaaaagatcatctgccgggatgtggctagaggctacgagaacgtgcccatcccctgtgtcaatggcgtggatggggagccctgccccgaggattataaatacatctccgagaactgtgagacatccaccatgaacatcgaccggaatatcactcacctgcagcactgcacgtgtgcggacgactgctccagctctaactgtctgtgtggccagctcagcatccgatgctggtatgacaaggacgggcggctgcttcaggaatttaacaagatcgaacccccctgatctttgagtgtaaccaggcatgctcctgctggagaagctgcaagaaccgcgtggtgcagagcggcatcaaggtgcggctgcagctctaccgtacagccaagatgggctggggggtccgtgccctgcagaccattccccagggcacgttcatctgcgagtacgttggagaactgatttctgatgccgaggccgacgtgagagaagacgactcttacctcttcgatttggacaacaaggatggagaggtttactgcatcgatgcccgttactatggcaacatcagccgcttcatcaaccacctgtgtgaccccaacatcatccctgtccgggtcttcatgctgcaccaagatttgcggtttcctcgcattgccttcttcagttccagggacatcaggactggagaggagctggggtttgactacggtgaccgattctgggacattaagagcaagtacttcacctgccagtgtggctccgagaagtgcaagcactctgcggaggccatcgccctggagcagagtcgcctggctcgactggacccccaccccgagctgctgcctgaactcagcgccttgccccccataaacacctgaggactcaagatccaggccagggcactgcccttcagacattcctccctcagagactccagtcagtcaggcctggagggtggacagcccctctcccagagctggtttctcactgggagtgtcacttcggggctggccatgctccactgagccaggcctcagtttgctgagttgaaattgggcctctgccaactgattttctgtgttctcaataaatgttgggtttggtaaaaaaaaa

SEQ ID NO: 909 - DNA, 2535 bp, Cricetulus griseus
cctgaaaattgccagagctccagcataaaaagtaggcacatgaagaggtaattacagagttatgattcccatcacctgcttaagagctgtgcattagatttgtatttgtttggttaccatttctggccccagatacagggatccaaaccggcttggcatgaaggagcgcacaaacagcccgagggcttggggccctgggtcagttcctctccactcccttccgattctaagtagcacattttcctaggtgcccgtggagccactggtttcatcccaaatatgcccccctcagcagggtggtgctcttgtatctgcctggcttcatgcctcaattctatagtgaagatattcttataactgacaagtgtttttgcacatgtgttggggcaggggcttcatttttatttgaatatatactaaactcctccctgcacaggatgtttttggtggggtaggagtgtcctaacctagcttcctgagcagcagtacaaactgacagtaaactgcttttttaactagccaggctaccttttgtactagacgttgaaaactagagtctaaagaaacaccccccaaaggtaattctttaatactttgtgtacaccatatcagaaatggtttattggagtttattagttcatgatgagagtagtttcgcctcataatagaaattctattttcactgatctcccgttggaaaatcatatttttgtgtgtctgattcatctttttatgttctcaaatgtgtgtctcttacataacataatcttaggaatgaagttttcgatacagctaagtcttctttagtaagaaagttgtctgctagagtctacccccaggtgacccttggatgtaagaaccaatcatttcattgtcacaatcaatgttctgccttaagagtgagtgtcctgtgtaaagtagtgggtgcagcatagaaacatccaaggtactgactgcagcttacatacttcattagtatgaaagtcacagttctctatgcgaagatacatatctttaagtaaattacgtctttaacttttccatgagctgattttgattgatacttaacgtaagcacaccctccttagggacagtaaaccttgggttataaacactggcctgaggaaaatgaagccactttgtgctgtttgactgttctgtttccagagaggaaagccgttgcaagttactctgctccagttgggggggggcggggcagagcctttgtatcaggaaccgtgaagcaagacagaatattcggtctttacaaagagttgacttggttcaggtctgaaaatgagacttaggacaaaacactaatgctctccaggaggttgttctctaaaagaagagccctagccctcaagcctagtttagtaggaaatgcttggtgcagttgactttgggttttttttgtttttgtttttaattaataacatggatggaagtatttctaagtcattgagatataaatgttttgaagattccttgcagtctagtgtacttgaggttgaaagagaaagaaaatctcatttagtgaggaccttctctacagtgcaaattaagaatgggttttaattaattttgcttttcttgcccttggaagaaagcaattttgttctgaaccagaactcataagaagaaaattccaagtcaaaactctggtaatgaatacatggagtcggacacagcgtctttagttgtaaccaggtgaaacccatttctcctggtaggttgaacggtaacagcagtaacagatcagacagctggtttctggtactcattttaaatatgcttggatttttaaccctcactgggacatcagctttagaagtgtaacacagggctgtagaggtggtgattgtcctagaacacctccaggcctgaactccagccaactattgctctgactcacagcaatagcaacctacccatcaccagcatcttacagagcagggattccagggttagtccattgatagcgttgtgtgtgtgtgtgtgtgtgtgtgtgtgtgtgtgtgtgtgtgtgtgtgtgtggagactaggcaccacagacagctgcagaactctgtttccatggctgcttctatcacaagacgggtagaaacacagtcactgcttcagggctctaacccatgtgtcgtctatggctccattctacatttcctatagctttggtatatgctaagtttgctttaaatggctaatttttgaaagtctctgtcagcagttggccatcctgcctttacatgcggttcttgtcagtatgatttgagagtgtagctccattgttagactttcattgtctgctcagtcttatacacacatctccactgtcaacaggtgggacagctgtcagtgaatctttatggacctgaaaagaatttcttgtgaagttgaatgcaagtgtactgtcattcacagcgtttctaaaacaccaggaaccttcacttttgctaccttgatatagcatttgggttatcatgttacaacattgaaatacatcgatttattaaaaactacttttataagaaa

SEQ ID NO: 910 - DNA, 2534 bp, Cricetulus griseus
aagtgttacttaagcaagcccaccagagccaacagaaacttcaatcacctcacagagacagcccagaactagactgatgaaagttcatgtgaaaaatgaactatcaggagacaggatgcttccacaaatgtcacaggaaataatggacatatctagagtaccagaaggtgaagacaaaggcattagcacaaggaagcaatctggtaaagcggaaattggacacagctgtcagtgtgcccagcagcaagaggcaaagaccctagagggccctgcctggcttccaagagctactccccaaaactccaagctcagcagtggactcagtgactgttgataaaaccacaaagatgctcagcaaatctccagagtccatggacacaacttcacagacacagccaggaagaagactcaggagagtgggtgtgaccaaagagcctatagcacaaagaaaaactacaagagtgttacggggaaccagaaacaacacccaaagagcctgtgggtgacagtaaagatgtcaaagagtttaaagattcttcacagaaacaagacccaactgtaagtttaactggcaagaggagccaatcaaggacacttaaggagaagacccaacccttagaggagctacccagcatccaagaagaaacagccacaagatactcttgtgaatctccacaaccagaagaaaaggaaagctcggtagcctcagagaggcagctcagaatacgactgtgcaaaatagacatgaaagaagagcccacaacacagagaaaaccaccaggcaggaaaaccaggaataccccaaaagagcctgtgagtgatagtggaaatgttgaagagcttaaggagtctacaaagcagaagactgacccagcagcaagtgtgcctgctagcaagaggccacggagagtactcagggaaaaggcacaacccctagaattgcctggtccccaagggaccagacccacacagattccctgcagttctccgcaaccagaacaggtagatagcctcccgatctcaccaagacgtcccaggacaaggcgaggaaaagtagaggtggatgaagtgccttcattagtgaggaaggcagtaccatcatcaaggcaaacttcaaggatctcgcaaggtccctgaaattgatgacaaagacattcaagcttcaaaagaacctggaaagcagaaattagaaacagtcaccactgtaactgccagcaggaggcagctaagaggacctaaggatggggtccaatctcttgaagtcctgggtgaatccaaagaaataactcaaatgtcagagcacactgagaaactaagacatgacaccaatagccttaaaagtactctccagcaaatgccagtccccataaaacctctgagaacatccaggagagtgctaagggcctctaaagaggacaactttggaaatggtggtggataccagggactctgcagaatcgcaaagcaaaagcatcactttcctgccacccaagaggaagtctgcaagagatggaagtattccaagaaccagggggttgcgctctgtgactccaaagcaggaagcaacagatgagaaacctgcacctaagaaacagaggactgcttccagcaagaggcatgtgtcacctgagcctgtgaagatgaaacagctgagaatcatgtcaaacaaaattgaaccagtggaagagcagattagcaacatcacggaagaaaaggaagcccaagtagaaaactcagcccatccagaccagaaaacgcctccagataccgaaagaaaaccaatgaaaaacagccaagacccgaggttggtgtatctgcagagaaggttgggataaagaaaaatgagaagacagtgaagacctcccaggagacagagctgcagaacacagatgatggagccaagaagtctacatctaggggcaaagtcagtgggaaaagaatatgcttgaggtctggaggacagagtgaaattccccagcctcatgcagcagaagagaaaacaagtgagacaggtgcagaaatcttggtaaagactcagaaagagaaagggatctctggagattcagatgtcaggtgtctgagatccagaaaaactggagccactttggacagtgaacctaagccaagagtgactcggggtgccaagaaagatacaaaagttccaaagaaggatgaagacattgtatacaccacgaaactaaggacaagaagttaaggacaagaagtcaccagaatagtaaaaatgtgtagcaaagacatttaagaaggaaatattaagttagcttagtgataaattccagtgtggtttttctcctcctatgtaaaagtaaactgtaaataatactgcctatgtttaaggaagggagctttgagctcttgtggttattctctcttcaaactccaatggagatcatgaagggggtcaccagggatctcagagcaataacagtttaggggtgggcaggcagaagtgtggccttctgtcctgcacaataaagttctgaagttcacaaaaaaaaaaaaaaaaaaaaaaa

SEQ ID NO: 911 - DNA, 2534 bp, Cricetulus griseus
ggggcgccggggcggccgggcctggctggggaccgcggcgggcgccgggacctggaggggactctcgggccggcccggggcagcatgtgacactctctgtgctggacggacctcctggcccccggccgcaggaagatcaacagaatctttggctcccaccagtaggtgtaacagtgaagtgtcccctggcctggctttcagcaacatgacaaaccttctaagtccctcttcccctaccactccctggatcccggaacttcagagacctgccggtaaagatgagtcagggctcactgaggaatctgagcccccagtgagaggatcttttcaggagatcagcccctcaggagggttgtagtgacacatggaggtcagctttagcaccaagaaagtcagaaaactcaatcaccaccaactggagaagacgtccagctggccccatacggcacggacccagtgagaacagagagtgtcagtgaacaggctgtctcctcccagctactttatcaggagtacagtgatgttgttctgaacaaagagatccagagccagcagcgactagacagcctggctgaggcacctggactctcttccccccggcatcggcgaaaggcagtggtgcccctcagactcctatctgcagcgtctgtccatggcctccagtggctctctctggcaggaaatccctgtggttcgcaacagcactgtgctgctctccatgacccatgaagatcaaaaactgcaagaggccaaatttgagctgattgtgtcagaggcatcttaccttcgcagtctaaacatagctgtggatcatttccaacattcagcccaactccgggccaccctgtccacccaggatcaccagtggctcttctctcgtctacaggacgtgcgcgatgtcagcaccacgttcctttccgacctagaagaaaacttcgagaacaacgtcttctccttccaagtctgtgatgttgttttgaatcatgccccagaattccgccgagtctacctgccttatgtcaccaaccagacctatcaggagcgcaccttccaaagcctaatgaacagtaacagcagtttccgagaggtcttggagaagctggagagcgaccccatctgccagcgcctgtctctcaagtccttcctgatactgcccttccagcgtatcacccgtcttaagttgctgctccagaacattctgaagagaacgcagcctggctcctcagaagaggcagaggccacaaaggcacaccatgccctggagaagctgatccgagactgtaacaacaatgtgcagaggatgcggcggacagaggagctcatctacctgagccagaagattgagtttgagtgcaaaattttcccgctcatttcccaatctcgatggctggtgaagagtggggagctggtggcccttgagttcagtgcctccccagggctgaggaggaaactgaccactcgtccagtccacctgcatctcttcaatgactgtctgttgctgtcccgaccccgagagggcagccggttcctggtgtttgaccatgctccattctcctccattcgaggggagaagtgtgaaatgaagctgcacgggcctcacaagaacctcttccgtcttttcctgctgcacaacacacagggcacccaagctgaattcctcttccgcactgagactcaaagtgaaaagcttcggtggatctcagccttggccatgcccagagaggagctggacttgcttgaatgctatgattccccacaagttcagtgcctccgagcctacaagccccgcgagaatgatgagttggccctagagaaggcggatgtggtgatggtgactcagcaaagcagtgatggctggctggagggtgtgagactctcagatggggagcaaggctggttccctatccaacaagtagagttcatttcaaatccagaggtccgtgcacggaaccttaaggaggcccatcgtgtcaagactgccaaactgcagctggtagaacagcaagtctaactattctcagtgaaggatcttctgagctcacaaacaagcattcctggagatgcctggccacagaaacctgttgtagaggcctttggtggaccaggagtttggccttctgaaagcccaaggactagctcagtccctcgctccagtacttctttgcattgtgtgcatggtagggaatattaagtgacttcacactggattctgggatcctttcttcataggaaaagggaccttggggcctatgtctaggcttgtactgccagatggttcttatacatcatctgctgccccagtgcggatgcaaagctggcatggtatcagatggacctcagcccactggagagcgggctttaatggggattagcacgtgaggtgggaggtgaacctggtgacctcccttgtgtcttcccatctggacatctccttggtgcatgggcccctgaggtctttgtttcccggtggcaatgtgagggtggcattctctcactctaataaacttggcacttctacaaaaaaaaaaaaaaaa

SEQ ID NO: 912 - DNA, 2533 bp, Cricetulus griseus
cccgcagcctgacacgctgcgcgatccctcagtctccagcggtcgcctccccaggcatggcacagggcctcgccacactatggcagcagcaaggcacagcttggcaccaaagctgacagtgaggccattctgaaaggccttcagtccatctttcaggagcaggggatggcagagtcagtgcacacctggcaggaccatggctatttagcaacctacacaaacaaaaatggcagctttgccaatttgaggatttatccccatggattggtgttgctggaccttcagagttacgacagcgacgcacaaggaaaacaagaaactgacagccttttgaacaaaatagaagaaaaaatgaaagaactgagtcaggacagtactgggcgtgtgaaacgtttaccacccatagttcgaggaggggctattgacagatactggcctacagctgatgggcgcctggttgaatatgacatagatgaagtggtgtatgacgaagattcaccttatcagaacattaaaattctacactcaaaacaatttggaaatattctcatcctcagcggtgatgttaatttggcagagagtgacttggcgtacacccgagccatcatgggcagtggtaaagaagattacactggcaaagatgtactgattctgggaggtggagatgggggcatattatgtgaaattgtcaaactgaaaccaaagatggtcaccatggtagagattgaccaaatggttattgatggatgtaagaaatacatgcgaagaacatgcggagatgtcttagacaatcttaaaggagactgctatcaggttctcatagaagactgtattccagtactgaagaggtacgccaaagaagggagagagtttgattatgtgattaatgatttgacagctgtcccaatttctacatctccagaagaagattccacgtgggagtttctcagactgattctcgacctgtcaatgaaagttctgaaacaagatgggaaatactttacacaggggaattgtgtcaatttgactgaagccctgtcgctctatgaagaacagctggggcgcctgtattgtcctgtggaattctcaaaagagattgtctgtgtcccttcatacttggaattgtgggtattttacactgtttggaagaaagctaagccttaaagatgagaatgtcgtgtgctgcaagccacctccctgacttccatatgccccatatgccatcaactgagtcaggcaactggtcatgaattccttcaagtgtttttattttaattattatttttaatttaaaaaagccaatgggaaaaatgtatattttgatgagctagggtgttaatttttgaaagtcagccgaaggacaattagacagcccagctgagacttcggaatgcactgaccccctagaatgtgattttagtatcttttcttctctgtgtggggtttgggttttcatttgggtttcagtagactttaatttggacatgcagaggaatgaacatcattgtttgttctggagagaagttcctgatagtgtttcttcccccaccccaaattgacttagatattaaaatttggtgcttttaaaaaaaagacttaagtgattagcagtgcttcaattaaaatgacgaaagagacctttcatgtgttttgtcactttatttcagcccatttttcctttcttacctctgatggcctagaacaaaggtatattgtatgtagctcagtctaacctggagtttgttatgtagacctggcttgcctggaactttcctgagagcttgtaccacagcacccaactcaattttttttgcttcattttagtaacaaacagtatatcagctcctggatgtattattaatgcgaggcatgacctggttggttggtacttgaagagtaacttgaggccacaaccacagatccactcatatttctggtgactcaggtcctgctaagccaagtattagaaatgaagagggtaggttatgcaaggctacttggaagatacatttgggagaaaataaaggaagtggtattgagtttatcttgagtgataaaagtaaattcagactaatttctttgtttgctgaaggaggatctcaagttttgaacacttgttattttaatacggaatcatgctaacagaatccccccaccccacccagtgtactagctaaaaacccacccttactttggctgtcttttgaagaaatgctaatgatccagcatgctgtttttcttagtgactagtgttgtgcagtgtgaaagtttcctttaacagtagaatgtattatggtgtcctagcttttttaatgaaagacaagacaaatacggatagtgtttaaattctattcaacacagcagatgctaagaattgatttattaagatatgaaatgctcctttcccttggaaatgtgattgaatatttataaaactgatccaactgggccaagggaaagctgggttggtggtattttttaatgggctagagcactgctgatatcaaaataaaaaagatgtgctgtccttcct

SEQ ID NO: 913 - DNA, 2532 bp, Cricetulus griseus
gagagagctagcaggcagcaggcggcaggcgggcgggtggccggccggcacggagggagggaacgagcaagcggtgagcaagccagcgagggcggccgggtcccgagggcagtggagattcctcaggcccctccggcgccctccccggagtccacagcacctccagcacccagcggagcggacacggccctgcccggccatggcctcgttgctgaaggtggatcaggaagtgaagctcaaggttgattctttcagggagcggatcacaagtgaggcagaagacttggtggcaaattttttcccaaagaagttattagaacttgatagttttttgaaggaaccaatcctaaatatccatgacctaactcagatccactcagacatgaatctcccagtccctgaccccattctcctcaccaatagccacgatggactggatggtcccacttacaagaagcgtagattggatgaatgtgaagaggccttccaaggaaccaaggtgtttgtgatgcccaatgggatgctgaaaagcaaccagcagctggtggacattattgagaaagtaaaacctgagattcggctgctgatcgagaaatgtaatacggtcaaaatgtgggtacagctcttgattcccagaatagaagatgggaacaacttcggggtgtctattcaggaggaaacagttgcagaactaagaactgtcgagagtgaagctgcatcttatctggaccagatttctagatattatattacaagagccaaattggtttctaaaatagctaaatatccccatgtggaggactatcgccgcacggtcacagagattgatgagaaagaatacatcagcctccgtctcatcatctcagaactgaggaatcagtatgtcaccctacatgacatgatcctgaagaatattgagaaaatcaaacgaccccggagcagcaatgcagagacactgtactgaggccagggccagggccaggggactctgtgagtctggctcaagaccgacattgccttggtttgttacatgactatcgtgatggggaaactggctggaaatagtgatcacacctctctgtttttagttagagtctaatgaaactctcatctagttctgtgatgtgtttacctcttttttcaggcctcaggaactcttctatctccttccccaaaccccattcccagcctgtcttaatttctggagaactccaggcttgtgcaggatatggcacaagaatatctgggggttatttttttttcttcccttccctcctcctccccttgttttaagtttgtgttttcttcctttcaattagttggttaaaagctggaggaatataggaaaagtgtctttaggaactgggggagtggaggtggaagggacatcttcctgtcacaaggccggtgtctcttgcttatgtgggactttaggtcctccctaccacagctgccctggtgatgccttagggctctccacctgtgtctatcccaccttgagcctgaccgtgatgagggatacctaaggccttcagctgcacccctagagctcctttggatgtttttataactggggttttctcatatacatgtgtacacatgtacacatgcatagggacatgtatacatgcttccttctccattatagaacatagccttccttcctgcaccactgccccctcagcccgtcacacatgcaacacctcagcaggtgacagttgtcttagtcatccacccaggcaagtcccaggcccaccctctcttctgataatgtagccgttggtgcccagggtaagttgaaggagaaccaagagccgaggagcagagggctcatgaaggccttccctctgtgactcaggtttttttggtgttatgcaaacgctggcgctctgatccccacttgcccttctcccaggccagcttgtgtgttggatagggtgtgggcagctgtgaggtccagaggctgctactcttcgctgtgctttccctttgggaaatatttctcatatttatagtattgtgcttccagggaaagcagtaattcatgtgtatatgtgtctgtgcacatacacacgcgcacatgtgcgtgtgtattcgtgtgtgtgtataaatatgctgcgaaggtcaaacccatagaagagttgcctcctctttcgaatcttgcagagatatcatttgttacagcttttgtgttaaccccatcaacccccagctttttaagtgagagttggtgtctgcagttaacctgccagtgactctcagtgtctatttggcttttattcctctgtcttccaactcccaatcatactccacctgggatgcatcattttcactcccagtattctatagaaaaggagtcaggatgcaggatgctctcttcccatgaatagtgctcagtaacaaaccaattgcatttcagttgggcagtactcctacccacccctcagatcccttccagctgaaccccctccctcctccttccacgtgtttctcagattcccatttttgtttgattgttccactgcccctcct

SEQ ID NO: 914 - DNA, 2532 bp, Cricetulus griseus
tctccatcagtcattgccaaccaactggaagttgtagaaggcctgaggaatagccgaaacaagaccaagaggatgctggtggagaagatgggccgggaggctgtggagctgggacacggagaggtgaacatcaccggtgtggaagaaaacaccttgattgccagcctctgtgaccttctggaaaggatctggagccatgggcttcaggtgaaacaggggaaatcagctttgtggtctcacctgttacactatcaggaaaaccggcagagaaaactcacatcaggaagcctcagtaactcaggaatacttcttgattcggaacggagaaagtctgatgccagtgctgtcatgtctcccctgaggatctccctaattcaggatatgaggcacatccagaatattggggaaatcaaaactgatgtgggaaaggccagagcatgggttcgactgtccatggaaaagaagttactctccagacacctgaaacagcttcttttcagaccacgagctcaccaagaagctgtacaagcgttatgccttcctgcgctgcgatgatgagaaggagcagttcctctatcacctgctctccttcaatgcggtggactacttctgcttcaccaacgtcttcacaaccatcctgattccgtaccacattttgatcgtaccaagcaagaagctggggggctccatgttcaccgccaacccatggatctgtatatcaggagaactgggtgaaacacagatcttgcagatccccaggaatgtgctagagatgacttttgagtgccagaacctagggaagcttaccactgtccagatcggccatgataattctgggctgtatgccaaatggcttgtggagtatgtgatggtcaggaatgagatcacaggacatacctacaagttcccatgtgggcgatggctggggaagggtatggatgatggaagcctggagcgagtgctggttggggagctgctcacttccctacctgaagtggatgagaggccttgtcggactccgcccctgcagcagtcccccagtgtcatccggagacttgtaaccatctcgcccaacaacaagcccaagctaaacactgggcagatccaggagtccatcggggaggcagtcaatggcattgtgaagcacttccataaacccgagaaagagcgtggcagtttgacactgttgctttgtggagagtgtggtctcgtttcagccctggaacaagctttccagcatggatttaaatcaccccggctcttcaaaaatgtcttcatttgggatttcctggagaaagcacaaacctactatgagacgttggagcagaatgacgtagttcccgaggaaaactggcacacaagggcccgcaacttctgccgctttgtcactgcaatcaacaacacgtcccggaacatcggcaaggacggcaagtttcagatgctggtgtgcctgggagccagagatcacctcctgcaccactggattgccttgttggccgactgccccatcactgcacacatgtatgaggatgtggcactgatcaaagaccacacacttgtcaattccttgatccgagtgctgcagaccctgcaagaattcaacatcacactggagacatccctggttaagggcattgacatctgacctcacagcaccagccagcagcaggacccagaaagactccctgcagctctgcctcttcatcccaaagggacctaagcatttgtaagggacgagaagagatgtatacttactgtaaaaagaaaactagaggatttttggaaaaaataatctattttagagtttatttgctgatctgctttttacacactttcatgtgaaagagtgacaggaagagggagcgaggttggcactgcttattttgaagctggtgccctcccttgcatggccacgcgctgggagcctgtggcctcccggactgagcctgcacacaagtgtggggctattccacatgcctcctcatcaccccgatgaggccattccacatcgtttttaaactaatgttttctatattaacattattctgaatatctggcttttatgggccatgcacaggtgtgcgagcaggaaatccatgctgtaatcatagggatttttagcagtgcctctgaccaagcactgcagaggcagccccacagctgttccccaccttccccccttttttggtcagtattatttgggaaggagacataccaggagatgtcattgtgccgctgtcatgcagaaaatcttatttcctgttggcacaaagttgcacagaagtaaacatgagcattttttaaaaaacagatttgtcttttcttcatctatcttatttatttaacctgccattgtgtgttttaagtatttgtttttcttttctttttttctcttttaagaaaaggaaaagcttgtcacaatctaactggctatgttattactgttaaatttatgttgttttgcaacttagaaaccagctacagtatggcccacttaataaaacaccggagacaaaaaaaaaaaaaaaaaaa

SEQ ID NO: 915 - DNA, 2531 bp, Cricetulus griseus
caggatgagcatcgagatccccgcgggggctcacggagctgctgcagggcttcacggtggaggtgctgaggcaccaggccggccgacctgctggagttcgcgctgcagcacttcacgcggctgcagcaggaccgaagagcgcaagggcgccgcttgcttcggccatgagggcaggacctgggggaacgcgggcgccgccgtcggggcggcgcccccagtaagggtgtcaacttcgctgaggagcccatgcgctccgactccgaaaacggcgaggaggaggaggccgcggaagcaggggcgttcaatgctccagttataaaccggttcacaaggcgtgcctcagtttgtgcagaagcttataaccctgatgaagaagaagatgatgcagagtccaggataatacatcccaaaactgatgatcaaaagaagcagattgcaagaggcttgcaaagacatcctgctatttaagaacctggacccagagcagatgtctcaagtggttagatgccatgtttgaaaaattggtcaaagaaggggaacatgtaattgatcaaggtgatgatggtgacaacttttacgtcattgacaggggtacatttgatatttatgtgaaatgtgatggcgttggaagatgcgttggtaactacgataatcgtgggagttttggagaactggccttaatgtacaatacacccagagcagctacaatcaccgctacctctcctggtgctctgtggggtttggacagggtaaccttcaggagaataattgtaaaaaacaatgccaaaaagaggaagatgtatgaaagctttattgagtcactgccattcctcaaagtccctggaggtttctgaacgcctgaaggtggtagatgtgattggcaccaaagtttacaatgacggagagcagatcattgctcagggagatttggcagattcttttttcattgtagaatctggagaagtgaaaattactatgaaaagaaagggtaaatcagaagtggaagagaatggtgctgtggaaatcgctcggtgttttcggggacagtactttggagagcttgccctggtcactaacaaaccaagagcagcgtctgcacatgccattgggactgtgaagtgtttagccatggatgtgcaagcatttgaaaggcttttgggaccttgcatggagattatgaaaaggaacatcgccacctatgaagaacaattagttgcactgtttggaacaaacatggatattgttgagcccactgcatgaagcaaagtatggagcagaagaagcatagtgacacagttatgcagtagtggttagtccactgagaatgtgtttgtgtagatgccaagcattttctgtgattcccggtttttccttttttaaacaaaaaacatttacaatgtatcagtaaacagtagtgatttaatagtcaataggctttaacatcactttctaatggatagttcattttaagaaaaatcaacatattcataaaaatgactttctattccataaaattatttgactgaacgttttattcaaaatataatatattgaaagcatacatgtttaagaagacaattaaaagatgtaatcataggacagtctatgtttgagttattcaaatatcaaattagtgactatcccacttaagagagaagttggtcgtgactcatgcaatctagcatgacatcacattctttttatcattcatcatacagtaaaatgtcagtcatttcatcttctagtttttctggcttgtataagttttgtgttagccttggcctattggtaaaataggcatgaaacatcatatgcaattttaaaaatttttatatttttgcaataaagtacattttgacttctttgacaaatgtcagtgggtagcctacgtaattgagtggcttttgaggcttcaaaacttagtcattatgataattgggcaaagagtcttttaagatgaaagatcataaactctgctaccgtggtggaaataagtctatatataagcaaagccatacataatgattaatggaatttctgtttatactaatgataattaggccttgtcctcagtttggaagtcaattcagagttaaaagtacacaaagtacaaatttttattaggttttttaaatagcttacatgcttatttttatgccagatacaatgaattgttatatacaaccaaagcaatatacttttacatgactttcagaccccaagaccaaatgtctagagacattaattctcaccagttattcacctttaaatgggtaatttcattttgggaaacacgttccaagaaacagaggtgtctatatatgtgaaattcatctatggttgttgtgatcttataagggaatgtttatagtcctacttgtacatgaaaacatggctggaatgttaattggataatgcataaacaagttaaagtatttaaactattgctttagttgtgttttaaaatactattttttaaaaatctgtctgtaggaaaaagagctctctctacatgaaggtaacacgttttc

SEQ ID NO: 916 - DNA, 2530 bp, Cricetulus griseus
  modified_base (749)..(749): a, c, t, g, unknown or other
gtgggatctattttggaccgaaaagatgaaacaaagacacaggcaattgtatgtcagcagcttgatttaactcaccttaaagaacgaaatgttgaagatctttcaggaggagagttgcagagatttgcttgtgctgtcgtttgcatacaaaaagctgatatttttatgttttgatgaaccctccagttacctcgatgtcaagcagcgtttaaaggctggccattactatttcgatctctaataaatccagatagatatatcattgtggtggaacatgatctaagtgtattagtactatctctctgacttctatctgctgtttatatggtgtaccgagtgcttatggtgttgtcactatgccttttagtgtaagagaaggcataaacattttttggatggctatgttccaacagaaaacttaaggttcagggatgcatcgcttgtttttaaggtagctgagacagcaaatgaagaagaagttaaaaaaatgtgtatgtataaatatcctgagatgaagaaaaagatgggagagttcgagctagctattgtagctggagagttcacagattctgagatcatggtgatgctgggggaaaatggtacaggtaaaaccacatttatcagaatgcttgctggaaggcttaaacctgacgaaggaggagcagtaccaattctgaatgtcagttataagccacagaaaatcagtcccaaatcaacaggaagtgttcgacagttactgcatgaaaagntcagagatgcttatactcatccacagtttgtgactgatgtaatgaagcccctacagattgaaaacatcattgatcaggaggtgcagacattgtctggtggtgaactgcagcgagtagctttagctctttgtttgggcaaacctgctgatgtttatttaattgatgaaccatctgcatatttggattctgagcaaagattaatggcaggccccgggttgtcaaacgtttcatactccatgcaaagaagacagcttttgttgtggaacatgacttcatcatggccacctatctagcagatcgtgtcatcgtgtttgatggtgttccctctaagaacacagttgcaaacagtcctcaaactcttttggctggcatgaacaaatttttgtctcagctggaaataacattcagaagagatcccaacaactacagaccacgaataaataagctcaattcaatcaaggatgtagaacaaaagaagagtggaaactactttttcttggatgattagattgaatctgagtttatcaataagccatttacttactgggatttttatcatataaaactttaatcaggttttatggccccacatactctggagcttgaagtatgattttcttaatgtgacatcaaaagccagttgtctgtcttataaattgttaagggcttttctgttcttaagataaacctctgtgcatacttcactaaaatggagacatttcaaatccgtaaatcacctcaagattttcatgatctgtggggagattttcagttgtgtattatattcatgtaccagatgcttactggtgttgaccacctttaaaatcttgataagatctgtatttatctgtttgctaagtggaccagtatattgaattgccctatttaaaagccagtcaaagactacactgctaaaagtctggcattatttttaatgggttttttggtgcttttgaacatctgtcaataccctaatttaactctaatttaactttttttttttagttcttacattctataataacatccaaagtaatgtaactttgtaaacctaaatttatataatcactcatcaagttgggaggagatgtttctgaagaatatttgcttcctataaaactataggcttgggctggggagatggttcagtcagtaaagtgccaactgttacgctcataaggaccatagttggtgcctcactatctggatgttaggggtttgtttttagttttgttttgagacctgtcctatagcccaagctggcctcaaactcattgtatagctaaggacaaccttgaaattctgagcctactacccagattaggattgtgcagtgctgagaatcaaacccagggctctgcaggttaggcaagcattctaccaactgagccacatccccagccctgtatttttatagactacagatttttctgttgagcaaccaagggcaacctttaaccacttctccaatgagtaccggaaatagcaatacaaagtgtccattgctgcagtacatattcatttgtaggtgtggataaaaaggacattatctaaaccttactaatacgctgaactagaattatgaggaaggtagattacagtgaataatggggcaggcggggcaggcagaacaggaaaattagacaagactttgaactttaatttgattaacttggaaacaatgatataaagtttgttttgactggaccccattaggcctaaaaatgaatttatatgaataatccataaatacatttctgttgtaaaagaatgcaaatata

SEQ ID NO: 917 - DNA, 2530 bp, Cricetulus griseus
ctgcagggtggcggcccgccgcggcctccaggtaaccgaagcgccgcgcagtcagtgctgacccggacgcctcgccgctgagccatggaaatcggtaccgagatcagccgcaagatccggagtgccattaaggggaaattgcaagaattaggagcttacgtggatgaagaacttcctgattacattatggtgatggtggccaacaagaaaagtcaggaccaaatgacagaggacctgtccctgtttctagggaacaacacaattcgattcaccgtatggctccatggtgtattagataaacttcgctctgttacaactgagccctctagtctaaagtcatcagacaccagcatctttgatagtaacgtgccttcaaacaagagcagctttagtcggggagatgagagaaggcatgaagctgcagtccctccccttgccgttgctagctctaggcctgaaaagagggagtccagagtttctgcaacttcacaggagcagaaatccactcacgtcagacattcttatgatgatggaggttcaacccggctaatgtcaacagtgaaacctctaagggagccagcaccctctgaagatgtgattgatattaagccagaaccagatgatctcattgatgaagacctcaattttgtacaggagaatcccttatctcagaaaaaacctacagtgacacttacatatggttcttctcgcccttctattgaaatttatcgaccacctgcaagtagaaatgcagatactggtactcatttaaataggctgcaacttcatcagcagcaaaacagtactcacactgccaagcagctagatgtacagagcagccaggtatatgaagcaggccgtttgtgtgaaccagaagtgcttagcagcgtagatgacacttacagccccttcttcagaaacaacttggataaaatgagtattgaggatgaaaattttcgaaagagaaagttgcctgtggtaagttcagttgtaaaagtaaaagattcagtcatgatggagaagaggaggaagaagatgaggattatggctcccggataggaagcttgtccagcagcgtgtcggtgccagcaaagcctgagaggagaccttctcttccaccttctaaacaagctaacaagaatctaattttgaaggctatctctgaagctcaagagtctgtaacaaaaacaactaactattctgcagttccacagaaacagacacttccagttgctcccagaactcgaacttctcaagaagaattgatagcagaaatggttcaggggcaaagcagggcccccaggataagtccccctgttaaggaagaagaagcaaaaggagatagtacagaaaaaattcaaggcactcaacagagacagttattatcccgactacagattgacccagtaatggtagagacaatggagatgagtccagctgagatgactgatctgagtgtggcacaaaaaccagaaaagcttttggagcgctgcaagtactggcctgcttgtaaaaatggggatgaatgtgcataccatcatcccatttcaccttgcaaagcctttcccaattgtaaatttgctgaaaaatgtttgtttgtgcatccaaattgtaaatatgatgcaaagtgcactaaaccagattgtcccttcactcacatgagtagaagaattccagtactggcttcaaaaccagtagtcatcaccagcaccatcttctaatggtcagctgtgccgttacttcccagcttgtaagaaaatggaatgtcccttctaccaccccaaacactgtaggtttaatactcagtgtacaagaccagactgcacgttttatcaccccaccattactgtaccaccaagacatgccttgaaatggattcgacctcaaactagcgaatgatgccctagtcctacctggcaagaagatcgtgcagtttgaacgcttccatcttctgatgagagagattctacagaacttgtcacgtctttgaaatttagaatatattgctttcataatatgaattttattgcctaactgaagtgtctaatttttcaagtttgtaatcttattaagtggtttcaactatttttttgtttgtttgttttgactatgaaaaagacagttttttggggggactacattatcacaaaatcatacaaaaaattttacaggtatatacagaaagtttcagaaaacagactttgaactcacaagagtataaatatacatatatattaccatattctgaaaaaatattgtcagaaataaactccacagaaaatatacttagtcactcctaaaagatggttcttgaaaatgtaagaagttaaagatttaaagtggtgtattttaaatgacagaactagttacagagctcatatgggtaaacatcacaatagggagaaacttggccactgtattatggagttttatgtatgtggttcttgaaactgttaaggcaagaagtgtcaaatgttttaaataacagacaactgatttcaaagacttgatgttttaaaaactaaagtgt

SEQ ID NO: 918 - DNA, 2530 bp, Cricetulus griseus
  modified_base (1147)..(1147): a, c, t, g, unknown or other
  modified_base (1230)..(1230): a, c, t, g, unknown or other
  modified_base (1712)..(1712): a, c, t, g, unknown or other
gttaccaaaggtgcaagacacaaaattgtaatcagtattcagaagctcaaagaaagacaaaacctcttgaagtctttggaaagggacatcatcgaaggaggtagccttcgcatccctctccaggagctgcatcagatgatcctgacgcccatcaaggcctatagctctcccactactcctgaggcgcgccaccacgagccttcgctgatgggcccagagaatccaagcgccgactgcaaagacagtgccacggtggccaacagcgtcacagtcagtgcctcagccggcgccagtggtgggctgcaaccaccccagctgagcagctgcgatggggagctggctgttgcacctctgccagaggggggacctccctgggcagttcacacgagtcatggggaaagtgtgcacacagctcttagtgtccagacctgatgaggaaaatataagttcctatctacagcttttagacaagtgtctcgttcatgaggcatttacagagacacagaaaaaaagattagttgtcatggaaacagcaggtgcagaagctctttcggtctttccctcggaaaacccttctagacatatcaggatatcgacagacagccagctccgtgggcggtggcatgggcagacggaacccacgacagtaccagattgcctctcggaatgtcccttctgctcgccttggtctcttgggcaccagtggatttgttagctccaaccagcgccacaccgctgccaaccccaccatcatgaaacaaggaagacagaacctctggtttgccaacccccggggcagcaacagcatgcccagccgcacccacagctccgtccagaagacccgttctttgccagtgcacacttcacaaaacatgctgatgttccagcaaccagaattccagcttcctgtgactgaacctgacatcaacaacaggctggagtccttgtgcctcagtatgacggagcatgccctgggagatgggggttgaccggacctccacaatctagaaactgaagatgagagtgaccgcgctggccgtgaaatcgactgctgcgggcccagtgtcagccatcttcagggttgcatagaatcttccaagacactttgcagtccttttccctggtccctcgtcccctttaaaaaaanaaaaaaaagttaattaaaaatggttattttttttttaagtagtgaggggcattcagactttaaaggccttaataaaaaccccncacacctttgtttgcctgtcaagattacaaatgtacacctagcccagccttggatgctgcaacagagatcctgaagtcctattatttaagcggcatgtctctgcactgtctgaggcacagtgctggtctacaatatcatgggtgatgttttattggtgcttttttactcatagtgttttcttaccagaaaacagtaggaagaaacacacgaactgtgtacaagacacgaaacattgctgctgatggtgttttgctttgttttgttttctccttccctgccacatgcttttgagtttcactttttttaaacacaaatccagcaagcaatatagatgctgctgggtctgcctgccaagggctgctgtttgcaccaagctctctcatatcctgggttgaactgaaggtctttatctgctacccaggatgagagctgcggctggtccccacctcccattcttctgaggcgacactgagggaaaccngattttctttgaggttgtcgctggctgccttttacagaatggggtcttctgcgggtcttttgttttctgtgcctcttgtagcttgtgctgatgctaaggtttgtagacccagggtgctcaggtgtgcctattacaaacagaacctgcagcaggatagttgtacatggagctgtgataaccactcaaatgtttgggtttgttttttgtttgtttttcttttcttttttacaactcatcagagatgtttgcaaagtgtacttttttttttaatttcctttatcttgacttaaaggtgaatgcgtatccctctgggaggagcaagaaaaaagcaggaatgttagtaatggcaaacagaagacttcctcccttattaatatataatcctcacatatttatacctaacgtaagctgaccttcaaaaggctttctttcgttgcatgccctgtgcaggcattcgtattgtacatgcatgccttttgtcctgttttcctgtataaagttagtgaacaaagaaatatttttgcctagttcatgttgccaagcaatgcatattttttaaatttgtcatatatggaaagagcatgtttgttacatgtaaaagctttactgatatacagatatactaatgtttgaagatgctgttctttgcaagtgtacagttttcaaatgttgttaccagtgacaacacccttgtggtctaaacttgctacaatgtatttattattcatttcctcctacagaattaagaatcatggctatatttcatatggttatattgagagtgaagggaaatgattaatacaaggttttgtaacact

SEQ ID NO: 919 - DNA, 2530 bp, Cricetulus griseus
gacagcaaggaagagttacctttcacgactacagtatttccaagatcataaaaatagaaattgtgaaaatacaatccctgttgcgggcaagcaaagccagagatgactacaaagcactagttggctctgaaaacccaccattaacagtaatccgaaagttcgtgtacctattggaccaaagtgatttagatttccaggaggaactggagctagcaaggctacgagaagaagtggtgactaaaatcagggccaaccagcagctggagaaagatctgaacctgatggacatcaagattggactgctggtgaagaacaggatcacactggaggatgtaatctcacacagaacaaaactagaaaaaaaaaaaagaggagaaacctgggatctgttggcaaaggttcttcaacatgcagcctccaacaagctgtttgagggagagaacgagcatttgtcatcaatgaacaattatttatcagagacctatcaggaattcaggaaatatttccaagaagcatgtgatgtccatgagccagaagagaagtttaatatggacaaatacacagacctggtgaccgtcagcaaaccagtcatttatatttcaatcgaagaaatcatcaatacgcatttactcctgctagaacatcaggatgccattgctactgaaaaaagtgacctcctgaatgagctgctagaatcgctgggggaagtgcccacagtggagtcctttcttggggaaggagccgttgaccccaatgatcctaacaaggaaaacacactaaatcagctctcaaagactgagatttccctttccctgacaagcaagtatgacatcaaggatggcgaggctgtcgatggcagaagcctcatgataaagaccaaaaagctcatcattgatgtgatccggaaccagccaggaagcacactgatggaaatcttagagactccagcaacagagcagcaggaactggagcatgccaaagacatggagagccgtgccatcgtagactcaagaactccagaagaagggaagcagagccaagcaatgatggaagatgcatgcctgcctcttgagcaaaagaagaggaagatccagaggaatcttcggacattggagcagactggacacgtgtcatccaaaaataaataccaagacattctcaacgagattgccaaggatattcgaaatcaaagaatccaccgcaagcttcgaaaagctgaactgtcaaaacttcagcagaccctgaacgcacttaataagaaggcagcattttatgaagatcaaattaattattacgacacctacataaaaacttgtgtagacaacctaaaaagaaaaaattctcggaggtcgattaaactggatggaaaagcagaacccaaaggaacgaagagagtgaagccagtgaggtacacagcagcaaagctgcatgacaaaggtgtcctattgggcatagatgaccttcaaaccaaccagtttaagaatgttacatttgatatcatggctactgaggacatgggcatctttgatgtcagatccaaattccttggtgttgagatggaaaaggtgcagctcaatattcaggacttacttcagatgcagtatgaaggggtggctgtgatgaaaatgttcgataaggtgaaggtgaacgtgaacctcctcatatacctgctcaacaagaagttctacggaaagtgaggtgcctgcaaggagcacgtggattttctatggcctgggttgaaaaatgagtttgtctagtatttttgttttaaaacatgattgaaatcactgcttataaatgtgtgtttttttttaaagaccaaaactgttatgaagaatgtagccacgtgcctttttgataattggatactacagcagagtgagagacaaggtgggcaggtgggacagacacactcacacagacacactcactgtactgtggtacaggtactccagctgaaagctctgaacaccctgtgatttgttttaaagttggaggcgaaagtctagctgactagggacaaatgtataaacctattttcctatgaaaaaaattttaaatgtcccacttaaatgatgtaattcttcatagattgttttctatctgtggagaagtagagatctaattaatttgtaatgaattatttagacatatagttctaagccctgccttctgggaattatcggttttaaagagaacttttgtgcaattcaaaatgaagtttttttataagtaattgaaagtgataatacaataacactttctgtataaaagtatatattttatgtgatttattcaatttactcaaagtgcactactgcctcattgaaaggcttctgtatgaggagtcacatggaccgacgaccatggatagcagttatagacccccaccttcacccctcacaatttatttgaatacttcaattgtgcctctcaaattttttgtaatgctataaaatcagtatctagatggtttttaaatgtattctttgaaaattgttttatgtaaaataaatgttacttaattaca

SEQ ID NO: 920 - DNA, 2530 bp, Cricetulus griseus
ctctttgtagttatcatgtatcatcaatagatgcaaattagatgtaagaaccaggggcttaacagtcatgtttgagataatgaagacctatggccacacttacgagaagcactggtggcaggacttatttagaattgttttttagaatctttgacaatatgaaattgccagagcagcagacagagaaagccgaatggatgacaacaacttgcaatcatgctctttatgcaatatgtgatgtattcacccagtatttagaagttcttagtgatgtacttttggatgatatttttgcccagctatactggtgtgtgcaacaagacaatgagcagttagcgcgatctggtacgaactgcttagaaaatgtggttattctgaatggtgaaaagtttactctagaaatctgggataaaacgtgtaactgcaccctggatatcttcaaaaccacaattccacatgcgctcctgacatggcgacctacttcaggagagactgctcccccatctccatcacctgtgagtgaaaagcaattggatacaatatcacaaaaatctgtagatatacatgattctgttcaaccaagatcttcagataacagacagcaggcaccactggtttctgtttctactatgaatgaagaagttagcaaagtgaaatctacagcaaaattcccagaacaaaaactagtttgctgccctgttgattaaatgtgttgtgcagctggaactcatccagaccatcgacaacattgtgttcttcccagccacaagtaagaaggaggatgcagagaacttagctgcagcccagagagacgcagtagactttgatgttcgagttgatactcaagaccaaggaatgtaccgctttttaacatcacaacagctttttaagctactggactgcttattagagtcccatagatttgcaaaagcatttaattccaacaatgaacagaggactgctctgtggaaagcgggcttcaaaggcaagtccaagcccaaccttctaaaacaggagacaagcagcctggcctgtgggctgcgcattctcttcaggatgtacatggacgagagcagagtcagtgcctgggaagaagtccagcagaggcttctgaatgtctgcagtgaagccctgagttacttcctcactctaacgtccgaaagtcaccgtgaagcctggactaacttacttttattattcctaactaaagttctgaagataagtgataacaggtttaaagctcacgcatcattctactaccctctcttatgtgaaattatgcaatttgacttgattcctgaacttcgtgctgttcttagaagatttttcctacgaattggaatagtttttcagatatcacaaccacctgaacaggaacttggaataaacaagcaatgatgagaactgaatatttttctgttggtgtttacattcctctgctctgtaacaggaccctagagcagaggtttcctacctggaaaattgtttctctcaattgcagtgtctgagaattactggtagtggcttctctgtcatgttgggctcatgttgagcagaaagtctgttcaaacagtgtcagcttaccctcatgggtccttccctgtcctctgagcagggtgagccccacacacttttggcaggtacgaaaatgaaacttacccaaagaagtatagatataaagatggaacttctgcaagaagtacaactcaggagagctgtattttgaaggataaaatgtttataattgggggggaagggagaaaattattgctcatggtaaaagatatttagcaactatggtattcttactctgaagatttttgcacactcaggctatctgagatactgggaatcatcatctttctgtgaaaatgtacagagatggagggctgtaatataaaaaccttaaaacatattgttcctcctgcactgtcttatttctttattttcttatctacttgctaaatacccataatattttgtcaaatgcactaaaacatttggggtgaacttttgtcttttggggggatggtcatgttgagggcttaatatgaatctgttgtgactagtgcttgtcaagatcacaacctcctagggctttaaagatgagccataaagtagatgacctttcacagagtgaaacttgaatcactgcagaatgaatctaggttgctgtcactttttcttttgggtggcggggcttgatgtagattttattctatgtacagaatttaatgttgaatatattaaaataacaaatctggcatggtttggggaggttagatttactggaaatgtattcatactgtgaattgtgctctgatggtaaaatgcaaagcttgtcaagcattccatattaacagtggatgtagaaaatttttttcagatggataaaatgtatatggtacagatgtaaaagttttctatgtaaaaattctgtacaactttctgtacaatattgattctcatctggcatatctaatcaggttataggtcaaataaagtttttgaattatttcatcagtgcagt

SEQ ID NO: 921 - DNA, 2529 bp, Cricetulus griseus
ctggaaggacatcgccattgctcagcgtggaatcattaagttttgggatgaatttggctacctttctgccaactggaaccaacccccatccagtgagcttcgtttcaaacgtcggagggctatggaaataccaaccactatccagtgtgatttgtgtctgaaatggaggaccctccccttccagctgagttcagtagaaaaagattatcctgatacttgggtttgctctatgaaccccgatcctgagcaggaccgctgtgaagcttctgaacagtaaggcaggaaggttcccttggggacattaaaaaaggacctaaagacacaggaagaaaagcagaagcagctgacagagaaaattcgccagcaacaggaaaagctagaagctcttcaagaaaaccacacccatccgctcacaagctgacctgaagaaattgcccttagaagtgactaccagaccttccactgaagaacctgtgaggagacctcagcgtcctcggtcacctcctttacctgcagtgatcaagaatgctcctagcagacccccttctattcaaactcccagaccaactagccaactccgaaaggcttcggttatcagcagctccccaaagctgcctgctccagcagccagaggagaaatgagtacttctagactgctccagccagctgaggcaccccgaaagcctgcaaaccctcccatccaagactacaccccgacctacccctcctgtgcagccttcgccaccctctctactccccaactccaagaaccttcgggaggtccctgctcaaaaagccatcaagtctccagtggtcaagaagccagagccacctgttaaacattctatggcaacctcaggtcggaagcggagtcttgcagtctctgatgaggaagaggctgaagaagaagctgagaagaggaaagagagatgcaaacggggcaagtttgcagtgaaggaggaaaagaaggaagcaagtgagctctcagacagtgctggggaagattgacccagctgaattcaagaaggctcagaaagataaaggattgcatgtagaggtacgtgtgaaccgggagtggtgcaacagggaggaggaggaggctgtggtggcccagcaggctgtggccttgccagagccctctacttctgatggtctccccattgagcctgacaccactgccccaagtaccaaccatgagactattgacctcctggtccagattcttcggaactgcttgcgatatttcttgcctccgagtttccccatctccaagaaggagctgagtgctatgaattcagaagaactaatatcttttcctctgaaagagtacttcaagcagtatgaggtggggctccagaacctgtgccattcctaccaaagccgtgctgactcacgggcaaaagcctcagaagagagcttgcgcacttctgagaaaaagcttcgtgagacagaagagaagttacagaaattgaggaccaacattgtagcactcctgcagaaagtacaggaggacatagacatcaacacagatgacgagctggatgcctacattgaggacctcatcaccaaaggggactgaggagcttggaggcagataactcctctgcacacctgcctctcagcacagcagcttctggggaggggatttcattagtgagttggtggacttaatcttggtttgactcatgtgggacatttgtgctttgggaagaagattctttgaatcttcctcccaagtttacataaatatttattttttaaaagagaagatgttaatgcctgctgtgagaccattcttttgtgtgactcttaaggaaagggcacagagtctgagccattgagctcctggcacctcaggatagtatgaagcaagcaccatcctgagttggagaggctcatcaacaatgggacatgaaaatacatgaccccagggactgagatctacaagacccataagggggtcatcaaaagcaggcccagtaccaagaaagactctccttgtaacagttgatctccttgtgtccagtcagggctgtgaaggtctgtaggctcctgtgcagctgtcagagtcatcctggccgtggccatacccagacagtgttgagatgattcttgatgctcagatttcccagcataccacctactctattgatgaaggagccattgcccgagtcagccacactgtccaagctcaagtgtagacagctctgactggtcagattgctggactggatagcactctgaatgttgaactcctaagattctcagggtgtgcaggtgtaaaagatctctctggaagaggaggcttcctcagtggtgctagttcctagagagcctttgctgctgcttttctactgcgtcctctgtgggttccagagagaccagcacctcctatgctctggaacagtgaggaggaggaaccatgtgcttcagacaactactcagagccagaagggcaagagcttcatttgatggccattgggagaattctggttccagtcctgccaattcttcactcctgttgaagac

SEQ ID NO: 922 - DNA, 2529 bp, Cricetulus griseus
  modified_base (691)..(691): a, c, t, g, unknown or other
ggcagggcgggagcgacagtcggcgaggactggagccgagcctcacggccgctctggcagcatgtaaacaaccttttgccaagaacccaggtcaccactgagaagggtgccttaagggagaagaatatcagaggacaccaatgccaggcgtgtctggaatagtgctcggtacaggcagtatgagacattctgtgccagcctctgtttgttactggcaaaggctgggactctccggttaggagggtcctggggcagccagcaccaggagtgccccccccctccaagggagcatgggaccagctatgaactctttacagtgaactcagttttagcttatgaaggaattttaaagtaaaagttacttctgtatactgacattgagaagcctttggtgtgaagtgccagcaattacccttgtctactggagttatcaggattcttctggcaccgaggtggactcttcttggtacttctggcaacacagacctttaggacaattcacctgttgaatgcgtttaagggaccatctgaagacgtgtttgtgtgtataaaggagggcaccagcctgacctgcatcctccaccatgttcctgttgctgccttttgatagcttgattgtcaaccttctgggcatctctctgactgtcctcttcaccctgctactcgttttcatcatagtccctgccaaganctttgcgtgggctaccttgagaatggagagaggagccaaggagaagaaccaccagctttacaagccctacaccaacggaatcattgcaaaagatcctacttctctggaagaagaaatcaaaagaaattcgtcgaagtggtagtaacaaggctctggataagacgccagagtttgagctctctgatattttctacttttgccgcaaaggaatggagactattatggatgatgaagtgacaaagagattctccgcagaggagttggaatcctggaacttgctgagcagaaccaattacaatttccaatatataagcctacggcttaccatcctctgggggttaggagtactgattcggtattgcttccttctgccactcaggattgctctggcattcacagggattagtctcttggtagtgggtactaccatggttggatacttacccaatgggaggtttaaggagtttttgagtaaacatgtccatttaatgtgctaccggatctgtgtgcgagccctgacagccatcattacctaccacaacaggaaaaacagaccaagaaatggtggtatctgtgtggctaatcatacatctcccattgatgtaatcatcttggccagtgatgggtactatgccatggtgggacagatacacgggggccttatgggtgtgattcaaagagccatggtgaaagcctgtccacatgtttggtttgagcgttctgaggtgaaagatcgccacctggtggctaagagactgactgagcacgtacaagataaaagtaagctgcccatcctcatcttcccagaaggaacctgcatcaataacacatcagtgatgatgttcaaaaagggaagctttgaaattggagccactgtttatcctgttgctatcaagtatgaccctcagtttggtgatgccttctggaatagcagcaagtatgggatggtgacttacttactgagaatgatgaccagttgggccattgtctgcagtgtttggtacctgcctcctatgaccagagagaaagatgaagatgctgtgcagtttgctaacagggtgaagtctgccattgcccggcagggaggattggtagaccttctgtgggatggtggactgaagagagaaaaggtgaaggatacattcaaggaggagcagcagaaactgtatagcaagatgattgttggtaaccatgaggaccggagccggtcctgagcctctgtctggcactggttggatccaccacctctaaaccctgacaagtgagccagctggagttgctgccacaacctctaccaccatccccactgcccactgctgcatccttccagactctaaccctcaggctgttctggactccaggactcttgagcttcttcagagccccatgggctacctgctgtcctctaagcagagtgctgcttgctgaggcttcccaggacaaaacataccccttgttcctttatagtaagcctctaagaggaatgccattaaagcagccatatgctggagaagtcagaagagccactgccaaggcaggtgcctaaacagcctccagccttggagcttttagatgccaggctgagcctgagtcccccacatgacttgtctgtttactatgtttcgctttccctaactgttacatggaattgcaaagggtgatgataacctacctcacagggttgttgtgggggttccagtgctaggatatgtgaaggaaatggatgctggtctcacagggacggctccatagaatgtggcaggacaaagtcagagctcacagctactgcccaggattttaacttgttttgtgagtaaataaaactggatggaaatgaa

SEQ ID NO: 923 - DNA, 2528 bp, Cricetulus griseus
ttgcaaagaacagacaagaaggaacacttgaaaaaacagagaaggatacaaattccaaagtgagcaaggtaaacccaaaggcaaagttcgatggactggttctcggacacgtggcaggtggaaatactccagcaatgatgaaagtgaagggtctgacagtgaaaaatcctctgcagcctcagaagaggagggaggaaagaaagtgaagaagccgtcctttccagatgatgatgaaccatgcaaaaaatgtggccttccaaaccatccagaactaattcttctgtgcgattcttgtgacagtggataccatactgcctgcctccgccctcctctgatgatcatccctgatggagaatggttctgccctccttgccagcataaactactgtgtgaaaaattagaagaacagttgcaagatctggatgttgccttaaagaaaaaagagcgtgcagagcgaaggaaagaacgcttggtgtatgttggtatcagtattgagaacatcattcctccgcaagagccagagttttctgaagagacaaagaaaaaaaaaaaaagacttgaaaggagatcaacaagaacaaggaaatgtataagctaatagatttgatgagtttgatgaagcaattgatgaagctatagaagatgatatcaaggaggctgatggagggggagttggccgaggaaaagatatctccaccatcacaggtcaccgtgggaaagacatctctactattttggatgaagaacgaaaggaaaataaaaggcctcagagggcagctgctgcgcgcaggaagaaacgccggcgacttaatgatcttgatagtgatagcaacctagatgaggaagagagtgaggatgaattcaagatcagtgacggatctcaggatgagtttgttgtgtctgatgaaaacccagatgaaagtgaagaagatccaccatctaatgaggacagtgacacggacttctgcagccgaagactgaggaggcatccttctaggccaatgagacaaagcaggcgtttgcggagaaagactccaaagaaaaagtattctgatgatgatgaagaggaagaagaatctgaggagaatagtagagactctgaaagcgactttagtgatgactttagtgatgattttgtagaaacccggcgaaggcgatcaagaaggaaccagaaaagacaaattaactacaaagaagattcagaaagtgatggttcccagaagagtatacgacgtggtaaagaaatcaggcgagttcacaagcgcagactctccagctcagagagtgaagagagctatatgtccaagaactctgaagatgatgggctaacaaaagaatctaagcggtctgttcgaaaacggggccgaagcacagatgaatattcagaagcagatgaggacgatgaagaggaaggcaaaccatcccgcaagcggctacaccgtattgagacagatgaggagagctgtgacaatgctcatggagatgcagaacagcctgcccataaccagcccagggtcctgccctcagaacaggagagcagcaagaagccctatcggatagagagtgatgaggaagaggactttgaaaatgtgggcaaagttgggagcccattggactacagcttagtggatttgccttccaccaatggacagagccctggcaaagccattgagaacttgatgggcaagccaactgaaaagtcccagactcccaaggacaacagcacagccagtgcaagtctagctcccaatgggacaagtggtggacaggaggtgggggcaccagaagaggatgaagatgagcttttgcgagtgactgaccttgttgattatgtctgtaacagtgaacagttataagacttctttccattttgtgctaatttattccacggtagctctcacaccagcgggccagttagtaaaagctgtttaatttttcctagaaaactccactacagaacgactttttagaagaagaatttaaacaaatcccaaagtctttctgtgaagtgaccagttttgaactttgaagattaataattgctgtaaattccttttgattttctttttccaagttcatggtccttggtaatttcattcatgggggaaaatcttattataataacaacaaagatttgtatatttttgactttatatttcctgagctctcctgactttgtgaaaagggtggatacaaatgcattccaaatctgtgagggcccaaaacagaatttagggtgggagaaagcacttgtgctttagcttttcatattaaatatatattatatttaaacattcatggcatagatgatgattaacaaactgtttaaaagttcaagtctgtactgttgcagtttgagaattgtagatacaacatcgtacatacgtcacttagtaatagccttcgtgaaatcagtttgtttactattggagttaccacactttaaataaagaagagaccatggaagtaccatcataaaaacactttaacctaagtttctgttatagcagagtttcttgtttttaaaa

SEQ ID NO: 924 - DNA, 2527 bp, Cricetulus griseus
tgaaccacttggcaaaccactttttcttcaagaaggattatagtaaagttcagcacctggctctccatgcgttccacaacacagaggtggaggctatgcaagcagaaagctgttaccagctggctcgatcatttcacgttcaggaagattatgaccaagcctttcagtactactatcaagccacacagtttgcttcatcctcctttgtactcccattttttggtttgggccaaatgtacatttatcgaggtgacaaagagaatgcatctcagtgcttcgaaaaagttttgaaagcttatcccaacaattacgaaacgatgaaaattctcggctctctctatgctgcctcggaagatcaggagaaacgagacatagccaagggccatttgaagaaggtcacagaacagtatcctgatgatgtggaagcttggatagaattggcccagatcttagaacagactgacatacagggtgccctttcagcctatggaacagccacccgaatcctacaggagaaggtgcaggccgatcgtccctcctgagattctgaataatgttggggccctccattttagacttggaaacctaggcgaagcaaagaaaaacttccttgcatcactggaccgtgcaaaggcagaagctgagcaatgaatgaacactaattacaatgccatccaatggcataggagcagttttggtcccacaaaggatacttccgagaagctcgtgatgtgtttgcccaagtgagagaagcaactgcagatatcagtgacgtgtggttgaacttagcacacatctatgtggaacagaagcagtacatcagcgctgttcagatgtatgagaactgcctcagaaagttctataagcaccagaacaccgaagtcgtgctctacttggcccgggccctcttcaagtgtggcaagttgcaggagtgcaagcaaactctgctgaaggccagacatgtggcacccagtgatacagttctgatgtttaacgtggccttggtcttacaaagattagctacctctgtcctgaaagatgaaaaaagtaatctgaaggaagtccttaatgctgtaaaagagctggaactggcacacaggtacttcagttacctgagtaaagtaggagataaaatgagattcgatttggcccttgctgcctctgaagcaaggcagtgctccgacttactgagccaagcccagtaccatgtggcccgggcacgcaagcaggatgaggaagaaagggagctgagggccaagcaggaacaggagaaggagctcttacgacagaagcttctcaaagagcaggaagagaaacgtctgagagaaaaggaagagcaaaagaaacttttggagcagcgggcccagtatgtggagaagaccaaaaatatcctcatgttcactggtgaaactgaagcaacaaaggagaagaaaagaggtggaggtggagggcggcgttctaagaaaggaggcgagtttgacgagtttgtcaatgatgacactgatgacgacctccctgtatccaaaaagaagaagagaaggaagggcagtggcagtgaacaggaaggtgaagaggaggaaggtggagagaggaagaagaagaggcggagaagacctgcaaagggagaagaaggatctgacgatgacgaaacagaaaatggccccaaaccaaagaagcgccgtccaccaagaacagagaagaagaaggctcccaagccagaacgcctgcctccttcaatgaagggaaaaataaaatccaaagccattatatcatcgagtgacgattcttcagatgaggataaactgaaaattgctgatgaaggacatcccaggaatagcaatagcgattctgatgatgacgatcggcccaatagaccggcctcctctgagagtgaatcggatgacaaccagaacaagtctggcagcgaggcaggcagtcctccaaggtcaggaagacaggagtcggatgaggattctgacagtgaccagccatccagaaagagaaggcgctctggctctgagcagtcggacaatgagtctgcacagtctgggagaagtccctccggaggttcagaaaatgattctcgcccagcttctccaagtgcagagtcggaccgtgaatcggagcaggggtccgacaatgagggttctggccaaggctctggaaatgaatcagaaccagagggctcaaacaatgaggcctcagatcgaggctcagaacatggatcagatgatagtgactaggttttatttcaccagactccgtggggggtgggggagctttataatatataaaagctgtgataaacacatttcagatggttagccatttgtgaaatttttaaggcatttttttttctatttgtatatttactaaactccaagagacatttcctgtgctagagtccagtgtctgaaactggagcaatgagactccttcattgtggtgcagctctacctgtcatatgtgaaaactgcagtgatatgcagatgctagagcattcccgcaaggcttgcccaggctagcc

SEQ ID NO: 925 - DNA, 2527 bp, Cricetulus griseus
tggccagactgcttaagcaccctttttacaagaaaacctcgtggaagatacagctggcgactttggaaacaggaccacagaggtgacactctgaggatcctggccatgaggttggatgcctcatcttgctgaaaagacactggacctaaatggcgcagcatgactttgttcctgcttggctaaatttctcaacgccacagtcagctaagtcatctacagccacctttgacaaacacggagagcacctatcccgtggagaaggtagatttggagtaagccgtcgtcgacataattcctctgatggcttttttaacaatggacccctaaggactaccggagattcttggcaccaaccctctttattccgccatgattctgtggactctggtgtctctaagggagcatatgctggaaccacaggttggcatggctcttcccgaggtcatgatggcatgaaccaacgaagtggaggtaacacaggaaaccatcgacactggaatggcagcttccactctcggaaaggctgtacctttcaagaaaaaccaccaacagagattagggaagaaaaaaaagaggataaagtagaaaagttgcagttcgaagaggaagactttccttctttgaatccagaagctggcaaacagaatcagccatgcagacctattgggaccccttcaggagtgtgggaaaatccgcctagtgccaagcaaccctcaaagatgctagtcatcaaaaaagtttccaaagaggatcctgttgctaccttctctgctgcattcacctcatcaggatcccaccatgcaaatgggaacaaagtgtcaaccatggtcccaagtgtctataagaacttggttcctaagcctgcaccacctccctctaagcccaatgcttggaaagctaacagaatggaacacaaatcaggatccctttcctctagccgggagtctgcttttaccagtccaatttctgttactaaaccagtggtactagctgctggtgtagttctaaactctcccaaagagagtccctccagtactacccctccaattgagatcagctcctctcgcctgaccaaattgacccgtcgaactacggacaggaagagtgagttcctgaagactctgaaggatgaacggaatggagactgctcagaaagcagagattgtgacaaactagaggggttggagggcacccacacacccgaaccaaaggaaaatggagaacaaggttgtcttcagaacggtctttctctacccattgtggaagaaggggaggtcctgtcccactcactggaagcagagcacaggttattaaaagcaatgggatggcaggaatatcctgaaaatgatgagaattgccttccactcacagaggatgagctgaaggagttctacatgagaacagagcagctacgaagaaatgggtttggaaagaatggcttccagctgagccgcagttctggcctgttctccgcttggagaagcactatcaatgtagagtgtgaagactccgacacagaaacaagcagcagtgagacgtcagatgacgacgcctggaagtagaaatataagtgctcacagttgacctgccccactgagctcagctttgtgtttagagaatataaaaagtgttcttttccttttcttacgttgttgaatacttcatgcacaagggaaataatcatatcccaaagagagagcaattgtcttgcctagcttttgttgttgttccctgttatctgcttaatagagagacatttgtgtggtggaatttttaaagcacatacacagtacctgtggggccgtgcacaagtgggagctggcagtgcagagatgcaggaggagacactgctctgctcaacagcttctactaccagcccttgggcactcacccctgtgctcaagcaatcattgtcaatgacaaagtgactattgaagttataattgtattaaattaatgctaataatttggatattttatttatttttggctgctcgggtaacttagcccttaaccaagcaaatgtggttgtttttgtttttttttttttgttgttttgtttttttttttatttttctttttttttttttttctttctgggtacagctgtaaaatatttggatataggaaatgttattcttgcagccttgatattcagggtggattgtaaaatatgaatttttgtgagatttcaaagattaagattattttgataacattatttacagatttaaaagatgtggttatcacaagtctgttgagggggaaaactactgcataaaataactaacgtggaataaatattttgcatcagtttggattgtcttgtgtaagaaatatattttctttaaaattaagagtggattctttttttaggggaaatatttttagaagtctgggagaaaactgaattcagccccacctgaattccttttcatttcagcaaaaactcttgatgcagaagaacctgtgcaataaattattcataataaactaaaaaaaaaaaaaaaaaaaaaaaaaaaaaaaa

SEQ ID NO: 926 - DNA, 2526 bp, Cricetulus griseus
gggaggaaagtcggagtccatccacgtcaccctcaatgtggaacaggcctgctacaccagggacgcactcgccaaggccctgcatgcacggatctttgatttcttggtagattccattaataaagccatggagaaggaccacgaggaatacaacattggtgtcctagacatctatggctttgaaatatttcagaaaatggctttgaacagttctgcatcaatttcgttaatgagaaattacagcagattttattgagctgacgttaaaggcagaacaggaaaagtattcatcaaagcccagagtctctatttcttctagaagagatgagagagagaaagtatgatgggtatgcccgagtgatacagaaaacgtggaggaagtttgtggcccggaagaaatatgtccaaatgagagaggaagcctcagacctgttgttgaacaagaaggagagaaggagaaacagcatcaaccggaacttcatcggggactatatcggaatggaggagcatccagaactgcaacagttcgtaggcaagagggagaagattgactttgctgacactgtcaccaagtacgacaggaggttcaagggtgttaagcgagacctgttgctaaccccgaagtgcatgtacttaattggaagagaaaaggtgaagcagggaccagataaaggtcttgtgaaggaagtcctgaagcgaagaatcgagatggagaggatcctgtccgtgtccctcagtaccatgcaggatgacatcttcattctccacgagcaagagtatgacagtttgcttgaatctgtcttcaaaacagagttcttgagcctcttagcaaagcgatacgaggaaaaaacccagaagcagctacctctgaaattcagcaatacccttgaactgaagttaaaaaaggagaactggggtccctggagtgccggaggctcccggcaagtacagttccaccaaggcttcggtgacctggccatcctcaagcccagcaacaaagtgctgcaggtcagcattggacctgggctgcccaagaactctcgccctaccagaaggaataccatccaaagcagagggtattctagtggaacaaagaatgccaattacccaatgagagctgctcctgctccaccaggatgccatcaaaatggagtcatcagaaaccagtttgtgcctcctcatgctcctggaaaccagagatccaatcagaaaagcctgtacacctctatggcccgcccacccttgccacggcaacagtccataggctcagaccgattgtcacagacaccagagagcctggatttcctcaaggtcccagaccagggtgctgctggagtccgaagacaaacaaccagccggcctcccccagcagggggcagaccaaagccccaacctaagcccaagcctcaggtgccacagtgcaaggctttgtatgcctatgatgctcaggacacggatgaactcagcttcaatgccaatgatgttattgatattattaaagaagatccttctggctggtggacgggtagactacgaggcaagcagggcctgtttcccaacaactacgtcaccaagatctgaggcacccagaaattgatatgcaggcagaggagctccaggcatggactggggaggggactttctggggattccccttctgatccccagtaagcaacaaggcctgaagctattctggcaccttccccacggaagacatagaaaagcttggattagggacaaggagtgtcagtccataaatgatcctaaaaggtagcctaatccccaggagtgcaaaaacaaccacccactaagatttatttattgtatttaaatctggtgagagtaacaggggcccactggctcgcttggtgtctatcccacaacccctagctcactcaccaggcccagggaacagcaggcggccacccttgacaagtgcctttagttgaagtgcacatctcattcattcctctcttacacctgatacattcctctctgctaaccctccttcagggaggacccgccctctggaggctggacttggtgtgaacaggcactcctgtgtcaatgccaaggactggccgctctcagagcccccaggagccagggccactaagactgctggtggggaaggagctggatgctaggctgttggtcttgctttctcttggtctttggttgtaatgtggctggcccatgttggttttatgttttaacgctgtgcttataataagaaaggtcttccccccgagctgtacatttataaaaagtgatcatacactgtatatagaaaaatctagatatgaatacagcaggtagtattccactgtacccattcatgaaggtaggttttattacaggactcgcaccaggtacttacagatgctcctcctcttcgcctacagaaacagtcactgcattcctgcacagccccgcagacccccttaccttttccctgtaggtaattctccagtgaccactctgccaccctctcctacctcctaaataaatgtaaaggagtcagtg

SEQ ID NO: 927 - DNA, 2525 bp, Cricetulus griseus
  modified_base (2205)..(2205): a, c, t, g, unknown or other
gatgtggaaacaccagagggtgagcagccgccacctttgtccacccctgtgggcagctccaaccctccagcccattcctcctcagtctcatccatccaccagtagcagctcatctgatgggcttcgtgataatgtaccttgtttaaaagtcaaaagctcaccacttaaacagtctccaggttatcagacagagctagttattcagttggtgtgggtgggtggagagcctccccagcagatcaccagcctggcactcaactcttcctatgggctggtggtttttggcaactgtaatggcattgcaatggttgactacctccagaaggcagtactgctcaacctcggcaccatcgaactatacggctccaacgatccttaccggagagaaccccggtcacctcggaagtcacgacaaccttcaggagctggcctatgcgacattactgaagggactgttgttacagaggatcgctgcaaatctccaacttcgcaaagatgtcaaggaaattaagcttgccaactgacctaaagcccgatttagatgtaaaagataattccttcagcagatctcggagttcaagtgtaaccagcattgacaaggagtcccgagaggctatctctgctcttcatttctgtgaaacttttactagaaaggcagactcctcaccctccccatgtctgtgggtgggaacaacactgggaacagtgttcatcatcacactgagccttcccccaggacctgagcaaagactccttcagccagtgattgtgtctccaagtggtactatattgaggttaaaaggtgcaatcttgagaatggcatttctggatgccgtgggctgcttaatgccacctgcgtctgaaccctggaaagagcacaacgttcccgaagaaaaagacgaaaaggagaaactgaaaaagcggcgccctgtctcagtctccccctcctcttctcaggaaattagtgaaacccagtatgcagtgatatgttctgaaaagcaagctaaggtcatctcactgccaacccagaactgtgtgtacaagcagaacattactgagacgtccttcgtgcttcgaggagatattgtagcactgagcaacagtgtctgccttgcctgcttctgtgccaatggccatattatgactttcagtttgccaagcttaagacctctgttggacgtctactacttgccccttaccaacatgcggatagccaggaccttttgcttcaccaacaatggacaagcattataccttgtttcacctacagaaatccagagactcacctacagtcaagagacgtgtgaaaatcttcaagagatgctgggtgagctcttcacacctgtagaaacaccagaagcgcccaacagagggttctttaaaggcctattcggaggtggtgcacagtctcttgacagagaggaactatttggagaatcatcctcaggaagggcctcgaggagccttgcacagcacatcccgggtcctggtgggattgaaggcgtgaagggggctgcatctggagttgtgggagaactggccagagccaggttggccctggatgaaagaggacagaagcttggtgacttggaagagagaactgcagctatgttatccagtgcagattcattttctaaacatgctcatgagatgatgctgaaatacaaagataaaaagtggtaccagttctgacaaccagaatccagtaagaccaacttccaccagaaggagaaggaagtttccttgttgatgtcattgatgtgtttggggagagagcacagaagggaagcacattgctgaaaactgttctttcccaggacagccaggcactgttttacctcagtcacatggctttacctgcgaactcacacacgtgcgaactggagcatatggtgtgtcctggctgtgcgctgacaaccagagaacttagcgggatcatattgacagatgaaaaccatgaagggatgttgagaagtccccgtgggctattccttggatcattcctgtattaaactttcatatgccaaaagattttgtgccgttgtatctgccatcagtgttgatccgatgtggggagaggcaataaatcagaagtcctaagtctgaaatggtcatatttgtgtcgggactgaattatgaacagatggaaaagtgtggcgcatgactcaattgctcatcttctgagagtctccatgtagtggccangcggtgtggaaagtaaagaaaccctccattgtggtgaggagaatttcttcaatgtcttttgtctttgttcacattaattcagctaaaggtagattcgacctaaagagttactggttcaatttctagaaaagttaaaattggctacgtttttaattttgctttgaatattttttattaaaatgtttaaccaaatatggccttgcattatttgattaaaattgctaaaacaaccatgtttcaccatttcagtaaaatgctcagatcccatttaaaatgccctttacttgctaacaattccagtaccctccgatgatgaccag

SEQ ID NO: 928 - DNA, 2524 bp, Cricetulus griseus
taaagaagtacaatcagagtttatagaagttatgaatgaaatctgggccaatgaccaaatcagaagtgcagtccttatctcatcaaaacccggctgctttgttgcaggtgctgatatcaacatgctagcctcttgtacaaccccccaagaagcaacacgaatatcacaggaaggacagagaatatttgagaaacttgaaaagtccccaaagcccgtggtagccgccatcagtggatcctgcttgggaggaggacttgagcttgccatagcatgccaatacagaatagcaacaaaagacagaaaaacagtattaggtgtccctgaagtgttgctgggactcttaccaggagctggaggtactcagagactgcccaaaatggtgggtgtgccggctgcatttgatatgatgctgactggtagaaacattcgtgcagacagagccaagaaaatgggattggttgaccagttggtggaacccctgggaccaggagtaaaacctccagaggaaaggacaattgaatacctggaagaagttgcaattacttttgccaaaggcctggctgatcggaaggtctctaccaagccaagcaaaggcctgatagacaagctgacgtcatatgccatgactattccatttgtcagacaacagatttacaaaacagtggaagaaaaagtgaaaaagcagaccaaaggcctttatcctgcacctctgaaaataattgatgttgtgaaggctggactcgagcaaggaaatgatgccggttatctcgctgaatcacagaaatttggagagcttgcactgaccaaagaatcgaaggccctgatgggactttataatggccaggtcctatgcaaaaaaataaatttggagcaccacagaagaatgttcagcatctagccatccttggtgcagggctgatgggagctggcattgcccaggtctctgtggataagggactaaaaactctacttaaagacaccacactgactgggctgagccggggacagcaacaagtgttcaaagggttgaatgacaaagtgaagaagaaagcactaacatcattcgaaagggattccattttcagcaacttgattgggcagctcgattacaagggttttgagaaggctgacatggtgattgaagctgtttttgaggacctcactgttaagcacaaagtgttaaaggaagtagaaggtatgactccagagcactgcatctttgccagcaacacatctgctctcccaatcaatcagattgcttcagtcagcaaaagaccggagaaggtgattggcatgcactacttttctcctgtggacaagatgcagcttctggaaatcatcacgactgacaaaacctccaaggacaccacagcctctgccgtagcagtgggtctcaagcagggcaaagtcatcattgtggtgaaggatggacctggcttctacaccaccaggtgtcttgctcccatgatgtctgaagtcatacgaatcctccaggaaggggttgaccctaagaagctggacgccttgaccacaggcttcggctttcctgtgggcgctgccaccctggcggatgaagtcggtgtggatgtagcacagcatgtagcagaagacctaggcaaagcctttggggagcggttcggaggtggcaacgtggaactgctgaagcagatggtctccaagggcttcttgggtcgcaagtctgggaagggcttttacatctatcaggagggatcaaagaataagagcttgaactctgaaatggatgggatcctggtaaacctgaggctggctgccaagcctgaggtctcctctgatgaagacatccaataccgtgtgataatgaggttcgtgaatgaggcagtcctgtgcctgcaggaagggatcctggccacacctgcagagggagacattggagcggtgtttgggcttggctttcccccttgtctcggagggcccttccggtttgtggatctgtatggtgcccagaaagtagtagaccggctccggaagtacgagtctgcctatggaattcagtttaccccgtgccagctgctcctcgaccatgctaacagctccagcaagaagttctaccagtgagcaggccctcccatcctgcctcatccatgcactaacccagctggcagcgccgcttctcagccatgctgtcaagattttcaggaagcgctcctccctcacagtgccttcagccctgaccagctcacctcctggtgaagtctgacagtgaattaagagtttgtacttcatgttggagggtgagccccactgtgctctttttgccagccctgccttaggcccagtgcagcagctatgagtaacccagaacatctgctgcctgtgtgggcctggaggccagtggggactggcagtggggagggcatttctgcacccagccaaacacagggtaacaataaaatccagacattggcctctgcctgcctgctctgttttcttgtctgcccttctgtttaagcacccccttcagtaataaagccctgtgctgtgg

SEQ ID NO: 929 - DNA, 2524 bp, Cricetulus griseus
gggatcttccttgtgagggagagtgagacaacgaaaggtgcctactgcctttctgtatccgacttcgacaatgccaagggcctcaatgtgaaacactataagatccgaaaactggacagcggtggcttctacatcacctcccgcacccagttcaacagcctgcagcagctagtggcttactactccaagcatgctgatggcctgtgccaccgcctcactaccgtgtgccccacgtccaagcctcagacccagggcctggccaaggatgcctgggagatcccccgggagtccttgcgtctggaggtcaagttgggccaaggctgcttcggagaggtgtggatggggacctggaatggcaccacgagggttgccatcaaaaccctgaagccgggcaccatgtctccagaggccttcctgcaggaggcccaagtcatgaagaaactgaggcatgagaaactggtgcagctgtatgcggtggtgtcggaggaacccatttacatcgtgacagagtacatgagcaagggtagtctgctggactttctcaagggggaaaccggcaaatacctgcggctaccgcagctggtggacatggctgctcagatcgcctctggtatggcctatgtggaacggatgaactatgtgcacagggacctccgagctgccaatatcctggttggggagaatctggtgtgtaaggtggctgactttggtctggcccggctcatagaagacaacgaatacacagcccggcaaggtgccaaattccccatcaagtggactgctcccgaagctgctctgtacggcaggttcactatcaagtcagatgtgtggtcctttgggatcctgctgaccgagctcaccacgaagggacgggtgccctatcctgggatggtgaaccgtgaggtgctggaccaggtggagcggggctaccggatgccttgccccccggagtgccctgagtccctgcatgacctcatgtgccagtgctggcggaaggagcctgaggagcggcccaccttcgagtacctgcaggccttcctggaggactacttcacatccaccgagccgcagtaccagcctggggagaacctataggaactgtgtgcacaggtcgccctcagcttctgggtgtggcctctggtgcacctgcctcccttcaccctgtctctggggctgagttgcctcagtgatgcccttctggagcatggaagggcttcagggactggggcagcctggaaggacaggttgaggctggtagagtgactgccccgtagcctgccctggccacaggcccactctgcattctctctggcgtcaacctacttctcacaggagacactgggtgaagagcagtgctgggggtggttttccaacctcaacccaccccactcacctggtccctccccctttcttcaccctgggtttgtttcaagttggccaaagagcctttccaaagaagaatgaggcccagcccttggcctgcgtacacttcctgcccctggccatccttgttggaggcttctgggtagaacacagggtctggaaccatcttctgtggctctcaggctagacagcccaaggcctaacattcggtgggataagagtcagagtgagcactccttcaaccctatcctccacatgggacccttggcaatcactaacacattgccctcatgtctctgttggaaaaactgattccaggaggggctgtgacttgcccaagaccacgggcagttcagggttgaggtgggttagcacctggtgctccctctgtcttcctcaggaactaatgaaaactgtccttaaaggcaatggacaggctggggccggagaatgggttaaaggtggcagaattctgatgccactgatgctcatgggtctgactgcttggtccctgactcttccgcccagccttggggtatgtggtggcttctctctgcctcagtgtccccatctataaggtgggtagttgatgatttgtggcatctcaactgagggcccctgtgtgtatgtgtgtatgtgtgtgtatacatgtgcctgtgtgtcttcctttgtgtccatatttaacatgtaaaaacaccctcactctctcccagatatgaccatttcacccactgccccatcacagcaataatgtccccactgccggggctttgagccagccaggccctgcttgtagggaaggaggccaagcttggcctgccctgacatttccactttcctctcatggctctcgcccaagttttcccatccacctggcaagtctgagcttgccaccccgttctccccacccaactactcaaggacctttgtatatggtggcctcaattgtcctgttctctctctctctctctttcacagtgttttgtagatttcagatgactatgcagaggccttggggaccctccagctctgggcagggcctggggatcccacattccatggcccaggctcgggaggagggggacccagaactggttgtacatactttgcatactgtctgattaaacacaaacagacctca

SEQ ID NO: 930 - DNA, 2524 bp, Cricetulus griseus
  modified_base (21)..(21): a, c, t, g, unknown or other
  modified_base (23)..(24): a, c, t, g, unknown or other
  modified_base (364)..(364): a, c, t, g, unknown or other
  modified_base (434)..(434): a, c, t, g, unknown or other
ggaggaggaaggaggaggagngnnaggagcaagggaggaggaagagagtggaaggagagtggtggggttgagttgggtagagtaggccctgcacctccaggggctgctaccatttgcaggccaacccggtcagtgccaggtagccgtggtgactacatgaccatgcagataggttgtcctcgtcaaagctatgtggatacctcaccagtggccccagtcagctatgctgacatgcggacaagcattggcgccgagaaggtgagcctgcccagaaccacaggggctgctccatcttcatcctccacagcctctgcttctcctgctgcacctgaaaggcgcagctgagcaggctgctcactcttcnctgctgggaggccctcaggggacctgggggcatgagtgcattcaccagagtgaacctcagtcccaaccanaaccagagtgccaaaagtgattcgtgcagacactcaaaggctgccggaggcaagagaatgggtttattcgcgtcgcctttacagcgtatgtttcatctactctgaagccgtgttccatgaaacaccactgtaaattatttcatatggaactgttcacgttgggtggagagagtattaaatatttaacatagggttttgatttatatgtgtaattttttaatgaaaatgtaacttttccttacagcgcatctttttttttttcttttggatgtggaactgcattgtatatatgtagacagaaggagacacgagcgatcccttcaagtcaaaaagctctctttggagtgaagaatgtgggtgtttataaattctggaaatgtttttctgttcataataaactagacactgtttttttttttttttttgttttgcttcttacgtctggctgccttggaactggaagttgctggtacccaggctgaattctcctgctctgcctccttgaagggtttctttaaatcatcagctgctaagttcttgtgttcaatttcctattttacaggagtttggctttttagctatttccaagtattttcaggtccaccaagggtatgttaacagggcttctagtggcctctggctaatgtggaagttagtggcttttctttacatgaccaacctttcacagaattctttcttagactgattaagacagagttttaaattctcctttgtgaaaagaacaagtatattccctggctgtgatgatacttttgttttggacacaatcttagctccagaaccagctggaaatgaggggattccattaatgatcaaccacctgggtcaataatgatcaatcaataccgatgctccatgtggggctacttcttgctaactttcaaaggtcagggccactctggactaatctagtcactacaaaaggtggtctactcaagaatcatctagccagaaatagagaggtttggcctgtcttccctaggcttttgtcgtctgtcttttatgtgtgagacaaagtattaagaaacaattttactgtactgtaagaaacaatattttatagtgcagaagtcctatttgatcagcggtacatcctgaatgcaatataccatgtagttggaaacacctttaaaacaggtgacttcaagatagggaaggtggctcaccaccccaatgacaataagagccatgagggatagtacagttgtgacttgctgtggctgcctgtagaaagtgtggctcagccgatgtgttgggtatttgtccctcatgacttgcaattagagcaccaaatagatgctggaaggagactgagaggtgctggaggtgtttggccctactcttaattaagagcctataattagcaaatatgatttttaaatgtatgacttgggtaaggcattatattatctcccttccccagcttatcaatgacttggcatttgtgatgtctgcaccaagagatgggtgtgttatccctttgccattcacctgctatttaaacctctctgtgtctatactgtctctttctccagtgttaaccattatgccatatcatagaacaaattcactacccaggaaaatgtgtctgtttgcatatccatctgtagtgctagcattttttttttagtccattttagaactttgccactggcctaagaatatagtttccagaagaatctttcttgtgtagttactttccttatacctcttggctacagggtgggccaaacgaatgccatcaagctttccatttgctgtgtgtggtttggtttatcatctgaagttggtggtgctattgacggtgctacttcatctgtgttcaaaagaccgacgcatggtctatgttgctaccaaaacatttactgtatatatgtggataacgtattatgtatatatgtaatgggtaccaggccaggtttatattttttttcctttagaggtgtttcacttttccaagctttctttacagtgttatgcttgtgttcaattctttttacccccaattctgtctggtacttagaattgtagtgtcttcatcgttaattaaagaaaactgtctaaatgaa

SEQ ID NO: 931 - DNA, 2523 bp, Cricetulus griseus
accttgaaggaacacttaattgatttgttagtctggactatgtgttggtcccaactgaagcctggaataaattgctaaattggtatggctgtgtggaaggccagcaacccattgtcaagaaaaagttgcggagcatggcctgtttgtcaagcactgcaaaagtggaggtgtattactggagctgaagcttctgtgagaacagtgaccccaccaatgtgctgagttgccattttagcaaaagcagacaccacgagatcaaccgagacaaccctctggggatgaaaggggagaattgcagaggcctatgcagagctcatcaagtggcacctcgaatgtcaaacccaagtgggacgtttcgcccctcagttttctggctaccaacaacaagattctcaggagctgttagcctttattctagacggattgcacgaagacctgaaccgagtgaagaagaagccctacctggagccaaaggatgccagcgggcgaccagatgcggtggtagcaaaggaagcctgggaaaaccacaggctgaggaatgattctgtgattgtggacactttccatggccttttcaagtctactttggtttgcccagaatgtgctaaagtttctgtgacttttgacccgttttgctatctaactctcccactgcctttgaagaaggatcgagttatggaggtctttctggttcctgctgacccacagtgccgacctatccagtgccgtgtgactgtgccattgatgggggccatatctgacctgtgtgaagcacttgctaaattgtctggcattgctgcagaaaatatggtggtcacagatgtatataatcaccggttccataaaattttccaaatggatgaaggtttaagccacattatgcctcgagatgacatttttgtgtatgaggtctgcaacacttccatggacggctcggaatgtatcactcttccagtctactttcgagagaagaagtccaggccatcaagtacttcttctggggcggtgctatatggacagccacttctcgtttctgtccctaagcacaagctaaccctcgaggctttgtatcaggctgtttgtgatcgtatcagccgctatataaaacagcctttgcctgatgagtttctcagctcacccttggaacctggggcctgtaatggctccaggagcagctatgaaggagacgacgatgaagaaatggatcatcaagaggaaggaaaagagcatctgtcagaaacagaaggcagtggtgaggacgagcagggagatggccctagtgagcccacccacaaggtgaagggccagccagggcacaggaggcttttcaccttcagtcttgtcaactcctatggcactgctgatatcaattcacttgcaactgatgggaaactactcaaactcaactctcgatccacactggccattgactgggacagtgagacccgaagcctttactatgatcagcaagaatctgaggcctgtgagaagcatgtgagcatgtcacagcctcagaagaagaagaagaccgcagtagccctcagggagtgcattgagctcttcaccaccatggagaccctcggggagcacgacccctggtactgtcccacctgtaaaaagcaccaacaggcaacaaagaagtttgacctatggtctttgcccaagatcctggtggttcatctcaaacgcttctcctataacagatactggagagataaacttgacacagttgtggagttcccagtcagaggtctgaacatgtccgagtttgtctgtgaccggtcagcaaggccttatgtttatgatctcattgctgtgtccaatcactatggagccatgggggttggtcactacactgcatatgcaaagaacaaactgaatgggaaatggtattactttgatgacagcaatgtatctctggcttctgaggatcagatagtgacgaaagctgcctacgtgttattttatcagcgtcgggatgatgaatgtcacaatgcacctttgctcaccagtttccccggctcttctgatggagggatgaggctgggcagctcacagcagggcctgggggatgatgaggcttccagcatggacaccaactgatgctgactcagcaaccccaccaccccacagcaccagtgccatcccccaggagagtgtctttggccctctcgaagacagctcatatcaatctaagaaccagatgaggaaattaccttcttttatgagaagaaatttaaaaaaaaaaaaaccctgctttctcagaaggttatgttaagaggctgaattatttttctttcagatgggtggtgagataaacctgtggagctgaaatgtggggtgggatttgttacacagtgcagtgtgtctcgtggattccaaagaatggagaggaacaccctgtcattgagtatggtgcagccatgaagacccatgcagggctgctctgaactcctgggtttggggttctggtgcccatactggtcaccctagtcgtctggccacagtaaaccaagcctccag

SEQ ID NO: 932 - DNA, 2523 bp, Cricetulus griseus
atggtactgagaatccaacccaagttttggatccaaaagcactttagaagagaatgcctatgaagaacattgtgggagagcttcccaaaggagaatccctatgaggatgtggaacttaagaaccgaagagctggaagaaaatctcagcaactgtctgagaactccttggactctttacacaggatgtggagtccccaagacaggaagtacaacaatccacccatgcagctgtccgtgaaacccagcagtcagtctctgcgcagtgggaactggtcagaaaggaagagtcatcgtttgccacgattacccaagaggcatagccatgatgacatgatgctgctggctcagctgagcctgccatcttcaccctccagcctcaatgaggacagcctcagcaccacaagtgagctgttgtccagccgcagggcccgtcgaattcccaagcttgtccaaaggattaaccccagctatcggacgctagagctggagcttcttgaatggcaggaacgggaactctttgagtactttgtggttgtgtccctcaagaagaagccatctcggaacacctacctccctgaagtctcctaccagtttcccaagctggaccgacccaccaagcagatgcgggaggcagaagaaaggctcaaagctattccccagttttgctttccagatgccaaggattggctccctgtgtcagaatacagcagtgagaccttttttttcatgctgactggggaagatggcagcagacgctttggctattgtaggcgcttactgccaagtggaaagggcctcggctgccagaggtgtactgtgtcatcagccgcctaggctgcttcgggttgttttccaaggtcctagatgaggtggagcgccggcgtgggatctcagctgcactggtctacccctttatgagaagtcttatggagtcgccctttccagccccagggaaaaccatcaaagtgaagacattcctgcctggtgctgggaatgaggtgttagagctgcggcggcccatggactcgcggctggagcatgtggacttcgagtgccttttcacctgcctcagtgtgcgccagcttattcgaatctttgcctctttgcttttggaacgcagagtcatttttgtagcagataagctcagtaccctgtccagctgctctcacgcggtggtggccttgctctaccccttctcctggcagcacaccttcattcctgtcctcccagcctccatgattgacattgtctgctgtcccacccctttcctggttggcctgctctccagctcccttcccaaactaaaggagctaccggtggaagaggcattgatggtgaacctgggatctgaccgattcatccgacagatggatgatgaagacacattgttacctaggaagttacaagctgctctggagcaggctctggagaggaagaacgagttgatctcccaggattctgacagtgactccgatgatgaatgtaataccctcaatggactggtttcagaagtgtttatccggttctttgtggagactgttgggcactactcccttttcctgacacacagtgagaagggggaaagggcctttcagcgagaggccttccgcaaatctgtggcctccaaaagcatccgccgttttctagaagtttttatggagtctcagatgtttgctggcttcatccaagacagggagctaaggaagtgccgggcaaagggcctctttgagcagcgagtggagcaatatctagaagagctccctgacactgagcagagcgggatgaacaagtttctccgtggcttgggcaacaagatgaagtttctccacaagaagaattaaatgcctatcccagtagcaaagtctagtgctttgcagggcctggggagagggcctcttctgggaccctgtgggctgctgtggccactctgcccctacagatcccacctccaagccagtccacctgtgccttcaccatatcccaggatgctgtttgtaaataatctgctgtaagctttcttaactgtaacaagtaaagagaatctggtaaatatttgtatattcccaaagggccgggtgctttcctgccttgcctgagcatggatggaatcttgctgggtgctggtgactggccaattatgtgcagctgactgtctcagccaaaccactgatgtttcccaaaggcttctggcctgcctgcctgaagcccctgctgccagtctcaggccctggagagcaggtgctgtcttaattatgtacaagaggactctagagtttctattttcttcttagtagttccctatcccccaagcctctgtttctgaaaggcaaggaccactctgcccctacttgcaatgtagagccaggtacttggacctggtcctctcttgttccttccaccctctgacatggccagtgagtcatgggaagtgcaactcccagttagtggtggccatgatgcggtacagggcattcctccttccaccatccacagatgttctcaataaactgtacattcattttg

SEQ ID NO: 933 - DNA, 2523 bp, Cricetulus griseus
  modified_base (2453)..(2453): a, c, t, g, unknown or other
ggagaaccccagacatcatgtcagagctactgtttcagaacaatgagatcatctttaaaaaatggcgatgatttacggcaagatatgttaacacttcagatcatccggattatggagaacatctggcaaaaccaaggccttgaccttcgaatgctaccttatggctgtctgtccattggggactgtgtggggctcatcgaagtggtgagaaactctcacactatcatgcagatccagtgcaaaggaggcctaaagggggcactgcagttcaacagtcacacactgcaccagtggctcaaggacaagaataagggagaaatatatgatgcagccattgacctattcacaaggtcatgtgctggctactgtgtggcaaccttcatcttggggattggagaccggcacaatagcaacatcatggtgaaagatgatggacagctgtttcatatagattttgggcactttttggatcacaagaagaagaaatttggttataaacgggaacgtgtgccatttgttttgacacaagatttcttaatagtgattagtaaaggagcccaaggaatatacaaagaccagagagtttgagagatttcaggagatgtgttacaaggcttacctagcaattcggcagcatgccaatctcttcatcaacctgttttcaatgatgcttggctctggaatgccggaactgcagtcttttgatgacattgcatatattcgaaagactctggccttagacaaaactgagcaagaggctttggaatatttcacaaaacaaatgaatgatgcacatcatggcggctggacgacaaaaatggattggatcttccacaccatcaagcagcatgcattgaactgagatgggagctgggaactgcaagctggtgcacagtttctccactgcatggcagtgagtggcagcaggcagacgttggtgcggggatggcacagtcaggaacagcattaggacttgagcaagaacagaaacaacatgctctataattgaaacactgtacacgcaaacagggtttgatagcactaaactagttcatttcagaattcagctttagaataatgagcaagttcatgttatgccttaagtccaaaaaaaaggtaaactttgaagattgtttgtatctttttttaaaaaacaaaaacaaaaacaaaaatccccaaaatacatacaaatgatggagatgaaaagagaatgctgttctgtttgtcttgccagggttctgtttaaaatgtggacacaaccaaggctgtgactgctttagctctgagtaagctgcagcttctgttaagtacatgaaattggagaagaatggaaatccttattttcccattgctgttcagacttatgatttgaagtgggtattttgactccctgctttatgaggagcaacacttggggtgaagggacttgccttttgctttgaacaaacaaccctttgatggatttagggtctctcacctgtggttttgaaagcagtcacaagtgataatctacagacagctgtgtttttgttgggttttgttttttgttggtttttttctggacagtatttacaaggatttgacttatttcctagggaaattctgggctcacatcaagtacagcagtgatcatagaggagggacagcaggggctcctgtttctgacctgtacagtattcactttaagctgattgtttctccttttgcaattgaactgaatactttttttcatgcatgttttccagaaaatagaagtgagtattaatgttattaaaaagattaatttttttattaaaggctatttatattatagaaactatcattaatatatattctttatttacataatctgtcccatagtcatgcattgttttgcaccccaaattttttatcattggtaacagcatggttagcttttctcttgtctataggtgaggctcaggcactattccatttatccagatcctctgtatgactccctaaggaacaggttgaactgcacatactttccttccactgctgtcgtttctacacgatgccctcatcatccatgcatctatagttgagaatggcacaatcatatgaaaccagttactaaatgaataccaagtagactatcatcctgactcttaaacccttctactgaggtctggtcatgaatgactttttatattatgagagactagaaaccatgtaattttttacctttgtaagctatgtatccatatctcaatgataaaagtaggacattaacccattttactatcatgtcccatttcaaagtggtcaggtctccaacttcattacatcccattcaagcacagaatgcgttattgagcatcctgaaaagcatccatccaagatgtagggctaatgttagtggtcactctagatttctactcagttgtttgaataaaagaagtaaaaaaagaaaaaaaaaagaaaaaaaaaanaaaaaaaaaagtgtgtgtttgtgtgtgtgtatgtctttttttttttccttaccaaaagacattggtttta

SEQ ID NO: 934 - DNA, 2523 bp, Cricetulus griseus
gaaagtgaattcatgaagtggaaagaagcgatgttttctgctggcatgcagttgcctactctagatgaaatcaataaaaaggaattatctattaaagatgctctcaattataaattcaatgatcaggatatcgaggagattgtaaaagagaaagaaaggttcaggaaagctccaccaaactatgctatgaagaagactcagctgctaaaggaaaaggccatggctgaggacctgggagatcaggacaaagccaaacaaatccaggaccagctaaatgagctggaagagcgggcagaagccctggaccgccagcggaccaagaacatatctgccatcagctacatcaaccagcggaaccgggagtggaacattgtggagtctgagaaggcacttgtggctgaaagtcacaacatgaaaaaccagcagatggatccgtttactaggcggcagtgcaaacccaccatcgtgtccaattccagagacccagctgttcaggctgccattttggcccagctaaatgcgaagtacggttctggagtattaccagatgctccaaaggaaatgagcaagggtcagggaaaggataaagatttgaattctaagtcagccagtgacctctcagaagacttgttcaaggtccatgattttgatgtgaagattgacttacaagttccaagctcagagtccaaagctttggccatcacctccaaggccccaccagccaaggatggagctccaaggagatctctgaacttagaagactacaaaaaacgacgggggcttatttgagcactcccagcctgctgcttccaaccctgcatgccccatcagggtctgactttcctcttttcctctgatttgccctctttgggctggagcagccatggaactgggaagagactctaaactgccagtcattgtaatataaaccatttgctgtatagacctcccttgtttgcaccatctcctaccaacgcccaggcccccacccaacggtggatctgtttgtgtttgccctccccacccacttttggttttaactagcacagtttggccactctgcacattcagtattaccgtggagctggggttcttgctagagtccctggtggcaacagtggcagcaagcacttcagtcctcttctgactgccttggggctggccattgaacatggcacctaacccttgcaaagagagtggggactgtgcgtctgctgtcttccttcctcttcatctttcccttcttcccgtgtccatggaagagggattttcaaaaacagtttagtttccaaaaagtgtacatttatggggagggagggggtctaatttgaaagagagagaaagagagagagagtgtgtgtgtgtgtgtgtgtgtgtgtgtgtgtgtgtgtgtgtgttttattttttggcctcgactgctgtagctgtgtgacttcccctcccctctcctgtcttttcttagttgactctgatgtttgacaagaataacattttgttttgttttttaaagaaataattcaacatgaatgtggagagcaaacaaaaagacgtaggttacaaatgttaccagcatgtgcagtggtgcgtgtgtgtctgtgtgtgtgcctgcgtgtgtgcatatatatgtgtggtaaaaatacatatatattgtgcagctagggtgaagccagcaaagaggtgtgtatgttgttatgaaatgtttgaaaagacttaagctgactgcttgataatcattctcaggtgtaaagctccaactgtaaataaaagtggcatttaacaaatcttttcagaacaaagtacagctcatgcttccctccaagcactaggctaaagaaacagcgagagctgcgatcttcacacagtgaggacccaagctctgctctgtacttgactcctgtagaaggaagagctgatgggaaatcatggaattaaatagtatttaaacaaaaatggacgtaatagttctaatggttgagtaaagccttggtgttgctttatcttagtttacatttttacttttttaaaaagcagcaacggatggttttgaagaagtattgttgattgttgaatctggaagtgtggctgtgccccagctggtgtagctgtggcgcagagttgggcaaaggaccagtgatggactccttgcaatcatacatacttgaagagtccatggacggaagctccatagactgttgtgtaaatgtggaatcagactgttgaacatcacctgactctagcagagttctggagctgctgggacctctcctatcatgtcagacttggatattttcttgtttttaaaggacataaaaatcatagaatccatataatctgtggcgtcaccctgacccacatgtagatctgtatctagtatcatttggatttggacaagtgtcaatgacattatggctgtgtaataaaatttttattaaaactgccacacactgtagcccctttgccactccccatctgaagctgctgaaaccctcatgctgagatgccagagcgcaaggcagggagaaa

SEQ ID NO: 935 - DNA, 2522 bp, Cricetulus griseus
cagctccggcttcgtcaccgcccgtccctccgccggtgacgcccccgcaaaggcttcgccgtcgccgaggcctcctctcagcgactcgtcgcgactgggttgtccttcactgggtctttcccgctcaccgcaaccattgacgccatgtcgagttactccagcgaccgagaccgcggccgggatcgaggatttggtgcaccaagattcggagggagcagaacaggacccctctctggaaagaagtttggaaatcctggggagaaactagttaaaaagaagtggaatctggatgagctgcccaaatttgagaagaatttttatcaggaacaccctgatttggcaagacgcaccgcacaagaggtagatacatacagaagaagcaaggaaattacagttcggggtcacaactgtccaaagcctgttctgaatttttatgaagcaaacttccctgcaaatgtcatggatgtgattgcaaggcagaatttcactgaacccactgctattcaagctcagggctggccagttgctctaagtggattggatatggttggagtagctcagactggatctgggaaaacattatcttatttgctgcctgccattgtccacataaatcatcagccattcctagagaggggtgatgggcctatttgcttggtgctggcaccaacacgggaactggcccagcaagtgcagcaagttgctgctgaatactgtagagcctgtcgcttgaagtctacctgcatctatgggggtgctcccaagggaccacagattcgtgatttggaaagaggtgtggaaatctgtattgcaacacctggaagactgattgactttttagagtgtgggaaaaccaacctgagaagaacaacttaccttgtcctcgatgaagctgatagaatgcttgatatgggatttgaaccccaaatacggaaaattgtggatcaaataagacctgataggcaaaccctaatgtggagtgcaacttggccaaaagaagtaagacagcttgctgaagatttcctgaaagactatattcatatcaatattggtgcactagaactgagtgcaaaccataacattcttcagattgtggatgtgtgtcatgatgtagaaaaggatgaaaagcttattcgtctaatggaagagatcatgagtgagaaggagaataaaaccattgtttttgttgaaaccaaaagaagatgtgatgaacttaccagaaaaatgaggagagatgggtggcctgccatgggcatccacggtgacaagagtcaacaggaacgtgactgggttctaaatgaattcaaacacggaaaagctcctattctgattgctaccgatgtggcctccagagggctagatgtggaagatgtgaaatttgtcatcaattatgactaccctaactcctcagaggattatattcatcgaattggaagaactgctcgcagtaccaaaacgggcacagcatacactttctttacacctaataacataaagcaagtgagcgaccttatctctgtgcttcgggaggctaatcaagcaattaatcccaaattgcttcagttggtcgaagacagaggttcaggtcgttccaggggtagaggaggcatgaaggatgatcgtcgtgacagatactctgcgggcaaaaggggtggatttaatacctttagagacagggaaaattatgacagaggttactctagtctgcttaagagagattttggggctaaaactcagaatggtgtttacagtgctgcaaattacaccaatgggagctttggaagtaattttgtatctgctggtattcagaccagttttaggactggtaatccaacagggacttaccagaacggttatgatagcactcagcaatatggaagtaatgttgcaaatatgcacaatggtatgaaccaacaggcatatgcatatcctgctaccgcagctgctgcgcctatgattggctatccaatgccaacagggtattctcaataagactttagaagtatatgtaaatgtctgtttttcataattgctctttatattgtgtgttatcagacaagatagttatttaagaaacatgggaaatgcagaaatgactgcagtgcagcagtgattatggtgcacttttttcgctatttaagttggatatttctctacattcctgaaacaatttttaggttttttttgtactagaaaatgcaggcagtgttttcacaaaagtaactgtacagtgatttcaaatacaataaatgaaggcaatgcatggccttccaataaaagatatttgaagactgaattaagtggaaattgtactttattttacatatatgatgtcatgtaaaacttggcttagatagtatgtttcggggggattttctttcattttggtgttttctttttacacaactaaagttgactacttgccattctttgatttaggttaattaactttttgtttttaaacatgtgtgttgtgtccagcctgtggttgtcttaactaataaatagtggttttcttcccc

SEQ ID NO: 936 - DNA, 2521 bp, Cricetulus griseus
  modified_base (2518)..(2518): a, c, t, g, unknown or other
ggataaggaaagcagagattgctagactgcgccgggagaagatcatggcccagatgtctgaaatgcagcggcactttattgatgagaacaaagagctgttccagcagacagtggagctggacgcctctgtctcggccactcttgatgacaggcctctcgtttcggatacagcacttacagcattgggcccggcacagacacaggtccctgaacagagacagtttgtcacctgtatattgtgtcaagaggagcaagaagttactgtggaaagcagggcaatggtcttggcagcatttgttcagagatcaactgtactgtcaaaagacagaaccaaattcattcaggatccaagaaaaatatagatccgttattcatgcaccctgatctgtcttgcggaacacacactggcagctgtgggcacgttatgcatgcccattgttggcaaaggtattttgattccgttcaagctaaagagcagcgaaggcagcagcgactgcgcttgcacactagctatgatgtagagaatggggagttcctgtgccccctctgtgagtgcctgagcaacaccgtgatccccctgctgctcccgccaaggagtgctttcagcaggaggttgaatttttcagaccaaccagatctgacccagtggattagaacaatatctcagcagataaaagcattgcaagtgcttaggaaagaggacaatgcccctgacactccctctacagagaacatagaagacatgagtgacattcaggtcccagaaggcttcagacctgattttcatcctaagaacccatattctgatagtataaaagaaatgctaacaacattcggaacagctacttacaaggtgggactgaaggttcatcccaatgaggaggacccccgtgtgcccatcatgtgctgggggagctgcgcatacaccatccagagcatagaaagaattttgagtgatgaagagaagcccctgttcggacctctgccttgtagactggacgactgtctcaggtctttaacacggtttgcagcagcacattggacagtggcatcacttcctgtggtgcaaggacacttctgtaaactctttgcgtccttggtgcctaatgacagctatgaagacctcccgtgtatattagacatcgacatgtttcatttactggtgggcctggtgcttgcgttcccggctctgcagtgtcaggatttttcaggaagcagcgtcggcactggagacctgcacatttttcatctggttaccatggcacacattgtacagatcttacttacctcatgtacagaagagaatggcatggatcaagaaaatcccactggggaagaagaattagctgttctgtctttgcacaaaacacttcaccagtgtactggaagtgccttggaagaagcaccctccggctggcacctttggaggaacgtccgtgccggcatcacacctttcctcaagtgctcagctttgtttttccattacctaaatggagttccagccccaccagaccttcaggtttctggaacaagccattttgaacatttatgtaactacctttccctaccaaccaacctcattcgtctttttcaagagaacagcgagatcatgaactctctgattgaaagttggtgccagaacagtgaagttaaaagctacctgaaaggtgaaagaggtgcaataagctacccgagaggatctaacaaactgattgaccttccggaggactacagcagccttattaaccaagcatccaatttctcgtgccccaagtcaggtggtgacaaaagcagagccccaactctgtgcctcgtgtgtggtagtctcctctgctctcagagctactgctgccaagctgagctggagggggaggatgtcggagcctgcacagcacacacctactcctgtggctccggggctggcatcttcctgagagtacgagaatgtcaggtgctatttttagctggcaaaaccaaaggatgtttttattctcctccctaccttgatgactacggggagacggaccagggactcagacgaggaaatcctttacatttatgccaagagcggtttcgaaagatccagaagctatggcagcaacacagtatcacggaggaaattggacatgcgcaggaggccaaccagaccctggttgggatcgactggcaacatttataatcactcctctaccaaaaacttgaacttggagttttgtaacacagctggcttttccagaaagacaacagaaaataagttcggctgaatctattttgaaataaattctttatttaagactttacacatctgacttctatttgttgcgcatgttttttgttgtagaaatgtttatataacatgctttccatatcagggaaaatcatatgtttaataaattggctataattttaatatctgtggacaacttgtaaaatttggaatgtatcatatgtaaaaagtttaaagatactcaaataaaggctttagtgtatgagcattgaaaaaaaaaaaaaaaaaaanaaa

SEQ ID NO: 937 - DNA, 2520 bp, Cricetulus griseus
caaagctgaactccctgtgatttttgctgacaagccagacaaggccaaactcttgttagaaggtgtagaaaataagctaaccccttgccttaaaatcatagtcatcatggactcctacggcagtgatctggtggaacaaggcaagaagtgtggggtggaaatcatcagcctgaaagatctggaggaccttggaaaagtgaacagaaagaagccccagcctccagcacctgaagaccttgcaataatttgtttcacaagtggaactacaggcaaccccaaaggagcaatgatcactcaccaaaacattattagcgactgctcagcttttgtgaaaacgacagagaactcattcaacgcttccccagatgacattctgatatcttttttgcctcttgcccatatgtttgagaccattgtagagtgtgtaatgctgtgtcatggagctaagataggtatttttaccaaggagatatcaggcttctgatggatgacctcaaggtgcttcacgcccactactcttccctgtggttccaaggctgctgaaccggatgttgacagtaattttggactaagcaaacactgcagtgaagcgactttgcctccaaaagaaaagaagccgagcttcgcagtggcatcatcagaaacaacagcctgtgggataaactcatcttttcacaagatacagtcgagcctgggtgggaaagtccggctgatgatcacaggagcggccccggtgtccgccacagtgttgacgtttctgaggacagctctcggctgtcagttctacgaaggctacggacagactgagtgcactgctggttgctgcctgagcttacctggagactggacagcaggccatgttggtgcccccatgccttgtaattatgtaaagcttgttgatgtggaagaaatgaactacatggctgccaagggcgagggtgaggtgtgtgtgaagggggcaaatgtgttcaaaggctacttgaaggacccagcaaaaacagcagaagccctggataaagatggctggttacacacaggagacattggaaaatggctgccaaatggcaccttgaagatcattgacaggaaaaagcacatatttaaactagcccagggagagtacatagcaccagaaaagattgaaaatatctacctgcgaagcgaagccttggcccaagtgtttgtccatggagaaagcttgcaggcatttctcatagctgttgtggtaccagacgcggagaacctgggttcctgggcctcgaagagagggtttcatggcacctttgaggagctgtgcagaaacaaggatgtccacaaggctatcctggaagacatggtgaaacttgggaaggaagctggcctgaagccatttgaacaggtcaaaggcattgctatgcacacggaattattttctattgacaatggccttctgactccaacaatgaaggcaaaaaggctagagctacggaactatttcaggccacagatagatgaactgtattccaccatcaagatttaacgtgaggaagactacttggaagaaacggcacacctccacaatctccttgtaccaatggccttctcattggtaactttgcctgcagcaagtgtaagaaaggaaatggccacggacttgtccacagggtctcactgtagggatattagagggcacggaacactgccttacagtcacttgtgttgcagcccatatacctggtgatacacaatttccaaaacgagccttaaatattgtcaaggagaacccgtaaaagtgctaagttatttaaaacttcctcaaccaataaggtgggtgtgaaaactctgtctttctaactgagggttaggacttcactctttctggtatgtctgctacttgctgcacagcctgcagctgtctgctgctctgaagagtacagtgcactggagggaagctgtccctttaagactaagaacaagtgtccaggctgaagaaagtcacagtggaccacagatttccccttttaaaccccttccccctgcacttctccaccccatatacaacacacgcactcatacaacccatctgatatgtaagggttccaaatggtctctgttgtgcctgctgggatacaaggttcccagtaaactaaaggacagatcctcctcagaacaatgtgagcgcccagtcctacaaagtaaaaaaaaaagggaaaatagcagcatttcactctactgagagtcttttgccacatttgacctagtcaagctgttgtttatacattttgaagccactgttgttagctgtgtgacagtgcgtgcattattgaagcacaacagggtttgcactaaagaatcgtcattgtaataacactatttggtagcctaacttcatacttgtattcttaattgcacaagaagtcgataattttcacaacggggttttgaatgtttgctttcagtgttggctatttctatgttttataaaccaaaacagaatttccaaaaacaatgaaggaaaccaaaataaatatttctgcattt

SEQ ID NO: 938 - DNA, 2520 bp, Cricetulus griseus
gagccggagccctggaagtggctaatccaggcttgccatgcgactgttgagggtcgccacggccctggggcgtgggcccctcccgcgggcccctgcggtcctgggcaggcaggggaagcaggcaaattggaaggcctaccgatggtgttcgtcaggaataattcccaatgagaaaatacgaaatattggaatctcagctcacatcgattctgggaagacgacattaacagagcgtgtgctatactacactggcaggattgctgcgatgcatgaggtgaaaggtaaagacggagttggcgctgtcatggattcaatggaactagagagacagagaggaatcactatccagtcagcagctacctataccatgtggaaagatatcaatatcaatattatagatacccctggccatgtggacttcacaatagaagtggaaagggccctgcgggtgttggatggtgccatccttgttctctgtgctgttggtggagtacagtgccagaccatgactgtcaatcgtcagatgaagcgctacaacgttccgtttttaaccttcattaacaagctggaccgattgggctccaacccagccagggcccttcaacaaatgagatccaaactaaaccacaatgcagcatttgtgcagatacccattggtttggagggtgattttaagggtattatagacctcattgaggaacgagctatatactttgatggagacttcggtcagattgttcgatatggcgagattccagcagaattgagggctgcagcagctgaccaccggcaggaactaattgaatgtgttgctaattcagatgagcagcttggtgagctgttcctggaagaaaaaatcccctcggtttctgatttaaagatggcaatccgaagagcgactctgagtcgatccttcactcctgtgttcttgggaagtgctctgaagaacaaaggagtccagcctcttctggatgctgttttagaataccttcccaatccatctgaagtccagaactatgctatactcaaccaggatgactcaaaggagaagaccaaaatcttaatgaactccaaaagagacaattcccacccatttgtgggcctggcttttaaacttgaggcaggccgttttggacagttaacttacgtccgcaattatcagggtgaactaaagaagggtgacaccatctacaacacgaggacagggaagaaggttcgagtgcagcggttagttcgcatgcatgccgacatgatggaggatgttgaagaagtatatgctggagacatttgtgcattgtttggcattgactgtgcaagtggagacacattcacaaacaaaaataacagtggcctttccatggaatcaattcatgttcctgaacctgtcatttcagtagcaatgaagccttctaacaagaacgatctagaaaaattttccaaaggtatcggcaggtttacacgggaagaccccacatttacagtccgctttgacactgagagcaaggagacgattgtgtctggaatgggagagttacatctggaaatctatgctcagagaatggagagagaatatggctgtccttgtatcacaggaaagcccaaagtggcctttagagagaccgtcactgcccctgtgccgtttgattttacacataaaaagcagtcaggtggtgctggccagtttggaaaagtaataggtgtgctggagcccctcgccccggaggactacactaaattggagttttctgatgaaacatttggggccaatgttccaaagcagtttgtgcctgcagttgaaaaggggtttttggatgcctgcgaaaagggccctctttccggtcacaagctttctgggctacggtttgttctgcaagatggtgcacatcacatggttgattctaatgaaatctctttcatccgagctggagaaggtgctcttaaacaagccttggcaaatgccacattatgtattattgagcctattatgtctgtggaagttgtagctccaaatgaatttcagggaacagtaatagcaggaattaaccggcgccatggagtaatcacagggcaagatggaatcgaggactatttcacactgtatgcagaggtccctctaaataatatgtttggctattccactgaactgaggtcttgcacagaggggaaaggagagtacacaatggagtactgcagataccagccctgttcaccatccacacaagaagagctcattaataagtatttggaagctacaggtcaacttcctgtaaaaaaagggaaagccaagaactgactctcctcactttgaacatagtgactgtttgactacaagatttagagatgatggattccagtggagtgaattcagatggctgaatcaagttttaggagcccttgctgtttcacattcagaagcttctgtatgtatgtgcaaagataattatatgtatattatatttaaactatggactatttttgttgtttaatgaaagaccttaaataaaattagagtattactga

SEQ ID NO: 939 - DNA, 2519 bp, Cricetulus griseus
  modified_base (2500)..(2500): a, c, t, g, unknown or other
caccgcccgggtcgtggaggcaggagcgacgtcaccgccatggcgggcatcaaagctactaattagcttgtcatttggaggagcaattggcctgatgtttttgatgcttggatgcgcgcttccaatatacaaccaatactggcccctctttgttctgtttttttattatcctttcacccatcccatactgcatagcaagaagattagtggatgacacagatgccatgagcaatgcctgcaaggagctcgccatattcctcacaacaggcattgttgtctccgcttttggactccctgttgtatttgccagagcacatctgattgagtggggagcatgtgcactcgtcctcacaggaaacacagtcatcttcgcaactatactgggcttcttcttggtctttgggagcaacgatgacttcagctggcagcagtggtgagaggagctaccgaactgttgtcacatggacttctgtcatctgttggccgtccatgcacaggagatggggaccgtgatgctgaattgtgtaacgagctcctgggggtctcccagccactcccttctcagtcccctgtttccacggggacttgctgaggattaaaaggatttttctcttttggaaaagcttgactggtttcccacttctctagactgctttctgtggtgtcctgctgaatctaaaatactcacgtgttttccctgttcagttgtttttaaatcagtatgcaatgttaaacatttttaagatgtaataaccatttgctttggtttagaaattcagaacttctggctgtattatgggctaaagtacatattttctctaaaaatcagttaatctccattacaaaaaaatatatatgtatatgtaagtttttttcagtcaggatgacatcactcccaggtgagtgcaaacattcagattgttgacataccttatacactatttactcagtgcaaagatagctgcatttatacctcaggggggccaagtaatactgcccatgccctccataagggttgctggttttactagtagacaggtgttttgtgaactgaaaattattttatggaattgctacaaaagagtgcttttctcttcaattgttagaatttatgttaaactttaaggtacaagtacaaacaagtctggggatacagtttatatttgtgtttattaccgtcaaagcaagtgagttgctgtgtgggaagaagcgaagctgaaattccctggtttgagtgccacttctgtttataagtgacaagtctgagctttgtcagcctcccatggttcggaggggtgacgtggacatgcatgggacagtttgtttgcattgtagataatcaaaaactttcccctgcttcctccttttaacttattttgtacattgtatatattaagtcagagaacttttcaaatatagtttaatagcatttagaaatgtttgactactaggaaaaaacaattgctatgccatacattcagagtgcccctccccctcaaggccttgactagattcacaagtgacttggtagtcttgcaggtaatccagggtcagagatttctaggactctgactttgataggagcggtctcctggggttagagcgtgtgtatttcaaaacctcttgagacaggcttcctagtgcctcctaattgaggtgtggtttcatcatgacagatctgctattgtaaaggtatttgttgtatgaattaattcagagtagccaaatgcagctgtatcacagcttcaaactcaaacccgaccaaaaacttcccccaaatggccaggcatgaccaaatcgtagcggttattcaaatctccgattctcaatccttaattcaagagctgattatgaaaaatgttcacattgatccaacagtattttgtgaagacatttgtatgtttcttcagtctgcttatataaaaagaagtgttctgcctttagctgaaaaatgagtaaccatgacaactgtcttttgttgttagtttttttgttcagctttttactaaagatgcctaaagctgcagtttttattttgttttgtgtgacctgaccaatgtttggattacctttggctgtgaggtgggaagccgtgtgaaacctgcaaatgtagctgtgccgtttgtgggttagactaaacatggcttactgagtgatgttgatggggggtgggggtgtgcacatggtcagaactctgccttcgatcagcgtggagcagcggttccttctcaggtccttccccattttctgttccttcacgtgtgcagtgctgcgcacttggctatagacaccttttctaacagctgcatattctttctgggtactgattttatgggcagcattttgtgtctgaccatgacactgacttgacagtccccatctctggtttctaggctagtcacttaagagttttcatgaagatgcaccaccatggcattgccattccgctgtggagagaaaaaaagaaacttttgatgatgaaacaataaagattttaaanaatacaaaaaaaaaaaaaa

SEQ ID NO: 940 - DNA, 2519 bp, Cricetulus griseus
aggctataatagaagaccaagtggccgtcgacatagcaaaagcaatccagagagttccttaacatggaaacctcaggagcagggtgtaacagagatgatttctgaagagagtggcaagggtgtgaggcgtccccattgcactgtggaggagggtgtccaaaaggatgaaagagaaaaataccgaaagttattggaacgacttaaagaaggtggtcatggaaacactctccctgctgtatcttcacatcatagttctcagagaagccagatggacacattaaagaccaaaggctgggtggaagagcagagtcacggaatcagaacagcccattttgttccaaaacagtacagagtcgttgaaacaaggggacctctctgttcagtgagaagtgagaagaggtactcaaagggaaaagctgatccagagaaggtggcgggactccgatttgaaaaggaaggtacaaggggacaccagttggagcctgatctgtcggaggaagtgtctgcccggcttcgccttggaagtgggagcaatggtttactcaggaggaagatatcaggactcgaggcaaaggaaaagaacttcccaagcagagagaaggagagaagaacagatctctttgaacttacagaggacatggaaaaggagatcagtaatgccctcggccatggtccaccagatgagatcctaagcagcgctttcaaattgcgaattactcggggagatatccagaccttaaagaactatcagtggctcaatgatgaggtcattaatttttacatgaatcttttagtggaaaggagtaagaagcaaggctatccagcacttcatgcattcagtacattcttctatcctaaattaaagtctgggggttaccaggcagtgaaaagatggaccaaaggggtgaatctctttgaacaagaacttgttctggtacccattcatcggaaggtgcattggagcctagtggtgatggacctaagaaaaaagtgtcttaaatatctggattctatgggacaaaaaaggccacaggatctgtgagattcttcttcagtatttgcaggatgaaagtaagaccaaaagaaatatagatctcaatctcttagagtggacccactacagcatgaagccacatgagattcctcaacagttgaacgggagtgattgtggaatgtttacttgtaaatatgcagattatatttctagggacaaacctatcacatttactcagcaccagatgcctctcttccggaagaagatggtgtgggaaatccttcatcagcagttgctgtgacaatgccctgacctgggccttctagctgctggtggttctttcatggatgtttccatatacctcatgcactatgggtaaaaagtccccatatcatttctgttctttcacaggtactgagctgtcaagagtgcatgaaagcctctccacaggagccctgacttgaggtgtggaggggctgcttgcaaccctgtttgtaaggctgtgcctgctcagagccctggactgttcatcccatacaagaacaaatgctaattaatgttttttgttttaaagagttatttccatatgaatgtgggaaatgcaggatttgttctatgaattgttcattgggcagtgcccttttctcactgctcttttataattaactataaataatttgtttgaactatttatttctgagaagaatgttaatcaaactgccacttcctgctgcagagggacacatcagcagggggcggagggggtgttcaccagcttctctaatgctggagtaggaactgccaacatgaagtgaaggttctctctaaaatgccagaagaaatgacgatgctgaggtgtagggatctggttgccttttagagagtctggcactatgactagggcacagttcatggaatatggccaaggaaccaggtctgtgcatcctcagaccagcacgtgctcatcttagagactttcttttctagaactgaagtagcttggcttcctctcgaaactggattcaaagtaactgtgaccataaatatttcatcttgggtgtggttaatatgaacctcacattggtaaagggctggcctgaattgtctatttcagaagatgctcctcaatttaagcctatttttcctcagagttttttttttttttaaatatatatatataaagctgaaattaagttcttggctcattagcatgccctactccagtcccactgagcctccaagagagatttagtacttggctctgaggttgcccgttttacagtcatctattttgcatatgaaagtttgtatttaacttttttgttcattaaaaatcttacagatgtggttatgcatttttaatttcagaaagttggtcagagcatattttgcaagatctagtgcctagtgttgcttttatgatgtaataaaagaccatctggcagaacctagaatatgctgataatttcttctcttttctcgacttcaactttccaaacttgttctggcacaaaaagaagataaa

SEQ ID NO: 941 - DNA, 2519 bp, Cricetulus griseus
gaggtaagcgccgcggcctgctcttgccagacctcctttgagcctgtctcgtggctcctcctgacccggggtgcttctgtcgccctcagatcggaacgccgccgcgctccgggactacagcctgttgctggacttcgagactgcagacggaccgaccgctgagcactggcccacagcgccggcaagatgaagttccctatggtggcggcggcgctgctgctgctctgcgcggtgcgggccgaggaggaggacaagaaggaggatgtgggcacggtggtcggcatcgacctggggaccacctattcctgcgttggtgtgttcaagaacggccgcgtggagatcatagccaacgatcagggcaaccgcatcacgccgtcgtatgtggccttcactcctgaaggcgagcgtctgattggcgatgcggccaagaaccagctcacctccaatcccgagaacacggtcttcgacgccaagcgcctcatcggacgcacttggaatgacccttcagtgcagcaggacatcaagttcttgcctttcaaggtggttgaaaagaaaactaaaccatacattcaagttgatattggaggtgggcaaaccaaaacatttgccccagaagaaatttctgccatggttctcactaaaatgaaagaaactgctgaagcatatttgggaaagaaggttacccatgcagttgttactgtgccggcttacttcaatgatgcccagcgccaagcaaccaaagatgctggcaccattgctggactgaatgtcatgcggatcatcaatgagcccacagcagctgctattgcgtatggcctggataagagagagggcgagaagaacatcctcgtttttgacctgggcggtggaaccttcgatgtgtctcttctgaccattgacaatggtgtctttgaagtggtggccacgaatggagacactcatctcggtggggaagactttgatcagcgggttatggaacacttcatcaagctgtacaaaaagaaaactgggaaagacgttagaaaagacaacagagctgtgcagaaacttcgtcgtgaggtggaaaaggctaagcgagccctgtcttctcagcatcaagcaagaattgagatagagtccttctttgaaggagaagacttctctgagaccctgactcgggccaaatttgaagagttgaacatggacctgttccgatctaccatgaagccagtccagaaagtgttggaagactctgatctgaagaaatcagacattgatgaaattgttcttgtcggtgggtctactcggattcccaagattcagcagctggtgaaagagttcttcaatggcaaggagccatcccgtggcataaacccagatgaggctgtagcatacggtgctgctgtccaggctggtgtcctctctggtgatcaagatacaggtgatctggtactgcttgatgtatgtcctcttacacttggtattgaaacagtgggaggtgtcatgaccaaactgattccaaggaacactgtggtacccaccaagaagtctcagatcttttccacagcttctgataatcagccaactgtaacaatcaaggtctatgaaggtgaacgacccctaacaaaagacaaccatcttctgggtacatttgatctgactggaattcctcctgctcctcgtggggtaccccagattgaagtcacctttgagatagatgttaatggtattcttcgagtgacagctgaagacaaaggtacagggaacaaaaacaaaatcacaattaccaatgaccaaaatcgcctgacacctgaagaaattgaaaggatggttaatgatgcagagaagtttgctgaggaagacaaaaagctcaaagagcgcattgataccaggaacgagttggaaagctatgcttactctctcaagaaccagattggagataaagaaaagctgggcggtaaactttcctctgaagataaagaaaccatggagaaagctgtagaggaaaagattgaatggctggaaagccaccaggatgcagacattgaagactttaaagctaaaaagaaggaactagaggaaattgttcagcctattattagcaaactctatggaagtgcaggccctcccccaactggtgaagaggatacatcagaaaaagatgagttgtaggtgtactgatctgctagggctgtaatattgtaaatattggactcaggaactttcgttaggagaaaattgagagaacttaagtctcgaatgtaattggaatcttcacctcagagtggagttgaaaatgctatagcccaagtggctgtttactgcttttcattagcagttgctcacatgtcttggggttggggaaaggaggaattggcaatttttaaaattggggaaaaagctgggtcagggtgtgtgttcaccttggaaatgttctatttaacaattgggtcatgcacatctggtgtaggaacttttttctaccgtaaatgacaccaataaatgtttgttatttacactggtctaatttttgtagaaaa

SEQ ID NO: 942 - DNA, 2519 bp, Cricetulus griseus
cctccatgtgtcaggccggtgaggactacgcggggccggctcagcgggagcctccgcccgtgccacggccgggccgggagcagaagtgtgtgaagtgcgcagaaggcctgccggtggtggtgatacgagcgggagatgccttctgcagggattgtttcaaggcattctatgttcacaagttcagagccatgcttgggaagaaccgactcatctttcctggcgagaaggtgctgttggcatggtctgggggccttcatccagctccatggtctggcaagttcttgagggtctgagtcagggttctgcaaacggctacgctttgtaccaggagtcatctatgttgatggagggagcagcctgtggccagagcctaaaggacagagagaagaccttggcagaggtgaagctgatcctgcagaacactggcttcccatggcatgtggttgccttagaggaggtgttcagcttgccaccatcggtgctgtgctgtgcttcccaagagccagcagggacaggaggaggcctacaaaatggctgtggacagcttcttgcaacagcagcaacagcaacatgtgctaggggttgagggctatgccagcccagctcaaggagaggatcagccacacccatcccacagccaggaacccctaggcatggctgggtcccccatagctgctcagactgaggccttgtctaggttgttcagctccataaggacactgacagccaaagaggagcttctgcagaccctgaggacccatctgattgtacatgtagcccgaacccatggctacggcaaggtgatgactggggagagctgcacccgcttggccatcaagcttatgaccaacctagccctggggagaggagccttccttgcctgggacacgggcttctcagatgagcggcatggggatgtggtattggtgaggcccatgcgggactacaccttgaaggaagtggccttctacaaccacctgtttggtgttccctcagtcttcacaccagccattgataccaaggctccagaaaaggctagcatccaccggctgatggaagcttttatcctgagattgcagactctgttcccctctacagtcagtactgtgtacaggacaagtgagaagttggtcaaggctccccgggacagctgtgccactggcccctcgggccccaactgcctcctctgcatgtgtacactggacattgacactgctgacagtgccacggcctttggggctcagtcctcctcacatctctcccagatgctgcctgctgaggctgggatgcctaccccacccaactgtggtgcaggggagggtcaggcccagagctgccacaggggagttggcagaagggaggatgtgcaggcctgcatcatggaacagctgtgctatggctgccgggtgaacatgaaggacctgccctccctggacccattgccaccctacgtcctggcagaggctcagctccgcagccagagggcctgggtctctcgggaaattcaggagtatctgattacagacgatgatgaggaagataaataaaatagtttttactttagaaaactactacagtacttgtgggaagggaggcccccagcccaataggtggggacgcaacaggtagggacacagcatccctttgacagcagcatcatcagggcttgatgggccaggaggatgtgtcacagctcgtggcctcaggcagctacactcctatccaaggagctctgtcagccctggtggccatgctgccctggggcagctccttcattcccggtgcccaggagctgggctcctactccttctcacgtgtccacttgatcatggtttctggtgagcggtacaggaagatgagcttagcgtacagctcctcctccagctccagctcacgggtctcccgcaccaagaagatatcctggcacagcttgaggatacggtccacatatggcagctcctcgaacatgatggagtgtgagatatcactgaagaagccccgcataaacttgccaatgaccagcacaatggacacgtatagcccaacaatccggaggttcctttgcagtacttacccatagccagccaggaagccaaggctgggtgggctgaccttgtcactgaagatgaccatgggtagcaggttgcagtcagcctggcagtcctgcagctcaataacccaccactcaaggaagtcggaagcctttgtgtctgcttgttccccagaagcccctgtgcccacttgctccctccgcagctggatgcgcacaccaagataatcggcttcttcatctgcactgactggtcaagtctgccctcaagcagttgggctagctgcctccgtgctgtactgttgggggccagctccaaggtgtgcttctcgttggtatactccaccttgccacccttggccaggtccctgggggaatgggcagtgttaggcagtgtggggcatgccccaggcgcttgtaagcacaggacccacctttggaaattccaggtgaatcgcagtgtaatgtc

SEQ ID NO: 943 - DNA, 2518 bp, Cricetulus griseus
tccacttctacaatgtgaagagcgtccttggctcaaccacagatgatggttgtatctgatgtggctgacatgtttgtgccactgctggatggcttcctggtcaatgtcaaagagtcccgagcagttatcaccagcttattggataagatcccagaaatgtttgcagatacaagagagacagagacagtatttgccccggttatccaggctgggatggaagctctgaaggctgccgagtgtgcaggaaagctgtttctgttccacacatccttgcccattgcagaggccccagggaagctgaagaatagagatgacaggaagttgctcaacacagacaaggagaagactctcttccagccccagacaggtgcctaccagactctggccaaagagaaggtggttggctttgatgctgtgatgcgggttcggacaagtactggtatccgtgctgtagatttctttggagctttctacatgagcaatacaacagatgtggagttggctggactagatgaggacaagacagtgactgtggaattcaagatgaccggctcaatgaagagagtggagccctactacagtgtgccctgctttataccagctgtgcagggcagcgtcggctccgcatccacaacctggccctaaactgctgcacccagttggctgatctgtatcgaaactgtgagactgacacactcatcaactacatggccaagtttgcataccggggtgttgtgaatagccctgtgaagactgtacgtgacactctcatcacccagtgtgcccagatcctggcctgctatagaaagaactgtgccagcccatcttctgcaggacagttgatccttcctgagtgtatgaagctactcccagtttacctgaactgtgtgttgaagagtgatgttctgcagcctggagccgaggtcactactgatgaccgtgcctatgttcgacagctggtttcctccatggatgtggccgagaccaatgtcttcttctaccctcggcttctaccactgacaaagtctcccatcgacagtacctctgaaccaccagcagttcgagcatctgaagaacgtttaagcagtggcgatatatatttgttggaaaatgggctcaacctctttgtctgggtgggagcaagcgtccagcaaggtgttgtccagagccttttcaacgtctcctccttcagtcagatcaccagtggcttgagtgttctgccagttctggataatccactgtccaagaaggttcgaggcctcattgatagcttaagggcacagagaatgcggtacatgaagcttatcgtggtgaaacaggaagacaagctggagatgctgttcaagcacttcctggtagaagacaagagcctaagtggaggtgcatcctatgtggactttctctgtcatatgcacaaggagattcggcagctactgagctaaagcaagtcggtaaatggtatagggtcccaggccaacttccagaaagtaccccaggatggcagagaaattgggacagttccatatcttatgagtcatgtaagctgacctcagttctcttcttggggggggagggcaagatataaggagacaccttctttctgggctcaaatatcctctaccactgtcatgtcctgctgatggaaggtgccctagtccccttactctaccctctttctcctgctaatcctgttgtaatgaatgtagtttatcagttcactgtatatgatctagtgttgggggtttggaggcagcgaggccctggcaatactgagtccctctggaccagcctccaagaggaaaggggcaggcaggaaggagtgagaaccccagggttattacaggaggtggcaaattcagctccgtgtcatcaacaacttcctatattagggattaaatatacaggtgcacaagagctggggtacagactgtaggtggtggagagtaaagtagttggggcctggtggtcagtagcaaaattatagttactgaggatggatgactagttgtctctctacttccattgtgtgtgctctctctcccctgctatgattggtgagcacttcgtggatgaatgagcctggggactgaattgcaaagcatattaacacctaggggaggtagcggcctcctttccagccggagaagcccccaatactggatggttctgtagagagcctgatggtcaacttgcaatacctcacagagccagcccacatcccactcagctcccaccagaaacgttgttggggagaagcagagatggctggagccctccctgtcttcctgtgcctggacattactgggctttggtattgactgagtggttgacagttatcttccaactccaattggctggggcaggacaagggctaggattgatggtgtcaggcttgcctgctcccagcccgggatgcccctgctctggacctttcatttcttttcattggtttatttttcaatgcatctttaatttgtaaagaaataaaataagatgtaaccagtaaaaaaaaaaaaaa

SEQ ID NO: 944 - DNA, 2516 bp, Cricetulus griseus
aagttctccaaggagaggcacatcatggaccggacccctgagaggctgaaaaaggaactggaggaggagctgctgctgagcagcgaagacctacgtagccatgcctggtaccacggccggattccccgacaggtatctgaaaaccttgtacagcgagatggtgacttcctggttcgagactccctgtctagcccaggaaactttgttctgacctgtcagtggaagaacctcgctcagcactttaagatcaaccggactgttctgcggctcagtgaggcctacagccgagtacagtaccaatttgagatggagagctttgactccatccccgggttggtgcgctgctacgtgggcaaccggcggcctatctcccagcagagcggtgccatcatattccagcccatcaacaggacggtgcccctctggtgtctggaggagcgttacggcacttcaccaggcttcggccgggaaggcagctttactgatggaaggcctgatatggctaagaggttgagcctcaccacgggtagcatccaggctcgggaacacagcttgccccggggaaacctcctcaggaataaagagaagagtggcagccagcccgcctgcctggatcatgtgccggacaggagggccttagtcctcaaagcccaccagtcggagagtcacctgccaataggctgcaagctgccccctcagtctccaggtatggacacaagcccttgccccagctctcctgtgttcaggactggcagcgagcccactctgagtccagcactggtccggcggttctcttcagacactagggcaggggaggcaatggcgggggtcagacagccagctgtgccccaagccacccccaaagccctgcaaagtgcccttcctcaaggttcctccatctccttctgcctggctcaactcagaggccaactactgtgaactgaaccctgcttttgctgtgagctatgacagggaagccaagcttctctcctatgcccacagcagccgtgaggagctgctgacagccaaacacaatggggcatcaggtgcccggaactctggcgtcaactacttgatcctcgatggggatgacccagcgagaccttgggatccgctggcagcacagcggatagatgagggtcaggaggacaagaccacgtttgtgccgcctatcatggaaaccgtgtcgtcattcagacccaatgactttgagtccaagctccttcctccagaaaacaagcccctggaaactgccatgctgaagcatgcaaaagaactcttcaccaacaatgatgccagggtcatcgcacagcacatgctgagcgtggactgcaaggttgctaggatactagaagtctctgaagacatgaagaggcgcatgggtgtgagctcaggactggaactcattaccttgcctcatggacgccagctgcgcctggacattatagaaagacacaacaccatggccattggcatcgctgtggacattcttggctgcacaggtactttggagaaccgagcaggtaccctcaataagatcatccaggtagcagtggaactaaaagatgccatgggagacctctactctttctcagccatcatgaaagccctagagatgcctcagatcacaaggttagaaaaaacatggactgctctacggcaccactacacccaaacagccgtcctctatgaaaagcagctgaagcccttcagcaaagccctgcacgaaggcagagagtccaagtatgtcccaccaagcagtgtatcagtcccactgctgatgcctctagtgaccttgatggaacgtcaggctgtcacttttgaaggaactgacatgtgggaaaaaaacgacgagagctgtgaaattatgctgaaccacttggcaacagccagattcatggctgaagcttcagagagctacaggatgaatgctgagaggatcctggcagattttcaaccggatgaagaaatgagtgaaatcttgaagactgaatttcagatgcgattgctgtggggcagcaagggtgctgaagtcaaccagactgagagatacgagaagttcaaccagattttaaccgccctctcacggaaactggaacctccctcggtgaagcaggccgagctctgagaaccataataatgtgcaaatctaacaagatacgagcgtttaatatccacagggtgttaaatgtgtaaattgcacagagcatacttatttatgaattgtttaaaattactactgatttttaaataaatggtaatttattattaagataactgttgctaatgttgatcagcaaatttaagaagacatagctatgttgctggttgtttaatatcatggtatttgaccatcttagttttaattccatgtcatataaatgtaaatagaggcatttaaaagaaaagcatgaaacattgcagaaggtatcagttatatgatattctctgaatatgaaactgtaaatagccatgagtggaaatatatcttttttgtgaaaaaaaaaaaaaaaaaa

SEQ ID NO: 945 - DNA, 2515 bp, Cricetulus griseus
  modified_base (2084)..(2084): a, c, t, g, unknown or other
  modified_base (2175)..(2175): a, c, t, g, unknown or other
atcattgaaaagcgatatcgatcctctatcaatgacaaaatcatagagttgaaggacttggtcatgggaacagatgccaagatgcacaaatctggcgttctgaggaaggccattgattacatcaaatatttgcagcaggtcaatcacaagcttcgtcaggagaacatggtactgaagctggcaaatcagaaaaacactgcatatcacagggaagcttcctgcaggatctacctgttcggatgtccacatggctctatgtgctgtgaacctcgctgagtgtgctgaggagaaaatcccaccaagcacacttattgagatccatctgacagccgccatggggctcaagaccggatgtggaggcaagctgggcttcttggctagctacttccttaatcgtgcccagagtctgtgtggcccagagcatagcactgtccctgactccctgcgctggctctgccaccccttgggcccagaagtttttcatggagcgaagctggtcaatcaagtcagcagccaaggagagtctgtactgtgcccagaggaacccagctgaccccattgcccaagtccaccaggcgttctgcaaaaacctcctggaaagagctgtggagtctttggtgaaacctcagtctaagaagaagtcaggcgaccaggaggatgagagctgtgaattttccagtgccctagagtatttgagattacttcattcttttgtggactctgtgggatttgtgaccccaccattctccagcagctctgtgctcaagtcagcccttggtccggatatcatctgtaggtggtggacatccgcagtcactatggccatcagctggctccagggagatgatgcagctgtgcgctctcattttactgaagtagagcggatccccaaggccctggaagtgactgagagtcccttggtgaaggccgtcttctatgcctgtagagccatgcatgcctcactctctggaaaaggagatgggcaacagaattccttctgccattgtgagagggccagtggccacctatggaacagtctcaatgtcagtggagctacttctgatccttcacttaaccatgtggtccagttgctgacctgtgacctactactgtccctgaggacagcactctggcaaaagcaggcaggtgccagccagggcctgggtgagacctaccatgcatcaggcactgaactggctggcttccagcgggacctgggcagcctgcgtaggctagcccacagcttccgcccagcataccgcaaggtgttcctgcatgaagccactgtgcgcttgatggcaggagccagccccacccggacgcaccagctgctggagcatagcctacggcggcgtaccagtcagaacaccaagcatggagaggtagacacctggcctgggcaacgagagcgagctactgccatcctgctggcctgccgccatcttcccctctctttcctgtcttccccaggccagcgggcagtgctgctggctgaagctgcccgcaccctggagaaggtgggtgaccgacgctcctgcaatgactgccagcagatgattgtcaagctgggtggtggcactgccatcgctgcctcctgaccacgtatggggcttggtctacctccttccacctttgtctctttctcccaggatcttccctctgtctctcagactgtctccccatctgtttttctcccttctccaagagttgtgaggatgaaggcaagactgactttctgagttgtcacctgccaaggcttttggatcatttcagcccagtaggaccatgggcaagtctccttaagactgctgtggtaaatgtccatggtctaagcccaagtgggctgagaagaaaagtggcctgagcaggaatggggtgatctcctcacttgaaagcaacatagggtgctgccaaagccccttccccagccctctggagcaactgactgtctcactttctgccttgtttttttttgtttattggttttgtttttatcaggctttctctgggaactaggtctctgtgcaccagagaacattttgcattctggacttatctcgcacatcccccttttatacaaatgnttttatatgtgtgtgcttgggcctgtcacaatacagggcaaagttgctgtggcatctttatttctcctgggtctgcactccttccactgtncctgactaagcctgttcattgttcagccagggaaggaagggagcccagtcctggggaggtgggtgggaggcaagggcaggtcttgggatggatgaaataatgttggcattgtttttaattttttaaaaaataaatggtatcttacttaattgtcctgttccttcccactcctccaccccctgagagggcaacctgagctcagggtaggcccaaggggctggataggatgaagccacctttggacctaggatccaggggtcttcagcatgatttatttgttccttcctacccctagcctaactcctacctcccatagagtgtatttttatccttaattcct

SEQ ID NO: 946 - DNA, 2514 bp, Cricetulus griseus
  modified_base (11)..(11): a, c, t, g, unknown or other
  modified_base (79)..(79): a, c, t, g, unknown or other
gatgagaatgntaaaaaagcctgataactgcaagtctgcaatccggtcagaggttggcaccagctccccagattccacncctttagatcaggaattgttcaactccttctatttctggaggactcctctacctgaaatagatcttgataaagagctccagcaggactctggggagagactcagcccagagaacacaggagatgcacccggagtccctgaaccagcttctcctaatatcaccatggctacccggaaggaattagaagaaatgatagagaacctagagccacacatggatgacccagacgttaaagcacaggtggacgtcctgtcagctgcacttcgcgcttccaccctggatgctcacgaggaggccagcagcatagagcatcggagtgagctacaagatgacctgggtgtcagtgagctgccagactgtagcatagatcaagatgctcctgggccgttagtcagcgctgttgaggagagtatggatgccacccctcactgtgtcgatgaaggtgcagacgtgatcgccagtgatggcttaagccctgatgaagaaaggagatcgaaagtacaggacgttgttccacaagcgttactagatcagtacctgtcaatgaccgacccctctcgagcacagacagtggacactgagatcgccaagcactgtgcatacagtctgccgggcgtggccttgactctgggcaggcagaactggcattgcttgagagagacgtacgagaccctggcgtcagacatgcagtggaaagttcgaagaactttagcattctccatccatgaacttgcagttattcttggagatcagttgacagctgcagatctggttccaatttttaatggatttttaaaagacctagatgaagtcaggataggtgttctcaaacacttgcatgacttcctgaagctccttcacattgacaagagaagagagtacctttatcaactccaggagtttttggtgacagataacagtaggaattggcgctttcgtgctgaattggcagaacagctgattttacttctagaattgtatagtcccagagatgtttatgattacctgcgtcctattgctctgaatctgtgtgcagacaaggtctcttcagtccgttggatttcctacaagttggtcagtgaaatggtgaagaaactccacacagcaacacccccaacatttggagtagacctcatcaatgagctggtggagaatttcggcaggtgtccgagatggtctggtcggcaagcgttcgtctttgtgtgccagactgtcattgaagacgactgcctccccatggacgagtttgctgtgcacctgatgccacatttgctgaccttggcaaatgatagggttccaaatgtcagagtgctgcttgcaaaaacactgcgccagactctactagagaaagagtacttcctggcctctgccagctgtcatcaggaggctgtggagcagaccatcatggcccttcagatggaccgagacagtgacgtcaagtacttcgcaagcattcacccgtccagcaccaaagcctctgaagacgcaatgagtacggcttcctcgacgtactgaacccggaagcgtggtgtcctcctgcccccttctaccagagccaggctcgacttgcccggcaccagtgtgggacagctgtggggggaccctcctcctgccatctcgttcccaggtgcaagtggcctactcccagtaccagtggttttaagagtcaagagaaagtacagtaaacactattatcttatcttgacttaagggaaagtaatttctcagaggattataatgtcaccaaagccttaacttgttacttcatcttcctgactgaatgacttgaattggcagagcggtttcccttgggcaaggatgaggttcccagagacctgcattgctttctcctggctttgtttaatggctgataagagatactcgaggccagaaggtggatgcaccagacgggaaagaaagaccttcagtattagcctaagcattcctcacaggtgtgagcctgcccggctccttggctgccttgcccagccctaagtgtgaatagttcttggcatatgtaaatgacaaaggagatttttttctctcctaagggcttgatgttaacactaaatagaatctgattttgacccctattgcagcacattgctgtatatttacagaatctttacagaatctctcctgattgtttttcatgctggtcatgacctgaaggaaatttcttagcacaaatattgtgtcaggtgttttaacttgatcatggtcagctctgaggtgcaaccttttcgtcccacgctgcacagacccgtgaccactctggggcctgcagccttaatcatgaggttagaactgttgtggtaaaagttccaaataaaattaataggacctataaagagatgccacccactttgttttctaaatgtctacaaataaatggaatatgtgacctgtattacttagcataaaaaaaaaaaaaa

SEQ ID NO: 947 - DNA, 2514 bp, Cricetulus griseus
aatgagagggttcgtatttgtccccacgtgcgcatggtgacagttcccccacgccactactgcatagtggcaaaccctgtatcccgggatgcccacgagcctggtgttatttgacaccacagggcaagttcggcttcgacatgctgaccaggagatccgactggcccaggaccccttccccctgtacccaggggaagtgctggaaaaggacatcaccccgctgcaggtggttcttcccaacactgccctgcatctcaaggccttgctagactttaaggatgagaatggagacacgatcagtggcgaggggatgagtggctgtttgagggacctggcacctacataccccagaaggaagtggaggtcgtggagatcattcaggccacagtcatcagacagaaccaggcactgcggctaagggcccgaaaggagtgctttgacagggatggcaaacagagggtgacaggtgaggagtggctggtccgatccgtgggtgcttacctcccggctgtgttcgaagaggtgctggatctggtggacgctgtgattcttacagaaaagacagccttgcacctccgggctcggcagaacttcaaggaccttcgaggagtggcccaccgcactggggaggaatggttagtgactgtccaggacacagaagcccatgtgccagatgtccacgaggaggtgctgggtgtggtacccatcaccactctgggacctcgacattactgtgtcatccttgacccaatgggaccagatggcaagaaccagctgggacaaaagcgtgttgtcaagggagagaagtcctttttcctccagccaggggagaggctggagagaggcatccaggatgtatatgtcctgtcagagcagcagggtctgctgctgagggcactgcagcccctggaggagggcgaaggccaggagaaggtctcccaccaggctggagaccgctggctcatccgtggacccctggagtatgttccatctgcaaaagtggaggtggtggaggagcgtcaggccatccctctggaccaaaatgaaggcatctatgtgcaggatgtcaagaccgggaaggtgcgggctgtgattggaagcacctacatgctgacccaggatgaggtcctatgggaaaaggagctgccccctggggtggaggagctgctgaacttggggcatgaccccctggcagacagaggccagaaggccacagccaagacccttcaaccctcggctccaaggaacaagacccgggtagtcagctaccgtgtcccacacaatgcagcagttcaggtgtatgactacagagccaagagagcccgcgtggtctttggccctgagctagtgtcactggatcctgaggagcagttcacagtattgtccctttctgctgggcggcccaagcgtccacatgctcgccgtgcactctgcttgctgctggggcctgatttctttactgatgtcattaccattgaaactgcagaccatgccaggctgcagctgcaacttgcctacaactggcactttgagctgaagaaccggaatgaccctgaagagacagcgaagcttttctccgtgcctgacttcgtgggtgatgcatgcaaggccattgcatcccgagtccgaggggctgtagcttctgtcacctttgatgatttccataagaactcagctcgtatcattcgtatggctgtttttggctttgagacatctgcagacacaggtcctgatggcacacttctgcccagggctcgtgaccgggccacctttccccaaaatgggctggtggtcagcagtgtggatgtgcagtcagtggagcctgtggaccagaggacccgggacgcccttcagcgcagtgtccagctagccattgaaattaccaccaactcccaggaggcagcagccaagcatgaggctcagagactagagcaggaagcccgtggccggcttgagaggcagaagatcttggaccagtcagaagctgagaaagcccgcaaggaactcttggagcttgaggctatgagcatggctgtggaaagcactggaaatgccaaggcagaggctgagtcccgtgcagaggccgcacggattgaaggagaaggctctgtgctgcaggccaagctcaaggcagaggcgttagccattgagacggaggcagagctggaacgagtaaagaaagtacgagagctggaactggtctatgcccgagcccagctgcagctggaagtgagcaaggcacagcagctagctgacgtggaggcgaagaagttcaaggagatgacagaggctttgggtcctggcaccatcagggacctggctgtggctgggccagagatgcaggtgaaactccttcagtccctgggcctgaagtccactctcatcacagacggctcttctcccatcaacctcttcaacacagcctttgggctgctggggctggggcctgatggtcagccaccggcacaaaagtaaggtggctggcccagcccggggaaggctggcctttgccag

SEQ ID NO: 948 - DNA, 2512 bp, Cricetulus griseus
aataagctcataacgctcatgggtcagaagacatctcttactcaagaaacagagctgttggaatctttacttcaggaggtagagcatcagttgcggtcgtgcagtaagagtgagctgatatctaagagctcagagatcctaatgatgtttcagcaagttcaccgaaaacccatggcttcctttgttaccacacctgttccaccagactttaccagtgaattggtaccatcttatgattcagctacttttgttttagagaacttcagcactttgcgccagagagcagatcctgtttatagcccgcctcttcaagtttcaggactttgctggaggttaaaagtttacccagatggaaatggagttgacgaggctattacttatctgtatttctggaactatcagctggcttgttatattcaacaaataaacaatcttaaagagagactgactattgagctgtcccgatctcagaaatcaagagatttgtcaccaccagataatcaccttagcccccaaaatgatgacactcctgagacacgaacgaagaaggctgggtcatgctctgacatgcttctggaaggtggtcctgcttcagcttctgtaagagaggccaaggaagatgaagatgaagaggagaagattcacaatgaagactatcatcatgagctctcagatggagacctggatctggatcttgctggggaagatgaagtgaatcacctagatggcagcagctcctctgcgagttccacagcaacaagcaacacagaagaaaatgatattgatgaagagaccatgtctggagaaaatgatgtagagtataacaacatggaattggaagagggggagctcatggaagatgcagctgctacagggtctccaggtagttgccacagctatgtgggtgccggtagcagaatgtcaagaagagggcatttatgctctgccgctaccagtagcttattagatattgatcctttaatcttaatacatttattggatcttaaggaccggagcagtatggaaaatctgtggggtttacagcctcgtccatctacttcgcttttgcagcccacagtgtcatattcccgaaaagagaaagaccaacggaagcagcaggccatgtggcgagtgccctctgacttaaagatgctgaaaagactcaaaactcaaatggctgaagttcgctgtatgaagactgatgtgaggaccacactgtctgatatgaaaggcactggtgttgcttctggagacatacagacaagccttttttgtgctgaccaggcagctctggcaccctgtgggcccgaaaactctggtagattacaggatttgggaatggagcttctagcaaagtcatcggtcgctggctgttacatacgaaaccccacaaataagaagaattcacccaagtcagctcgggccatagcagggagtctgtcactccgaagagctatggactctggagaaactatccgttcaaagggggactgccagactttgtctgaaggctccccgggaagctctcagtctgggagcagacacagctctccccgagccctgacacatggcgtcattggtgatattctgcccaagagtgaagaccgacaatgcaaagctttggattctgatgctatggtggttgcagttttcaatggcttgcctactgttgagaaaagaaggaaaatgatccccttgggggctaatgcaaaaggaggtcgcctggaaggaatgcagatggcggatttggaaagtcattctgaagctggggagttacagcccacattacctgaaggagcatcagctgccccagaggaaggaatgagtagcgacagtgacattgagtgtgacaccgagaacgaggagcaggaggagcacaccagcatgggctcgttcaacgatccgttcctggctcagcccccagatgaagattcacattccagttttcctgatggtgaacaaatcgacgctgaaaatctccacttcagtactgatgaaggcagtggaaggtaattgccagacaggagaaccaagttacaagctacctgggccctgaaatattttggaagttggtgctcaaaattatcagcagtcagataatcagatttagtctcatttgttcattatctctacctgaaatagtacctttgaaactgttagaaggaacacaattctagtacaaaaacaataatagtacatgggaaaagatttagcagggggaaagttccttctgatgtaatgaactaacagtgtagtgctcaattaatttagcaaattagcacattaacaaaggcagcttgtctgcagtatggagagccagctaagtggcagaaagcacgcagaggcagtgtgcgactctgtgacttgtttagcatcgttgctctcctgtctttggctcaacatagggtttagatggccatatactctaagtttttaattagtttgtaagtttcattggggcctgtgtaatagtgaacaaaaaaatagacttatgaacagattctgctcagtg

SEQ ID NO: 949 - DNA, 2511 bp, Cricetulus griseus
  modified_base (341)..(341): a, c, t, g, unknown or other
ccacagcccacgcactgcccggcacgcacccgcagtccggaagttctccccagaccttaagttgcttaaggatgtaaagattagtgtgagctttactgagagctgtaggagtaaggacaggaaggtgctgtacacaggagtagaacgcagcactcgggctgaatgtagcctgctccttagtcctgtcagtggggactgcatgcttgtccctttggcgggagtgttggtaatggggtaggcctagggggtgaaagtgcagataagaaggatgaggaaaatgagctggatcaggaaaagagagtggagtatgcagtgctgatgagttagaagattttactganaatttggagctagatgaagaaggagcaaggcgggttcacggctaaagcaatcgttcaaaaggagacagagtggatgaagaggccttccaagattaaaacagtgctcaagagtcgaggccgtccacctacagagccattgcctgatggatggatcatgacttttcataactctggagtccctgtatacctgcatagagagtctcgagtggtcacctggtccagaccctatttcttgggaacaggaagcatacggaaacatgatcctcctctaagcagtatcccctgtctgcattataagaaaatgaaggacaatgaggaacgggagcaaaactgtgatctcacacccagtggggaggtgtcacctctcaagcccctgggtcgatctgcagagttggatttccctttggaagagcctgactccatgggtggagactcagggtccctggatgagaaggacccactggggggtgaggcagcccctggagccctgggacaagtgaaggctaaggttgaggtttgcaaagatgaatcagttgatctggaggaatttcgtacctacctggagaagcgttttgattttgagcaagtaactgtgaaaaaattcaggacttgggctgagcggcgtcagtttaaccgtgagatgaagcggaagcaggcagagtcagagaggcccatcctgccagccaaccagaagctcatcactttatctgtgcaagatgcacctacaaagaaagaatttgtcatcaatcccaatgggaagtctgaggtctgcatcctgcacgaatacatgcagcgtgtcctcaaggtccgccctgtttataatttctttgaatgtgagaatccaagtgagccttttggtgcctcggtgaccattgatggtgtgacttacggatctggaactgcaagcagcaaaaaacttgcgaagaataaagctgcccgagccacactggaaattctcatccctgactttgttaaacagacctctgaggagaaacccaaagacagtgaggaactggagtattttaaccacatcagtattgaggattcacgagtctacgagctgaccagcaaggccgggctgttgtctccatatcagatcctccatgagtgccttaaaagaaaccatggaatgggtgacacatccatcaagtttgaagtggttcctgggaaaaaccagaagagtgaatatgtcatggcatgcggcaaacacacagtgcgcgggtggtgtaagaataaacgagttgggaaacaattagcctctcagaaaatccttcagctgctgcatccacatgtcaagaactggggatccttactgcgcatgtatggccgtgagagcagcaaaatggtgaagcaggagacctctgacaagagtgtgatagagctacagcaatatgccaagaagaacaggcccaaccttcacatcctgagcaagctgcaagaggagatgaagaggctggctgcagagcgggaggagactcggaagaagcccaagatgtcaattgtagcatctgcccagcctggtggtgagcccttgtgcacagtggatgtatgaggtaggcggcatgggccaacagtgctacccaggagaccaccagccacacatcactgcagcaccaggcctccaacctaagttcctttcctgcggcagtgtctgggctctgctctgacacgtggggacagctgtgaccacacagcacacgtgcaaagaagcagttcttctggaagatgctgtcagtgtgacttgatatatttaaggatcagctataagtaactgcacaagtggaagctgatagacagctgtagatcttgcttgtatgtatctgctgccgactgtttttatgaaggttttcatgaattttagtatactatatgcactgacaagaagtgatgcttggttgatagatgagatgaccaggttttatagctttggctggcctatgatgccaggtagcccctttgcccatggttccttctggtggagccagtgagacctggtcagaaggtgcaggtatcctgtcctgtagttattacctgctttgtctgtttctcattttcctctgaaaaggttataacagaaaggattatttcaggctattttggcttaaaataaaacaaaattttagcaccagaactacttttcagagattgcagtgaaggtactgaactgtta

SEQ ID NO: 950 - DNA, 2511 bp, Cricetulus griseus
accatacagtccttttacccttcgtggtgaccacagatctccagcctctgcccagaagtcattcagcaggtccacccatgttaaagttgtccatcatgtcagaagaggaactcacacatatatttggcgacttggacgcttacatacccctgcatgaagatttgttggcaagaataggcgaagcaaccaagcctgatgggacagtggaacagatcggtcacattctcgtgaactggttaccacgcctgaatgcctacaagggctactgtagtaaccagctggcagccaaggctcttctggatcagaagaaacaagacccaagagtccaagacttccttcagcgctgtctggagtctcccttcagtcgaaaactagatctttggagtttcctagatatccctcgtagtcgcctcgtcaaataccctttactgttaaaagaaatccttagacacactcaaaaagaccaccctgatgtccagctgctggaggaagcagtattgataattcaaggagttctttctgatataaacttgaagaaaggtgaatccgagtgtcagtattacatcgacaagctggagtacctggacgagaagcagaaggaccccaggatcgaagcgagcaaggtgctcctgtgccatggggagctgaagaataaaagtggccataaactgtatattttcctgtttcaagacatcttggttttgactcggcctgtcacacgaaatgagcgtcactcctaccaggtttaccggcaaccaatcccagtgcaggagctggtgctggaagacctacaggatggggatgtgcgcatgggtggttccttccgaggggcttttggcaactcagacaaagctaaaaatatctttagagtccgcttccaagacccctctccaggccagtcccacacactgcaagccaatgacgtgttccataagcagcagtggttcaactgtattcgtactgccattgcccctttccagcgggctgccagccccctagagctgcagggcttaccagagctccacgaagagtgtgagaacaaccccagtgctgggaatctcccagcccagcgaaggtcatccatggctcccgggtttacacagggagatgatgaaagtgcactggaatgtggctccagtgtacagacagcagaagacaccaagagcatgaaggcacatcgagtgcagcctggcttacgaagagcaagggacaaagcccagtcaggtggcaacaggaaagagactctggtgtaaatgtgttctctggtggaaggctgtttatttataaatttgtacagtttttcttgtaatgggagcatcctagggttactctgtaccagctgtaatgtgttcatggtttgggtttctctctctctctttctcttcctcctccctcccccctgaaattctatcagtgttccttgttaaacctcaaatgatgaatgaaattttaataatgacatctacaatctacatggaagatttttgagtttgaaatacttcaatttacagtgaagcaccacttcattggaaaacaaccataaaactcagtgtgttttccatttttatcaactggaatgccttagatcagtttttcactgcacattcctcatttttcattcatttattctgccaactatttaattttttattgtaaagtagtttttagaattttcttttattttttacgttgatgccttttttaaattggcatgtccttaaagtttttcttcctgattttgtgtgtgtgtgtgtgtgtgtgtgtgtgtgtgtgtgtatgtgtgtgttaatcgtattagttttactaagtgaaaccaagccatactgttgagccaattaagaaaactgcagtttttacagtgtatcatgtcagggtagtgaagacccatgagatgacttagtatattctagactactggaagaaaccacatgaaggactttggtgaaagtttttgtgttgtctagaaagcaagagagaaggcaggagactggaatagtgaagagaagggaagggaaaagggagtttgtctaaggtaaaaatgtctggttgatccagaggagtggagacaggaaagcctgacttgagggtatgtaggaagttgtagaaggccagagggggtgggaactatatttgctttggtttctcatgcctgcaaatactgaatttgaaaagaaaccgtaaaatgtgttggaaatttgaacatattaggttaattctgattggttttcttcattaaaaaaaataagctggtgattcttcactccaaaatgtttgtgttagaaatggggtcatgctctttaaaggagggaggaggactgagatcccgtgtcagcccagatttatactggccatcagttcaagtcattgttacccatcgtgtgaaatatatctccagtgaaaatgaaaattggaaaaggctgtaaatagatcaatcaagtgatttctttgtataaatgaattatacaattaaaaaaaagcacacacataataacccaaaaaaaaaaaaaaaaa

SEQ ID NO: 951 - DNA, 2510 bp, Cricetulus griseus
caggagtacaaaaccttagcagaagtctcatgcttgagaatacagaatgtcacagtatctatgaagaatctcctgaacgaagtgatacacctgttgaggcccagcagcctgtcagcagtgaacccacatgccagggttcaggctttgaaaaagagcctgcaaatggagcacagaatccagtaccggctaaacaagaaaaaaatgagcttcgagattccactgaacaatttcaagaatattataggcaaagattacgctatcagcagcatttagaacagaaggagcaacagcgacagataataccagacagattgtacttgaaggaggggtgaaccaggaggatggtcctgatcagcagcagaatctcacggaacagttccttaacaggtctattcaaaagcttggagaattaaatattggaatggatagtcttggtaatgaggtaccagtactcaaccaacaatgcaccgggaacaaaaacaatggatcaaatagttcttcagtgactggttttagtacaccaccccaagattccagtcagaggttaatacacgatacttcaaatattcacacaagcacacctcgtaatcctggatcaacaaatcttatcccctttcttgaagaatcaccttgtggaagccagattcaaaaactctgagagtatgtgcctatcctgacaaaatcgatccaagtgcacacgacatgcctaagccgccagtggtacgatttaaaaagaaacaaacatcataagggattctatttattgtgtggcttggagtccttgtggacagttattagcaactggatcaaatgacaaatatgtgaaagtgcttcccttcaatgcagagacttgtaacgcaacaggaccagatctggaatttagcatgcatgatgggacaatccgagatttggcatttatggaaggcccggaaagtggtggagctattttaataagtgctggggcaggagattgtaacatttacacaacagattgtcaaagaggacagggccttcatgctttgagtggacacactgggcatattttagcactttatacttggagtggctggatgattgcatctggttcccaggataagactgttagattctgggatcttcgagtaccaagctgtgttcgtgtggttggcacaacattccatggaactggcagtgcagtggcatctgtggctgtggatcccagtggccgtctcttagccacaggtcaagaagactctagctgcatgctgtatgacattagaggaggcagaatggtccagagctaccaccctcattccagtgatgtgcgctctgttcgattctctcctggagctcactacttgctaacaggctcttacgatatgaagataaaggtgacagacttacaaggagacctcaccaagctagtctttccttctttatggtggtgggggaacgacaaggacaaagtgattcagtgcagatggcacacccacggacctttccttcctgtcgtcttctgcagacagaactgtgactctctggacttacagtggctagagtccaccccatgtaggtctatgcagtgaaagcacagagactcaaagactactgaattgtgaggactacaggcctgaagaatgcagaccaccccagacagactttagcacaaggaagccccttgttaccatgtcctctgaacagaaggtgttgggtggttttcagtcttccatgtgtgttcatgctgctgtgtagtctccttgccaaagtctgcagaagagctcttatgttggtgtgcacgccaagtcaaggtacaggatgtgttcatagtttattattaaatgcactcctcgggttttacccagataacagttttatacatacactgacacggagttaatagttaattaattgttacatacaatacagccaagttctccccagatgaaacataggtgttcagaaattactttggtcgtgtcggggtgtggttgctaatttgtcacattactttgttttgggctaaaaagtaactattttactttgaaacttgttggtttcaatttttgaatgcacaagatacacccctcctcaaaagatacactagaagaagcagcagcagctgcattacgtggaacaatatcgaacaatatcggatggtagggtatatttactgggtagcattttcctcttaaaaattaaagactttgccatggccctagcatggcttgaaaaactgtctgcatgataatttaaaatggaaaactgaaactttgcactccagaaacttatttggattttcttgcacagtttatttgtacagtactatagatcctaacattgtatgtatctttattttcatattcagtattttactttaagttattaaaataggctattttatttatttcaactgcagttgtattgacctgtctgttcactatatgtagcaagcattttaaatctatagtctacaagtgggaagggtaatagaagtgtaactgtgcttttatttcaataaagaccttttgaca

SEQ ID NO: 952 - DNA, 2510 bp, Cricetulus griseus
  modified_base (2489)..(2489): a, c, t, g, unknown or other
attatccttggggatgacatagatgatctccttgattcagcaccagaacaatgatggtatcatgccctccaccctgggcagaggatccctcccgacagccagtgtggctcctagcttgcctttcaggacaacatccctgcttggaaccttgcccattggtgcgaggtatgctcctccaccctcctttgcagagttgtatccacctctgacctcagccttggaagacttttgttcttctttaaattcattttcagtgactgaatccaaacgagatctgtccacctcaactgctagagagggaacaacgcttaacaacagtaattcctcccttttacttaaaaatgttgaagataaatcatggaaaaaatacgtccaagaccaacaaaaacaaattatgaaggaccatattatatatgtaaagatgttgctgcagaggatgagtgtcgatattctggccactgtacattcgcttattgtcaagaagagatagatgtgtggaccctggaaagaaaaggggcattcagtcgagaggctttctttggtggcaatggaaagatcagtcttactgtggtcaaacttctccaggagcatcttggagagtttacattcctttgtgagaaatgttttgatcataaacctagaatgataagtaaaagaaataaagataattccactgcttgttctcacccggttacaaagcatgaatttgaggacaataagtgccttgtccacattttgagagagaccacagtaaaatattcgaaaatacgttcttttcatagtcagtgtcagcttgatctatgtcgacatgaggtccgttatggctgcttaagggaagatgagtgcttctatgcccatagtcttattgaattgaaagtctggataatgcaaaatgaaagaggtatctcccatgatgttattgctcaagaatcccaacaatactggagaagtttggaagcaagcatgcctggagctcaggtacttggcaatcagataatgcctggattacttaatatggagataaagtttgtatgtgctcagtgtctgagaaatggccaagtcattgaaccagacaagaacaggaagtactgcagtgccaaagcacagcactcgtggaccaaagaacgtcgtgcaatgagagcgatgtcttttgaacgtaagaagtggatgaacatccgtcctctccccacaaagaaacaaatgcctttacagtttgatctatgcaaccatattgcttctggaaaaaaatgtcagtatgttggcaactgttcctttgctcatagtcccgaggaacgagaagtgtggacttacatgaaggataataaaatacatgatatagagcaattttatgaactctggctgaagaatcagaaaagtgaaaaaagtgatgatgtagccagtcatgctaacaaagaaaatgggaagcagatccacatgccaacagattatgctgaaattactgtggactttcactgctggatgtgtgggaagaactgtaacagtgagaagcaatggcaaggccatatctcctccgagaagcacaaagagaaggttttccacactgaggatgaccagtattgctggcagcaccgcttccccactgggaacttcagtatttgtgagaggtatatgaatgggtcctgtacagaagggagcagctgtaaatttgcacacggaagtgctgaacttcatgaatggaaagaaagaagaaaggccctagagatgaaactcaacaaagcacgaaaagatcacttaattgccccaaatgataatgactttggaaaatatagttttttgtttaaagatttaaactaacatgctggcttttatgtaacccaatcagagcactggccagaaaaattggaagtgttgaaaagcacgtagcagaggagcccgcagactttctgcttgattggcatctatcgttcctcctgagcagcaacccacagtagataggagaatggctgtttgacaggccaggccaagctctcacggagccactggcatcagatggcaaagtaacttggtgccggttgctgtctgttggacagacttttggatgaggtgtgttgggaagagtataaggttaatgtacactgggatcagaatatataatggatgaaattctttatgtgttttagtggaacgaatttatttaataaagtttgctacttatcttgtatgtaggttgctaaaaaggattttaactcagatttttaagccaaataaccatttaacactagtatctgttaaatggggtattttctgtatttgtatgtttcactatgataagggaactgatgatcatgtacatcaaaaatattttgaaaataatcaattgacacaaattttatttcttggtcttttgctgtttaaatgatgatttttgaaagattaaacttgtattgttggtattgtgtagtgtatggaccgatattgcctgtaataaaatattttatatagagatgaaaaaaaaaaaaaaaaaaaanaaaaaaaaaaaaaaaaaaaaa

SEQ ID NO: 953 - DNA, 2510 bp, Cricetulus griseus
aatgctacgtatgtgcagcctagaaggaaacagagagatgagcagctcttgacaaatgttctggaaactctccgtggtgatggaaatgttctaatagcagtggacacagccggcagggttctggagcttgctcaacttcttgatcagatttggagaactaaagatgcaggccttggtgtttattcactggccctcctgaataacgtcagctataacgtggtggagtttttctaagtcacaggtagaatggatgagtgataaattgatgagatgttttgaagacaagagaaataatccatttcagtttcgccatctctctctgtgccatggtctttctgacttggctcgagttccaagccccaaagttgtacttgccagccagcctgacctggagtgtggattctcaagggacctctttattcagtggtgccaggatcctaaaaactcaatcattttaacttatagaacaactcctgggactttagctcgtttcttaattgataatccttctgagaaagttacagaaatagagctgaggaaacgcgtgaagcttgaagggaaagaactcgaagaatatgtggaaaaagagaaactaaagaaagaagctgctaagaaacttgagcagtcgaaagaggcggatatcgactccagtgatgagagtgatgtggaggaagatatcgaccagccttcagctcataagacaaagcatgacctgatgatgaaaggcgaaggcagtcgcaaaggcagcttcttcaaacaggccaaaaaatcctaccctatgtttcctgccccagaagaaagaattaaatgggatgaatatggcgagatcatcaaaccagaagatttcttagtgccagaacttcaggccactgaagaagaaaaaaacaaattagaatcgggtttgacaaatggagatgagcccatggatcaggacctgtctgatgttcccaccaagtgtgtttctgcaacagagtctattgagataaaagccagggttacttacatagactatgaaggacgttcggacggagactccattaaaaagatcatcaatcagatgaaaccacggcagttgatcattgtccatggcccaccagaggccagtcaggacctggccgagtgttgccgtgcatttggtgggaaagatattaaagtgtacatgccaaagctacacgaaacagttgatgccacaagcgaaacgcatatctaccaggtacgattaaaggactcgcttgtcagctcccttcagttttgtaaagctaaagatgccgagctggcttggatagatggtgtcctagacatgagagtttccaaagtggacacaggagttattttagaagaaggagagctcaaggatgatggagaagactctgaaatgcaagtggatggtccttcagattccagtgccatagcccagcagaaggccatgaaaagtctgtttggagatgatgacaaggaattgggtgaagagagtgagatcatccccacactggagcctttgccacctcatgaggttcctggacaccagtcagtttttatgaatgaaccaagactgtctgacttcaagcaagttcttttgcgggaggggattcaagcggaatttgtagggggagtacttgtctgcaacaatcaagtagcagtccgcagaacagaaactggacgcatcggattagaaggctgcctttgtcaagacttttataggatacgagaccttttatatgaacagtatgccattgtgtaaaggacatgatgtcaggaagtgtctgcttgacctttctcaggaagaaagggttctcatctgaggctaagctttcgctgtcttgttttgtaacatacaaaaagagtctgcaagaaaacgtgagcatgtattagattttgaaaaataagaatcaagggcctggggtgtagctcagtggtagagctcttgcctagcatgtgcaaggcccgggatttaattcccagtactgaatacagaaagaaaaaaaaaatttccaacctcatcatttgaataaatgtcatctaaagaaagccttgaagctgagtgtggcacgtacgcctggaatcccagcagcactcgggaggctggcgtaggaggattgtgagttagaggccagcctgagctacctacatagtgagtgagaccctgtctcaaaaaccagcataaagaaagcctagtgtcttaccagttctgcagatattttgtttagacacaactattagccaagcagctgtatttgaaactgtccaatgctctctttgtaaaaaaacatgttgaccctcacatttttataaggtaacagtataatttaactaaagggtgtaaatgtgttcctttcttagcctgttttctaaggttatataaacagtggttggattttatgcttattactacaaaaatagtactgaactggggtaattgccacccttgatacagttcaaagaatcctgcttaagagtaaaaactgaaaataatgcaattccattgacttgaacaatgaaccatgttgtcc

SEQ ID NO: 954 - DNA, 2508 bp, Cricetulus griseus
gcacgccctccctcgtctcgcgccgccgcggtcgtccccgcgtacaccagcagcgccgtcacttcggcagagatgctgcgggcctgtcagttatccggggtgaccgtcgcggcccagagttgtctgtgtgggaagctcgtcctccgcccactacgaccatgccgtagatactccacttcaagcagctctgggttgactgctggtaaaattgctggagctggccttttgttcattggtggaggggttggtggcactatcctatatgccaaatgggattcccatttccgggaaagtgtagagaaaaccataccttactcagacaagctctttgagatggttcttggctctgcaccttatactgttcctgtgccaaagaagccgattcagtctggtccactaaaaatctccagcgtatcagaagtgatgaaagactccagactgcccgtggcagaggaacagaagggagacactccagcttcagcagcatctacaggggaagctcaaattatttctgcagcaggtgatacactttcctctagccaagagtttagaagatgctctgagccagactgcatctgtcactctgcaggctattacagcccagaatgctgcagttcaggctgtgaatgcacactccaacatactgaaaacagccatggacaattctgagatcgaaggtgagaagaagtcggcccagtggcgcacagtggagggtgcattgaaggaaagaagaaaggcagttgatgaagctgctgatgcccttctcaaagccaaagaagagttagagaagatgaaaagtgtaattgaagatgcaaagaaaagagaggttgctgggaccaaacctcgtataactgctgcagaggggaagcttcacaacatgatagttgatctggataatgtggtcaaaaaggtccaggctgctcagtcagaggctaaggtggtgtctcagtatcatgaacttgtggtccaagcaagggatgactttagaaaggagctggacagtatcactccagacatcactcctggatggaaagggatgagtatttctgacctagctgacaagctctctactgatgacctgaactctctgattgctcatgcccatcgtcgcattgatcagctcaacagagagctagcacaacagaaagccacagagaaacggcacatccaggtagccttggaaaggcaaaagctagaagaaaagcgggcctttgactctgcagtggcaaaagcattggagcgccacagaagtgaaatacaggctgagcaggacagaaaggtagaggaggtcagagatgccatggagaatgaaatgaggacccagcttcgacgacaggcagctgcccacactgatcatttacgagatgtcctcaaggtgcaagaacaggaactgaagtatgaatttgagcagggcctatctgagaaactgtctgagcaagaattagagtttcgtcgtcgtagtcaagaacaagttgacaactttactctggacataaacacagcctatgccaggttgagaggaatcgagcaggctgttcagagtcatgcagttgctgaagaagcagccagaaaagcccaccagctctggctttcagtggaggcattaaagtatagcatgaagacttcatctgccgaaacacctaccatcccattggggagtgcagttgaggccatcagagtcaactgttctgataatgaatttacgcaggctttaactgcagccattccttcagaatccctgtcccggggggtatacagtgaagagaccctaagagcccgtttctatgctgttcaaaaactagcccaaagggtagcaatgattgacgaaaccagaaatagcctgtaccaatacttcctttcatacttgcagtccttactcctgttccagcctaagcaactgaagccaccagcagagctctaccctgaggatataaacacatttaaattgctctcatatgcctcctattgtattgagcatggtgacctggagctggcagcaaagtttgtcaatcagctaaagggggagtccagaagagtggcacaggactggctgaaggaggcccggatgaccctagaaactaagcagatagtggagatcctgactgcatacgccagcgctgtaggaataggaaccactcaagtgcagcaagagtaaggcctaggaagagttgtgtaatgtcatatttcatatcaaagaaaatcagcattggtatctttcagggtttgcaacaagggtcccagaattgtctagaagtgagcaggttccaagtcctgtgcaagatgttaacacctgttgcatttaccttccttacactgctatcatgccaatgaactccaggaggctttatttgcaacttgtgtaacacttcctgtttttcaggttttactgatcaggcttgtgagccactcaaaataatgtctgtgatccctactattgattctgcccttggagcaaactgaataaagcaacacaatgaaaactgagtactctaaaaaaaaaaaaaaaaa

SEQ ID NO: 955 - DNA, 2507 bp, Cricetulus griseus
  modified_base (2036)..(2036): a, c, t, g, unknown or other
  modified_base (2054)..(2054): a, c, t, g, unknown or other
actcaagataacatcacggtcaggtgggacctgggccttaacaagaagagaatcggccttcttcactttagcccaaccaagatgcagttccgttccatcctcattgatgaaagcacccaggccactgagcctgagtgcatggtgcctgtggtccttggggccaagcagctgatccttgtgggtgaccactgtcagctgggccccgtggtgatgtgcaagaaggcagccaaggccggactgtcgcagtcgctctttgagcgcctggtggtgctggcatccggcccattcgcctgcaggtgcagtaccgcatgccaccccgcgctcagccgccttcccgtccaacatcttctacgagggctcattgcagaatggcgtcactgcagcggatcgtgtacaaggaagggtctttgatttccagtggccacacctgacagccatcgttcttctacgtgacacagggccaggaggagatcgccagctcgggcacgtcctacctcaacaggaccgaggcagccaatgtggagaagataactacaaagctgctgaaggcaggtgccaagccggaccagattggcatcatcacaccctacgagggccagcgctcctacctggtgcaatatatgcagttcagcggctccctgcacaccaagctctaccaggaagtggagattgccagtgtggacgccttccagggacgggagaaggacttcatcatcctgtcctgcgtgcgcgccaatgagcaccagggcatcgggttcctgaacgacccccgtcgtctcaatgtggccctcaccagagcaaggtatggcgtgatcattgtgggtaacccaaaggcgctgtcaaagcagccgctgtggaaccacctgctgagctactacaaggagcagaaggcactggtggaggggccgctcaacaacctgcgtgagagcctcatgcagttcagcaagcctcgaaagctcgtcaacaccgtcaacccgggggcccgcttcatgactacagccatgtatgatgcccgagaggccatcatccctggatctgtctatgaccgcagcagccagggccggccatcaaacatgtacttccagacccacgaccagattggcatgatcagcgcaggtcccagccatgtggctgccatgaacatccccattcccttcaacttggtcatgcctcccatgccgccgcctggatactttggacaggccaatgggccagctgctggccggggtaccccaaaaagcaagactggccgtggaggacgccagaagaaccgcttcgggcttcctgggcccagccagaccacccttcccaacagccaggccagccaggatgtggcctcacagcccttttcccagggcgccctcacacagggctatgtgtccatgagccaaccctcccagatgagccagcccggcctctcccagccagaactgtcccaggacagctacctcggtgatgagtttaaatcacagattgatgtggcactctcccaagactccacataccagggggagcgggcataccagcatggcggggtcaccgggctgtcccagtactagaaggtggcggcggaacagctaagctatgtggcttagtctatcagcatcttattctgggtaataaaaaataaaaataaatggatacctgttttccactgctaaaactgaagcaccactgtgtgagcagccgaggagaggagaggagaggagagaggagcgagagcgagctgagagcggccagggaggacgacggagaggagcggagcgccgaggagcgggcgccccctgcgggcggtgagaggagagaggcccgcaccgctgcgaggccggcccggcgccgtgcccgccagagggagaggcctcgccaggaccggcccgctgttctttttctttgtttctcgtgattgaggggctacgttttagcaggacgaactaagcgtttctgtgcccgagcgggcggccaggagcgtcatcgcgcacgtcccagcgctaaggggtttcatttaaagaaaacacggtgtttggggtttttttttnttttttttcttttttttntttttttttttttgtttgtttgtttagttatttatttatttttcagagattctttcaaaggagtatgggaagtactttgatcagtttgtctctaagaccttagtggtggacctgggagatacaagaagcttccagagaggcaacgcagagaagcctgagccccgcagcctgggatcaccgtctgcaccatggccagaggatttgttttgagtttgagcttcagaagctgcaggcgaactcctgagcgtgaccaatgcgtgttggcccgcggggtcttcccatcgtgggtggaggcctgattgctgggcgctctgccccaacctcccgcagtggcccccgacccctacccaggcacacctgcgtcaacgcaatggaacttaatttttggtcaaatttgttttaagctttttgtcaccaataaaacatgaacaaatagaaaaaaaaaaaaaaaaa

SEQ ID NO: 956 - DNA, 2506 bp, Cricetulus griseus
agggattcggcgggcgctgttcctggcttccaagcaggccacccttacccagaccctgcttatccagaatggtgctcgagaggactgcagggagatgaagatctacctcaggaatgagtcagaattccgagacaaactctcaccgattcacattgccctcaacttctccttggaccccaaagctcccatggacagccatggcctccggccagtcctacactaccagagcaagagtcggatagaggacaaggcccagatcttgctggactgcggtgaggacaacatctgtgtgcctgacctgcagctggatgtgtatggggagaagaaacatgtgtacctgggtgataagaactcattaaacctgacattccatgcccaaaatttgggtgagggtggcgcctatgaggctgagcttcgggtcacagcccctctggaggctgaatactcaggacttgtcagacaccagggaacttctccagcctgagctgtgactactttgctgtgaaccaagccggcagctggtgtgtgaccgtgggaaccccatgaaggcaggcaccagtatctggggtggccttcggttcactgttcctcatcttcaagacacaaagaaaacaatccagtttgacttccagatcctcagcaagaacctgaacaactcacaaagcaacgtggtctccttcccgctctccgtggaggctcaagcccaggtctcccttaatggtgtctccaagcctgaagctgtgctcttcccagtcagtgactggtatccccaagaccagcctcagaaggagggagacttgggccctgctgtccaccatgtctatgagctcatcaaccagggccccagctccatcagccagggtgtgctggagctcagctgtcctcaggctctggaaggccagcagcttctctatgtgaccagggtgacgggactcagcaactgcacctccaactacacccccaactcacagggcctggagttggatccggagagtttcccacaccacctgcagaaacgagaggctccaggcaggagttctacggcctcagggccacaggttctgaaatgccctgaagccaagtgtttcatgttgcgttgtgagtttgggccactgcaccgccaagagagccggagtctgcagctgcatttccgagtctgggccaagacctttctgcagcgggaacaccagccatttagcctgcagtgtgaggctgtatatgaagccctgaagatgccctaccaaatcctgcctcggcagctgccacaaaagaaacttcaggtggccacagccgtgcagtggaccaaggcagaaggcagcaatggtgtcccattgtggatcatcatcctagccatcctttttggcctcttactcctaggactgctcatctacgtcctctacaagcttggcttcttcaaacgctccctcccatacggcacagccatggaaaaagctcagctcaagcctccagccacctcagatgcctgagtcctcctgatcccagactcctgatcctgaagagccagtcccctacctgccaacagggagggaccaggcacttcctgaaggtgctgagggctggggagaagctgttctccctagcccagagacatacttgaagggccagagctgggggacaagaagctggggtccttcctgccccccatgcactgtgaaggaccctcgtttacacatgccctctcacggatgggggcctcaggtccagggacagaagccccagcctttcttcagccttcagcattttggagacttttatgaaagcaactcggagccgtaattagggaatacagtcatggttctctgagccgtgcatgccaccaggacttcctgtctggttccagcctgcaaagatgcatctttggcctttccagagatcgaaaggaagcctgcagctaagagcccaagacttggggagtgagccctggcagctccaatagcccccatcctggaaggtcaataaagaacactaatgatggatggtgctgcaggcccagctcaggacagttcccaaacaaaggccgatgctggcacagacccacgtcgaggggagtcagaatgaaaatggagccagacctagtctggggcctggggttgatctggagcccagtctcagattcaaagaacctatgctcacagacccaggatggcatttgggtcagctgcagactgggcctagggctcttttcatccctgacttaggatgagtcaggaattgcccaggaccctaaccaggccacagtagcaacagatctggaacctcagcctggccaaacacaggctcactcattccccagagaatggggagccccagacttgccagacctgggttctgcccaccagctgcactgatgctgccccctctcccaacccacccctcccctctgctccagaacccaccccaacttatttaaactctgttgcaagtgcaataaaccccacccactgtccccactgaaaaaaaaaaaaaaaaaaaaaaaaaaaaaaaa

SEQ ID NO: 957 - DNA, 2505 bp, Cricetulus griseus
acatcagcgaggaaggcatcaccaaatctaccctcaccaaggccgaacgccagctcaaggacaagtttgatgggcgacctaccaagccacctccgaacagctactcattgtactgtgcagagctcatggccaacatgaaggacgtgccgagcacagagcgcatggtgctatgtagccagcagtggaagctgctgtcccagaaggaaaaggacgcctaccacaagaagtgtgaccagaaaaagaaagattatgaggtagaactgctgcggttcctcgagagcttgcccgaggaggagcagcagcgggtcctgggcgaggaaaagatgttgaacatcaaataagaaacagaccaccagtccagcctccaagaagccttctcaggaaggtggcaagggcggctctgaaaagcccaagcggcctgtgtctgccatgttcatcttctcagaggagaagcgaaggcagctgcaggaggagcggcctgagctctcagagagcgagctgacccgcctgctggcccgcatgtggaacgacttgtcagagaagaagaaggctaaatataaggctcgggaggctgctctgaaagcacagtctgagaggaagccaggtggggagcgtgaagagcgaggcaagctgcctgagtcgcccaagagagctgaggaaatatggcagcagagtgtcattggagactatctggctcgcttcaagaatgaccgagtcaaagccttaaaagctatggagatgacttggaacaacatggagaagaaggagaagctgatgtggattaagaaggcagccgaagaccaaaaacgatatgagagagagttaagtgagatgcgggcccctccagctgctacgaactcttccaagaagatgaagttccagggggagcccaaaaaacctcccatgaacggttaccagaagttctcccaggagctgctgtccaatggggagctgaatcacctgccgctgaaggagcgcatggtagagattggcagccgctggcagcgcatctcccagagccagaaggagcactataagaagctggcggaggagcagcagaagcagtataaggtgcacttggacctctgggtcaagagcctgtctccccaggaccgtgcagcatacaaagaatacatctccaataaacgtaagaatatgactaagcttcgaggcccaaatcctaagtctagccgaaccaccctgcagtctaagtcggagtctgaggaggaggaggatgaggaagatgaggatgatgatgaagaggaagaggaggaagatgatgagaatggggactcctctgaggatggcggggactcttcagagtctagcagcgaagatgagagcgaagatggggatgagaatgaggacgacgatgacgacgacgatgacgatgaggatgacgatgaggatgaagacaatgagtctgagggcagcagctccagctcttcctcttcaggggactcctcagactctgactccaactgaggctcagcccccaccctgggcaggcagcagtgggggtaggaagactgcatgagcccaggctaggactctgcagtcttggagccatcagctccaggggttctccaggaacagcaaccatcagactgagccagcactggaccggcccaccccacccctcttctgcacttgcagttccggcatggacaatggaccggggagtttgggggtgggagtgtgtcctaaagagttcggtgaggcctccatccctgcagcctgcaccaaggtggattttcaggaagcctttcctttccagaggggcttgccgcctggactcccacaatgaactggagggagagaacggtgctgccttcaagaaagcaggcagtgtccatgtccctctcccctgcccctgcaggaaggagctgcctggacccattcatgggggaggggcagagtggttttttatatatgtgtatatatttttttttaagctctgagctgtcaacgagacgtttcctaaccgatctcggctgccgtctctgttgtcatttctgggaatggggagggcctggggtgggatggaatgagactaaaatgtgtgtgtgtgtgtgtgtgtgtgtgtgtgtgtgtggagaagaatgtggtgtgtgtgtgtgtgtgtgtgtgtgtgtgtgtgtgtgtgtgtggcacgcaccacacacacacacacacacacacactgtcctcttgtttgaatgccctggactattacacttgagtggaatgttttcacttagaaacaactttgaacgcaacatgtgttcctcccatttcaagtattggaaattgttacagacagggctctggggattgtcggtgctgtcagaggttgcccagggtacattttagcactgggacccctctccctccttttctaatatttaaggagttattttataggtctcaacaaccaccccacttgaatttgtaccatgggagcggcttagacatgactgacccagcttaaggcccactgtggtaggtttttgttttccctttttt

SEQ ID NO: 958 - DNA, 2505 bp, Cricetulus griseus
gggtttcaaagaactgtggccattgcagactcaaattacaactggttttatggtccagaaagccaattagtgttacctggataaaatttgtcatgcgtaatggcagtggaaactggctagctgaccaaatcagaaagaaccgtgtggttaagaaggtccaggcacaccatccaaagggcagcgctggtgcactctacacacagaatttctctggtatgatgccagcttgaaatcagttccacctccagattttggcaccccaacattgcattattttgaagactggggtgttgtgacttacggaagtgccctgcctgcagaaattaatagatcgttcctctccttcaagtcaggaaaacttgggggcgtgcgatttatgacatagtccacagaaacaaatataaagattggatcaaagggtggagaaattttaatgcaggacatgaacatcctgaccaaaactctttcactttcgcccccaatggcgtgcctttcattactgaggccctctatgggccgaagtacaccttcttcaacaacgtcctgatgttttctccagctgtgtctaagagttgcttttctccctgggagggtcaggtcacagaagattgttcatcaaaatggtcaaaatacaagcatgacctggcagccagctgtcaggggagagtagttgcagcagaggagaaagatggggttgttttcatccggggagaaggcgtaggagcttacaaccccctgctcaacctgaagaacattcagcgcaatctggtcctcctgcacccgcagcttctcctgcttgttgaccagatacacctgggagaggagagccccctggagacagctgcaagtttcttccacaatgtggatgtgccttttgaggagaccgtggtggatggggtccatggagctttcatccggcagcgagatggtctctataaaatgtactggatggatgatactggttatagtgaaaaagcaacctttgcctcagtgacatatcctcggggctatccctacaatgggacaaattatgtgaatgtcaccatgcacctgcgaagccccatcaccagggcagcttacctcttcatcgggccatctgtggatgtccagagctttagcatccatggagaccctcagcggttagatgttttcgtagctaccagtgaacatgcctatgcaacttacctgtggacaggtgagagcccagggcaatctgcctttgcacaggtgattgcagatcatcagaaaattctgtttgaccggagttcagccatcaagagcaccaccgtccccgaagtgaaagattatgctgctatcgtggagcacagtctgcagcattttaagccagtgttccagctgctggagaagcagatcctatctcgagtccagaacacagctagctttaggaagactgctgagcgcctgctgaggttttctgataagagacagacggaggaagccattgacaggatttttgccatatcccaacaacagcggcagcaacaaggcaagtcgaagaaaagccgaagggcaggtaagcgttacaagtttgtggatgccgtcccagatatttttgcacagattgaggtcaatgagaagaaggttcgacagaaagctcagattttggcacagaaagaactgcccatagatgaagatgaagaaatgaaagaccttttggattttgctgatgttacatacgaaaaacataaaaacgggggttccgtgaaaggtggcttcggacagatgcggatggtgacaacaagtcgcaacagagccccttcactgtcagcctcatacaccagactcttcttgattctgaacattgccatcttccttgtcatgctggcaatgcaactgacttatttccagagggctcagagcctccatggccaaaggtgtctttatgcagtcctcctagtagatagctgtgtcttactgtggttgtattcctcctgttctcaatcacaatgctaacaccaaagccatgagcctgaattgggttgtgttacattaatttaatgatagtagaaacttccatgtactgtattatggaacatactgagacacataattccatgcaatacaggcttttaaaatattaatgatgggaactgtaactgtaggacctggaagctgttaaaataacatgataaaatgatggcataacattgtaaagaaactgaaagtttttttatggaaaacatctacagatgaacatttctttgatgatattggtcaattcaggcatgggatttgtgactttatacattcattgtctttttgagaaataacataattacagataattatctttcccttctatataaaatgtttgcagacccaatagtaaagttttcaaaataaactattttgtatcttgaatctcaataccaaagaatatgggactaaagttttggtgtgatccttatgttttttattaggaagctttctttgaatttattttgctaaataaaccaatcataattaaaaaaaaaaaaaaaaaaa

SEQ ID NO: 959 - DNA, 2504 bp, Cricetulus griseus
ttatcctttccttctgtgcttcaagatgctgctattggcaaccacgcccctctccacttgttctgtgggaacttcttttactcctccagtgccaccagaagtaggcaccaagcacagtacttcagagacagagcgcctcctcttaggctgcggtcctctggatctgactgccttgtcccgacatgacttggaggagaacctgttgaactcccttgttgtgctggaagttctttcccaccagctacaagcctggaagaggcagctcactgtccctcgacgggaatctcaagacagtagcacacagactgaccgctctccttgtggggtcactaagacacctaaacatcttcaggacagcaaaagagattagacaggctctgctgcaagccaggagtgtcatgcaatcatggatgttagtctctagagaactgatatctttgcttcacctgtccctgacacacatgaatgaagacagaatgacagtgagtcaggagtctcggcgtggcagaaaccctggtttcctcctgttctcatgtactgaagaaactgagggcaaagctccagagcctcagaacagaaagggaggaggcaaagcacagagaggagatggcccttcacggcaaagatgcggcagaggcagtactggaggctttccgtgcacatgctagccagcgcatcagccaactggaacaggattttacatctatgcaagagttcagaggccttctacaggaagcccagacccaactgatagggcttcacacagagcaagaggagctggctcagcagacattgagtctgacttctgctttgcagcaggactggacatcaatccaacaggattgtggaacatgggcagctttgctgagtcggtctcgagaactcacagagaaactcacaaccaagagccggcaggcccttcaggaacgtgatgctgcaatcaaggaaaagaagcaggttttgaaggaacttgaacaagtgtctgcccatttagaggactgtaaaggccaaatagaacaactgaaatcggaaaatagtcgccttaccacagatctctgggctcagctgcagagtctaactagcacagacaaccaactaaaagaactgcagagccagcatacccattgtgtccaggacctggccatgaaggatgagttgttgggtcaacttacccagagcatcaaggaacaggctgcacaatggcaaaaggaggaaatggaactgaagcacacacaagcagagttgcagtgtcaacaggctgtgctggctaaggaggtacaggatttgaaggagaccttggagtttgcagaccaagagggtcaagttgctcatctggagctgggccagattgagtgtcagctgaaagccacactagaagtgctgcgggagcgcagcctgcaatgtgaggccctcaaggacactgtggagaacctgaaggctgagctgtccagcactgtagcaaagcatgagaaacaggctctggagaagacatatcagcattctcaagagctgaggctgctatccgagcagctgcagagtctcaccctcttcttacaggcaaaactaaaggagaacaaggctgaatcagagatcattctgcccagcacaggttgtgctccagcccaggaacaccttctgcctgatgatagcactgcttcagaaaaggccctgacagcagtggcagatgaagagccagaaccagttcccgtcgtgccattgcttggaagtgataagagtgctttcacccgagtagcatcaacgatttcctttcagcctacagagaccccaggactggagaagagctcatcagaaatgagtactatgttactagagcttcagagcctgtgttctctgctgcaggagtctaaagaagaagccattggggccctgcagagaaaaatctgtgaattgcagactagactgcaggaccaagaggaagagcatcaggaagccctgaaggcaaaggaggcagacatagagaagctgaaccaggccttgtgcttatgctataagaatgaaaaggagctccaggaagtgatacagaagcagaacgagaagatcttagggcagatagacaagagtggtgagctcataagtctcaaggaggaggtgacccagctcacacgtttactgcggcatgcagagacagagacgaaagtgctccaggaagctctggagggccagctagaccccagctgtcagctgatggctactaactggatccaggaaaaagtctctctctcacaggaggtggacaagctgagggccatgttcctggagatgaaaaacgagaaagcaaaactggtgatcaagtatcagagccataggaacattcttgaggagaaccttcggcgctctgacactgagttaaagaaactggatgacactatccagtatatctacgagactctgctgtctgtcccagaggtagtgaagagttgcaaagaactacaaagattgctggagtttctgagctaagaaactgaaaatattgcacctgcagt

SEQ ID NO: 960 - DNA, 2504 bp, Cricetulus griseus
agcgtggtgtagtatgggaagaaactattattttgctgccagataatgtccattatgtctttctttcggctactattccaaatgcacgacagtttgctgaatggatttgccacctacataaacagccctgtcatgtaatttatactgattatcgacctactccgttgcaacattacatatttccagcagggggagatggccttcaccttgtggtcgacgaaaatggtgacttcagagaagataattttaacactgcaatgcaagtgcttcgggatgcaggtgatttggccaaaggtgaccagaagggccggaaaggaggaacaaaaggtccatcaaatgtgttcaagattgtgaagatgattatggaaaggaattttcaacctgtgattattttcagttttagtaagaaagattgtgaagcatatgctcttcagatgactaaattagatttcaacacagatgaagaaaagaagatggttgaagaagtgttcagtaatgcaattgactgtttgtctgatgaagataaaaagctccctcaggttgagcacgtacttcctcttttgaaacgggggattggtattcaccatggtggtttacttcctattttgaaggaaactatagaaattctcttttctgaaggattgattaaaggccttatttgccacagagacttttgctatgggaattaatatgccagctagaactgttttatttacaaatgcccgtaaatttgatgggaaaaattttagatggatttcctctggtgagtacatccagatgtctggccgtgctggaaggaggggaatggatgacagaggaattgtaattcttatggtagatgaaaagatgagcccaacaattggaaaacaactacttaagggctcagctgatcccctgaatagtgctttccatctgacctataacatggttttgaacttactacgagtagaagaaattaatcccgagtacatgctggaaaaatccttctaccagtttcagcattatagagcaattccaggagtagtagagaaggtcaagaactcggaagagcagtataataaaatagtgatccccaatgaagaaaatgtagtcatctattacaagattagacagcagcttgccaagctagggaaaagagattgaggaatatattcataagccaaaatactgcttaccatttctacagccaggtcgcctagtaaaggtgaaaaatgaaggagatgattttggctggggagtagtagtgaatttctcaaaaaagtcaaatgttaagcctaattctggtgaactggatcctttgtatgtggtggaagtactcctgcgctgtagcaaagaaagcctgaaaaattctgctaccgaggcagcaaagccagcaaaaacctgatgagaaaggagagatgcaggtcgttccagttttagtgcatctcttatctgccatcagcactgttaggctttatattccaaaaagaccttcggcctgtggacaaccgacagagtgttttaaaatccatacaggaagttcagaagcgttttcctgatggcgttcctgatgatatgggcattcaagatcaaggactgaaaaaagtcattcagaaagtagaggcttttgagcatcgaatgtattcacatccacttcacaatgatccaaatttggaaactgtgtatacactttgtgaaaaaaaaagcacagattgcaatagatattaagtctgcaaagcgagaactgaagaaagcaaggactgtcctgcaaatggatgaactcaaatgtcgtaagcgtgttttaagaagattgggctttgctacatcttctgatgttatagagatgaaaggacgtgtggcttgtgaaataagcagtgctgatgagctccttctaacagagatgatgtttaatgggcttttcaatgacctttctgcagaacagggcaactgcactattaagttgttttgtgtttcaagagaattctagtgagatgcccaaattaacagaacagttagctggaccacttcgacaaatgcaggaatgtgctaaaaggattgcaaaagtttcagcagaagcaaaactagagattgatgaggaaacttacctaagttcgttcaagcctcacttgatggatgtggtgtatacctgggcaactggagccacatttgctcatatctgcaaaatgacagatgtgtttgaaggcagcataattcgttgtatgaggcgcctggaagaactgcttcgacagatgtgtcaagcagcaaaagccatcggaaacacagaactggagaacaaatttgctgaaggaatcaccaaaatcaagagggatattgtatttgctgccagcctctacttatagagttcaacagttgactacaaatgcttacaagtattcaagtggttctcccatctcaagagagttgtcccaagcattttattatatttaaatcagatatcattctaagaaggcatgtaacatacgcatttgtacatagcatctttcaattaaaaaaatgtacaggtg

SEQ ID NO: 961 - DNA, 2504 bp, Cricetulus griseus
ctcgctgcaggctgtgccggaggagatctaccgctacagtcgcagcctcgaggagctcttgctcgacgccaaccagctgcgcgagctacctaagcccttcttccggctattgaacttgcgaaagctgggcctcagtgacaacgagatccagaggttgcctcctgaagtagctaacttcatgcagctggtggagctggatgtgtcccgaaatgacattcctgagatacccgagagcataaagttctgtaaggctctggagattgcagacttcagtgggaaccccctgtccaggcttccggatggcttcacacagctgcgcagcctggctcacctggccctgaacgatgtttccctgcaggcactgcctggagatgtgggcaacctggccaacttgataaccctggaactccgggagaacctgcttaaatctctccctgcgtccctgtctttcctggtcaagctagaacagctggctgctcgctgtggccttcgggttggggaccggcatcctagcagtgaatgggcaggatgttcgggaggccacacatcaagaggcagtcagtgcccttctcaggccctgcctggagctgtgtcttgcttgtgcggagggacccaccacccccaggcatgcgggaactcttcagaaggctcctggggagaagctgggcatcagcatccgaggaggcgccaagggccacgcgggaaacccctgtgaccccacagatgagggcattttcatctccaaggtgagccctacaggggctgccggacgagatggacggctgcgtgtggggctacgactgctggaagtgaaccagcagagcctgctgggcctcacacatgctgaggcagttcagctactgcgcagtgtgggtgacaccctcactgtgcttgtctgtgatggcttcgataccagcaccaccacagccctggaggtgtctccaggtgtcattgccaacccatttgcagcaggccttggccaccggaacagcctggaaagcatttcatccattgatcgggaactgagtcccgaaggcccaggcaaggagagagagttgaccagtcaaactctaccctgggagcctgagtctacagagactctgggtcggagtctggagcccctgaagctggactaccgagtcctggctgctgtgcccagtgctggaagtttgcaaagaggaccatctgtgaccactggagggaagatgactgagaccccctgttcccctggcagcccgcaaacaaaaccgggggtgatccagccattggctcaggcctggccaaggggctccccgacccccaggggcagagatggtccctgttctccgccctcccctgatgaactgccagccaatgtgaagcaggcctatagggcctttgcagcggtgcccactgtgcatccccctgaggacagtgctgctcagcctacaacacctggtcccgcagcctccccagagcaactgtccttccgggaacggcaaaagtactttgagctggaggtccgggtgcctcaggcagagggtcccccaaagcgtgtgtccctggtaggtgctgatgacttacggaagatgcaggaggaggaagcccgcaagctgcagcagaagagggcacagatgcttcgagaagaggcagtaacctcagggcctgacacggggctcacctcagacagggagtccccagatgatcaacaggaggctgagcagccctgggctgtgccaggccatgcaggaggttccagcccatcttcacccccacccctgggaggcagtgcccctgtgaggacagctaaagctgagcgacgccatcaggagcggttgcgcatgcagagccctgagcttcctgccccagagcgagccctgtctcctgcagaacggcgggctctagaggcagagaagcgggcactgtggcgggcagccagaatgaagtctttagagcaggatgccctccgtgcacagatggtcctcagcaagtcccaggacggccgtggcaagcgaggacccctggagcggctgactgaggccccttcacctgcacccactccatcacccacaccattagaagacttgagcctccagagcagtccctcccctggacgcttgcgtcaccagattttgtggaagagcttaggagtttggaaccatctcccagtcctggcccacaggaggaagatggtgaagtggctctggtgcttcttggcaggccctcacctggcactgtgggccctgaagacatgacgctgtgcagtagccgtcgggccatgcggccaggacgccggggtctgggccctgtgccctcctagggccaggttcctccccagacttagggtggggagcctgctggcttcgtcacctcccttacccaagtcttttagccttggtgttagcattttaagagacccctcaggagttatggcttctgactaactgcccccgtagccgggatctcgtggcgagactgtaactagtgatgtttgtacaaccaaagactctattttgtggtttaag

SEQ ID NO: 962 - DNA, 2503 bp, Cricetulus griseus
agccaggcctctgacccctgcctcggacactgaggctgtcgatggcgaacgagggaccgcagccaaccctgagccagccaatcgatcagcccctgagcaggccaagaaactgacccgcttgggacatccctggcccatgccccggaagcgggcaggctccttcacaggtcccagtgactctgagacggccccggcccgcactggcttctctggccgcagtgctgagctctacagcaccagccgtaagcctacaatagccgaggcccgagctgctgccaggaagactgctgctcctgctgccaacacggggccccgccaacccttcagtagggcccgcccgggcagcgccagatactcttccagcacgcggcggaggcagcagggttcggattacacgtccacctctgaggaggagtatgggtcccaccacagctcccctaaacacacaacgcccccatgaagagctggtacagcgcattccagaggccagcctcaacttccagaaggtgccacctggctccatgaactctcacaacttggatcagaacatgaacgacagctgtgaggatgccctggccaataagacaaggcctcggaaccgtgaggaggtgatctttgataatctgatgctaaaccccgtgtcccagctgtcgcatgccattcgtgaaaacacagagcatcttgctgagaagatgaagatcctcttccagaatacaggccgcgggaggacctagaggccagaatcaacgctgagaatgaagtgcccatcctgaagacatccaacaaggaaatcagctccatcctgaaggaactgcgacgtgtgcagaagcagctggaagtcatcaatgccattgtggaccctagcgtgaacctcgacctgctcatgggaaacaggactcctgcagggtccattcagcaagggcttggaagccaggccagcagctcagagctcaacttctgcctcggtggacaccttgctgccagccctgcccctcaggagctttccacaacgggccaactgtgggccccctggcctcccagagcctgcctttcttcctgatgcggagaggttcctgatttaacctatgagacaggcaaggccagccttcttatgcgtgtgtcctgtgcctgcctgcatcccatggcccccctgcctggctgcaggcggttctctgtgaaaaccccatatgtgccataaccccatggatgggtgcctcctgggcccctcctcagccagcaccccaaccactccattgagctcaatggctacccccaccttcacaggcctcctagcctagcccctggggtatccactgccaagggccagcccttgaggcccaccttcacctcctccccgacactgttgcccctgtccctagctttaaaggaaagagtactttgcccctttgcaggtctaagcctttggtgccaacacaactgccaaacccgccgagtttgggtactgtcccagcaagtcctcctgaatggactcatgccaactcgggaccctgggcctccttacagtgggactgggggaagctgggtgggccagcggcccctttggttctggtattttaccagagtggcagaaaaagagatttggaagctcctggcattgtgatctaaaccgtgtcccctgccgtcctcgatgctgtgggcacagagtggtaactgcagcaggctcctgtggcctgatccttcgtaggggcctggcagggacaggcccactactgggtatgctttctcaggatttgttcggctggggcctgccaggggagcagattgtggctgccctgctgcggcccttgctgatgtttccagaggcactaagccaaagagcccgctggctggagtgggatgggggagcatcccgtatcgaccaagctggcacgggtgtgctctgtgccctgcctgacgtgtgtgtgggtgttgctcctgaacagaacctatctgctgggggaagaggtagctgcggcaggagacccagagccctcaggggtagcacgggcctccctgtttacacttagctgacagcgagtcatacacgggtcctgtgtgcctctgcccaactcccctgatgtttacgtgtatgtgtgtgtgtgtgtgtgtgtgtgtgtgtgtgtgtgtgtgtgtgtatgtgtgtagagcctgctgtctgtctggaggaggtgccagcccggcctgttggctgctccccctgcatgtccctcacactgcccacagcctgctccccatagtaaatggctgtctctctgcagagccagtaccccctggccatcactgtacaatttttttttaatgcacaaattggtgtttctccccacatttagttcctgtgtccctccagccttcgacctggcattggtatcctacttgcctggcatcgtgaaggtgtctgtacattgttctcaggtggtcttgtggatgtctttcagaaaatggttattttatatgatttgtcatggaatttgttctaataaaccatcttccgcgtggcagcaca

SEQ ID NO: 963 - DNA, 2502 bp, Cricetulus griseus
cacctccacgcctggcttccttggctagcttgccctgcgcactttgccctttgctggcagcggataaaaggggtctgaggaaagaccaaacaccgtcatcctatcgcctgctctcccctttaaattgccagcccgggaagatctgcgcacaaccaggtcgggctgaacacccatcccgcggaacaggagcgcaggtttccaaccccagctcggccaatcgcccgcaccagcgggctccggaaccgaagtccacgctcggtctcggcgctgggacagtgaggccagcagccggcagccacgatgcctgcccacatgctccaagagatctccccctcctacacgaccaccaccaccatcacagcgcctccctccggaagcctgcagaatgaacggagacagcagaagaagaagaccctgccactctggaagaagacatccgccctgaaatgaaagaagatatacacgaccccagctaccaggatgaggaggggccccgcccaagctggagtacgtctggagaaacatcatcctcatggccctgctgcacttgggggccctgtatgggatcacactggttccgtcctgcaagatctacacctgcctcttcgggattatgtactatcgtcactcagtgccttgggcatcaccgccggggcgcaccgcctgtggagccaccgaacttacaaggctcggctgcccctgagggtcttcctcatcattgccaacaccatggcttttcagaatgacgtgtatgaatgggcccgagaccaccgcgcgcaccacaaattctcagaaacacacgctgaccctcacaattcccgccgtggctttttcttctctcacgtgggctggctgcttgtgcgcaaacacccggctgtcaaagagaagggcggaaaactggacatgtctgacctaaaagccgagaagctggtcatgttccagaggaggtactacaagtccggtctcctattgatgtgtttcatcctgcccacactggtgccctggtattgctggggtgaaactttcctgaacagcttgtttgttagcaccttcttgcgatacactttggtgctcaatgccacctggctggtgaacagcgccgcccacctctatggatatcgtccgtacgacaagaacattgaatctcgagagaatatcctggtttccctaggtgcagtgggcgagggcttccacaactaccaccacgccttcccctatgactactcggccagtgagtaccgctggcacatcaacttcaccacgttcttcatcgactgcatggctgccctgggcctggcttatgaccggaagagagtgtctaaggctgctgtcttggccaggattaaaagaactggagacgggagccgtaagagtagctgagtctggggctcctgagttcctgttctaaaagctatctgggcagagatttaatattctgttaactgcaggataatgctaccaggatgctaatgatgcatttaacctgtttgggtacagtattcttttaagatgagaaagctttggtcacattttgaggtaatacacattttgattagctaggactaaccatgccacattatatatacttctaaacatatatacaataaatgcacatataatttcacgcatcaatttaaatagtagcaatacatttgaacattctatacaaagagtattaaaagccaacaaacacgctgtttgaggctgaggtgatgagcacggtatccattccctgtttgtactgcatcttgtcttggtttcttcttctctataaataaattcttcacttggaacttgaaagtatttcattttgaaaaattgaaggacaagaggagttatctaggttgccgatttctttcgtggcaggacaggaagtggaaagcttgagggtcagcttctgtaggtagctgctaagaggtagatttctaaatgaagcccttggggagcacactgccaggaatccggaagtgttagctccatccgttactctaatttcgtccttcgattgagtagagaccgatttctcgtggtgttgaaccttccctgcattcttcgctttgtggccacccagcctacatcatgctgcccgggaggctactacctaccctgctttcttctgccagttctctgttctttggcatttcttctctcctgcaggcatcgagttgcctgagtgtattcagagcactctggacttgctgaggaagaggccctgcttcctgaagccaggtgtgatgctgtagatctgctgacctatattcctctgtcttattccacggttatctgattcaggccatgtcacaacacaaggctgtattctctgaaactgtagctaacaaaggtgagctggtgtgaaagttttatgtgggatagttatttgtgatccatgcataattttggatgattcccatttaacataaactctggagtctaattgtactaattgagattgtatttgttcctaataaaagcagatctggctgtgctgtctgggaaaaaaaa

SEQ ID NO: 964 - DNA, 2501 bp, Cricetulus griseus
aaacagagttaggctgctggtgagcgcctgcgctcagggagtgccaacctccccgttcttccagacctcgagcaacgcagaagattcagatcctcaacctcgggagacattgttcctctcactgaacgcctttccgccctttttatcttcctagtcctgcggccctccttggcgtctctgaggctgctagtcaggcaatctgttgggcaccccgaacacggggtcctcgctgctttctctgctgcttcagcttcggtccagagacggacccggcaccgaatcactgactcgcccaggtgtcgggaaaatgatccacagtctatttctcatcaactgctctggcgacatatttctagaaaagcactggaagagcgttgtaagccagtctgtctgtgactatttctttgaagctcaggagaaagctgctgatgttgaaaatgtaccacctgtcatttcaacacctcaccactacctcatcagtatctaccgggataagctcttcttcgtgtctgtcatacagacagaagtgccacctctctttgtaattgagtttctgcatcgagttgctgacacttttcaggactactttggtgagtgttcagaggctgcaattaaggataatgtggtcatagtgtatgagctcttggaagaaatgttagacaacggattcccactggctactgaatctaacattttgaaagaactgattaagccaccaacaattctacgttctgtcgtcaattctattacaggcagtagtaatgttggggacacactccccaccgggcagctatccaacatcccatggcgtcgagcaggagtaaagtacacaaacaatgaggcctattttgatgtagttgaagaaatagatgcaattatagataaatcaggatctacagtgtttgcagaaattcagggggtcattgatgcttgcattaagctctctggaatgcctgatctctctctctctttcatgaacccaaggcttctagatgatgtcagcttccacccgtgcatccggttcaaacgttgggaatcagaaagagttttgtcatttattcctccagatgggaatttccgactcatatcataccgtgtcagctcacagaatcttgtggcaataccagtgtatgtgaaacacagtatcagctttaaggaaaacagctcttgtggcagatttgatataacaattggacctaaacagaatatgggaaaaactattgaaggaatcacagtgactgttcacatgccaaaagttgtactgaatatgaacctgacaccaacacaaggcagctatacatttgatccagtaaccaaggtactagcatgggatgtggggaaaattactccacaaaagctcccaagtcttaaaggactggtaaatttacagtcaggagcacccaagccagaagaaaatccaagcctcaacatacagttcaagatccagcagcttgctatttcaggcttaaaagtgaaccgcttggacatgtatggggagaagtataagccatttaaaggagtcaaatatgtcacaaaagccgggaagtttcaagtgaggacatgagaagaggccagaattccttaagatgtttgtttttcaagtgtcattacaatttattactattaggtaccaagtgagtgggaatacatataaagcatttgtgtcaagctacactgctaacgaagttgcttagtatcaatctagggttcttaaggagcttaaagctaaggagagttttctaaagacttagcttattttgtatcttttcacttaggaaaagatttagatgatttcttccaagggggctaccagctgaatgctgcacattgtaacagtaaaggcagaaggctacaatggtagcctctcttacagccagtgaactggtctcatccaccagcaggaactgtctcagccttgatgtgtcaggtgcagccaagtgtcacaccttctgatgttagccatctcaaatcagtgtctatcccacaagaggagattcccccaccccaagaagtttacagaaaactgcctcttcaagtgtttgccttactcagcttttcacttgtgccattaagcaagcactgtagcaaaagccacctccacatggccctggcagggagcattgctgctccatgctccattgtcactgtacttggtattatatttttttatgaataagatttttacgtaaagctcagattttgatttacaaggactttgctgcagtagatataccatcaatcatcagttcagctgctagatagcacaatcaaaatcatttgcatcaaaggggcaaatactttattaataaaagggaacactacttctgcttttaggaagttaatgcaggcacaagtgtttgtgcttttaaacgaatcaaagtagtaaaagagaaaattaagcaaaacctttgccattctgttttattaaaactttatctaatgccactccaacctagtaagcctgaaagcctattaattaaccttttttttttcttctgcag

SEQ ID NO: 965 - DNA, 2501 bp, Cricetulus griseus
cctctgaatctgcagaaccaatgtgcagacaccttaggaaagggttggaacaaggtaacttgaagaaagccttagcgaatgtggagtggaatatctgccaagactgtaagactgacaataaagtaaaagaaggccctgaggaggaggcagaagacccttcagtgtggctgtgtcttaaatgtggccatcagggctgtggcagagattctcaggagcagcacgccttgaagcactactcgacaccaagatctgagcctcactacctcgtgcttagtttggacaactggagcgtctggtgttacaagtgtgatgaggaagtcaaatactgtagttcaaaccgattgggccaagtggtcgattatgttagaaaacaagctggcactacaactccaaagccagcagagaaagataatggacatattgaacttgaaaataaaaaattggaaaaagacagtaaaaatgaacaagagaaagagaaaacggaaaacatggctaaagaaaacattcccatggactctgcttcccagatgattgtgaaaggactcagtaacttgggaaacacttgtttcttcaatgccgttatgcagaatttgtcacaaacaccagtgcttagagaactactaaaagaagtgaaaatgtctggaacaattgtgaaaatagagccacctgatctggcactaacagaacctttagaagtaaaccttgagcctccaggtcctcttactttagccatgagccagtttcttaatgagatgcaagagaacaaaaagcgaattgtgactcctaaagagctcttttctcaggtctgtaaaaaggcaacacgttttaaagggtaccagcaacaagacagccaggagctacttcgatacttactggatgggatgagagcggaagaacaccaaagagtgagtaaaggaattcttaaagcatttggtaattctactgaaaaattggatgaagaagtaaaaataaagttaaagaatatgaaaagaaaagacaatcccaagttttgtggaccgcatctttggtggcgagctaactagtacaatcatgtgtgaggagtgcaggactgtctccttggtacatgaatctttccttgatttgtctctcccagttttagatgatcagagtggtaagaaaaatataaatgatagaaatatgaaaaagacgatggaggaagatgataaggacagcgaggaagaaaaagacgacagctacatgaaaacaagaagtgacgttccttcagggacaagtaagcacatacagaaaaaagcaaagaagcaagccaaaaagcaagccaagaaccaacgaaggcaacaaaaacttcaagagaaagttcttcacctaaatgatatctgtagcactgaccatactgaagacaatgagcaggaatcggaaatggcacttccaggagaagtggaagtggatattgaatccaaccatgtttctcaggaggaggggatacacactggagctgaggttaatcagaaagatttgaatggccaagagaaaatggtagaaagtacagctgacagtcagaagtgtccagaggccctagctctgaagagcgagcgagggtgatgtggggagtttgacatctgctacagaatgcactagggatttaaatgatgccatcctggaggaaagtaccaatggagaactcgacattaccaatggtttaaaaaaccttcatttgaatgctgctattcatcctgatgagataaatatagagattgtgaatgacagtcattctcctccggcaaaggtgtatgaggtcatgaatgaggacccagaaacggctttctgcactctcgcaaaccgggaagctttcagcactgctgagtgttccatccagcattgcttgtatcagttcacccgcaacgagaaacttcaagatgcaaataaactgctttgtgatgtgtgcacaagacggcagggtaatggaccaaaggctaacataaaaggtgagaagaaacatgtttacaccaatgcaaagaagcagatgctggtctcgcttgctcctcctgtcctcactctccatttgaagaggtttcagcaggctggttttaacctacgcaaagttaacaaacacataaagttcccggaaatcttagatttggctcctttttgtacccttaaatgtaagaatgtggccgaagaaagtacaagagtactgtattccttatatggagttgttgaacacagtggtactatgaggtcaggacattacactgcctacgccaaggcaagaactccaagtagtcatctctctaattttgttcttcatggcgacattccacaagattgtgaaatggaatcaaccaaagggcagtggtttcacatcagtgacacacatgtacaagctgtgcctgtaactaaagtactaaactcacaagcctatctccttttttatgagagaatactgtaataacaaggactttctctggaagtacacctatggcttttatataacaaaaaataataaaaagttaaactaaaaa

SEQ ID NO: 966 - DNA, 2500 bp, Cricetulus griseus
cacagtttgagataatgctgaaggccaagcaagcacgaaactcacagtttgacttcctgcggtttgatcactacctcaacccctactacaaattcatccagaaatccatgaaggaaggacggtacacggtgctggcagaaaacaagaatgaggagaagaaaaagtctgggtctacctctgacaatgaagacgaagatgaggaggaggatgggagttacctgcacccgtctctctttgcttccaagaagagcagccgcctggaagagctgatgaagcccttgaaggtggtggacccagatcaccccctagcagcccttgttcgtaaagcacaggctgacagctctgctccagccccacccactgcagatggcacccctacacagccctcccaggtggagtacacgactgactcagctgtggcagccatgtactacagctactacatgttgccagatggcacctactgcctggcaccacccccacctgggattgatgtggccacttactacagcacccttcctgcctggagtgaccgtgtccagctcacctggtgtgactaccactcgtaccaccacccctgggactacacctccaccaacagctgaaacaagtagcggggttacctccacaaccaccaccacaagtgcgcttgctcccgtggccatcatacctccgccccctgacatccagcctgtgatcgacaagctggcagagtacgtcgctaggaacggccttaaatttgagaccagtgttcgagccaagaatgatcagagatttgagttccttcagccctggcaccaatacaacgcctactatgagtttaagaagcagttcttcctgcagaaagaaggaggcagtagcacacaggtagcatcaacagctgaagaggcttccacagaaaccgctgctgaagagtcaagtgaagctggggaggacagcactcctgagggtatggcggagactgggggaagaggcagcgggaagaaggaggctgggtccagcaagagcaccgtggacgggaagctggtaaaagcttcatttgctccaataaagttttagccatcaaggccaaagaaaattgacctacttcctggaaaaaaccgagtcaagttggacgatgatagtgaagaggatgaagaaagcagggagtgccaggaaagcacaagcaatgtggccaaccccagcccagctgcagccccaccctgtgtgcttgtggaagagaagaagccccagctcacccaggaggagctagaagcaaagcaagcaaaacaaaagctggaggaccgtcttgccgctgctgcccgggaaaagctggcacaggcgtccaaggaatcaaaggagaagcagcttcaggccgaacgtaaaaggaaagcagctctgtttttacaaaccttaaaaaatcctcttccagaagcagaagtgggaaaactggaggagagtgctttcaatgtagaggaaacaagtgtcatgccttgtcctctgctggttggaggcagaactctgcccatgttagaggtgaagcctccagaaaggccttcaagtagatgtagagacccaccgagagaagaagaaagagaaaagaagaagaagaagcacaaaaaacggtctcgaacgaggtcccgctcccccaagtaccactcgtcttccaagcccaggtctagatcccactcaaaagccaagcactctctgcccagtgcctaccggacagtgcggcgttcgaggtcacgttctcggtccccaagaaggagagcacactctcctgagagacgacgagaagacaggagtgtccctactgcctaccggatgagcagcagccctggagccagcaggaaacggacccgttccagaagtccccatgagaagaagaagaagcggcgatcacggtctcgcactaaggccaaggcccggtcccagtcaacatccccgagcaagcaggcagcacagcgtccctcagcccattcagcccactcggccagcatctctcctgtggagagccgaggttcttcccaggaacgctccaggggggtttctcaggaaaaagatggccagatctcctcagcgatcgtctcctctgtgcagagcaaaataactcaggatctcatggccaaagtaagagcaatgctcgcagcttcaaaaaacctgcaaaccagcgcatcctgaggtggcagccacggagccagccccaagcagagcatcgggtgtggctgtggccttggctgtggtcacaggtgctgggctttggctcagagcattcccaccccagccagaagctgagctgcaagctctgtgccgacctatgcccggccctccaggttctccagcccgactccctgggtcagtcggttgcttttgtaaatttttggtgacattttcagtttcagatttttgaccagcagtctcttacctgtatatttgtaaatatatcatgtttctgtgaaaatgtattatcaaataaaacaggaggaaacaccttttctagctaagcaaaaaaaaaaaaaaa

SEQ ID NO: 967 - DNA, 2500 bp, Cricetulus griseus
gtgaatggccctactaccttggtggaatgaaaagatttcaagtcccaaatgtaatagcagcaatcagctgtcctcctctggccctgtgtccagtacagtttgctctgggagtgcctatcacaagcagttggctggcttgaactgctctgtccgggattggatagtgaagcatgtgaatacaaacccactttgtgacctgacgcccatttttaaagactatgagagatacttggcgacgattgagaagcagcttgagaatggaggcagcagcagttctgagagccagactgacagggcatcaattggaatgcagcctcctcccctttttagttcaacaaaactacagcaagagtcaccattttcgtttcatggcaacaaagcagaggacacatctgaaaaggagtttacagcagaaaagaaatcagacacaacacaaggagcaacaagtgccagagctctagtttggtctcattagctctggctccctgactggttttcattctccctggaaactctagtttattcggtaaagatgctgctcaaagtaaagcagcctcttcactgttttctgctaaagcaccagaaagtcaagcaggaggcagcagcagtgaatgcagaggtggcggcgatgaagaagaagagaatgatgagccacccaaggtggtagttactgaagtgaaggaggaggatgctttctactccaaaaagtgtaaactattttacaagaaagacaatgaatttaaagagaagggtgtggggaccctacatttaaaacccacagccaatcagaagactcagctcttggtgcgggcagacaccaacctaggcaacatactgctgaatgttctgattccacccaatatgccgtgcacccgaacagggaaaaacaatgtcctcatcgtctgtgtccccaatcccccactggatgaaaagcagcccacagtcccggccaccatgctgattcgggtgaagacgggtgaggatgcagatgagttacacaagattttactgcagaaaaaggatgcctgagcactgaggctgaccaaggaatgttgccacattgcttgccttcccctctgcaccctaaacttagtcacattctttcctcttcttattgtgacattctgagaacttttaggtaatgggaacttctatgaggaagattaaggccaaataaaacctggggctgtcaggaagaatggactttagaagcacaaatttggtagctttttatatcatttctataccacaaacaagcctttattttaagataaaagtgaagccgtgctgaaaagggatgtgtgctcatggccgttgctgccctggtgagccctacgggcacagcctgaatctcatcaaaccattcaacactaggaccagatcttgtctgaaggctcagggtcagtgcccaggggtgcacacttgtatgctcagtttgccatttaacattgagaattagtttctagcaagtgaattgcttgcttgctgctctgttactgctggccctgacctgttcatattgggtttgcccagctttccaaagatgaaatgaggggagccacatttcagaacagtaccgtgtagccgcatgcccatgaggctgactagtcagactcttgggtactttcaggaacttgtctatttatggtggtggggctctgtgagcactctccccatgccttgaacaatttaccaaaagagtaaaagcaaaaaaggtcgtagactggattgccttctaaacgtcccagcccattttaattgtaaagtagtgggtgtagcttccttttcctaacattcccagcaaagtttgctgctaagactatcacaattacagggaggggagagggatgtgaccgaactcagtgtgtcttgtctttatgctttaggagctagctcagcactctgcacttaacctgagtgtgaatcactagaaagtctgtcacagggaggcccctggagggctctgttctcccttaactgtgttagtagctggttccaacccatggcttaaacttcatttacattttaacatgttagaaatttgcctattgtgtgtttaatgtgaactgaggtttttatctttggtttgaaaagtatgtctttcttttatttgtctgaggaagtgtgtgttctttgttgtcagggtgtgtctaggtagatgctgagcctgggccttctcacactgtatctcatgatttcgcacattcccagtctagccccacgctctgcacagggccaccacgtgctctccaaaagcaatcacaagactgaggactgtccttaacgtagacagagttgtaaaggggatgtaagacttcttaacacatggaataatttgctctttacattaatcaggaaattgtttcctaaagctaaaatacttgaattgtcagacagtataatctcagtgtgtgtgagcttttgaatgagcctgtaaggaagtgtaacaatccatgaaatgtgaataaatggaaagtttaaaaaccaaaaaaaaaaaaaa

SEQ ID NO: 968 - DNA, 2500 bp, Cricetulus griseus
agaaacagcagctgagctgaagtggacgggttccgggttggaggtgaaaccatgaagagaaagtagaacagataataatgctttaccgcaatcgcttcttggtgctgctggccctggctgggctgctggccttcctgagcctcagcctgcagttctccacctgatcccagtgtccacaacaaaaaatggaggaagcagcaagagtcggaagaggatcatgcccgacccagtgacagagcccccgacggtagacccggtttatgaagctcttctgtactgcaacattccgagtgtagccgagcacagcatggaaggtcacgccccacatcattataagctggtctcggttcatgtgttcattcgccacggggacaggtacccactgtatgccattcccaaaacaaagcgaccagaaatcgactgcactctagtggctggcaggaagccttatcaccctaagctggaagctttcgttagtcacatgtcaaaaggatccggagcctcttttgaaagccccttgggaagagccgcacccttcagagtgggctggccttgctctacggcttcctcccggattttgactggaagaagatttatttcaagcaccagccaagtgccctgttctgttctggaagctgctactgcccactgagaaaccactatctggagaaggagcagcgccggcaatacctcctccgcctgaagaacaatgacctagagaggacctatggggagatggccaagattgtggacatccccaccaagcagctccgggcagccaaccccattgactccatgctctgccacttttgccacaatgtcagcttcccctgcagcagaagtggctgccttggcatggagcacttcaaggtgatcaagacacaccagatagaagatgagcgtgagaggcatgagaagcccctgtactttgggtattcgctactcggggcccaccccatcctgaatcagacagtcaaccggatgcagcgtgctgccgcaggctggacagaagagctgttcaccctctactctgctcacgacgtcactctgtcaccagttctcagtgccttgggtcttttggaagccaggttcccaaggttcgctgccaggctggtctttgagctctggcaagaccgtcaaaagcccagtgaacattccgtccggattctttataacggggttgacgtcaccttccatacctctttctgccatgatttccacaagcgttcccccaagcccatgtgtcctcttgagaacttggtccgctttgtcaaaagggatatgtttgtagccctggatggcagtagtactaattattatgatgcgtgtcatggggaaggggcctaaactgtgttcagcacagcactgttttcttgctggttctgtctgttgctaaatcatggtatggagttctaatggatgcagattagggcaggtgatcatgcccaaggtttcggacacacaggaagcacataacagtatgtcacttggtacaaaatagctggttcacagagggagggaaaaggtacattatcatagctatatgcagtttagaatgctagcatcagattcagtactcaatcttaggctctgcagaccgtaaaagggtcacacctaaaaggtctgtgtcacatcttctcagctgtgctctggtgcaaacaaaagtggtggtagccagctgtggctcacaggctgcgtttgctgacccctgatctttaaaaacagcctgctatagttgcatttccggcactttgagagccagctgaatgtcaggttgttcagcaggtccttgggtagcgtccgtagaaacacagaactgggtctatatctgatgtggtaacaaactcaaggggaaataaacattgggtcagaaggctcctaggaaatgatcacaatacttgatgctcatgatgattgtggcacaaaatagctttaagtgtgttttaggtatttgtctgctatagtctattggcttcataggctggaatttttgtattccatttagtatttttatagtctaggaaaatattttctgagaccagttttagatgtgttcttatccctgtagaaatacttgatttgctgcacctgcttggtggttggaaggaggccaaaagctgaattggggcactattttccccctccaaaaataaataactaatgactcattccctttgacaagctgtagaactgggttcatttttaaaccattttcatcagtttcaaatgccaaattccaattgatttttaaagaggtttctaaaaattaaactttgttactggatagttaaataatgtttctaaagtattttctatatcaggcgcaattacaactaagcccttggtttctaggttaatggtgctagtttgttctgaagacctggtccatgcacaggggattctccagcatccagcattccagccctttctcttccttcttgtctggtgttgcatttgaacacattttgtttgtagaaataaaatttttgaagaattctta

SEQ ID NO: 969 - DNA, 2500 bp, Cricetulus griseus
ctgcctgcagtggaccacggtcatcgagaggaccttccatgtagactctccagatgagagggaagagtggatgcggactatccagatggtcgccaacagtctgaagcaccgggacccaggtgacaatgccttagagtataagtgtggctcccccagtgactcttcctcatctgagatgatggaggtggcggtcaacaaggcacgggccaaagtgaccatgaatgacttcgattatctcaaactccttggtaagggcaccttcggcaaagtcatcctcgtgcgggagaaagccactggccgctactatgccatgaagattctgaggaaggaagtcatcattgccaaggatgaagtcgcccacacggtcactgagagccgggtcctgcagaacaccagacaccccttccttactgccctgaagtatgccttccagacccaggagccgcctgtgcttcgtaatggagtacgccaacgggggcgagctgttcttccacctgtctcgggagcgagtcttcacggaggatcgggcccgattttatggtgcggagatcgtgtcagctctggagtatttgcactcgagggacgtggtgtaccgtgacatcaagctggaaaaccttatgctggacaaagacggccacatcaagatcactgactttggcttgtgtaaagagggcatcagtgacggggccaccatgaaaaccttctgcggcaccccagagtacttggcacccgaggtgctggaggacaatgactacggacgtgcagtggactggtgggggctgggcgtggtcatgtacgagatgatgtgtggccgcctgcccttctacaaccaggatcacgagcgcctctttgagctcatcctcatggaggagatccgcttcccacggacgcttgggccggaggccaagtccctgctggctggactgctgaagaaggaccctaagcagaggctcggcggaggtcccagtgatgccaaggaggtcatggagcacaggttcttcctcagcatcaactggcaggatgtggtacagagaaagctcctaccacccttcaaacctcaggtcacttccgaagtggacacaaggtacttcgacgatgagttcaccgcccagtcgatcacaatcacacccccggaccgctatgacagcctgggctcgctggaactggaccagcggacgcacttcccccagttctcctactcagccagcatccgagagtgagcagccctctgccaccacaggacacaatcatggctgccatccactgcctgggtggctttttaaagaaaaccttattttgccttttggtttgtgttcccttccctgtccccctcacttgtatatccagtttcttcttcagttcttgcccagattagtgccctggcagccatctcctccggcctcccctctattcccagatgcatgctgggaaagtgcccaaggatgggctgttgggaggatggagagaggctataaatgaccaccagcctccaagaggaagtgggagccacggggtcacctgggcttgagggccagccagcaggggccacatctggatgaaacctgccacccccagcaccccaggtgccttctatgctgttactgggctgtctgtctgctcccgcctcacctggggcagaaacgcaacagcgcccaggggcgggcagaggccttcggaagctgaaggatctgggtttgcctgcctcttcctcccaagctgctctcttgattctggacagagcaggaggaatatttgggggccagcccccctgcccacagcctcgtgccttaccagggcttccttctagccagccttgcctcccgatgggccccagcccctttggaaggctccattttctgcctggggcagaaggaagccaaccttggctgttacacatctcacaccgagacagtattgggccccttggacttgactggggcctgagaggggacacagatggggacaggtgtctctggtacacattggggtggggccacctcatctccagggcccctgctctggagccttaaggcgaatgtgtgagtgcgagtctgtccgtgctgtgggtggccgtgtgcaccctgctctagcggtgagcatctcaggctcctgggatgcaggcgccttcagctgtgtgcagtagcacaggtgtgagtgagcaggctcagccgaaaccccagccggagtgtttggtcccatggagtgcagccggtccacctgctgctctggccatgttgccccatccccaatatctctgggtgtttggaattgagttttcctggttttcctatcccaccccacccctcagactagatacattacaaaaaggcagtagggtggggtgggcagggatgatgtgggggtcgtctgttttttccttttatgtgtgtatgtttatctgagagttctctcccacccctactggccttcccttacttgtcatatttgtacggtacaagcaataaagacactcatttcagaccaaaaaaaaaaaaaaaaa

SEQ ID NO: 970 - DNA, 2499 bp, Cricetulus griseus
tttgtgtacagaaggcagaagactatatgaaagaaacagccaacttccatggaaagggttatataatccagaaaagagaagcaaaaccaagcctagatgcagataaaccagctgaagacatactcacgtatgaggaatttcatcctttcttgttttctcaacatttacaatgtccatatatagaatttgaatcgtttgacaaggccgtggatgaatttttattccaagatagaaggtcagaaaattgatttaaaagctttacaacaggaaaaacaagcactgaagaaattagataatgttcgaaaggatcatgagaacagattagaagctcttcagcaggctcaggaaatagacaaactgaaaggagagctaatagagatgaacctgcagatagtcgacagagccattcaggtagtccgaagtgcattagccaaccagatagactggacagaaattggcgtgattgtgaaagaagcccaagctcaaggagaccctgttgcaagtgcaatcaaagaactaaaactgcaaacaaaccatgttacaatgctgctacgaaatccatacttgttatcagaggaggaagatgatgatggtgatgccagtgttgaggtcagtgatgctgaaccaccaaaagggaaaaagaaaaagacaaaagaacaagcagctgcagaagcctacaagaaaaacaagaccactgcttgtcgatgtggatctcagcctgtcagcctatgccaatgccaaaaatattatgatcataagagatatgctgctaaaaaaacaacaaagaggacggttgaagctgctgagaaggcgttcaaatcagacagaaaagaaaacgaagcaaaccttaaaagaagtacaaacagtgacttctatccagaaggcaagaaaagtatattggtttgagaaatttctgtggttcattagctcagagaactatctaattataggtggtcgagatcagcaacagaatgagatcattgtgaaaagatacttgacaccaggagacatttatgtccatgctgatcttcatggagctaccagttgtgtgattaagaatccaacaggagaacccatccctccacggactttgactgaggcaggcacaatggcactttgctacagtgctgcttgggatgcacgagttatcactagtgcttggtgggtgtaccatcatcaggtgtctaaaacagcaccaacaggagaatatttgacaacaggaagcttcatgataagaggaaaaagaattttcttcctccttcatatctaatgatgggatttagcttcctttttaaggtagatgagtcttgtatctggagacatcgaggtgaacgaaaagtcagagcacaggatgaagacatagaaacactgacaagctgcacaagtgaactcatgtcagaagagatggaacaactagaagccggtgacagcagtgaggaagacaaagaagacttacatggaactcctgtagaagtagaactcctgactcaggccagtcaagaggatgctgctgttcagagtggcagagatgaaaagctctgaagatggagaatccaaagaagttacaaaagacgaagagcccgttgatgagatgaagggtgaggaggaagacaccctggattatcctgacaccaccattgacttgtcccaccttcagtcccagaggcctctgcagaaactggcttcaaaagaagaaccttctaattcaagtgacagtaaatcacagagccgaagacatttgtcagccaaggaaagaagagaaatgaaaaagaaaaagcttccaagtgactcaggggatgtagaagtaatggaaggaaaggacaaagcaagagaaaattctgtgcacactgaagcttaccagaacaccagcaaaaatgttggatctggacagccaatgaaaagaggacaaaagagtaaaatgaaaaaaatgaaggaaaaatacaaagaccaagatgaagaagatcgtcagcttattatgaaattgctggcatctgcaggttcaaacaaaagaagaaaaggggaaaaaaggaaaaaaaccttcacgttttaactcatgacttacaagacttagctatagatgatccacatgatgacaaggaagagcacgatctggatcagcagggaaatgaggaaaaatctgtttgattctttgacagggcagccacatcctgaagatgtactaatgtttgctattccaatatgtgctccttataccaccatgacaaattataagtacaaagtgaaacttactcctggagttcagaaaaagggaaaaagctgcaaaaacagccttgaatagtttcatgcattccaaagaagcaacagcaagagaaaaagacttattccgcagtgtgaaggacacagatttatcaagaaacattcctggcaaagtgaaagtgtccgcacctaatcttcttcatgtaaaaagaaatagctgaatgatacacatctgtaattgttctgcattttattgaaattcttgaggtttcatttaatgat

SEQ ID NO: 971 - DNA, 2499 bp, Cricetulus griseus
gaggcatctgccttctctgggctgaaaggtagctcctgtgtcactgacttccaggcatgaggtggctcctgccctggacgctggcagctgtggcagtcgtggtggcgggcaacgtcctggccacggtcgtctctccaacccccacagccatgactctcactccagtgccactggaggacgccactgcccgccctgaattctgcaagtggccatgtgagtgcccgcaatccccacctcactgcccgctgggtgtgagccttatcacagatggctgtgagtgctgtaagatatgtgcccagcagctcggggacaactgtacagaggctgccatctgtgacccacaccggggtctctactgcgattacagtggggaccggccgaggtacgcaataggagtgtgtgcacaggtggtcggtgtgggctgtgtcctggatggcgtacgctacaacaatggcgagtcctttcagcccaactgcaggtacaactgcacctgcattgatggcacggtgggctgcacaccactgtgcttgagccccaggcccccgcgcctctggtgccgacagccccggcatgtgagagtccctggccagtgctgcgagcagtgggtgtgtgacgatgatgccaggaggccacgccagactgcactgctggacacccgagcctttgcagcttcgggtacagtggagcaatggcacgggaactgcatagcttacactagcccctggagtccatgctcaaccacctgtggcctaggaatctcaacacggatctctaacgtcaacgcccggtgctggccagagcaggaaaatcgcctctgtaacctgcggccgtgtgatgtggacatccattcacacatcaaggccgggaagaagtgtctggctgtgtaccagccggaggagcccacaaacttcaccctcgcgggctgtgtcagcactcacacctaccgacccaagtactgtggtgtctgcactgacaacaggtgctgtatcccctacaagtccaagactatcagcgtcaatttccagtgtccagagggtccaggcttctcccgtcaggtcctgtggatcaacgcttgcttctgcaacctgagctgtaggaatccaaacgatatctttgctgacttgcagtcctaccctgacttctcagagattgccaattagctaggtgtgtggctcggggcaaagctccatgtttgcagagcagtcagccctctgaggcccaggacttcacagttgagccttattccagcccctcctactcagttccgaattcccaatggcccaggagaatgctgctcaggtgggagaactacacacagcacacgaatggactcttaagtaggaaaggagacccctgatttcccctccttccagtaagccccccaaaggcctggccttgtgcaaggtgaacagcggtgctcaagacatattgaaggtagaaaacactttatataacactcctacttttccttagaagcactcttcttccaaggtctcttcctaccagtgaaaatcctctattaaaggaggcttagtactttgaataaatgtatgttcatatgtgtacaacggcttgcatgtaaagatatgttacccctgggaattatcacttgtgtaaggttttttgtggatcacgtcagattttctttgattggaaaaacctgtcttaacatctaactctgaaagaacttccataccaagactgctactccatgcttcactggcatagtccacttaatccttccagtgagcccaggagttatggcattaccactgcctatttccgggctgacgcagaaagatctccaggagttagatgatttgctcaagttcttgccaaacagggcatagcagacaagctccgaagcccaggatcatgtggcatcctatgccatctgtcctgtcactcagactgcttgtctgtcctcagccaaaggctccagagtcacaagtggtgactcacagaccccggtgcagaaattctaatctcgagggtgattagagattgatcaaagaaagtaatttcaaatgatatgattgtctgtaatcaccctaatgaattttggactgtgcatgagtggagaatgcagagaggattacaacctctgactatgctgttgactcctgtcatttcatttgagacttgttttttgtttttgactcagaggaaccacagtgacggccctaaatggctgggaagctgtgtgtgtgtgtgtgtgtgtgtgtgtgtgtgtgtgtgtgtatctattttcaagctgtgattgagtatttaaatattcctactgccattttgtaagtgaacacgcataaagaaatgtctttagatttccaaacagagaaaaaatagcccttgggccgcctgtcacgttctaccacattcctcatttttctcatgatttgtgtagcaaggaatgtgtttgttcacccgtgatgggttttcattgttcaaattctttgtttacagcttttctccttaaagcaataaatcatcagcaaaagt

SEQ ID NO: 972 - DNA, 2498 bp, Cricetulus griseus
tcccacagctccctccctcccttcctccctcaggaccgagggcggcccaggccagtgcatggtcagctagctcccgtctccaaacccggcgtctagcagcacggaacggacggcggcggcgggcgaggaggaagatggcgggacggctgccggcctgtgtggtggactgtggcacgggatatacaaaattaggatatgctggaaatacggaaccacagtttatcatcccatcatgtattgcaatcaaagagtctgcaaaagtaggtgatcaagcccagaggagggtgatgaaaggtgtggatgacctagacttcttcattggtgatgaagcaatagaaaaacccacgtatgcaacaaagtggccaatccgccatggtatagttgaagattgggacttgatggaaaggtttatggaacaagtgatttttaaatatttaagggcagagcctgaagaccattactttcttttgactgaacctccactgaatactccagaaaacagggaatatactgctgaaataatgtttgagtccttcaatgttccaggcttgtacattgctgtgcaggctgttcttgccttagctgcatcctggacctcaagacaagtaggagagaggacgctgacgggtacagtaatagacagcggagatggagtcactcatgtcattcctgtggctgaagggtatgtcatcggcagctgtattaaacacattccaattgcgggaagagatataacatactttattcagcaactgctgcgagatcgagaagtaggaatccctcctgaacagtccctggaaactgcaaaagcagtgaaggaacgctatagttatgtctgcccagatttagtaaaagagtttaacaagtatgacactgatgggtcaaagtggatcaaacagtacaccggagtcaacgcaatctcaaagaaagagttctccattgacgttggctatgagagattcctgggaccggagatctttttccacccagagtttgctaatccagattttactcaacctatctcagaagttgtagatgaagtcattcagaactgccccattgatgtcaggcgtcctctctacaagaacattgtcctctctggtggttcaaccatgttcagggactttggacgtcgtttgcaaagagatttgaaacgaactgtagatgccaggctgaagttaagcgaggagctgagcggtggtagattgaagcccaagcctattgatgtacaagttattacacatcacatgcagcggtatgcagtctggtttggagggtcaatgctggcttccacgcctgagttctaccaagtatgccacaccaaaaaggattatgaagaaattggacctagcatttgtcgtcacaatccagtgtttggagttatgtcctaaagttgacttgttttggggggttagggagatggaaaggagataatctttctgatgaccagttttgtctgaatggatggttctgaggtttttaaccaaacatgatcatacaggaatatttaatgagtgtgtcaacatgcagatgtagaagagagccaagatgattgttttcatttaggttgaatatttgaatcttacgtgtatcaaaaaagaaatgggttttagttctttctgtgccctgatattttgtatattattgacttacccaatgtgctgggctctgtgggtgttttgagagctctgtaatgccagattgggcactgtgagtgggcagtgcaggagcttgtttatatttcatacttttttatactttgaggaaaaaaagtcaaagaaatactgtagtattggagggaaaaaatatgatcaagaaaaagatgaattcaataagcagcctcatgggacttggccacacactctgggttccagttatctcgagctgctccaccctccctagcccaccaacggttctctctgcaaatgctttggatctaggaagctagtctcctgggttagccgatgtctgccctgctttctggttactcacattctgtttcttgcttcaaaagaaaagacaagactgttggaccagtattgcaattctgtagagtcatttcttattaaaacaataatgtgattacccaaattggcatatttaaggcctaatgccattctaataaaggcaaaaatttctttctactacttgtttcaggctctttgatctctttataagttaactaatatgtctattttcttcagattctgcagtagctctttaaaaagcacagcgggtggatagcaagctgacttttttatgtgctctgtacaaataattgtgaacttttaatatgttgagtgctttcattttgataactggatctccatttgatattttcatttgtataactcatttgcagtctgaattttttttagtgccagtccctgacatatcatgaaaagttcattttctttgcaatttaaaatatctggatcatgaagaaaagtgatgacaataaattaaaattgaattaccaaaaaaaaaaaaaaaaaaaa

SEQ ID NO: 973 - DNA, 2497 bp, Cricetulus griseus
tgggaaggatgtgaagattgacgtatttgaaagagaagaggtcgggggccgtctggccactttgaaggtgcaaggtcatgactacgagtcagggggttctgtcatccaccctctaaatttgcacatgaagcgttttgtcaaagagctgggtctttccagtgttccagcttcaggtggcctgatgggggtgtacgatgggaagtctctggtgtttgaggagagcagctggtttataatcaacatgatcaagctggtgtggcgctatggatttcaatctctgagaatgcacatgtgggtagaagacttgctggacaagttcatgaggatttatcgttatcagtcccatgactatgccttcagcagtgtagaaaagttaatgttcgctattggaggggatgactacgtccgactgcttaaccaaactctccgtgaaaacctgcagaaagcaggtttctctgagacattcctcaacgagatgatgtgtcaatgacagctgctgattcaacctttgggcgagtggaaggtggtaataagttgtttgctcagggctccttcaggcctccagcagcaaccttataactggctccgtagtgtccatagaggagaagacaaggaccaagcagacaggaaatcccacgaagatgtatgaagtggtatataaaacaggatctgagacccattctgagttctatgacattgtccttgtggctgctccattgaaccgcaagatgtctggcataactttcctcaattttgaccctcccattgaggaattcaatgacccatatcaacacctggtgacaactttcattaaaggagaactcaattccactctcttcagctccagacccaaggaccagtttggcctctccacaattcttatcactgatgactcagatatgtttattaacagcctgtccattgtggcctctgtaaaagagaaggagggtcctgcacgggcggtggatggcatgcaagtgtggaagaccttctctagggacattctcaccaaagagcagatttcaaaactcttcctgtcctatgactatgctgctcggaagccatggctgtcctatccttactatgagccccctcagaagtgtccctccatcatcctccatgaccgactctattacctcaacggcattgagtttgctgccagctgcatggagatgagtgccattgctggctacaatgcagctctccttgcctaccatcgctggaatggcaatgaggacatgattgaccaggacgacttgtatgaaaacttaaaacggaagctgtaactgagcactgcccctcccccagagcacccttctcttgaaggactaaatcagcagagatgattttgaatctttaccagcacccttcatgtgggtcatgagaaaacacagtgttcctgttcactggagaacttgatcttcggcgagaatgtcttcactcttccattttgcagggagggataggaggattgaacctaaggccctgtgcatgctaggcaaacactctactactgagctgagatacatccaaccttctttgtggattttcttttgagactgggtctcaatcctcctgcctcagtctccagagggctaggatttttttcttctctctctatttttctccctttggggagggtgtttaaactgtcttactctgcacctcaggctggaagtcattatgtagtctaggctggtctttaaatcacagcaatcctcctgtctcagcctcccatgtgctgggatacaagcatgaggtccaagtcctggcagtttatacttttttatataaatgtgctcaagcttgaagtcatgactttaagaatgtgattttttgattgcccttgtcttggttttatcatggatagattcagagataggaagagagatatcctgtgaagtggaaacagaagatataggctattaaactagtattaagcgataaaagtaattttgcctgccttggtggtacatgcctataatctcagtacttttatggcaaaagtacgaggatcaaaagttcaaagccagcctgggctgtaacaacaccctgtttcaaggaacaaaaaccaactcttcaccagattatagcgctgcatcagcaaagtgttctaagaaaatactgatttttaaaaattatttttctcttgtacagctgtgggtattaatactgtctggagaaagcagccatgatatatttggtgtagtgacaggaattaaactcatagtttatcaaaaggttggtattttttctgatgtgttcagaacatttatattttttcctgttgtggttttaacaaacatggtttgtcaagcctcctcatctgagggatgtttcatgaccccccagtgggcagtcagagctgggaagcagtgaggcccatatgttctattttccacatgtacaatatacctgtgataaagttttaatttataaatttggcatagtaagagattaacaacattaattgtaaaatagaaaaattttaacaatt

SEQ ID NO: 974 - DNA, 2497 bp, Cricetulus griseus
ggatctcatcctgagtctccgtgctgtgctggcttctacaccacgttttgctgagtttttactacctctgctgattgagaaagtagattctgagattttaagtgccaagctggattctctgcaaactctgaatgcttgctgttctgtgtatggacagaaggaactgaaggacttcctccccagcctttgggcttctatccgcagagaggtgttccagacggcaagtgagcgagtagaggcagagggcctagcagccctccactccctgactgcgtgtttgtcttgctctgtgctgagggctgatgccgaggacctccttgactccttcctcagcaacattctacaggactgcaggcaccatctgtgtgaaccagacatgaaactggtatggcctagtgccaagctgttgcaggctgctgcaggtgcatctgcccgggcctgtgagcacatcaccagcactgtgcttcccttgctgctggaacagttccacaagcacagtcagagcaaccaacggcgaacaatccttgaaatgatcctgggattcttaaagctacagcagaaatggagctatgaagacaaagatgaaaggcctctgactcgcttcaaggaccagctgtgctcattggtgttcatggctctgacacgaccccagccacccagcttcagcttgtaggcatccggacactcacagttttgggttctcagccagatctcctatcttctggggacttggagctggctgtaggtcacctgtaccgactgagcttcctggaggaagattctgagagttgtagggtggcagcactggaggcatcgggaactctgactacactctatcctggagccttcagcagccacctgctacccaagcttgctaaagagctgcataaagggaagtcggatgttgctagagaggatggtctcatgaagtgttcccggcatttctgctgtctgcaagctttgtcagccatttcaacacatcccagcattgtcaaaaatgtcagcaggaccctgagagctactggtatttccatgagacagctataccgtgcctgtttggtttggctgtgcaggcttccatgccagagaaggaatcctcggttctgagaaaggtcctgttggaagatgaggtcttagctgccttggcatctgtcatcggaactgccactacccacctgagccctgagttagctgcccagagtgtcacatgcatcgtgcctctcttcttagatggcaacacctctttcacctgaaacagcttcccaagccgattccagccattccaggatggctcctctgcgcagaggcgactggttgcactgcttactggcttttgtctgctccctgccacgaaatgtggaaattcctcagctgaaccaactcatgcgggagcttctcgagcagagctgctgccacagctgccccttcgcttccactgccgctgccaagtgctttgcgggactcctcaacaagcagcctccagggcaacagttggatgagttcctccagcttgctgtggacacagtggagactggcctggcctccggatcttctcgtaatcaggcttttgtactgctgctctgggtaaccaaggctttagtcctcagataccatcctctcagtgcctgccttaccacccggctcatgggcctcctcagtgatccagagctaggccctgcagcagctgatggcttctctctgctcatgtctgactgcactgatgtgttgactcgtgccgggcatgctgatgttcgaattatgttccgccagcggttcttcacagacaatgtgcctgctttggtccaaggcttccatgctgctccccaagatgtgaagccaaattatctaaagggtctgtctcatgtactcaacaggctacccaagcctgtgcttttaccagagctgcccacactcctttccttgctgctggaggcactgtcctgccatgactccgtggtccagctttccactctcagctgtctccagccccttctactggaatcaccccaaatcatgagtcttcatattgatactctggtcaccaaattcctgaccctcagctccagtcattcaatggctgtccggattgctgctctgcagtgtatgcatgctctcactcgcctacctgctcctgtgctactgccatacaaatcacaggtgatccgggccttagccaaacctctggatgacaagaagagacttgtgcgcaaggaagcagtgtctgcgaggggagaatggtttctactggggagcccaggtagctgagcccttggtcctggcctagacccttctgacaatctaacctccacatactaactattgagccatcctacaagacaagaagaccattggcctgtcttccccatggatgcagtacaaatgctgggcctctcctgcatggctgtgcaagacacttaaagagtcctgatttctaatgggttgttgaagaaactgagacttgtatttgaggaaaagacattggatctcggggctttcc

SEQ ID NO: 975 - DNA, 2497 bp, Cricetulus griseus
tggcctcactggctctcagcatgatgcctgacgcttggccatgtgtggtggcagatatggtttcggctcttccaggctgaggactctccggtggatggccagggccgttgtctggccctgctagagttgctgacagtactgcccgaggagttccagactagccgcttgccccagtaccgcaaaggtctggtgcgggccagcctggctgtggagtgtggggctgtctttccactcctggagcaactgctacaacagcccagctcgcccagctgtgtgcgtcagaaggtgctcaagtgcttctccagctgggtgcagctggaagtacctctgcaagactgtgaggcgctcattcaggctgccttcactgcactgcaggactcagagctctttgacagcagtgtggaggccattgtcaatgccatctcccagcctgatgcccaaaggatggggacatggagacctcccatggcatctgtcgcattgctgtggccctgggcgagaatcattctcgggccttgctagaccaagtagagcactggcggagcttcctggaactagtcaacatgatcatgttctgcactggcattcctggtcattatcctgtcaatgagaccaccagctccctcactctcaccttctggtacacactgcaggatgacattctgtcctttgaggcagagaagcaggctgtgtaccagcagctgtaccggccagtctacttcaagctggtggatgtgcttttgcgcaaagcccagttcccttccgatgaggaatatggattctggtcctcagatgaaaaggagcagttccgaatttacagggtggacatttcagacacgctcatgtatgtctatgagatgctgggggccgagctgcttagcaacctctatgacaagctgggccatttgctcaccagctcagaggagccctactcttggcagcacacagaggccctgctctatggcttccaatccatcgcggagaccatcgatgtcaactattctgatgtggtgcccgggctcattggcctcatcccacggatcagcatcagcaacgtgcagctggcagatactgtcatgttcaccattggagctctgtctgaatggttggctgaccaccccgtcatgatcaacaatgttctgccccttgtgctgcatgccctaggcaaccctgagctatctgtgtcttctgtgtctaccctcaaaaagatctgcagggagtgcaaatatgacctgccaccctatgctgccaacattgtagctgtctcccaggatgtgctgatgaagcagatccacaagacaagccagtgcatgtggctaatgcaggcactgggcttcctgctgtcagccctgcaggtggaggagatcctgaagaacctgcactcactcatctctccctacatccaacagctggagaagctggcagaagagataccgaatccctccaacaaactggccattgtccacatcttggggcttctttccaatctcttcaccacactggatgtcagtcatcatgaggatgatcacgaaggccctgagctccggaagctaccagtgccacagggacccaacccagtggtggtcgtgctacagcaagtcttccagctcatccagaaggtgctgagcaagtggctgaacgatgcccaggtggttgaggcagtgtgtgccatctttgaaaagtctgttaagacactgctggatgactttgcccccatggtgccacagctctgtgagatgctgggtcggatgtatagcaccatcccccaggcctctgctcttgacctcactcggcagctggtccacatctttgcccatgagcccgcccactttcccccaatagaggccctcttcctgctggtcacttccgtcactctcactctcttccagcaagggcccagggatcatcctgatattgttgattcatttatgcaactcctggcacaggctttgaagcggaagccagatttgttcctgtgtgagcgattggatgtcaaagctgtgttccagtgtgctgtgctagccctcaagttccctgaggcgccaactgtcaaggcctcctgtggcttctttactgaactactgcctcggtgtggggaaatagagtctgtggggaaagtggtacaggaagacggccgaatgctgctaatagcagtgctggaggccattggaggccaagcctcccgcagcctcatggactgctttgccgacatcctgttctccctgaacaaacactgctttagcctcctgagcatgtggatcaaggaggcactacagccgcctggtttcccatctgcccgtctcagccctgagcagaaggacactttcagccagcagatcctccgtgagcgagtgaacaagagaagggtgaaggagatggtgaaggaatttacactgttgtgtcggggactacatggcacggactatacagctgactactgagggacacctgtgtcccacgtaccccttcttacccctcctattcccaaagagtaaac

SEQ ID NO: 976 - DNA, 2496 bp, Cricetulus griseus
  modified_base (105)..(105): a, c, t, g, unknown or other
cttcaaaattctactgactcagatatcagtgatcttattaactttttacacacaccagaacataatggtgacaatgtttaatgacagtgactatgtatccgctgntccccatagtgcagctttaaatgtggtgcattcagaaaaggactatgtttttactgctgttttcaacagtactatggtttattctctaccagtaatgatgaacatcattagtaactactatctttatcatttaaatgtgactgaggctatccagatctggagtaccccattcattcaagaaattactgacatagtttttaaagttgtagctatattttcaagcagctttgcttggaatcatcgttactgcaatgccaccttactttgccatggaaaatgcagagaatcataagatcaaagcttatactcaacttaaactttcaggtcttttaccatcagcctattggggttggacaaactgttgtggattttccctgactttgattgctgggaagtttatttgtcatttcatcatggactatatttttatcctgtaaaatttcttgctgtggttgttttgcctttgttggctatgtaccatcagttattctgttcacttattgttgctttctttcaccctttaagaaaattttaaataccagggaattttggtcatttatctattctgtgacagcattggcttgtattgcagtcactgaaataactttctttttgggatattcagtttcaactgtttttcattacaccttttgcatagccattccaatctatccactcatgggttgcctgatttctttcataaagggttcttggaaaaatataccaaaaaatgaagatacctacaatccatgggataagcttttagttgctgttataatgccctacctgcagtgtgtactgtggattttcctcatacaacactatgagaaaaaacatggaggcagatcattaagaaaggatccctttttcaggaccctctcacaaaaggccaaaagtaagaagtttccggaaccaccagtcaatgaggatgaagatgaagatgtcaaagctgaaagactgaaggttaaagaactgatgagctgccagtgttgtgaggagaaaccagccattatggtatgcaatttgcataaagaatatgatgacaagaaagattttcttcattcaagaaaaacaaagaaagtagcaaccaaatacatctcgttctgtgtgagaaaaggagagatcttgggactgttgggtccaaatggtgctggcaaaagcacaattattaatattctggttggggatattgaaccaacttcaggccagatatttctaggtgattatatttcacattcaaatgaagatgatgaatccagtaagtgtatgggttactgccctcagacaaacccactgtggccagatattactctgcaagaacactttgaaatttatggagctgtgaaaggaatgagttcaagtgacatgaaagaagtaataagtcgaataacaaatgcccttgatttgaaagaacatcttcagaaaactataaagaaactacctgcagggatcaagcgaaagctgtgttttgctctcagtatgctggggaacccacaggttacgctactggatgagccatccacaggtatggaccccagagccaaacagcacatgtggagagctatccgaactgcatttaaaaacaaaaagcgggctgctcttctgaccactcattacatggaagaggcagaggctgtctgtgacagagtggcaattatggtgtccgggcagttaagatgtattggcacagtacagcatctaaagagtaagtttggcaaaggctactttttggaaattaaattaaaggactggatagaaaacctggaaatagaccgccttcaaagagaaatccaatatattttcccaaatgcaagccgccaagagagcttttcttctattttggcttataaaatccctagagaagatgttcagtccctgtcacaatcctttgctaagttggaagaagcaaaacatacttttgccattgaagaatatagcttttctcaagcaacactggaacaggtttttgtagaacttaccaaagaacaagaggaagaagataatagttgtggaactttaaacagcacactttggtgggaaagaacacaggaagatagagtagtattttaaatgttttaaaggcttttcttaatgtattttaatattgttaacattggttttcatctttttcctttgaaatagcatattacacaaaatgaaagtttattctcaggtgaattatttttgtatcagctattcttaaaaggtaaaaatttacttattttctattcataatgtgttgtatgtaagcaattctcaatgctgccctttaaaaaatgaatgtgcttattataataaaaaactttaagagctaaaaaactaaaaaaaaaaaaaaaaaaaaaaaaaaaaaaaaaaaaaaaaaaaaaaaaaaaaaaaaaaaaaaaaaaaaaa

SEQ ID NO: 977 - DNA, 2496 bp, Cricetulus griseus
acccccgcgcacactaacctccgcgtgcgagtcggtcgcgctccgagcccacccggccctgtactactactcggctttcctgtcaagatgcctgaggaggtgcaccatggcgaggaagaggtggagacctttgccttccaggcagaaatcgcccagctcatgtccttgatcataaatactttctactcaaacaaggagattttccttcgagaattgatctccaatgcttctgatgccttggacaagattcgctatgagagcctgacagacccttccaaattggacagcggcaaagagctgaagattgacatcatccccaaccctcaggagcgcacgctgactttggtggacacgggcattggcatgaccaaagctgatctcataaataacttgggaaccattgctaagtctggcacaaaggctttcatggaggctctccaggctggtgcagacatatccatgattgggcagtttggtgttggattctactctgcctatctcgtggcagagaaagtggttgtgatcacaaagcacaatgatgacgagcagtatgcttgggagtcctctgctggtggatccttcacagtgcgtgcagaccatggtgagcccattggccggggtaccaaagtcatccttcatctcaaagaagaccagacagagtacttagaggagaggagggtcaaggaagtggtgaagaaacactcgcagttcataggctatcccatcaccctctatttggagaaggaacgagagaaggagatcagtgatgatgaggcagaagaagagaagggtgagaaagaggaagaagataaggatgatgaggaaaagccaaagattgaagatgtgggatcagatgaggaagatgacagtggcaaagataagaaaaagaaaacaaagaagattaaggaaaaatacattgatcaggaagagttgaataagactaagcccatttggaccagaaaccctgatgacatcactcaagaagaatatggtgaattctataagagcctcaccaatgattgggaggaccacttggcagtcaagcacttctctgtagagggtcagttggaattcagagcattgctcttcattcctcggcgagctccctttgacctttttgagaacaagaagaagaagaacaatatcaaactgtacgtccgtcgtgtgttcatcatggacagctgtgatgagctgatccccgagtacctcaactttatccgtggcgtggtggactctgaggacctgcccctgaacatctctcgagaaatgctccaacagagcaagatcctgaaagttatccgtaaaaacattgtgaagaagtgccttgagctcttctctgagctggctgaagacaaagagaactataagaaattctacgaggccttctccaagaacttaaagcttggaatccatgaagattccactaaccgtcggcgtctctctgagctgctgcgctatcatacctctcagtctggagatgagatgacttccctgtcagaatatgtgtcccgcatgaaggagacacagaagtccatctattacatcactggtgagagcaaagagcaggtagccaactctgcctttgtggagcgtgtgcggaagcgaggctttgaagtggtgtacatgactgagcctattgatgagtactgcgtgcaacagctcaaggagtttgatggaaagagtctggtctcagtgactaaggaaggcctggagctgccagaagatgaggaagagaagaagaaaatggaggagagcaaggcaaaatttgagaatctctgcaagctcatgaaggagatcttggataagaaggttgagaaggtgaccatctccaataggctagtgtcttcaccctgctgcattgtgacaagcacctatggctggacagccaacatggagcggatcatgaaggcccaggcactcagagacaactctaccatgggctacatgatggccaaaaagcacctagagatcaaccctgaccaccccatcgtggagactctgaggcagaaggctgaggcagataaaaacgacaaagctgtcaaggatctggtggtgctgctgtttgagactgctctgctctcctctggtttctcacttgaggatccccaaacccactccaaccgcatctaccgcatgatcaaactaggcctgggtatcgatgaagatgaggtgacagcagaggagcccagtgctgctgttcctgatgagatccccccactcgagggtgatgaggatgcctcccgcatggaagaagtagattagagatcccctgggaagaccatgtcctctgtatagtttccctgagccccccccagctggccccaacctacctggctctctgttcaagctagaggatctctttatcctgtccttgtgccttaaggcaggaaagtcccctcccacagaatagcagggttgggtattgtgtattgtggttttgtttgttttattttgttctgaaattaaaagtatgtgaaaataaagaaaatgcagttt

SEQ ID NO: 978 - DNA, 2495 bp, Cricetulus griseus
cgcgggccgggtcgctgaggaaggcctaggccgtctgcttcacagcttgtcgagcgtctgcgcagcttctcccgcctcccgtccgctgcggccgggcgagcggaggccttccggagccatggaggacgaggtgattcgcattgccaagaagatggacaagatggtgcagaagaagaacgcggctggtgcattggatttgctgaaagagcttaagaatattcccatgactctggaattattacagtccacgagaattgggatgtctgtcaatgctattcgtaagcagagtacagatgaagaagtcacatctttagccaaatcactcatcaaatcctggaaaaaattattagatggtccatcaactgataaagaccctagaaagaaaagaaaaaagaaacctacaatttcatcacagaatagccctgaagcaagagaagaaagtagttccagcagcaatgtaagcagcagaaaggatgagacaaatgctcgagacacttatgtttcatcttttcctcgggcaccaagcacttctgattctgtgcggttaaaatgtagggagatgctagctgcagctctccggacgggagatgactacgttgctattggagccgatgaggaagaactgggatcacagattgaggaagctatatatcaagaaatacggaatacagacatgaaatacaaaaacagagtacggagtaggatatcaaatcttaaagatgcaaagaatccaaatttaaggaaaaatgtgctgtgtgggaatattcctcctgacctatttgctagaatgacagcagaggaaatggctagtgatgagctcaaagaaatgaggaaaaacctgaccaaagaagccatcagagagcatcagatggccaagacaggtgggacccagactgacttgttcacgtgtggcaaatgtaaaaagaagaactgcacttatacacaggtgcagactcgtagtgctgatgaaccaatgacaacgtttgttgtatgtaatgaatgtggaaatcgatggaagttctgttgagttggaagaatcggcaaggtatctggaccattaagaaaaatgggattttataattagctttaaaattaggccaggcaacttatttccctgcaaatgatatttgtaaacagtacacatcccatgggttggtttttgtttctcgcctaacatctttcttaaaggcgttccgtggtttcagttcagccaggagaccatagaagaattagataatgtgtcgcattttttttttttataagtaagcttatgttacattttgttaaatattaatgttttgagtctggaacacacaaaaattctgttgttcttcattaatgcataaagacaaattgcttttctcatcggtatgtacctaaaatattaatggagaagaaaaggagtaatataaacatcagagttacaaaatatgtattccagtagtacttgacaagcttatcaaaattgtgtatgctatttgaaatagtatttgaattgctcttaattaccgtgctcacaaagcctcggatccctagatttgcatctgtgactaacagcagtgatcatttcttgtatttctcatttatgtatattaccggttttaatagatagatctttgagaattgacttaattgacgcaatcacaatcagtttgggtttatttgactttgcactctattttagtttcacagaactctgttaaagtttctaggcttctcacaaagccactcacaggcatacttctggtgacttttcccccataagaagacatgctaggaaggaaatgtcagcatctttgtagagttccttgaggcagcatgactggacttgcacttgggaatctactgactaaggactaagcctaagaactgtgttaatcattaagctgtgctctttgcttatgaaggttgcaaaaagaaaaaagaaaatcttttagtctgaatcttttgtgctttttttcttacatgatgatgttgagcccactgaaatgtaggctgtagcaagtagttttacaatacatatgtcacaattaagttttacctttgtttaagtgtgtcctacttgttttgctggtaataagcagtggttttcacatagctttcttgatacagatattctgataaatatagtaaaggccacttggtggcacacacctttaatccccagaactcaggaagcaaaggcaagcagatctctgagtttgaggccagcctggtctatatagtgagttcctggacagccaggactacacagacaaaacccctgtctcaaccccccacccccccaaaaaagattggtccatgggtaatttctgtcactttaaaataaagtacattttgaaagaattagtttaacaataataagattaaaatagtcccacttttaagtgatccattttaaaatttgtaaatcaataaatgttttttgttgttaaacataaaaaaaaaaaaaaaaaaaaaaaaaaaaaaaaaaaaaaaaaaaaaaaaaaaaaaaa

SEQ ID NO: 979 - DNA, 2494 bp, Cricetulus griseus
taaagcttcagtgtgagactgtacccctctcggcagatcgccatctgcctggacccttactgtggcctcggctttgcactgtggtgtctgtgcagcgtctactccggacaccagtcagtgcttgttccccactggagctggagagcaatgtgtccctctggctgtctgctgtcagccagtataaggcccgtgttaccttctgttcctactcagtgtatggagatgtgcaccaagggtctgggcgcacagacaggcgcccttaggatgaaaggggtgaacctgtcatgtgtgcgcacatgcatggtagtagctgaggaacggccccggatctcactgacacagtccgttttccaagctgttcaaagacctgggccctccctgcacgtgctgtgagcaccaccttttgggtgcaggggtcaatgtggccatctgcctccagggcacaacaggcccagatcccacgactgtctacgtggacatgcgggcactgcgccatgacagagttcgtttgggtggaacggggctctccgcatagtctacccttgatggagtctggaaagatcctcccaggagtgaaggtcattattgcacacacggagaccaaagggcccctcggagactcacatctgggtgagatctgggtgagcagtccccacaatgccactgggtactacacagtctatggggaggagacacttcatgctgaccacttcagtgcccggctgagctttggagacacccagaccatttgggcaaggactggctaccttggctttcttcgcaggacagagctgactgatgccagtggagagcgacacgatgcactgtatgttgttgggtctctggatgaaacactagagctgagaggcatgcggtaccaccccatcgacatagaaacctctgtgatccgtgcacacaggagcattgcagaatgtgccgtgttcacctggaccaatctgctggtggtagtggtggagctggacggtctggagcaggatgccctggacctggtagcgctggtgaccaatgtcgtgctggaggagcactaccttgtggtgggggtggtggtcatcgtagaccctggggtgatccccatcaactctcggggtgagaaacagcgtatgcacctgcgcgacggcttcctggccgaccagctggaccccatctatgtggcctacaacatgtgagggctgttttctgctatgctgcgagcttgcacttttttaggctaaaaaaatattcctgatttctaaatatataatttcctgattatttattcccacttgtaacaacaagcttatatgtaaagtttatgctggagagaacttttgagccaagcctgcctaggagggctgatgaaaggagcagccccccacctccacactgacagactccaccgagccacacagcttcctttcccagtgattattggagcaggtgtgcctgtttgtctgcgtgtgttgtcactaatgctcagaatgtgccatttggactgttagatctatttcagatagataaaccagcatttaatttaaaatcactttcctagcctataacttagtgacatttaaactgcaagttctcatggcatcacaatattaattcttcttcatgaagtataccgatttattcttaagagcaggtctggaagcgcgagtgacatcctaaggtcttatccatgtgccagctgggtctcctacacactcaagtcgccccaggagcccggctctctaggatggacaccgctgcagcctctcggcttcgcattttagttacgtgcctataaaattttggccaaaccatttttagttattttatccagacttgaaatccaagtgatctaatattgtacttatgtcagaaaagagaatgtaaaatcttttagatacttggaagaatttgaagtcaagcatgaatctaagattatttttatatgactaatcagagattaatgttatcaagttgttggggcttaggggctttcaagggtagagaggtttatgaatcatacctgcttcacagaaacagctagatttttctagagttagcctggactcgtgcttcagtgagtctagctaactggtccctcactcacatcccacccccggaaagcactgtgtgcaggagcccttttgctcatggtatcatgtggtgtagtatgtggaaacatactggaatcttaataatcctgttataattgtgtacagaatccatgtcacttactacttggcgccagaggtttagcaacagactgatgaaggttcacagtagatagctgagaacagactacctatccacggtctcaacgttgtagttttatagtaaacagcgcttgtaaactttttgtattaaaaactcagtggcagtaagaacgttacttggtaagttaagattttaagaatcgtattaaaatgttttaaagttactctctgggaattctgtatatcacactaatttttttatatcatgttaataaaagctattgactttgtaa

SEQ ID NO: 980 - DNA, 2494 bp, Cricetulus griseus
ggaggatgcgttccagctagctgttaatgttaacagcaatcccaggaataaatctgaaaatcccatggtgcagctgttctatggtacttggggatgaatgggccatgttcctctccccactcctccctgggagtgtctgcacccccagctcctcggacagtcacagatgaggagatgaactctgttaagacctgtcttcagaggtggcggagtgagattgaacaggatatacaagatttaaagaattgtattgagagcaccacccaggctatcgagcagatgtactgtgatcctcttcttctatcaggtgccttatcgtttacacgcagttcttgttcatgaaggacaagccaatgctggacactactgggcttacatctataaccaacctcggcagatctggctcaaatacaatgatatctctgtcactgagtcttcctgggaggaacttgaaagagattcttatgggggcctgagaaatgtcagtgcctactgcttgatgtatatcaatgacaaaataccccatttcaatgcagaggcagctgctaacgaatctgatcaaatggcgggagaagtggaagcgctgtctgtggagctcaggcagtacatccaggaagataattggagatttgagcaggaggtggaggaatgggaagaagagcagtcctgtaagatcccacagatggagtcctccccaaactcctcatcacaggatttctccacatctcaagagtctccagcagcctcctctcatggtgtccgatgcttgtcctctgaacatgctgtgattgcaaaggagcagactgcccaagctattgcaaacacggcccatgcctacgagaagagtggggtggaagcagccttgagtgaggcatttcatgaagagtactccaggctctatcagcttgccaaagagacccccacctctcacagtgaccctcgccttcagcatgtccttgtctacttcttccaaaatgaagcacccaaaagggtagtagaacggacccttctggaacagtttgcagatagaaaccttagctatgacgagagatctatcagtatcatgaaggtggcccaggccaagctgatggaaattggtccagatgatatgaacatggaagagtataagaggtggcatgaagattacagtttgttccgaaaggtgtctgtgtacctcctgacaggcctggaactctttcaaaaaggaaagtaccaggaagcactttcttatctggtgtatgcctaccagagtaatgctgccctactgatgaaggggccccgaaggggggtgaaggagtctgtgatcgcactataccgcagaaaatgccttctggagctgaatgccaaggctgcttccctgtttgaaacgaatgatgaccactctgtaacagaaggcattaatgtgatgaatgaattgatcattccctgtatccacctgatcattaataatgacatctccaaggatgacttggatgccattgaggtcatgaggaaccattggtgctcttacctggggaaggatatcgcagaaaatctgcagctgtgtttaggggaattcttacccaggcttctagatccttctgcggaaatcatcgtcttgaaagagcctccaactattcgaccaaattctccctatgacctttgcagccgatttgcagctgtcatggagtccattcaaggagtctcaacagtaacagtgaaataagcccctcacagtccagactcagcctggtctctggtcacctgcctgctacacagcagtctgttgttgcagattcccctagaggaggactgggtggctgagcaagattcagaccctcacccctctcatgatgtgtgtttaaaaggattaaggataaagttgcacattttaggtacagaatcatgagagctatctccctgaagaaggtcagtgcattatagttttgaattatccagaagacctgaattgcctttttaatctcccataatacttggttttgtataatcctcatgccacttttaaattgcccttcaggcaccagtatttctgacagcagaagggtgactcatcagaactgaactggaggagcagttagttattagttgttttgtcaagttcagatgacatttaaaaatccttaactaccagagattggtaataaagtcttgcgtggctcttgagaatgatgaaaagggggtactgatgagccctcccttccacataattatcagaagcaggtgtctaaggctgccctggcctaataaaacattctgattttcttctttttccccccttttagaaaataagggatgtgaatttgtataaagaaaagaacatttatctgtatgtatatgtagagagaaatccatttttaaagaacttctaattggaaactcatgtcttaaccaaattttaaggattattggagaaatcatgggagggaagaacaatacaactatgcagattttataaatgtgcaataaaagtatttagttttaacctttggtgtgt

SEQ ID NO: 981 - DNA, 2494 bp, Cricetulus griseus
aaccaaggaaaaagcagagggggccccagaaccagggtagaaagggagagggggccccagaaccagggtagaaaggagagggggcccagaaccagggcaagatccggactcttcaggagcagctggagaatggccccaacacccagctggcccgcctgcagcaggagaactccatcttgagggatgcattgaaccaggccaccagtcaggtggagagcaagcagaacacagaactggcaaagctccgacaggagcttagcaaggtcaacaaggaactagtagagaagtcggaggcctcccggcaggaggagcaacaacggaaagctctggaagccaaggcagccacctttgagaagcaggtcctacagctgcaggcatcccataaagagagtgaagaggctctgcagaagcgccttgaggaggtcacccgggagctatgtcgggcccagagcagccatgccagcctccgggcagatgccgagaaggcccaggagcagcagcagcgaatggcagaactgcacagcaaattacagtcttctgaggtagaggtaaaaagcaagtgtgaggagctgagtaatcttcacgggcagctcaaggaggccagggcggagaacgaacagctcacagagaggatccattccatcgagacccttctggaagcaggccaggcccaaaatacccaggccagtcaagctgaggccgaccagcagcagattcgtctcaaggagctggaatcacaggtgttgagtctggagaaggagaccagtgagctcaaggaggctatggagcagcaaaaggggaagaacaatgacctccgagaaaagaactggaaggccatggaggcactggccttagctgagcggacctgtgaggagaagctacactctctaacccaagccaaggaggaatcagaaaagcagctccatttggctgaggcccagaccaaggaagtcctgctggccttgctcccagacctctccatctcagcacaccagaactatgctgagtggctgcgggaagtcaaagagaagggctctgagctgctgaagaaaccacctgcttccctagagccctccttggacgtagtctccaagttgagggaagccgaagagacccagaactccttgcaggctgagtgtgaccagtaccgcagcatcctggcggaaacggagggtatgctcaaagacctgcagaagagtgttgaggaggaagaacgtgtgtggaaggccaaggtgggagctgctgaagaggagctccagaagtcacgggtcacagtgaaacatctggaagacattgtagagaagctaaaaggagaacttgaaagctcagatcaggtgagggagcacacttcatttctggaagcagagctggagaagcatatggcagctgccagtgcagagtgccagaattatgccaaggaggtagcagggttgaggcagcttctgttagactctcagtctcagctggatgaagccaagagtgaagctcagaaacaaagcactgagcttgccctggtcaggcagcagttgagtgacatgaagagccacgtagaggatggtgacgtggctgggtctccagctgtccctccagccgagcaggaccctataaagctgaaaacacagctggagcggacagaggccatcctggaggatgagcagacacggcggcagaagctcacagctgagtttgaagaggctcagagcacagcctgtcgtttacaagaagagctggagaagctccgtgctgctggtggccccctggagtcttcaggaatagaagaggttacacagctgaaggagagactagaaaaagaaaagaggttaacgagtgacctggggcgtgccgccaccaaacttcaagagcttttgaagacgacccaggagcagctgacaaaagagaaggacacagtgaagaagttgcaagaacagctggaaaaagcagaggatggtagcagctcgaaggagggaacctctgtctgagtctcctcggcaaactgttcaacttaccaaaatgccttacacattccttacaaataaaccaaccaacaccgcgttatccaggcccaacctccagtgaagccattggagacaagtctcagaaccacagaaataaatcttccagacccccagtctgtaaaagaacctttgtcacatttgataaacactattcccgggagcagccctggaccacctcgagcagacgccaaagccctcatcaacgctgacagaccagagtgtgctgggagtccaggccgctcgggattatgtcaatcagtgcaattgtctgtatttctcagtggggccgggtcgggaagcaacaggccaggtggtgagttctctgaggctgctgagcagactggagggcccagcccagcccagcccagcaaggctgcagccctcacccctggaagttgccaagcagaactgacatgtgactacctggatgtcaatgccattaaaaccaacgtgttgcccggcaaaaaaaaaaaaaaaaa

SEQ ID NO: 982 - DNA, 2494 bp, Cricetulus griseus
cctcaacaagaagtgcacacatttgattgttccagagccaaagggggagaaatacgagcgtgctgtcaagagagcaagtattaagattgtcactcctgactgggtcctggactgcgtgactgagaagagcaggaaggatgaagccttttatcatcctcgtctgatcatctatgaggaggaggaagaggaggaggaggagggagacaacgaggagcaggactctcagaacgagggcagcactgaggagaagtcgagtgcggccagttctccagaagcctctcctgctgaccaaccttctcacccaagcccagagccgaggtgtccaaagggggattgatgttgatgactcttctgattcatccccgaaagcaggagcggagcttgaacccagccgccatctcatcagttctctccgcaagtccatcagcacccgttccctcagcagcagctccagtttccacagcaaccgttacaccctcagcagcagctgcatcgtcctcagcagcagctgcagccatttcagcagcagcatgccttgcagcagcagctccagcagctgcagcagcagcagcagcagcagctccaggccaccgccgcagcagcagcagcagcagcagctctttggacatgacccagcagtggagattccagaagaaggcttcttgctaggatgtgtgtttgcaattgcggactatccagagcagatgtcggataagcagctgctggccacctggaaaaggataatccaggcgcatggcggcactgtggaccccacattcacaagccgatgcacacaccttctctgcgaaagccaagtcagcagtatgtatgcacaggcgctacgggagaggaagcggtgtgtcactgcacactggctcaacacagtcctgaagaagaagaaactggtgccgccccatcgagccctgcatttccctgtggcatttccacccgggggcaaaccctgttcacagcatattatctctgtgactggatttgttgacaatgacagagatgacctgaagttaatgacatacctggcaggtgccaagtatacggggtacctgtgccgtagcaacactgtcctcatctgtaaagaaccaagtggtttgaagtacgagaaggccaaagaatggcggatcccgtgtgtgaatgcacagtggctgggggacattctgctgggaaacttggaggccctgcggcaggtgcagtacagccggtacaccgccttcaaccttccggacccctttgcgcccactcctcacttggtcctaagtcttttagatgcatggagggtcccagtgaaggtgactgcagagctcttgatgggtgtaagattaccccctaagctgaaaccgaatgaggttgccaacatccagccttcttctaaaagagccagaatcgaggacctgccacctcccactaagaagctgagtccagagctgatgccttacgtgcttttcacgggatttgagcctgttcaagttcagcagtacattaagaagctgtacaccctgggcggggaagttgccgagtccacgaagaagtgcacccatctcatcgccagcaaggtgactcggaccgtgaagttcctgacggccatctctgtggtgaggcacatcgtgactccggagtggctagaggagtgcttcaagtgccagaagttcatcgatgagcagaactatatcctgcgagatgctgaggcagaagtgctcttctctttcagtctggaagagtccttaaagcgagcccacgtttctcccctctttaagacaaagtatttctatatcacccctggcatctgcccgagccttgcaacaatgaaggccattgtagagtgtgcagggggcaaggtgctggccaagcagccatccttccggaagctcatggagcataaacagaataagagtctgtcagagatcattttaatatcctgtgagaatgacctgcacttatgtcgagagtactttgccagaggaatagatgttcataatgcggagtttgttctgacgggagtgctcacacagacactggactacgaatcatataaatttaactgacagcctcttgtgtgctgtgagcctggagcctggagcacagggtcgctgctggcagcgtgcacaccaggcctccctccctgcagagggcgtgttttccagctctgccttagggagaagcctctaccaggaagacagatgtaataactgactgcatcgtgttaagatgtgtgatcttattctaggaaacataaattatgttttgtattatatgcctaagagcccacattaagtcctctgattaatttgccaggtttttatgtgttttcagaaaactgtatgaaatttcatctacaaataaattatgtaaataaagactttgctgtctaaattatggatgttaaagatttgagatgttttgtactttgattatttttatttcttacacttttcttttatattgataacttgctcacatttaaataaatgtacttttgaac

SEQ ID NO: 983 - DNA, 2494 bp, Cricetulus griseus
gtgattggaagtgcccgatgcaaaagactttcgggagcgagaaggaagactccgggctgcccacaacctggtgaagctgggaatcaccaatctgtgtgtcattggaggtgatggcagcctcactggggctgacactttccgttcagagtggagtgacttgttgaatgacctccagaaagctgggaagatcacggctgaagaggctacaaagtctagctacctgaacattgtgggtctggttggctcaatcgacaatgacttctgtggcactgatatgaccattggtactgactctgccctacaccggatagtggagatcgtagacgccatcaccaccactgctcagagccaccagaggacttttgtgttagaagtgatgggccgtcactgtggatacctggccctcgtcacctctctgtcctgtggggccgattgggtttttattcctgaatgtccaccagatgatgactgggaagaacacctttgtcgtcggctcactgagacaaggacccgtggttctcgtctcaacatcatcattgttgctgagggtgcaatcgacaagaatggaaaaccaatcacctcagaagacatcaagaatctggttgtaaagcgtcttggatatgacaccagggtcactgttttgggacatgtgcagcgtggtgggacaccattcagcctttgatcggattctgggcagcaggatgggtgtagaagcagtgatggcacttttggaggggaccccagacaccccagcgtgtgtggtgagcctctctggtaaccaggcagtgcgcctgcccctcatggagtgtgtccaagtgaccaaagatgtgaccaaggctatggatgagaagagattcgatgaagccatgaagctgagaggccggagcttcatgaacaactgggaggtgtacaagcttctagctcatgtcagacccccagtctctaagggtgggttgcacacagtggctgtgatgaatgtgggggccccagctgcaggcatgaacgctgcggtccgctctactgtgaggattggccttatccagggcaaccgagtgctggttgtacatgatggctttgagggtctggccaaaggtcagattgaagaagctggctggagctatgttggtggctggacaggtcaaggtggttccaaacttggtactaaaaggactctgcccaagaagaacttggaacagatcagtgccaatataactaagtttaacattcagggtcttgtcatcattgggggctttgaggcttacacagggggcttggagctgatggagggcaggaaacaatttgatgagctctgcatcccatttgtggtcattcctgccacggtttccaataacgtccctggatcagacttcagcattggggctgacacagcactaaacaccatctgcacgacttgtgaccggattaagcagtctgcggcgggcaccaagcgtcgggtatttatcatcgagaccatgggtggctactgtggctatctggccaccatggcaggactagcagctggggctgatgctgcctacatttttgaggagcccttcaccattcgagatctacaggcaaatgtcgaacatctggtgcaaaagatgaaaacaactgtgaagagaggcttggtgttaaggaatgagaagtgcaatgagaactacaccactgacttcattttcaacctgtactctgaggagggaaaaggcatcttcgacagcaggaaaaacgtgcttggccacatgcaacagggtggaagtccgactccatttgataggaattttgccactaagatgggtgctaaggctatgaactggatgtctgggaaaatcaaagagagctaccgtaatggacggatctttgccaatactccagactcaggttgtgttctggggatgcgtaagaggaccctggtctttcagccagtgaccgagctgaaggaccagacagattttgagcaccggatccccaaagaacagtggtggctgaagctgaggccaatcctcaaaatccttgccaagtatgagattgatctggacacttctgaccacgcccatctggagcacatttctagaaagcggtctggagaagctgccgtctagacctctttggagggagagagtctgatcatggtcagctcatgccctggtagatctaagtccctgattcctcagtgtgttagccccagccctctaccctattaggtttccttgtccctgcaacctggatcagctgtggccaggagttgggggagggcagtgagtgaacctccctctaggtagctgtcattccttctaccccagcttcgtctctaacataggctggattcctctagtgctactgctacatttcagccacccagagttttcctaaaaataagctttatttatttctttgtgataacaaagagtcttagatccctttacttttaccacagtgatggagtataactacactaataaatgccagcttgtcactagtaaaaagaaaaaaaaaa

SEQ ID NO: 984 - DNA, 2493 bp, Cricetulus griseus
ggagaatacccggctgaagggaaaaataacaagggataaagacgttaggggagctcctagaggagtctcagatggaagcatccaggctcagacagaagggctgaggagctggtcaaggacactgagctgcctccaccgccacctgctccttcccttgggctccttcgatcccctggctgagctcacaggacaggatacacaggtccaggtacatcctcctgccaccactcccaccaccaccaccactcccaccaccactgaaaactccatggagaagccagcaccaacctccaggccttcatccaatggcacctcctctgactttgaagtggtccccaatgaggagcagaattctccacccaaaactgacagccaccctaggaacatgatggagcctggggcccccacccctagaggacagcaatctcatgctccacctgcagcgcctggagaccaccctgagcgtgtgtgccgaggagcctgaccacagccagctcttcacccacttgggccgcatggcccttgagttcaacagattagcctccaaggtgcataaaaatgagcaacgcacatccatcctgcagaccttgtgcgagcagctgcgtcaggagaatgaagccctgaaggccaagttggacaagggtctggaacagcgggatcaagctgctgaaaggctacgggaggagaacatggagctcaaaaaaactgttgatgaacagcagctgcaaagagagcctctgtgggcagcccagctccccaaagacagagggtgctggcaagaagggtatggccggacagcagcaggcgtaaagtccccgaggtgggggtcttgggtaccgctgagaagaaggtgaaggtgctggaacagcaacgtatggagctgctggaagtgaacaagcagtgggaccagcatttccggtccatgaagcagcagtatgagcagaagatcacagagttacgccagaagctagtggacctgcagaaacaggtgactgagctggaggctgagcgtgagcagaagcagcgggactttgaccagaaactcctcctggctaagtcgaagattgagatggaagagactgataaggaacggctgacagtggaggccaaggagttgcacaagaaagtcaggcacctgcaggatcagctgagtccactcacccggcatcgagaataccaggaaaaggagatccagcggctcaataaggccctggaggatgccctcagcatccaggcctctccatcatcaccaacaccagcttttggaagcccagaaggggctgggagccacctgaggaagcaggagctagtgacacagaatgagctgctgaaacagcaggtaaagatctttgaggaggacttccagagggaacggagtgaccgtgagcgcatgaatgaagagaaggaagagctgaagaagcaggtagagaagctgcaggcccaggtcaccctgtcaaatgttcagctcaaagcactcaaagatgaggagaaggccagagaagccctcaagcagcagaagaggaaagcaaaggcctcaggagagcgctaccacgtcgaaccccaccctgagcacctctgcggcgcctatccctatgcctacccacccatgccacccatggggcctcaccatgctttcaaggactggtcccagatccgctaccctccacccgccatgcccatggagcacccgcccccactccccaactctcacctcttccatctggcagagtacacctggcttccaccctatgcagggattcggaatcccacctcccaagtgatggatccacccccagacaggcctacagaaccagagtctgcaaaaaatgactgtgaggggcctcagtgagaccacattgggtcatttggctccaccttcatcttgcagagccagctgacctcagattgccgagaaactagaagccatgtgcacgttctgtgtggcccacgccttggctgaacagagaggctgggaggagcaggcaacttacatccccagccccacctccaactgtttacaagactagggagactccacccacaaggcctcaagtttttctggatgcagctaggagaaattcaacgcaccctgcctcttgccaagacaaaggggcttcacctggctttgacttgcccccttttgctgaggccactggctgtccattctaagagtggggtgcaactaacaccctttcctctcagaaccgtgaagaattggttccaggctctccagagaccacgcccatttcatgtgcatgtgtaatttttgcttcaagctctgtagcaggatctgcatcatgcccctctccttacccctctgtgaggagttatgggaagggggctttgtctctagagaagagagtggtggcatgttctgatgctagcgtgcactccactgcacccatggcagcctctgagagccaccatgatctgggatacaggccacatcatccatgtctgctgaagggccccagcctgaagctgccttcggcc

SEQ ID NO: 985 - DNA, 2493 bp, Cricetulus griseus
  modified_base (454)..(454): a, c, t, g, unknown or other
gcaggggaggaggcctggctgcagcagtgtgcccagcgcatcaacgatgagctggagggcctggggctggagggggccagcgagggtgaggccccgcgggatgactgctacgactcctccagcttgccagatgacatctcagtggtcaaggtagaggataacttcgagggcgagcggcctggccggcgctccaagaagatttggctggtgcccattgattttgacaagctggagatccctcagcctgacttcgagatgccaggctcagactgcctgctgagcaaggagcagctgcgtagcatctatgagagcagcctgtccattggcaactttgcctccgcctgctggtgcacctgttcccagagctcttcacccacgagaacctgcgcaagcagtataactgcagcgggtccctgggcaagaaacagctggatccaggttgatccgccactangttcagctgctctaccctcgagccaagaacgaccgcgtgtggactctggagttcgtgggcaagctggacgagcgctgtcgacgcagggacacggagcagcggcgctcctaccagcagcagcgtaaggtccacgtgcctggccccgagtgccgggacctagcaagttatgcaatcaaccccgagaggttcagagaggagtttgaggggcccccgctgcctcctgaaaggagcagcaaagacttctgcaaaatccccctggatgagctggttgtcccctcgcccgattttccggtgccttccccttacctgctgtcggacaaggaggtacgtgaaatcgtgcagcagagcctgtcagtgggcaacttcgctgcccggctcctggttaggctcttccctgaactcttcacggctgagaaccttcgactgcagtacaaccactccggggcttgtaacaagaagcagctggaccccacgcggctgaggcttatccgccattatgtggaagctgtctaccccgtggagaagatggaggaggtgtggcactatgaatgtatacccagcatcgatgagcgttgtcgccgccccaataggaaaaagtgcgatatcctcaagaaagccaagaaagtggagaagtgacaggggctgggactgcccagtgaccttggtcatcacaggctgagcaatgggtgcccttgggaccgagcatcctctggagctcatgtatggtacccacagacaggcaccttatgtcagtggggagtggtttcctacgtttgcacacgtaaacacctacccagccacacacacacatatacgcaccaaccccaaagatggccttggtgctctcttactgcttccactagtttgagagaattccatgggtatttttttctggttcttgagtaaccaagaggattccaagccatgtgagaattgtcctgctttctagagtgcggaatgtggccctgcaatgtcagaagcacagtcggttacttaggttttagaagtcccactctgggagctaatttcctggcccctggactgtatggtccctcatttacccagccatacaggtggctccagtgggcacttcttttcagaagcaatataaatatagaatacttattttttcagaattaaataggtttcatgaaatctgttggcactgctttccttgttccccatctaaattcttccttcgtgtttggattttttgccttgtatacagaggactaaagattagcacagacattctgacgttgagtaaggtagtatgtcacagtgggtggtagaggtcttgtttttctctgttaggaagttgttaaagagtgtatgaagatagtcatgaatgtatagtgttcgaatcctgcttttagttcatgtggccatgtctgtctgatgacaaatgtttgtcagggaataaagtgtctagtgttattagcactcagtgcccttccccttcagtgttgagcccccaaccttcctttccttttaaggggtgaggggctcatctcagcagcaatcatcaaccgaccaatgggatctacttagtggtcactggatttggcctgatcataccacagcatggccgcttgggttcttgtagagatagcctcactttctaccattcctccagagattgcatcttgcctgaccaggaggggcctggagactctttattggagtcactgggtcattctaaagtgggggtgagggctcagggctggtactgctgtgggaattccttgcctctcgtagatccagccttaatgtctgacatcctagcatgagcagaccctgcacagagtgggtatcagagttcctactgtgaggagtaaacaatgaggacagttttaccaaagagaatgagataccacgtcatgtctgcctgttacgattgattgagtgcacccttagaaaactgaatgtaacacaaacccaggacatttttggaaattgtatgctctttagcaactttgtgtgaatttttatacaagcactgttttattaattatataaaatataaaaatagaaaaact

SEQ ID NO: 986 - DNA, 2492 bp, Cricetulus griseus
ccaacaaacaggtgtgcaatccacggaacccctgcacagatgggacacacgactgcaacaagaatgccaagtgcaactacctgggccattacagcgaccccatgtaccgctgtgagtgcaagcctggctatgcaggcaatggcatcatctgtggcgaggacacagacctcgacggctggcctaatgaggacctggtgtgtgtggccaatgcaacttaccactgcaaaaaggacaactgtcccaaccttcccaactcaggacaagaagactatgacaaagacggaattggcgatgcctgtgatgacgatgatgacaatgacaaaatcccagatgatagggacaactgcccattccattacaacccagcccagtatgactatgacagagatgatgtgggagaccgctgtgacaacgcccccataccagaaccttgatccctacgtgcctaatgccaaccaggctgaccatgataaagatggcaaaggagatgcctgtgaccacgatgatgacaacgatggcattcctgatgacagggacaactgcaggctggtgcccaatcctgaccagaaggactctgatggtgatggcagaggtgatgcctgcaaagatgactttgaccatgataatgtgcgcatagtgtggactctaagagcaggtgacctgcctcagaaaatgcagtcccagactcagcactctcagcctttcacggatgagaacgcctcctccaagaacatgaagaatgactttggtttgcttttgtgaaagcaaacacatctatttacttcccaccaggaaggtgcccactccactctgccttgcccacagagccagggctcctgtgaggtcatcttggagcagcactttcagaagcattttcaggcatgtcagagggagaaggacccactaggactcagcaccgagccacccctgacagaagtcctcaggggtggggaagcagaagccaaagtgctagggagggtgcatagccaagagacaattgtatgaagaagaaatatggaggagctgttacttgttcggtactaaatcattttcaggggacagaaagacttgctgcatttcctttatgctgactcgtgggagttaacccaaccatcgatacaggcacttgagtaacaggaagggagggaaagcctggcttctggacttcctcctccctttgggcacttctcacacacctgcagtggccagggtggggggcctctgcaggaggggcagcatgcctttattttatggttagaaaggcacaaaatttctatcaacctagctaaaacattccttttccttgtttcttttttccttgtttctttttttctccctctgttaccatggagttttccgattctcttctggtttttgtttaacaaacgctttagcagtgtaatatatttatattttttctccctattctggaggacctgccagaaggattgtttctgaagcaggaagcgtgggactatctgaaccatcctcatagtgagtctttatgactgtaagattgtaaatacagattatttattaaccctgttctacctggaattagattgcatatggcaaatgtttgccagcaggtagctgaggcggatcagcaaattgctccagaaccagtgtgtggaatgccaacagaagtcatcacttttcatttggggcttagagtgaatgatttggactcctttggcttttccccttaattttctctgtcttgtgaagtggaattaggtggctgcccatttgtgtgtgtttctccttgtaaaggaagccatgaacactctaaggctagtccacaccactccttgtgcctatttccaggaagaagaagaaaacattatcaccgttctttttttattttcccaaaagatacaaaggtggaacttatatacaaatattacctcatttgttgtgtgactgggtaaagaattttggaacaagtagaaagagtttaagtgtcaaaaacttaaaactactgtcgtgtctaaaaagtcagtgttgtacatagcataaaaagcctttgcagaagatgatcccaataaagaaatagctttgaaatgttaaatacaacttctcaaagttctggttttgttctatcatcttgtacaccgttgctttatttttataaattattttctcattgccattggaatagagatctcaaactatgtagatatgctatttaaataatttatcaggaaatactgtctgtagagttagtatttctatttttatacgtttgcacactgaattgaagaaatgttggttttccttgttttagtttgtttctttgtttttgtttttgttttttgcttttttactccccagtttttactatttgccaatacccttttttctaggaatgtgctttttttttttttgtacacatttttattcattttacattctaaaacagtgtaacttgtatattactgtttcttatgtacaaggaacaataataaatcatatggagatttatatttata

SEQ ID NO: 987 - DNA, 2491 bp, Cricetulus griseus
acagcgcggctcggaacatgagaattggaaaggaaattagaagaaaactaagactacacatcgacgagcaatgagactgaaaaaggaaagcgaatgtctgcgattaaaaattttggtgcttcgaaatgaactggaaagacagaagaaagccctgggacgggaggtggccttcctgcataagcaacaaatggctctacaggacaaaggaagtgcattttcaactgagcacggcaagcttcaacatcagaaggaatccctgagtgagttgcggaaggagtgcactgcaaaaagagaactctttctgaagactaatgctcagttgacaattcgttgcaggcagttactctctgagctttcctacatttaccctattgatttgaacgagcataaggattattttgtatgtggtgtcaagttgcccaattctgaagacttccaagcaaaagatgatggaagcattgccgttgcccttggttacactgcacatttggtctccatgatttcctttttcctacaagtacccctcagatatcccataattcataaggggtccagatcaacaatcaaagataatatcaacgacaagctgactgaaaaggagcgagagtttccactgtatccaaagggaggggagaagctgcagtttgattatggtgtctaccttctgaacaagaacatagcacagctgagataccagcatggccttgggactccagacttgaggcaaacccttcctaacctgaaaaacttcatggagcacggactcatggtcaggtgcgacagacatcacacctccagtgccatccctgttccaaagaggcaaagctccatgtttgggggtgcagatgtaggcttctctgggggtatcccttcaccagacaaaggacatcgaaaacgggccagctcagagaatgagagactccaatacaaaacccctcctcccagctacaattcggcattgacacagcctggagtggccatgcccaccatgggagattctgagaggaaggtcacaccactgtcctcctccttggacacctctctggacttctccaaagaaaataagaaaataggagtagacctgggcaacagtgtaagtgcagcccatgggaactcggactccagccagcaaggggaagcccttcctgggcacctggcagccgtgaatggcactgcactgcccagtgagcaggctggctctgccagtgcactgctgccaggccagtgccacccagccccctcagctgagctctgctgtgccgtggagcaagcagaagaaatcattggcctggaagccacaggcttcacctcaggcgaccaacttgaagctctcagctgcatcccagtggacagtgcagtggcagtggagtgcgatgagcaagtgctgggagaattcgaggagttctctcggaggatctatgccctcagcgaaaacgtgtccagcttccgccggccgcgcaggagttctgataagtgaggagagcgggcagacagggcagacagtaagaccagggcagagccactgccctccaccaggcccaagctgcacttaatctttttaataattctgacacaaatgagtatcggtggaggagattcctcagaaaggctgactttgggaacagagggaactcgggatcattgggtaccagtggggccagtccctgagatttgctttccaggtctggtgattgtttccaggcaaaggtcaccttcgcacttacagctcgagtcatcttataggcattcgtctgcgctttatttacacatgggtgttttcttcagaaggaagatgataatatatatgtaatagaacgaactcacctttagtttctcaaaagcatttgccctcgctattgtttgtaaaactttgcaaaatggaatattcaaaaatagctttgtaccacttctatggccatctgttaagctgatgaataagaaccagaatgggggtccttgtaccaggccctccagcccgagtaccacaatcagactgcagatcccactgtggcctgctttctcaagatgggccatgcaccatgaaagctggggctgtagattcactagtctaaaaccaacagatattatgttctgttggtccaaaactgggcacacctctagcaatacactccccagataaagaccccctagatttaaatcccaagttaacttattacgtttcattcagaaggaagccattatatatgacaagtatatgtagagtcaggatgtccagtttgaagacagcaagacaattgagaggtagctggattaagagaatagatgaagcatagacaatgtgcaattttacaatgttaaattatgttcttgaaatccattgtcattctgcattcagatttcatttactgttgcattatacattatgtacccacagacattgcctcagggttgcaagctcttaaagaaaaacttatccacatatccatgtattgtatagaagaataaaaattgaatttacttcacttgacct

SEQ ID NO: 988 - DNA, 2490 bp, Cricetulus griseus
ttgaggggtcagagagatccggaccagtccgcggagcagcctagtgggctccggagaaaagccaacatgttaaggatacctgtaaaaagggccataatagccctttctaagtctgctaaaggatatgttcgaacaactgccacagcagcaagtaacttgattgaagtatttgttgatggtcagtctgtcatggtggaaccaggaactactgtcttgcaggcttgcgagaaggttggcattcagatccctcggttctgttaccatgaaaggttgtctgttgctgggaactgcaggatgtgcctggtggaaattgagaaagctccaaaggttgtagctgcttgtgctatgcctgttatgaagggctggaatatcctgactaactcggaaaaatctaagaaagccagagaaggtgtgatggagttcttattagcaaatcacccattggactgtcctatttgtgaccagggaggtgaatgtgatctgcaggaccagtccatgatgtttggaagcgataggagccggtttctagaggggaaacgtgctgtggaggacaagaacattggaccattggtaaagactatcatgactagatgtatacagtgtactcgatgcatcaggtttgcaagtgagattgcaggagtagatgatttgggcacaacgggcagaggaaatgacatgcaagttggcacatacattgaaaaaatgttcatgtctgaattgtctgggaatatcattgatatctgccctgtaggtgccctaacctctaagccttatgcctttactgcccgaccttgggaaacaagaaagacagagtccattgacgtaatggatgcagtggggagtaacattgtggttagcacgaggacaggagaggtaatgaggattttgccacgaatgcatgaagatattaatgaagaatggatctctgataaaaccagatttgcctatgatggactaaaacgtcaaagactgactgagccgatggtcagaaatgaaaaggggcttttaacttatacctcctgggaagatgcactctctcgtgtagctgaaatgttacagagcttccaaggcaaggatgtggccgcaattgtaggtggcttggtggatgctgaagccttagtagctctgaaagatttgcttaataaagtagactctgacaacttatgcactgaagagatcttccccactgaaggagctggcacagatttacgctccaattatcttctcaatacaacaattgctggtgtggaagaggcggatgttgttcttctcgttggcacaaacccacgttttgaggccccgttatttaatgctagaattcgaaagagctggcttcataatgacttaaaagtggctctcataggtagtccagtggacctcacttacagatacaaccatctaggagattctcctaaaattctgcaatacattgcttcggggaaccatcttttcagccaggtcttaaaggaagctaaaaaaccaatggtggtgttaggcagttctgcactccagagaaatgatggagcagcaattcttgcagctgtgtccaatattgcacaaatgattcgagtgacgagcggtgtttctgaagactggaaagttatgaatatcctgcataggattgcaagccaggtagctgctttggaccttggctataaacctgggatagacgcaattaggaagaaccctcccaaagtgctgtttcttctgggagcagatggaggttgtgtcacacgacaggacttgccaaaggattgtttcattatttaccaaggccatcatggtgatgtgggtgctcccatagctgatgttattctcccaggggctgcttacacagaaaagtctgctacttatgtcaatactgagggtagagcccagcaaaccaaagtagctgtgacgcctcctggcttggcaagagaagactggaaaatcataagagctctctcggagattgcaggtctcactcttccatatgatactctggatcaagtgaggaaccgtctagaagaggtgtctcctaatcttgttcgatatgatgatgttgaaggagcgaattacttccagcaagcaactgagcttgccaagctagtgaaccagaaacttcttgctgacccactcgttccacctcagctaactataaaagacttctatatgacagattcaatcagtagagcctcacagacaatggccaagtgtgtcaaagctgtcacagagggagctcaggctgtagaggaaccatccatatgctgagacatctaccagggacccagttttgctatagagagtaaatggacactggtgtaatcccttacaaattaatgttttccaacgtgattctgaatgatgtaatatttaaagttatactatgcttgtttgaacatggtattacacttatcaaaaatcttggcagtttaagatttattaaagtgtattatgtgcaagcattccgtagtttaataaaactattgtttgttctttaatagttaaaaa

SEQ ID NO: 989 - DNA, 2489 bp, Cricetulus griseus
  modified_base (741)..(741): a, c, t, g, unknown or other
tctgtcacctatgatgattctgtgggagtggaagtgtccagtgacagcttctgggaggttggaaactacaaacggactgtgaagcggatcgatgatggccaccgcctgtgtggtgacctcatgaactgtttgcatgagcgagcacgcattgagaaggcatatgcacagcagctcactgagtgggcccgacgctggaagcagcttgtagagaagggaccacagtatgggactgtggagaaggcctggatggctgtcatgtctgaagcagagagggtgagtgagctgcacctggaagtgaaggcgtcactgatgaatgaagactttgagaagatcaagaactggcagaaggaagcctttcacaaacagatgatgggaggcttcaaggagaccaaggaagcagaggatggcttccggaaggcccagaagccctgggccaagaagctgaaagaggtagaagcagcaaagaaagcccaccacacagcatgcaaagaggagaaactggccatctctcgagaagccaacagcaaagcggatccatcgctcaaccctgaacagctgaagaaactgcaagacaagatagaaaaatgcaagcaggatgtcctgaagaccaaggacaagtatgagaaggccctgaaggagcttgatcagaccacaccccagtacatggagaacatggagcaggtgtttgagcagtgccagcagtttgaagagaagcgcttgcgtcttcttccgggaggttcngctggaggttcagaagcacatggccatgaactggccacagtttgaggagtggtctgcagatctgaatcgaactctcagccggagagagaagaagaaggctgctgatggtgtcaccctaacaggaatcaaccagacaggggaccattctgggcagaacaagactggcagcaaccttagtgtcccgagcaaccccgcccagtccacgcagttacagtccagctacaaccccttcgaggacgaggacgacacgggcagcaccgtcagtgagaaggaagacattaagaccaaaaaatgtcagcagctacgagaagactcagaattaccctgctgactggtctgatgacgagtctaacaacccttcttcaccacggatgccaatggggactctaacccatttgacgaggacactacctcaggatcggaagtgcgagttcgggccctctatgactatgaggggcaggaacacgatgagctgagcttcaaggctggagatgaactgaccaagatagaggacgaggatgaacagggttggtgcaagggacgcttggacagcggtcaggttggcctatatccagccaactacgttgaggctatccagtgacaggccatgggcaggctggcggagagacggaagtggggagttcaggagctccgttagccttagcctgtgcagcccccagcagccatgttggcatccactccacctgcaaacgatgatggttgtgttaggcttcctggtgtgttttgaaggcagatgaactggtgatttcactggggacttggcccctttccaagcacatctgggcagatctaggcacaggaagacatggtccaacagcgaaagccaagcccctccctacccgtaccatctctttgtatcatggatctgcaccttcttgcccttatctctcctgagtcaatgatggatcacactgattcttgttccactgattattttctctgatgaatccctgcctacaagttcagtgaacaaactttaacgccattttctgagtaaagagtttgaggttttaatttaaaggcaatgtacagttatacttttttatatgctcttccagtcacgtaaattatggcctacattgatctgagatgatctccatgtaagctgtcttcatttctctgttttgtccagatgtggggttgctgcagcagggttccatggcaagtgccagttgcaggggtaacattttgcagcattccccaacatcactatgtttagaaattattttcactctattctggcttcagtttttacagattaacagttttattagtgatttggaaagttaaaagaagactaacttttcaaagcagctgcatctatagattaagatgctttacattagactcatgtcttgatgtatatctgtatatattatttgatattcagagaatctataaagttcacctactcttgaagcattggtggcttctgacagcaggttttgtcaactgcttgaagcccatggcattgaggcacaggcatggctggccaacagcctcctcccggttaagatgtggctctgacctctgagtggagactgctgagaagtctaattctccctggccagaactctagctccatgtcagagcactggaaaatctcccaggtctttgcagtcatcacaggcttcacggttcctgtgccactcactggagagttggagggctgctgctgctgctgctgctgctgctgctgctgctgctgctgctgttgctgctgctgc

SEQ ID NO: 990 - DNA, 2488 bp, Cricetulus griseus
ggactggctgagggaactgatcaggccacagcgctacgagaacgtgtccagcagggccaggagaagccgcgcaggggtttcaggaggaactgagggactttgaatatgtcggggattgccctcagccgacttgcccaggaaaggaaagcttggagaaaggaccacccttttggctttgtggctgtcccaacaaagaaccctgatggcacgatgaacctgatgaattgggagtgcgctatccctggaaagaaggggactccatgggaaggaggcttgttcaaactacggatgcttttcaaagatgactatccgtcctcaccaccaaaatgtaaatttgagccaccactgtttcacccaaatgtgtatccttctggcacagtgtgcctgtccatcctggaggaagacaaggactggaggccagctatcacgatcaaacagatcttattaggaatacaagaacttctaaatgaaccaaatattcaagacccagctcaagcagaggcctacacaatttactgccaaaacagagtggaatatgagaaaagggttcgagcacaagcgaagaagtttgccccctcataagcagcggcactaaggctccatgacgaggaagggattggcttggcaagaacttgtttacaactttttgcagatctaagtcgctgcgtacagttactagtcgcctgggagggttgagcgggcgccattttccatttccgccactggcatttacagtcttttgtatttttgattgttatgtaagacttgcttttattttaatattgatgtcagtatttcaactgctgtaaaatgataaacttttgtacttggtaagcccctaggagctagtttcttcgcgctcggatgcaggcatgcttcccactgttctctggcctccagctggctgtatgacagatccacactgtccctctctccccatcctcgtcctcctcagaaacctgggctgttgcttatgagcctcagatccaaagttggccagcgtctccattctgcacctcttcctttgtgtttatatggcgttttgtctgtgttgctgtttagagtaaataaactgtttatataaaggtttttgttgcattatcatcattaaaatgtgaggaggtacttcagtatgtctggccctccttatatggctgcagcccttgccaggcaccaaggctgagccccaagactagcacctaggagttctcacagcttctgctagagttgtgcccaggccccttgcagctccatcttcatctggttctttgtaaataggactgtgtatagaggcgtattctattctccccacctgggtcttgggccttaaggtaccaggcagcgtgagaccctcaagaagtcggaatccacatccagccttcataaacccagcagggtgaaagattggctgatccagaccaaggctgtggccaagtaagggccaaggacacagtgacctgcattgatttccctgcctgcaaatactgtgggtcccactgcgccctggtagctggcttcaggccttttgatgccctgcccttgcaccctggaggaggcaatcctgccaccagccctggcaaacagcaggcccttgtctgagcacctgagcacacagctcctgcacctcctggcctgcattcagtcccaccctacaacctagagaccagcctggctgtagcctgggcacagtatggcctcaggtaccactgtccacatactctgcttgctggacctggtctggggtgaagctgctatctagcggtggcctctgggcccaactgggtctgtgatcttggggcttacagaccaccgggagatgcagtggacatagccagtgatcacagtctccttcagacttgttcctgacatcccctggaagacccttggaatgggaaccagtcaccagtggctcaagttcagggaccaagcaagggccaggtctgcaaccaggagtcttcactctgaaattggagagacttgtgctcccacagctggtggcacctgtatggactgggttactagtgccttgtgggtatatttagccacaagtacaggccggagccgaggttgatggacagttgcagttggtggcacagggcctcacctggggagttcaggctgttgtgtgtgtgtagcctgctctcagaatgtcttattttgtaacaactgactacatttagtaataggtacacatgtatatggttaatatatggaaattcaatatattttatagctaaagtattctaaagtaactgatgtttctagcaaactgtagtgactccagctatgaaatgttccttttgtaccacagtccttggctaccagagatgtgaatcttgtaacatgagaatgtggtctgtgaccatcctgtgttcagatggtggggaagagggtgtcccagcatgaggcctcattggtaaggaattgtgggcaacacataaaccactgtatctacaaatcctctaattaaaacatttccacaaactgc

SEQ ID NO: 991 - DNA, 2488 bp, Cricetulus griseus
  modified_base (2369)..(2369): a, c, t, g, unknown or other
  modified_base (2373)..(2373): a, c, t, g, unknown or other
gtggctggcaacagccagtgtggcgactgtggccagccagatcctcgctgggccagcatcaacctgggtgtgctgctctgtattgagtgctcaggcatccacaggagcttgggtgttcactgctctaaggtacggtccctgacactggattcctgggagccagagctgctaaagctgatgtgtgagcttggaaatagcaccatgaaccagatctatgaggcccagtgtgagggaccaggcattaaaaaacctacagccagtagttccaggcaggacaaagaggcatggatcaaggacaaatatgttgaaaagaagtttctgcggaagttgacctctgcaccagcccgggaagccccgagacgctggaggcacagaagtgccagcgccctcacagctcccctcacgcccctacttcccgccgcaaggtccggcttgagcctgtcctgccctccatcgctgctttgtcctcagctggcactatggagcgcaagttccgccgagactccctcttctgccctgatgagctggattccctcttctcctactttgatacaggacgcagtctaagcagtgacagtggtcttaggaggtagtctctgatggcagttcagatgtcctggccttcagcacaggctctgtcgtagacagtgtcacagaggaagaggctgccgagtccgaggagtccagcagtgaggttgatggagaagccgaggcatggagcctggcagatgtacgtgagctgcatcctgggctgctggcacaccaagccgcacgcactcgagatctccctgcactggctgcagcgctggcccacggagctgaagtcaactgggctgatgcagcagacgagggcaagacaccactggtgcaggctgtgctagggggttccttgattgtctgtgagttccttctgcaaaatggagctgatgtgaaccaaagagacagccttggccgggcacccttgcaccatgctacacttttgggacacactggccaggtctgtctattcctgaagcgggggctgaccaacatgccttggaccaggagcagcaggatccactgaccatcgcagttcaagcagcaaacgctgacattgtcacactgcttcgcctggcccgcatggctgaggagatgagagaagctgaggcaccccctggccagccaggccccctgccaggcagcagtcctacagagctgcagtaccgcaggtgcatccaggagttcattggcctccacctagaggaaagctagggcctggcaggccgggcagctgagggacccctaccctgaccccagcctacccggcccagaaatcctgcatgttcctgaagaccctagcccctcatctagccacagccctgcctgtgacaactgtgggcccatcccaacagcccagtattttggcatttctggagtccccactctcctgctcttccctccttctggctgctttaatgctcagccagaggacagggacccaagcactgaatcttttgaagccccacatttgggggccttcttctagcctggggctggtggctggccaccagcaccttccctggcaggagtggcagcccacccagggaatcaacctgagtacctcgctcagtgaccccagcatccaggttgggctttgatggtgctgggaggtggaactttggcccaggccttccacccaggctggacgcaggcgtctcaaggccacgtggctggccacttgggtccttgtgcttgagagcctagatccatcctgccttctccagaggcactgtctggtttacctgggccagagcccatacctaaagcaactggcactttccaccctgtgcccaatgttctttgttactgactgagaggattttctacaacgacctcattctgactttgtctgcgtctttttctgtggactctcaaggaccatcctgatcccagctcttcctgttgctgggaaggcccacagagatctccccctgccctgcccctaagcttcactcctcgggctgggcctctgataggtccagtggtcccttatttgagggggcccaccaatgccttcaatttccctttttttctggaggagttccaggatagaggctgggcccctctgcatacatactatggagcccttgtttaggtcaagggcactacgctggtcactatgcaaatactgccctgggagcatccatgggcagtaaggtaggcactggatcagggcctctgactcccttgcttgatggctgcggccctaaagagcagaattggcttattcctcctgcttgagctctgccccaccacctaccctgcccacctttgggctggcaggaatcccactcccttcctgctctgatcactctcacttaataaaaaanaaanaaaaaaaaaaaaaaaaaaaaaaaaaaaaaaaaaaaaaaaaaaaaaaaaaaaaaaaaaaaaaaaaaaaaaaaaaaaaaaaaaaaaaaaaaaaaaaaaaaaaaaaaaaaaaaaaaaa

SEQ ID NO: 992 - DNA, 2487 bp, Cricetulus griseus
ggatatacccccccagatggaggctgggggtgggcagtggtagttggagctttcatttctattggcttctcttatgcatttcccaaatccatcaccgtcttctttaaaagaaattgaaggtatattcaatgctactaccagtgaagtgtcatggatatcatccatcatgttggctgtcatgtttttggctggagaggaagcttcctaattcttggtggcctcctactaaactgttgtgtagctggatccctgatgcggccaatagggcctaagccaggcaagatagaaaaactaaagtccaaagaatctcttcaggaagctggaaaatctgaggcaaacacagatctcatgggaggaagccccaaaggagaaaagcgatcagtcttacagacaattaataagttcctggacctgtccctgtttgcccacagaggctttttgctgtacctgtctgggaatgtagtcatgttttttggactgtttacccctttggtctttcttagtaattatggtaagagtcagcattactccagtgagaagtcagccttcctcctttccattctggcctttgttgatatggtagccagaccttccatgggacttgcagccaacaccaagtggatcagacctcggatccagtacttctttgctgcttctgtggttgccaatggagtgtgccatttgctagcacctttgtctacaagctacatcgggttctgtatctacgcgggagtctttggatttgcctttggttggctcagctccgtattatttgaaacattgatggaccttgttggtccccagaggttctccagtgctgtgggcttggtgaccattgtggaatgctgtcctgtccttctagggccaccacttttaggccgccttaatgacatgtatggagactacaaatacacgtactgggcttgtggcgtgatcctcatcattgcaggtatctatctcttcattggcatgggcatcaattatcgacttgtggccaaagaacagaaagcagaagagaagcagaaacaggaagaaggtaaagaggacgacaccagcactgatgttgatgagaaaccaaaggaattaacaaaagcaacagagtccccgcagcagaatagctccggagaccccgcagaagaggagagtcctgtctgaactgaagcatgaatagagcagtgtgtgacccaagacatctgaaaccattctgctggcctctagtctaccagtggtgctcaatgcagacagtggacatttgtgtggaaaacctaccaggtgttcattggtggaattttgtttttcactccttaccaatgccagagtttaaaatttactatgctttaggtagggattggttggcaaaggatatgggaaagaagtgtagggattttttttttgtttttttgtttttttttaatcttagcttttaacagtgtcatgaagattataatatgtgccttaagttttagttttagaactctttagagagccttaacttttaaaatcattctgctgaattcatctattttaaatgttttaaaaggaaaaataacaactaacttgcttgaggtaactctaaccttaatcttgttttgttgttgtttgtaatgctttgtcagagattgttactggaacatttatggataaaaatactagttaaaagttggaggtttataaaatactgactaaagtatttttctagcatcatagttgcctcgagtaggtgcctgctaggtatatatttaagaaatttaaagcatgaaattctggaaacatcttggctgttatagccacagtctgtcatctgctggggacttctcagatgcttactgcaagcctagtgctaaaaatgttgtcactaaattgctaaccttgctcctcttcagagacattgaaatctactgcaaaaaagttagtattaaaatctacaaaacttttaacacagtctgatttaatatagacaggtatttcaggcatctgctaaattcagtttagttttccaaaaccctagttatggtatgaaactcttgtaatctttgagtatgtgtgggttttggggggcctggtggttctgaggattgaacccagggccacaagcatgctaagcacatgctgtaccactgagccacatcccaccagcaccctggaatcctccttaaccccgagacctttgctctttgatttttgatagttccatttatatcctagtttagagctgtatgcgagatatcagtatggactaaatgtgtgtgctagttttgttttttacattgtttttcagtatttgcaaaaccaagagggccagagtttggccccggggaagccaataaagataaaatagggagggagtttgctgagaagatatatgacactaaattgtactcaatgcatctaaaataccattgtaattgacggggtgaaaatatccatttaaaaccttgtaagaagccgactttttccaaataaaacatttattttaattttaaaaaa

SEQ ID NO: 993 - DNA, 2485 bp, Cricetulus griseus
ggatgcaggccaagccgggcggcggctcactagggcgaaccatggacagccagggcaggaaggtggtggtgtgcgacaacggcactgggtttgtgaagtgtggatatgccggctctaactttccggaacacatcttcccagctttggttggaagacctattatcagatcaaccaccaaagtgggaaacattgaaatcaaggatcttatggtcggtgatgaggcaagtgaattgcgctcaatgttggaagttaattaccccatggagaacggcatagtacgaaattgggatgacatgaaacacctgtgggattacacatttggaccagagaaactcaacatagacaccagaaactgcaaaattttactcacagaaccacctatgaacccaaccaaaaacagggagaagattgtagaggtaatgtttgaaacttaccaattttctggtgtgtatgtagccatccaggcagttctgactttgtatgctcaaggcttattgactggtgtagtagtagactctggagatggtgtgactcatatttgcccagtgtatgaaggtttttctctccctcaccttacaagaaggctggatattgctgggagggatattaccaggtatcttatcaagctgctgctgttgcggggatatgccttcaaccattctgctgattttgagacagttcgtatgattaaagaaaaactttgttatgttggttacaatattgagcaagaacagaagctggccttagagaccacagtgttagttgaatcatatacactcccagatggacgtattattaaagttggaggagaaagatttgaagcaccggaagctttatttcagcctcacttgatcaatgttgagggagttggtgttgctgaattgctttttaacacaatccaggcagctgacattgataccagatctgaattttacaaacacattgtgctttctggaggctcaactatgtatcctggcctgccatcaaggttggaacgagagcttaaacagctttacttagaacgagttctaaagggagatgtggaaaaactttctaaatttaagatccgaattgaagatccaccccgaagaaagcacatggtgttcctgggtggtgcagtcctggcagacatcatgaaagacaaagacaacttttggatgactcgacaagagtaccaagaaaagggtgtacgtgtgctggagaaactcggtgtgactgttcgataaaatgccaggcttgttcctatcatgcctctgatgcagtcttctttttccgtccagttggtattgtttgttatctcaaaaaatatcagatagtacctagatgtatgaagtctttctaacattgaaaaatgaaataatgagacattgtatcacagtaaatacaaaatgatgattctgggagaaatattttccttcacttcaaaatattctttattaatgatgaatttaaaaggatggcttcttttctctttcttttttttttcttttctctttctttttggatgcttaacatcaggattttttattttttgagataactttaaagttagtttatataaaatcagcagcaaaaggaagttagtcttaattatgcagcttctgtgatattaagtattttttgcctgttttacctcaatttgaacaaataggagaagtctgtgtgcatgctggacatgctcagtacacacaacagcctgccagtgccgactggtcggtgttgggtgctcgactcagagtcactttggaattcctaagtgttcctaaatcatgttgtcaaataccccagtcttgggagtcctgggcccattgcaggacacctactgtatataggactggtaccaatgactattgagggcagaaaaatttggactcttggctttgagtatgattttaaatataggggtagaaaacaagaaagaatagggtagaatcctaaataaaacagtgaaagagcattatcatttgtaccttgaatgtagaatttgtttttatttcataattctgctagcaaacatgactgttaaaagtgatgtatttatatatataataatttagaaattccattttatagttttcctatcctaaggtgaaataatgatttaataatttgggagttgggacatactgtatgtattctattggagatgtcaggtttgagtccttaaaaaatttaaaaaataaaaaattttttttaaaagatctgattcttagctcttgaaacccattgttgcttagatttccaatgctaattataattctttttttatttttaaattaaaatcaccaatgccttgagggatttcttagaaaatgtggtattggatgttaacttttcacagttctgagcactgttagtatctatctggcaagtatttgagaaatcattggaaagctaaacattctaaatttaacacaaatatacttctttttgattaagaaaataaaatcagatttttcaaaataaaaaaaaaaaaaaaaaaaaa

SEQ ID NO: 994 - DNA, 2485 bp, Cricetulus griseus
agaagtcccattgcagacttccaactttgctcatgtcatctttcaaaatgtggctaaaagttaccttcctaacgcacacttggagtgtcattacaccttaactccgtatatccatccacaccccaaagactgggttggtatattcaaggttggatggagtactgctcgtgattattacacatttttatggtctcctatgcctgaacattatgtggaaggatcaacagtcaattgtgtactagcatttcaaggatattaccttccaaatgatgatggagaattttatcagttctgttatgttacccataagggtgaaattcgtggggcaagtactcctttccagtttcgagctgcttctccagttgaagagctgctcactatggaagatgaaggaaactctgatatgttggtggtgaccacaaaagctggtcttcttgagctaaaaattgagaagaccatgaaagaaaaagaggaattggtaaaggtgattgctgttcttgaaaaagaaacagcacaacttcgagaacaagttggaagaatggagagagaattgaaccattgaaaaagcacgatgtgaacagctgcaggctgagcagaagggccttcttgaagtatcacaaaatttgagaatggaaaaggaagagtttatgaagagatacactgatgctacatctaaagctacaacaacttgaagaagatattgtgtcagtgacacataaagcaattgaaaaagaaactagagctagacagtttgaaggataaactcaggaaggcacagcatgaaagagaacaacttgaatgtcagctgaagacagaaagggatgagaaggagctttataaggtgcatttgaagaatacagaaatagaaaatactaagcttatgtcagaggtacagactttaaagaatttagatggaaacaaggaaagcatgattgtacagttcaaagaagagattgacaaactgcagtcaagtttggttgaaaaggaaaatttgtacagggctctcctgcttacagcctcaaataaagaagatacaatatttttaaaggagaaacttcgtaaagcagaggagcaagttcaagcaacacggcaagaagctatctttctagctaaagaactcagtgatgctgtgaatgttcgtgataaaacaatggcagacctacatactgcacgcttagaaaacgagagagtgaaaaagcagctagcatgctgtgagaaaagaccaggaaaagactgatacaatggagcatgaactgagaagagaagttgaagatctgaaactccggctccagatggctgcagatcattacaaagaaaagtttaaggaatgccagaggctccaaaaacaaatcaacaaactttctgaccagtcagccagtactaacagtgtcttcacaaagagaaatgggagtcagcagaaagtgaatgatgcttcaataaacacagacccagccacttctgcttctgccatggatgtaaagccagcagtgtcttctgcagagataaattttgacatgttaacaaaggatcatgtctgtgaaatgaccaaagaaattgctgagaaaacagaaaagtataacaaatgtaaacaactgttgcaggatgagaaaaccaaatgtaataaatatgctgatgaacttgcaaaaatggagctgaagtggaaagaacaagtaaaaattgccgaaaatgtaaaacttgaactagctgaagtagaggacagttacaaactacaattggcagagaaagataaagaaataaatggtctggcctcgaatttggaaaatctctcaagggagaaggaacttaaaaggagattagaagatcagaaaggaagaaaaatggaaagtccgagcccacaacaggtttcgaggtgtctcaacacattctctgagcaaaatgggctccttcctacactgccaaatgcacagccagttctgcagtttggtaatccttacacagcacaagaaactcgagacggagcggatggtgctttttatccagatgaaatccaaaggccacctgtgcgagtcctatcttgggaagacaatgttgtctgtagccagccagctcgaaaccttagccgtccggatggtttagaagatcctgaggacagcagagaagatgagaatgtgcctgaccctcctgatccagccagtcagcatttacgtggtcatggagcaggtttttgctttgattccagaagctttgatgttcacaagaagtgtcccctctgtgaattgatgttccctcccaactatgatcagagcaaatttgaagaacacgttgaaagtcactggaaggtgtgcccgatgtgcagcgagcagttcccgcctgactatgaccagcaggggtttgaaaggcacgttcagacccattttgatcagaatgttctaaatttcgactagcttttattaggagttagtacaatttagcaatctacaaaaaaaactctgttctcattaaaaaaaaaaaaaaaaaaaaaaaa

SEQ ID NO: 995 - DNA, 2485 bp, Cricetulus griseus
cccacactgaagatctctcttatccagatattccgagctcacctgtggcagaagatccatgagagcatcgtgatggacttatgtcaggtctttgaccaggaattggatgcactggaaattgagacagtacaaaaggagacaatccatccccgaaaatcctataagatgaattcttcctgtgctgacatactactctttgcttcctataagtggaatgtctcccggccctcactgctggcagactccaaggatgtgatggacagcacaactacacagaagtattggattgacatccagttacgatggggagactatgattcccatgatatcgagcgctatgcccgggccaagttcctggattataccacagacaacatgagtatctacccttctcccacaggtgtgctcattgccattgacctggcctataatctacacagtgcctatggaaactggtttccaggcagcaagcctcttatacagcaggctatggccaagatcatgaaggcaaatcctgccttgtatgtattacgtgaacggatccgcaaaggactgcagttgtattcatctgagcccactgagccttatctgtcctctcagaactatggtgaactcttctctaaccagattatctggtttgtggatgacaccaatgtctatagagtgaccatccacaagacctttgaggggaacttagacaaccaaacccatcaacggagccatcttcatctttaacccacgtacggggcagcttttcctcaagataatccatacatctgtgtgggctggacagaagcgtttgggtcagttggccaagtggaagacagctgaggaagtggctgccctgattcgatctctgcctgtagaggaacagcctaaacagatcattgtcaccaggaagggcatgctggatccattggaggtgcacttgctggacttccccaacattgtgatcaaagggtcagagctccagctccccttccaggcttgtctcaaggtggagaagtttggggatctcatccttaaagccacagagccccagatggttctcttcaacctctacgatgactggctcaagactatctcatcctacacggctttctcccgtctcatcctgattctgcgtgctttgcatgtgaacaatgatagggcaaaggtgatcctgaagccagacaaaactactattacagaacctcaccacatctggcccacgctgactgacgaggagtggatcaaggtggaggtgcagctcaaagatctgatcttagccgactatggcaagaaaaacaatgtgaatgtggcatcactgacacaatcagaaattcgagacatcatcctaggaatggagatctcagcaccatcacagcagcggcagcagatagctgagattgagaagcagaccaaggagcagtcacagctcactgccacacaaacccgaactgtcaacaagcatggtgatgagattatcacctccaccactagcaactatgagacccagaccttctcatcaaagactgaatggagagtcagggccatttcagctgccaacctgcatcttcggaccaatcacatttatgtttcatctgatgacatcaaggagactggttatacttacatccttcccaagaatgtacttaagaaattcatctgcatatctgatctccgtgcccaaattgcagggtacctatatggggtgagtcctccagataaccctcaggtgaaggagatccgctgtattgtgatggtgcctcagtggggcactcaccagactgtgcaccttcccagccagctgccccagcatgagtacctcaaggagatggaacccttaggttggatccacactcaacccaatgagtctccccagctatcaccccaagatgtcaccactcatgccaagatcatggctgacaacccatcttgggatggcgagaagacaattatcatcacctgcagcttcaccccaggctcctgcacactgacagcctacaagttgacccccagtggctatgagtggggccgacagaacactgacaaaggcaacaaccccaaaggctacctgccctcacactatgagagggtccagatgctcctctcagaccgattcctcggcttctttatggttcctgcccagtcctcctggaattacaactttatgggtgttcggcatgatccaaacatgaaatatgagctgcagctggcaaaccccaaggaattctatcatgaggtccataggccctcccacttcctcaactttgccctcctgcaggagggtgaggtctactctgcagacagagaggacctctacgcctagttatttccttgcttccttctgcttcggattccccaaaggctggagcccatagacaagctgctgacattcagcagcctggccccttttgtgttttgtgtttgtgttgttgatagactgtaatcctgaacaaaatgtaataaattttataaataaggaaaaaaaaaaaaaaaaaaa

SEQ ID NO: 996 - DNA, 2485 bp, Cricetulus griseus
gactatagcagagatggattagctagagtcattctttcaaaaatcctcacggcagctactgatgcctgcagactgtatgcaacaaagcattttaagggttttattgagagctaatgttgaattcttcaacaattggggaattgagttactagtgactcagctacatgaataaaaacaaacaatttcttctgaagctctggatatccttgatgaagcttgttctaagttctcagggatttctggatgcagcgacggtgcatctcaggaaggctcagccagcagcaccaaaagcacagagctgctactgggtgtgaaaaccattccagatgatacaccaatgtgccgtatcctgcttcgtaaagaagtgctaagattagtcgtcaatttgagtagttcagtttctaccaagtgtcacgaaacagggcttttgacaattaaagagaagtatcctcaaacatttgatgacatatgcctttattctgaagtttctcatttgttggcacactgcacatttagacttcaatgccggaggttcatacaagagttatttcaggatgtactaatttttacaaatgcatgaagaagcagaggctgtgttggcaattccaccaaacacccatagttgatgaatctgatgaatcctgacctcattatttatgatgtgtatagctagacactatatatttatccaaacttgtggatttcctaaaggtcctcacgaaatactgactggctgtcagggaggcaggaatgtcttctgtcccagcagtcattggtacagaacagctgcaactgctgtcgtccctaaccaagccaacttcctcttccctgttaggaacccttctccgggttcgtgattcattaccaccagttttaattcagttcccatcatatgcaagagccaagcactgaatacctacataggttttcattttttatttaaaagcataatggcggtggaacatgatgaaaactacatgcagtgccaagtgattagtgtaggtgttttatgactattaaattgtagcagattaggaatgatgaatgatgtcaatggtaatagaaatcattgagaaatcatctataaataatagattttaccaaaataatgtcaatactgtagtttttcaagagtttagaattaatcttagtcacataaatttgtattattggtaattatttaataatttggaggagtttgaacagttaagctggttgtaaactgtgaatttctaattgtaaattgtcatttctaattgtaatttttttcaagaacagatttcagcttcacatactaagtaaatactgacaaataaggagaaatttagtatttataataaaataggctctaaaatttcttgtccttttattttctgtttgtgcttagggtatattggaggaggaaagtgttctccctaacttaagtgtttttaataaagagtaatgaatagacatccctgagacagtgatattgcaaggctgttgaaactgcatgcattgttgctatggtgacatcaggtcactggaagcaatgttttcagcagcattcccctcttgtccagagctttgagagaggtgctaattttgtgtgagaagaatttgtgaccacttgggaaatgtattttggaagtaaggtttcccccccccttagactttgacttccattttgtctcaaattcacaatccatgaaagaaaagtagaattgtttgagagacttctaagaaaagctgcttgtaatgaacttcatttctagtacattttatacgactcacagaatgtgggattcctcccctttggagtatttttatagttaggtggataactctgccacagaagcatggattgcacatttgactctacaagataacctaaaattaaaatatgccaaaaaggaaacatcttacaattttcccatttaactaggttggtctagcacaaaatgtaaagtcttggggcagagagggaatagtaaaaattttttatgtatgattgttgaaaaatgttccattactggcctgtcagaaaccctaacaatgcattgtgaaacaaatgatgtaaattaaattagctttgaaaagtggtaagggatcataaagagaatctcagattcaatgctctctgaccacatgacttttttttttttattagtaatacgctgctacatttttggaggttctggtgtttgtaggtcactgaacagacattgaaatctgatttatattgtataactgtaacatagaaagaaaaagtatttatatattttccttaagaatatttcattgagttgtgtataatttaaataagatttgttcccaaaatggtttggctcaccttgattttgttgttgttgttggttttattgtttttgtataatgtgtacagtttatgttaaggcattaaagcctcctgaaacaatcttatacaaagggattcattgttaataaaatgtaactttaaaaaatttaagttaaaaaaaaaaaaaaa

SEQ ID NO: 997 - DNA, 2483 bp, Cricetulus griseus
gataagcagcgagccctagaagaaccaaaagctacaccacccaatccttagcaagtgttgcatatctgataaacaccttggccaacaatgtcctacaaatgctggatatccaggcatcccagttacggaggatggaatcttcaatcaaccatatttcacaaacagttgatattcataaagagaaagttgcaagaagagaaaatttggtattttgactactaataaaaacacttcaagaacccacaagattattgcaccagccaacctttgagcgaccagttcgttatattcgaaaacctattgactacacaatttttagatgacattggacatggagtaaaggtgagtacccagaatatgaagattggtggcctcccacgtacaacacctccaacccagaagcccccaagtccccctatgtcaggaaaggggacacttgggcggcactccccctatcgcacactggagccagtgcgtcctccagtggtaccaaatgattacgtacctagcccaacccgtaatatggctccctcgcagcagagccctgtgaggacagcttctgtgaatcaaagaaatacgaacttacagcagcagtgggagtagtggaggaagccacccaagtagtcggagcagcatcagatgaatggaggccccttttataaccagaatccagtttcagatacaccacctccaccaccacctgtggaagagccagtctttgatgaatccccgcctccaccgccacctccagaggattatgaagaggaggaagcagctgtggttgagtacagtgatccttatgctgaagaggacccaccatgggctccaaggtcttacttggaaaaggttgtggcaatttatgattatacaaaagacaaggaagatgagctgtcctttcaggaaggagccattatttatgtcatcaagaagaatgacgatggttggtatgagggagttatgaatggcgtgactgggctcttccctgggaattatgttgagtccatcatgcattattctgagtaaagctcagcacagctgtgcttccctttcaggaggtcaggtcttcccacattagctagaggccctgggaatttcctcccagtgaaactaatgaagcatataaatggtgaagttacttcttttattactatgtttggtttatccctagtattaaaatttttttttgttttttattgtattttggggtaacccatgggcagttgactcctcccacttatatcacagagtactgatgggattttacaaagataaaaacactgttggcttcttttttcatctttcaaattttcacaattttgaattctataaattgtcttggaaggatactctgtaacagtgagccaggcctgtagtgattggagacttttaatgtatgtaatattttgtagattgcatgctgttaatactgtgaggttatctcctgttttattgtaaaatttcccatttatttgcccataaactaaaaacggttgatattaggaattttaaatgaatgttgaaaccctgccaactggtaagcaactgctttaccaggacacaggtgctctgagggcgctgatctttcctgaaatgtctgatttagggacagttcctttaccctaaaacaaaatgatagcttgcttttatctttcagttttcattgtctttaaagatcatcttcctgcagtacaacctttgttttacctttatttcttctctccttctgagagaacatggtgtggcctgaaggctgcctttacttctggaagggatttgaagaaatggtaggttgactgccaaatcttggaatgaatgggagctgtttacttctgaatagctttggccaggaactcctgatgggtgtggaggtgacacttcctaacactgtttacttggaatcataaaattttggaactaaaaagctttacgaatgtttgttccagtctcaccttaatgatggggttagatgcgattagatgccatgtataagataaacagttagctcttgactcagctcagtcttctccactgtaccaactgttataactaaatgtgctgtacttttctgtagatatcaagagtgcttgttttcaggactatacttgaaaagatatgccatgttttcataaataaccacccaagtattcagattgctttaagtttaagtgcaacctgagtggaaataatcttcgtttacccttctaaaacttcataaacaccattccataaagctatgtgtagcaagaatgcattgtatttagttctacactggcaggagcagagtggagcatacacagtacacagccttacttatgagagccttacaaagtcactaaatggaggcattgagcttgctatctaagtttactttatgctccttgttttattgagaatctctattaaaaaaaatcaacaaatgaaatgacagggcctaactgtaaatgatccttgctaataatgttaaaatttttagttaaagaaaa

SEQ ID NO: 998 - DNA, 2483 bp, Cricetulus griseus
ccgccgccgccaggttgtgcctgagactgtcagataaagcggcgggccggcgggcggggcggcggcgagcacggcccgggccggacatggcggcgctctacgcctgcaccaagtgccaccagcgcttccccttcgaggcgctgtctcaggggcagcagctgtgcaaggaatgccggattgctcaccctgttgtgaagtgtacctactgcaggactgagtaccagcaggagagtaaaaccaatacaatatgcaagaagtgtgctcagaacgtgcagctgtatggaacgcctaagccttgtcagtattgcaacataattgcagcatttattggcaataaatgccagcgctgcacgaattcagagaagaagtatggacctccatattcttgtgaacaatgcaagcagcagtgtgcgtttgacaggaaagatgatcgaaagaaggtagatgggaagttgctgtgttggctgtgcacactgtcttacaagcgtgtccttcagaagaccaaagagcaaaaggaaacatctgagcagctcttctcgagccagccatcaggagaaggagcagtacagtcgcctgagtagtggcagccattacaacagccagaaaacactttctacatcttcaattcaaaatgaaatcccaaagaaaaactaccaagtttgagtcaatcacaactaaacggagacagcttttccccagacctggctctggattcacccggcactgaccactttgtcatcattgcccaactgaaggaagaggtagccactctgaagaagatgctgcatcagaaggatcaaatgatcttagagaaagagaagaagattacagagctgaaggctgattttcagtatcaggaatctcagactcgggccaaaatgaatcaaatggagaaaacccacaaggaagtcacagagcaattgcaggccaaaaaccgagagcttctgaaacaggcagctgctttgtccaagagcaagaagtctgagaagtcgggcaccataacatctccgtgaagaccctgagaaggctcccagcaacaacagccggtgctcctgggtcagggttggcaacctggctgttctctgggattgtgctttcttacaaaaatctctattttcttaccgttactcttctttgtgagtgtagtgggtggaatggaaacacctggtctgtgccatgttatgactgcatgctgagcgcttgggggtctcagacctgctcctcctcctctgctcccctgtgctccctctctctactttggtactcggtgttttccatcgtggtcactgcttagtgtcatgtgcagtagtttctgtccgccatctcatctgtcatccaccttgaaaactgccacctgagactttgtgcagtgagagagcctttctctcaccaataaatcttttgcttcagggtatactcttgggttttttccaggtatattatgtatgacctttgtactatgtatagacagagttttatttattttttaaaaaggaaaccttttcttgataaaggaatgatggtaacctagctagttcttgtaaaagcaatgcctctttgaaaaaaaaaaaaaaaaaaaaaaaaaatgctgtcctgtttgctagcttttagtaagagaatcctatcttttctttctcattaccttagagtcttgatgctaaggtaaatgctggaggcgtaagtgtggagctaagtgcctttggaggactctggaagagcattgaggagatgcttaagggtgcagagaattgaccagtctgtctttaagtaagggcagaaagaatggttgtccaggttgtactggacacttccccctctatctacccctccttcttttatgtaattttaaattcccacactgccacttcttttttaaaaacatacctgtttcttgcttgtgtcagctgtcggctctttccgacaggagactggaagggccatgtatttatgtcaccgtggtagggaatgcagttttcccttctaagagggaaaactgctgtgctgaaacattttgtaactttttgaatgagaaactttgaggtaaagataactatcagtcatagcctgtttttcggaagcatttgcgttggctgtgggggaaaagatggtagaaaaagaatgacagtcatggtttcttaaaatgtaagactgagaaattgtggatgtcaagtgtgacagtgtacagatgttcatttagttttatactaaatcttttttaaggtcttagcatttaatattccgcaaacctacacattttctaaactaccatgagctcctgaacggtaaagagtaaacctcagtcttgaatttgttttttaatcatgacagcattttaccatgaaattgagtaacttttggtaacaccttccgtttctttgtatgtttgtaataatggacattttaaaacaggaatgttttggtttgtacagactttgaaaaatgtgtgttaataaaattcatattgactcagaaaaaaaaaaaaa

SEQ ID NO: 999 - DNA, 2482 bp, Cricetulus griseus
gctctttgtgagtgttcacctaagacgaatcgagtcctactcccagttccctgtggtggagttcctgacccttctcttcaagtacacatttcatcagcctactcatgaaggttacttctcttgtttggatatctggacactgtttttggactatctgacaagtaaaattaaagtcgtctgggagacaaggaagcagttctcaacaggtttgctgcaaggttcaacgatgctctcacagtcgtggaaaggttggtcaaagttaactttgtacggatctcagataaaactgtacaaacattgaaacagctgtgccatcagtgttgaaaccggacctcattgatgtgcatgcccagtcacttgctgctctccaggcgtactcccactggttggcacagtattgcagtgaagcccatcgacagaacacacagcagtttgtgacactcatctctaccaccatggatgccatcacgcctctcatcagcaccaaggttcaagacaagttgctgctgtctgcctgccacctactggtctcactagctaccactgtgcggcctgtctttctcatcagcatccctgcagtgcagaaggtgttcaacagcatcattgatgcctctgcccagcgcctagcggataaggcgcaggttttagtttgccgtgcactctcgaacaccttgctccttccatggccaaatcttcctgagagtgagcagcagtggcccctgcgctctatcaaccatgctagcctcatctctgcactctctcgggactaccacagcctgaagcccggtgctgctgccccccagagaaaggtgccactggatgagaccaaagtgatcattcaccagacacttagtgttttggaagacattgtagagaatatctctggggaatccaccaagtcacgacagatctgctaccagtcactgcaggaatctgttcaggtctccctggccctctttccagctttcatccatcagtcagatgtgactgatgagatgctgagcttcttcctcaccttgtttcgaggccttagagtacagatgggtgtgcctttcacagagcagataatacagaccttcctcaacatgtttaccagagaacagttggctgagagcatcctccatgaaggcagcactggctgccgggtggtggagaagttcctgaagatcctacaagtggtggtgcaggagcctggccaggtgttcaagcccttcctccccagcattattgcactctgcatggagcaggtgtaccccatcattgctgagcgcccgtcacctgacgtgaaggctgagctgtttgagctcctctttcggacgctccatcacaactggcggtacttcttcaagtctactgtcctggctagcgtgcagaggggcattgctgaggagcagatggagaatgaacctcagttcagtgccatcatgcaggcttttggacagtcctttcttcaaccagacatccacctgttcaaacaaaatctgttctacttggagactctgaatagcaagcagaaactataccacaaaaagatcttccggaccaccatgctattccagtttgtgaatgtgctgctccaagtcctggttcataagtctcatgaccttctacaagaggagattggtatcgccatttacaacatggcttctgtggactttgatggcttctttgcagcctttcttccagagttcctgaccagctgtgatggtgtggatgccaatcagaaaaatgtgctggggcggaatttcaagatggatcgggacctgccctcgttcacccagaatgtgcacaggctggtaaacgacctacgttactaccgactctgcaaccacagcctgccccctggcaccgtgaagctctaggagtgcctgcttgccttcctggctgctcactgccccagggacatgcctgttgccattgccacctacaccacctgcacctgtgccacagaagtctatgacaagccttggccactctctggatggtcatgccctgagcaagtggcctgcctttgccctctcctgctgccaccaacacagcaggctttggggtccatttggcactggtagcgttgccaggcatttggagcaggtagagggtcatgtggctggatgccagggaggcacccagagatcccacagcgtggtccatgcagatcatgtgtctatcagtcctgagtcagaatcgccaaggaccgcttacgacagtgccaccttctcaccattccacctccccacccctcctggcccagccagcccaggagaaaagcgacagcagaactgtttatgtcgagcctcctgcccctccgattgccttgaagtctctgctctttgtcagagattcgcgaagactcgcgttttttgttcttgttttctcatcattccattgtgatactaagaagcttaatggataaataaaatgcttaagttgttgttatataaaaaaaaaaaaaaaaaaaaaaaaaaaaaaaaaaaaaaaaaaa

SEQ ID NO: 1000 - DNA, 2482 bp, Cricetulus griseus
gggatccaccggcttggctcctgggtcgctttccctaaccgctagcctcggcttgggaaaggcgaggcagaatcgaaccccgctccgagagcggcagcttcgcgcagcgtgcttggcctatgcctgccttgaggggcgtctgctaggcaccccgccttctcctgcagctcgacccccatgatagatacgctcagacccgtgcccttcgcgtcggaaatggcgatcagcaagacggtggcgtggctcaacgagcagctggagctgggcaacgaacggctgctgctgatggactgccgaccgcaggagctgtacgagtcgtcgcacatcgaaacggccatcaacgtggccatcccgggcatcatgctgcggcgtctgcagaaaggcaacctgccggtgcgcgcgctcttcacgcgctgcgaggaccgggaccgctttaccagacgctgcggcaccgacaccgtggtgctctacgacgagaacagcagcgactggaatgagaacacaggtggcgagtcggtcctcgggctgctgctcaagaaactcaaagacgagggctgccgggcgttctacctggaaggtggcttcagtaagttccaggccgagttctccctgcactgcgagaccaatctagacggctcgtgcagcagtagctccccgcccttgccagtgctgggtctcgggggcctgaggatcagctccgactcttcctcagacattgagtctgaccttgaccgagaccccaacagtgcaacggactcggatggcagcccgctgtccaacagccagccttccttcccggtggacgatttttcgccccttcctttacctgggctgtgccaaggactctaccaatttggacgtgttggaggagtttggcatcaagtacatcttgaatgtcacccccaatttcgcccaacctctttgagaatgcaggggagttcaaatacaagcaaatccctatttcggatcactggagccaaaacctgtcccagtttttccctgaggccatctctttcatagatgaagcccgaggcaaaaactgtggtgtcttggtgcattgcttggcaggcatcagccgctctgtcaccgtgactgttgcttacctcatgcagaagctcaacctgtccatgaacgatgcttatgacattgtcaagatgaagaagtccaacatttcgcctaacttcaacttcatgggccagttgcttgactttgaaaggacactgggactcagcagcccctgtgacaaccgtgttccagcacagcagctgtatttcaccactccctccaaccagaatgtctaccaggtggactccctgcaatctacgtgaaaggcacccaactttcctagctggaagtgtcccgttccttcagcagtttctcttgggcagcaaacgagcaggctgctttctttgtgtgtggccccaggtgtcaaaatgtcaccagctgtctgtattagacaaggttgccaagtgcaaaattggttattacagagggagagatttgctccattcattctttttggaaggactggacatgctgtctagatccaggcaatgtgtttgctcccataccccccagcctacccaagcagggactggacatccatccagataaaaagagggtaggatcaagaagtagggtatgggcatgtgttctttagggcattgtatgactgtttcctgttgcatctggaactacgtattgtcttcagtgaagacagactcaactttgcgtatagtggagccaaagagattttagctctgtatttgtggtatcggtttggaaaacaaaaacaaaactgatactcttatttgattattgtaaatatttgatcataaatcactttacagtgtttgtttggcttgtgtttgtttttatctttgggtataaaagaagtccaaagggagagaaggagcagtgtgccacttcttttaaaacaaaaggagaaaaggaaagttgtgctcttctctaatccaaagggtatgtttgcagcatgcttgaccttattgtaccaattctgatgaccttttcatggatattatcactaagactttgttatggtgcagtcttcggtctctttcatatatcttgtgtaattttttttttccttaatgtactttgactctgccttacctttgtaaatatttggcttacattgtctcaaggggggtggttggatcttggaaagacaccaaaattgtgggttcacggttctttttttttttaaacttcagctgtgctacacagtatattacctctgtacaaaattcttcagggagcgtcacctcaaatgcaatacttatggttggtttctttcctttaagaaaaattatacaaaactggaagtgtgtgtctgtgtggaagggatagttaagttgcttcatgatgttcgtggtgtaaagttttgagctggaatttattataagaatgtaaaaccttaaattattaataaataactattttggctaaaaaaaaaaaaaaa

SEQ ID NO: 1001 - DNA, 2480 bp, Cricetulus griseus
gacggctgcgagccggaggcgctcggcaagcggccggccgtgctgcccctgctggagcgcgtgagcagcgaggcggctaagaacccgggcgccgccggctcgctgccctccacgccgccgtcggccgaggaggaggaggacgagctgtaccgccagtcgctcgagatcatctcgcgctacctccgggagcaggcggccggcgtcaaggacgcgaagccgctgggcgaggcgggcgcggcgggccggagggcgctggagaccctgcggcgcgtgggcgacggcgtgcagcgcaaccacgagacggccttccagggcatgcttcggaaaatggacattaaaaacgaagacgatgtcaaatctttttctcgagtgatggtccatgttttcaaggatggcataacaaactggggcaggattgtgactcttatttcttttggtgcctatgtggccaaacacttgaagagcataaaccaggaaagctgcatcgaacccttagcagaaagtatcacagatgttcttgtaaggacaaaacgggactggcttgtcaaacaaagaggctgggatgggtttgtggagttcttccacgtacaggacctagaaggcggcatcagaaatgtgctgctggcttttgcgggtgttgctggagtaggggctggtctggcatatctaataagatagccttgtgagtgcagtaggggactcttaactccagccaccaaaccacatgcttctgtgaaaacaaatgtatttatgaagttggacttgaagctgcccgggctttaacaatccaggagttccactctagcaacatagccagaaagaaagcaaatggctacaggattgtggctaacaagaataaatacatgggaaaagtgctccctcttgaagagttactatctgaaagaagccaagttttcactcagcaaattttgggaggccttggaggaggacttgtagattgaatggaagtggtaggtggacagacttgatttccttgtctagaagagtggccagtcctcaggctagtcatagagctcaataaatgtgcagagtccatcactctcctgtggtgttgaaagaagcactaatgatggcggtgatctgtgtaagatggatttaagctacaaggaaccaggccatgactagaagccgcagtactgtacaagaatgtgaaaggaggctctgtggtgagctttcccaggtgtacttcttgacagagtccaagtgctcaggacgtgtagacctgtctactttggcttggttttgtgataatcttaagtttattagcctagtaatggccaaaatacttgacttaaggttcactaattagttacaaaactgaaaagcctcaatttttaaggtaaacaacatataaaatgtatttgtctgtaaaaattgtatatatttttacagaaaatctatttctttggatataaaacgagggactccaatttagtttttccatacccttttgaaatttgcaacttctctagttagaaatctatttcttacaactttttaaaactttgtcatgatcagctctagagtatatacagaaccagttgtgtgcgtggactggttgtagattcataactatgcaggcttaattttccagtctgattttgtatgtgaggatcacagatagatgtaaggaatttgaccccctgttgactttaaattgtaaagtggtttggtaacacaggctagactcataaccatggtgctattgacaaggtttacttgtttgacacaagtttaagcctggtggtgtcaataaaacaaatatgtatttcttttctactaatgattgccaagctttgttttgaatttctgtattagtctagtttgctcctaatgtcaatatgctcgcttaaatttagagaaaggtttttttttggtagcctcagttatataatagccactggtaaactgaggtttctgtttgagctaggatcatttgaaagcttcagtctcagaatgtgacctttagtcaggactgcagataaaaatagtcatgagtcagatgactaagaatgtactggggaagaagtgccctgcctgccgtacctatgtatttattccttggttataaattgcttatttatgtttatctcttggacttacaaagcactttatgtagtttaataggtgttttagtgccagggccatgaagacttgcagagcccaagtggttgagaaaggggttttttatttagagaagaggcacaatggtctgagtgctgactagctgaatagttgagacatcctccaaagtgaatagggagaggcagcttggaaagatggttctcagcaaattctgtttgtcttacacttctctcagggaaaaaaccatacagtcttcaagcatccatgtacattctacctggggtggtgaataccttcattctggtagaaccagcatttttaacatctgttcccgaaagggttaggaccaactgcaagttaatgtgggttgtaaa

SEQ ID NO: 1002 - DNA, 2479 bp, Cricetulus griseus
  modified_base (587)..(587): a, c, t, g, unknown or other
  modified_base (599)..(599): a, c, t, g, unknown or other
agtagcggctttctcgagcgctgtacctggtgggttgtaattctagggtcctagtgacagtgcaggagcagggttggagcagggcgtcgaggttgagcggcgggatgatggaggaggaggaactggagttcgtggaggagctggaggccgtgctacagctcacgcctgaggtgcaactagccatagagcaggtatttccaagccaagatcctctcgatcaagctgacttcaatgctgttgagtatatcaatactctgttcccaacagagcaatctctggcaaacatagatgatgtcgtgaacaaaattagactgaaaataaggagactggatgacaatatccggactgtcgtgagaggtcaaacaaacgtggggcaggatggaaggcaagcactcgaagaggcccagaaagccattcagcagctctttggcaaaatcaaaggataatcaaaagataaggcagaaaagtcagaacaaatggtgaaaggaaatcaactcgaagatattaagcagttagaccatgccaagcgccacctgaccactcaatcacgacactgaaccacctgcacatgctggctggtggggttnactccctggaanccatgaccaggcgcagacagtacggagaagttgctaaatctccttcaggggcctggtggctaatattttggaccccagaatcaaacaggaaatcatcaaaaagtttattaaacagcatctatcagagtatctagtactttttcaagaaaaccaagatgttgcctggctggacaaaattgacagacgttatgcctgggtgaagcgccagcttgtggactatgaggagaagtatggtcggatgtttccacgggagtggtacatgacggagaggatctcagtagaattctgccacgtgacgaggacagaactttccaaaatcatgcgagccagagctaaggaaattgaagtgaaattgcttctttttgcgattcagagaacaactaactttgaggggtttcttgcaaaacgattctctggttgtaccctgacagacggaaccctgaaaaagctggagtccccaccatcgtctaccaaccccttcctggaagaggagacaacaccagagatggaggagctggcgctggagaaaggggagttagagcaaccaaagaagcccaaagccccagacaatccatttcatggcattgtttccaagtgttttgagcctcatctctacgtatacattgagtcccaggacaaaaacctcagtgagctgatagaccggtttgtggcagatttcaaagcccagggcccaccgaagcctaacactgacgaagggggtgctgtactccccagctgtgctgacctcttcgtctactacaagaagtgcatggtgcagtgctcacagctcagcactggggagcccatgatcgccctgaccaccatcttccagaagtacctcagagaatatgcctggaaaattctctctggcaacctccctaagaccaccagcagcagtgggggactgaccatcagcagcctcctcaaagagaaggagggctcggaagtggccaggttcactctggaggagctgtgtctcatctgcagcatcctcagcacagccgagtactgtctggctactactcagcagctagaagaaaaactcaaagaaaaagttgatgtaagtctgactgaacgaattaatctcacgggagaaatggacacattcagcactgtcatctccagcagcatccagctgttggttcaggatttggatgcagcctgtgatcctgccctgattgccatgagcaagatgccatggcagaatgtggagcatgttggtgaccagagcccttatgtcacttctgttattcttcacattaagcagaatgtccccatcatccgtgacaacctggcttccacacgaaaatacttcacgcagttctgcattaaatttgcaaactcattcatccccaaattcatcactcacctcttcaagtgcaagccaatcagcatggtgggagcagagcagctgctgttggacacccactccctgaagatggtcctgctcgatctcccatccatcggctcacaggttgtgaggaaggcacctgccagttacactaagattgtcgtgaaaggcatgacccgggctgaaatgatcctcaaggtggtgatggcccctcatgaaccattggtggtatttgttgacaactacatcaaactccttacggattgcaacacagaaaccttccagaaaatactggacatgaagggcctgaagagaagcgagcagagcagcatgctggaacttttccggcagaggctccctgccccaccctcagggacagaaagttccagcacactgtccctaatggctccaacaccagagcaggaatcgtcccgcatccgcaaacttgagaaactgattaaaaagagactgtaaggaatatacagacactgccagggactctgagcaactgatttctggaaaccctcac

SEQ ID NO: 1003 - DNA, 2479 bp, Cricetulus griseus
cccgcgccggccgctggggcggataggaccccgtcgcgccgcgggtgtgggccggagggcggagacggtgcccgagcgccacaggagtatgacggggctgtacgagctggtgtggcgggtgctgcacgcgctgctctgcctgcaccgcacgctcacctcctggctccgcgttcgcttccgcacctggaactggatctggcggcgctgctgccgcgccgcctccgccgcggtcctagcgccgctcggcttcacgctccgcaagcccccggccgtcggcaggaaccggcgtcatcaccggcacccacccgggggacccgggccgggacccgggccggccgccacccatccccggctgcgctggcgcgcggacggccggtccctgcagaagctgccggtgcacatgggcctggtgatcaccgaggtggagcaggagcccagcttctccgacatcgcgagcctcgtggtgtggtgtatggccgtggggatctcctacattagcgtctacgaccaccaaggtattttcaagagaaataattccagattgatggatgaaattttaaaacaacaacaggaacttttgggcctagattgttccaaatactcaccagagtttgcaaatagtaatgacaaagacgatcaagttttaaattgcccttcagcagtgaaggtgctgtccccagaagatggaaaagcgggcattgtgagagctgcccaggacttttgccagttagtagctcagcagcagaggagacccacagatttggatgtagatctgctagacggcttacttagttcacatggtttccctgatcctgatttagtgttgaagtttggtcctgtggacagcacgttaggttttcttccctggcaaatcagattgactgagatcgtctctttgccttctcacctaaacatcagttatgaggactttttctccgcacttcgccagtatgcagcttgtgaacagcgtctgggaaagtagtggctcctggttacataacaggatttcaggcttttggagaaaaggacccaattgactctgatgtttacaaagtacctataaaaccttgtacacacctagttcatattcctcataatttatcaacaaacacaaaaaagtgtcttacttgagagtgaatgagtgtgtgcgtgtgtgcgtgcatgtgtgtgtgcatgtgtgtatggaaataaatttataaatggggcacattggagaatggagtacatagaccttcagctgaagcaagtagcggccatgtcttaggagctgagacttgagatggaaaggcttcagctcctgctgctcccctgttttttcggggagtggaggggtgagtagagagagctggtatagttgtttgtggtgggaggggatcattttgttcagtctttcttagagaccaaactttaatttttaagaataatatattgacttactagtggaagtattctccttgtgcgggacagtcggagtcctcagttttccgtccatttcatttctgcattatagtaaacagtgggacttgccagtaaatctcagtgatgactttggcatatgattaagtaggatggaggcctgtattaccaaagtctgtgagcatcgtttaaattgatcttctgtattctcttgtgttctagagaacagcactgcttctgacagaattgtattcttgataatgtttttatgtttttccactgataatctttggatggaaaccattctttatatttgatggacagttttcagaaaacttttatcagcaagtatacaaaagtcatgtatatttagaatagagcagtttaaatgctaggcccctgaaatctgaaaaatagcaaagaacctgggtttggaaagtatggtctggaattgcctgtcagactctgaagaatacatgtttcagctttggattacaaaccccatttatgattttaaaaatatacttgaaataaaatgattaaaatgaattttgttccagtgacattactttgcacttcaaagacaccaagtagaacccactcaacagatggcatggagcatataaagaagttggagcaattaactccattccgaagtctgattgtaaatcgctccttgaaactgactggttaatgtttgaagtttaaaagctgattataatgtgaatagcaatttctggtatattgtgagtaaggcttaagaatgcctgtttttgacaataaaaatgttccaatattaattaacagtgccaaatacactgtgcatatctataatttaccatttgaatgtatgttaattagctactcccttctgtgtgacggtcccatgcttagtgtcagtgaagtacttgtgatgtgtgtcacgcctgtagattttggcaacatgtaaataatatgtacagcaagtttttatgattaaggaatcaaatttattgaattttattattgaaagttgaaacgatgtatgaacaaaaaaaaatcaaataaaagaatatactctttt

SEQ ID NO: 1004 - DNA, 2479 bp, Cricetulus griseus
ggagctccggcaaaatttcagccacactagaaatggagcatgaagtggcttgcttggatatcaccccattaggggacagcaatgggctgtccccgctttgtgccattggtctctggacagacatctcagcccgtatcttgaagctcccatccttttccatcctgatgaccacctttgagagcagccattacctcctctgtgccttgggagatggggctcttttctactttgggctcaacatcgagacaggcttgctgagtgaccgcaaaaggtgactttgggcacccagcccacagtgttgaggacattccgttctctttctaccaccaacgtctttgcttgctctgaccggcccactgtcatctatagcagcaaccacaagttggtcttctccaatgtcaacctcaaggaggtgaactatatgtgtcctctcaactcagatggctatcctgacagtctggcattggccaataacagcaccctcaccattggcaccattgatgagatccagaaactccacattcgcacggttcccctctacgaatctcccaggaagatttgctatcaggaagtgtctcaatgctttggggtcctttctagtcgtattgaagtccaagacactagtggaggcacaactgctctgagacccagtgccagcacccaggccctgtccagcagcgtcagctccagcaagctattctctagcagtactgctcctcacgagacttccttcggagaagaggtggaggtgcacaacctcctcatcattgaccagcacacttttgaagtgcttcatgcccatcagtttctacagaatgagtatgccctcagcctcgtctcctgcaagttgggcaaagaccccaacacatacttcattgtgggcacagccatggtatatcctgaagaggcggagcccaagcaaggtcgtattgtggtcttccagtattcagatggaaaactgcaaactgtggctgaaaaggaagtgaaaggggctgtgtactctatggtcgaatttaatgggaagctgcttgccagcatcaatagcacggtgcggctctatgaatggactacagaaaaggagctccgcactgagtgtaatcactacaacaacatcatggccctctacctgaagaccaagggggacttcatcctggtgggcgacctcatgcgctcagtgctgctgcttgcatacaagcccatggaagggaactttgaagagattgcccgagactttaatcccaactggatgagtgcagtggaaatcttggatgatgacaatttcctgggagctgaaaatgcctttaacttgtttgtatgtcagaaggacagtgctgccaccactgatgaggagcggcagcacctacaggaggttggtctcttccacctgggcgagtttgtcaatgtgttctgccatggctccctagttatgcagaatctgggcgagacttcaacccctacacaggggtcggtgctttttggcacggtcaacggcatgatagggctggtgacctcactgtcagagagctggtataacctcctgttggacatgcagaaccgactcaataaggtcatcaaaagtgtgggcaagatcgagcactccttctggagatcctttcacactgagcgaaagacagaaccagccacaggcttcatcgatggtgacctgatagaaagtttcctagatatcagccgccccaagatgcaggaggttgtggcaaaccttcagtatgatgatggcagtggtatgaagcgggaggcgactgcagatgacctcatcaaagtcgtggaagagctgactcggatccattagccaaggacaggggctcttttcctgacccgtcctaaaggcactgccctcctgtcctcccctccctttcccacccttgtcttcttggcatgggaggcttttccctagccacctgcccctagagccacagctgacctgtgtggaaacagggctttttataactaaaaccagttcactagagacctaggaatgggctgaaagtggaatattttctccctggatttttaccagccatcaccttggaccaccaagccttgaatggtgttgccagttggctccttctggggaggacctttgccactctttgcccatgaagcagctctgtgcacgtatgtgtgtgatacccacactcatgctttgtcctctactgtcttatgtaggttgtgggtgtggggaggttgaggtagggggaagagggtcgagagggtttcattgtcttgaagtgagagcttccttttgctttcttctctcgcctctgagaacatcagcctgaaggcctatcaggccatcggctgcctgagtggaaacctgggaaggtggataattcccaagccacagcccttttgtctcggggaactcccttcttcacagagaaggaggtagggggctgtgaattggttgttagtttctgaattttaccaaataaagtagaatctaagaagaaaaaaaaaa

SEQ ID NO: 1005 - DNA, 2478 bp, Cricetulus griseus
  modified_base (1961)..(1961): a, c, t, g, unknown or other
ctgcagcttggctggatattaagatgtccgtggacatgaacagccaggggtctgacagcaatgaagaggactatgacccaaactgtgaggaagaggaagaagaggaagaggaccctggggacatagaggactactatgtgggagtagccagtgatgtggagcagcagggggctgatgcttttgatcctgaagagtaccagttcacttgcttgacctataaggagtctgagggtaccctccatgagcatatgaccagcttagcctctgccttaaaggtatctcattcagttgcaaaacttatactagttaatttccactggcaagtctcagagattctggacaggtacaggtctaattctgctcagctgcttgtggaggctcgagttcagcctaatccgtcaaagcatgtccccacacgcccagcaagcccaggccagggaggccctcaagaagtacttgttctactttgagaggtgggaaaaccacaacaaaagtttacagctagaggcacaaacttaccagcggattcatgaaaagattcaagagagggttatgaacaatttgggaacgtggattgactggcagtatctgcagaatgctgctaaaactcttggccaagtgtcgatacaccctgcaatacacctatccctatgcgtactacatggagtctggtcccaggaagaagctgtttgaataccagcaggctcagctggaggctgagattgaaaacctttcgtggaaagttgagcgtgcagacagctatgatagaggggacttggaaaaccaaatgcacattgccgagcagcggagaagaaccctgctgaaggactttcacgacacctaggcaggctgtggatgtgccggggtgaggaagacgtagctgtgaggccttccggctaccacactgcatgctgcaggctctgcctttcacgaccccaggcaacagccaggcccactcctgagagacactggcaacacacctcttagtcaatttgttttctccttatctttttgctttttgtttctaccagggttagaggccatgttgaactggcctctagtaaggacttttaaattctccctggatggttgttgggagggagggtaactttttttttcctgtaatggctattaatagtattagatcattacaacttatgtaaggttgtacgatttgaaagaaaggcaaaccataggataacacagagcccttttgaaaataaattggcattggagtgtttaccctctagctactttacttagaatgtaacttgatgctgcccacccaccgagcctcagaatgtctgtgctgccggggttcctggggtggtccctgctttccagcatcctctttgacgttacctggagtcccaagggaagagtatgtgtggcagatggtaaggaactgagttggcctgcataacaggcatggagcacagagagtcaagtaccttctgccgtagctgagcagcaagggcacggagcatagcagggtttcactatgggcttgcttttattgaatgtgagaggtcagagttcagcatggcccttctaagggcacgggccttgtggctcaacagctaggtttgcacaagctattatgttaacctggagtgcggtcagaagctggctctggggtggggtgtgtcccctttgcctagttgcagcagtcagagaaccccatctctaaggtctgggagtctaaaacccaggagaatcctggtttggggtggcagttcctatacaagaaggggctggccagaggaaaggaccagctcttgtacagtcaaggcagcttgcctgctgtccttcctgtcttgaacctggtcctgtgggcctttgaaaagttagatctgtgatctctggggtttctgtggctttgttcagtgcctcccctctgagactggcagagctgtcaatacttgacagggcctccttggactcctgggagagcccatagngaaaaaatctgtgaatattatgatgcagactctttgatattcatacatttcacctccagtcagcaattacctaggtaccatgtaaagctgtaaaattgagttgttctttaagacaggtgacagctgtgactgctggggtagttggccagctgcacattctttcacctctcaggttttgtctcttcatgttgtccccgacaaatgagagatggtggggtggattgggagaagtaatttggtatacagtaattgaacccaagataaaagtgggagctcattgtaaacaaggagtattcattcctgctgcaggcccaggggtggcatgtgaattctgtgttggtgcacagacttctccatcaagtcctttcagcggccatgacacgcacagaaccagagttgcagctctgcagcctaaacccccttgggtactatctgaactgcacagctgccatgctcctatacatgggctgtgatcctgaccattggcactgcaggaggctctggcagccagagctgg

SEQ ID NO: 1006 - DNA, 2477 bp, Cricetulus griseus
cacgtggagaacgtcatcaaaacctaccagcagaaggtcagccgcaggctgcagttggagcaggaaatggccaaagctggactctgcgaggctgagcaggagcagatgaggaagatcctctaccagaaggagtccaactacaacagactgaagagggccaagatggacaagtccatgtttgtgaaaatcaaaactctgggcattggtgcctttggagaagtgtgcctggcctgtaaggtggatactcatgccttgatgccatgaagactctgaggaagaaagatgtcctgaaccggaaccaggtggcccatgtcaaggctgagagggacatcctggctttccctgagcacctggcccgattctacattgcagagttgactctggccattgagagtgaccacaagatgggcttcatccacagggacatcaagcccgacaacatcctgatcgacctggatggtcacatttaagctgacagatttttggcctctgcaccggatttaggtggactcacaattccaaagtactaccagaaagggaaccatatcagacaggacagcatggagcctggtgacctctgggacacgctgcacatcccagcgcaggtgaagctgagcgccgaggcacgagacctcatcaccaggctgtgctgtgcggctgacagccgcctgggaaggaatggggcagacgacctcaaggcgcacccattcttcagcgccatcgacttctcccgtgacatacggaagcagcctgcgccctatgtccccaccatcagccatcccatggacacctccaattttgacccggtagatgaagaaagtccctggcacgaggccagcggggagagcgccaaggcctgggacactctggcatcccccaacagcaagcaccctgagcacgccttctacgagttcaccttccgcaggttcttcgacgacaacggctaccctttccgatgcccaaagccgtcagagccagccgagagtgcagacccgggcgatgcagagctagaggatgcggctgagagctgccagccagtgtatgtgtaagcagatttttttgaaagacaaactcaagttgaggaatccttcatttctagttttggttaatgggcaacagggagagtcaccgtgacttcgaattggtcctttgaggaccttcactgcattaaaacaatattttttaaaatttagtacaatatggaaagagcacttattttatggatacccattttttcttactaaattataaggattaactttgacaaatcatgctgctgttacttccatttgtgtttttttatctgatagcacttgtccacatttagagaaaggtaggagctgactaatgcgtgataacgtgcaataaaggagagaacaagacggcgctcgctctgctccaagtcaccaggaccgtttatctacacagtggctttgttttatagtttcccacatttcaaaaactgtgatgtaatgtttaagagctgctttcgtgcttttttcccctccgcatattatagtatactagaaagagtgagcagagatgatgggtgattccagtgtctggtgtgtggaaggcactgcatgagcagttttctgttataaaattaccgtatcttgccattcacagcaggtcctgtgaatctgtttttaaatgaggtattctagagagtgtgctgataatgtattgtgtggtgttaaagaaatgcatatgtgtaaactgaagtttgtttggtttttttttaacgtgtgtgtgtcttggatatgactgggttctttgggaggcaaatgtaaacgtttgtcatatataaaacacatcaaaagggattaattcagctatgccaaaacattggacataatcatggcactctgtccatttctctagtccagtatgctgtctttttctaactttgtaaaaagaaaaaaaaagattcttcaaagtgacattgaagtacaaaagcaagccatacaatttttcttagacatataggtgtatatataactatagataaacacacaaaatattccttatttcaaattagtatggtttctatttaaagtgatttatatttgaataattcaatttcttttgcttttgaaaggatggaatgcatcacattttcattatactattccacatattttccttgaggttcttagcataatgtatccgttacttagtatgtatctaggcagaaatacaaatttatctatgtctgagaaacattcctgtgtcctggtttacatttgtatgaatggcatattctgaagtctgctgtgcttgtattgggacttacagtattcttgctattttgtagtaatgccgtgttatttacagcgctctgacatagtttcttgtggtaggttctttctcaggaactcgatttaactattatttattgatatatcattgcctttgaaagcttctactggcacaatttattatttaaaaactttaaaaacccaaaaaaaaaaaaa

SEQ ID NO: 1007 - DNA, 2477 bp, Cricetulus griseus
gtggccaggtcctgctgtccctgcgcatcttgttactgatgaagcccagcgtgctgtccagggtcagccaccaggttgcctacgggctccatgaactcctcaagaccaatgcagccaacatccactcgggtgacgactgggccaccctcttcacattgctggagtgtattggctcaggcgtgaagcctccagatgctctacaggccacagccagggctgatgctcctgatgctggagcgcagtcagacagtgagctcccatcctaccatcaaaatgatgtcagcctagaccgagggtacacttccgactcagaagtctacactgaccatggcaggcctggcaagatacaccgatctgccacagatgctgatatggtcaacagtggttggttagtggtggggaaggatgacattgataactccaaagcaggagcagggctcagcaggcccagcccttcacccctggttaatcaatatagcctcacagtgggcctggacctggggaccacatgacactaagtccctgctcaagtgtgtggaatcactgtccttcattgttcgtgatgctgctcacatcacccctgacaacttttgaactctgtgtcaagactctccgcatctttgtagaggccagtctgaatggtgggtgcaaatcccaggataaacgtggcaagagtcacaaatatgacagcaaagggaaccgcttcaagaaaaaacccaaggagggctcagtgcttcggcggccccgaacctccagccagcatggcactcggggtggacatagtgatgaggaagaggatgaaggagtgcctgccagctaccatacggtgtctttacaggtcagtcaggacttgctggacctgatgcacaccctgcacactcgggcagcctctatctacagctcatgggcagaggagcagcgccacctggagtcaggtggccgaaagattgaagctgactcacgcaccctctgggcccactgctggtgccctttattgcaaggcatcgcctgcttgtgctgtgatgcccggcgccaagtgcggatgcaggccctgacgtatctgcagcgagcacttctggtgcatgacctacaaaagctagatgccctggaatgggagtcctgctttaacaaggtgctgtttcctctactgaccaagctgttagaaaatatcagccctgcagatgtgggtgggatggaggagacccggatgagggcttccacgctgctctcaaaggtcttcctgcagcacctgtcccctctgctgtcgctgtccacctttgctgccctgtggctcaccatcctggacttcatggacaagtacatgcatgcaggctccagtgatttgctgtcagaagcaatccctgagtccctgaaaaacatgctcctggtgatggacacggccgagatcttccacagtgcagatgcgagaggaggcagcccctctgccctctgggagatcacctgggagcgcattgattgctttttgccacacttacgtgacgagctcttcaagcagactgtcatccaggaccccatgcccacggaacctcacagccaaaagcctctggcctccacccacctgacccctgctgctggtgaccccggccggccatctaccttccccagagataccctcagaagtgggggcctgtgactcagagaagcctgagggtacccgagccaccagcagcagctctccgggatcaccagtggcctccagccccagtagactgagtccttccccagagggacctcccccattggcccagcccccactaatcctgcagcccctgacttccccgctgcaggtgggcgtgccacccatggctctgcccattatcctcaaccctgcactcatcgaggccacctctccggtgcctctcttgtccactccccgtcctacagaccctattcccacctctgaagtcaactaaggcgggtcactcggagatgagacccttacttcacaccaggccttccaggcccaaagcaagctgctgttgctactacttgatgggggaatgagaacttacatagcccctgctgggatccacttcaggctcagactcttccactgctgcccattcctgagcttccaagccgagagtggacacaggcataacctgtagcctctgccttcagcctggcggccctggggaggcatggagccaaccctgctgtgccaaccctgcagtgcctgccgcgtgccccctgccaggttaggccttaagagcccagcccagccactctgcactttgttcctctctccatatagtcccatcagccctgagccaccgcctccaattctcccttcattaaatagttggtcagtttggagttgcttggcaccgtggagggtgggcaggtaggacttgatgggggtctgcccataggagcatgtacatatggaaaataacaccaatggactttttatgatgtaataaatgttagtaccgacacaaaaaaaaaaaaaaaaa

SEQ ID NO: 1008 - DNA, 2476 bp, Cricetulus griseus
ggatgagctgaactccctgccgaggacagtcagacccctacctccatctgtgtcccgtccctaggccaggaccgctgccggctgctgtccaaaagagagcagcgtctctttcccaccatccagtcagctggagacccctgccctgctgtgagtcccgagctcacttctcctgacttctcagccgccacctcagaaggctggagcagggacgtggtcgctccggccgcctgctcccttcgggtccccgtgcgaacccacgccggccccggcgcccacccgcagccctgcctctggataccggataaggcccagcgcacagactcccaggtggacaccatggaccgaggcgtgctccctctggccattatcctgctgctggccacctacagcttcctccccacaagtcttgcagaaagaatccattgtgatctacagcctgtggaccccacaaggagtgaggtgacatacaccaccagccaggtctctgagggctgtatagctcaggttgccaatgctactcatgacgttcacgttctcttcctggatttttccaagatgtcaaagatggagctgactcttcaggcatccaagcaaaatggcgctgggacccgagaggtgttcctggtcctacctccaggaagcagatccttgactgggcagccaaaaagagtgctgtcacctcgatggcaacactggttgaccccaaaagcatcgtcctccggctgggccaagccccaaaggcaccaccctactgcttggcagaggcccatcaggacatggcccccatccttgaatggcaacctcaaggccccactccagtccaaggctgctccttggaagatgtgactggccacaaggaggcatatattctgaggatcctgccaggttctggagccaggcaccgcacagtgaccgtaaatgtggaactgagttgtgaatctggggatcccgatgccattctcatcctgcagggtcctccatatgtgtcctggttcatcaatgccaaccacaacatgcagttatggaccacaggtgaatactccatcaagatctttccagaaaagagcatcaaaggctttgtgcttccagacacaccccaaggcctggtaggggaggcccgaaaactcaacgccagcattgtagcatcctttgtagagctgcccctggccagtgatgtctcactgagggcctctagctgcggtcgtgtgccacagacctcacctgcaccagttgtgaccacacctcccaaggacaggtgcaactctgggctactcatgtccctgatccagccgaagtgtggcaatgacatcatgactctggaactcagtaaaaaacatgtgcagactctgcagtgcaccatcataggcctgactttctgggaccccagctgccaggctgaagacagcgatggccacctagtcttgcgtagtacctactccagctgtggcatgaaagagacagcacatgtgatcagcaacgaggtgatcatcagtttcctgtcaggcttaccaccgctccggaaaaaggtgcagtgcatcaacatggacagcttctccttggagctgggactctacctcagccggcacttcctccaggcatccagtaccattgagctgggccagcaaggctttgtgcaggtgagaatgtccccatcaacctctgatgtcacggtccatctagagagctgccatctggatttggggcctgaaggggacatggtggaactcatccagaaccgagcacccaagggcagctgtgtgagtttgctgtccctaagccctgaaggtgacccacgcttcagcttcctcctccatgtctacatgatgcccacacccacagctggcaccctcagctgcaatgtagctctgcagcccagcaccgtgtcccaggaagtctacaagactgtctccatgcatctgagcatccacagccctaacctgcctcgcaaaggcctgcccctgccctatgtgctgggcatcacctttggtgccttcctcatcggggtcctgctcacagctgcactttggtacatctattcccacacacgtggccccagcaagcaggagccagtggtggccgtggctgccccagcctcctctgagagtagcagtaccaaccatagcatcgggagcacccagagcaccccctgctccaccagcagcatggcatagtgcccagcctggagctgcagggccccccagccaagaccaagcagccacaagctgggaaccactggccacgaacttgttgtccattccttccagtggagacaggggctctgagatatggctgcccaggaatacagagagacacagcactgccctgcacatgaacattgctgtagaagcttaaggagctgccttaaagctggatcctgtgccccagcccattggatgggcagcaggaggggagtggccaggctgcttgtcctgggccaaaccctgtatattcaccaataaatcagacatgaaaccag

SEQ ID NO: 1009 - DNA, 2476 bp, Cricetulus griseus
cggtaatatttcacttgttgcatttccagtttccagcaccaactcaccaacaaagattttaccgaaaaccttagggccaataaatgtgaatgttggaccccaaatgattataagcacaccacagagaattaccaattcaggaagtgttctgattgggagtccatatccccctgcaccagcaatggtcactcagacacacatagctgaggctgctggctgggttcccagtgatagaaaacgagctagagaatttatagactctgatttttcagaaagcaaacgaagcaaaaaaggtgataaaaatgggaaaggcttgagacatttttcaatgaaagtgtgtgagaaagttcagcggaaaggcacaacatcatataacgaagtagctgatgagctggtatcagagttcaccaattcaagtaaccatctagcagctgattcggcttatgatcagaagaacattagacgaagagtttatgatgctttaaatgtgctgatggcaatgaacataatttcaaaggaaaaaaaagaaatcaagtggattggcttgcctaccaattctgctcaggaatgtcaaaacctggagatagagaagcagaggagaatagaaaggataaaacagaagcgtgcccaactacaagaacttctccttcagcaaattgcttttaaaaacctggtacagagaaatcgacaaaatgagcaacaaaaccagggccctcctgctctgaattccaccatccagctgccatttataatcattaatacaagcagaaaaacagtcatagattgcagcatctccagtgacaagtttgaatacctttttaattttgatgacacctttgagatccacgatgacatagaagtactgaagcggatgggtatgtcctttggtctggagtcaggcaaatgttctctggaaaacctgaaaattgcaaaatcactcgttccaaaagcattagaaggctatatcacagatatctctacaggaccttcttggttaaatcagggactacttttgaactctacccaatccgtttcaaatacagacctgaccactggtgccaccgtaccccaatcaagtgtaaaccaagggttgtgcttggatgctgaagtggccttagcgactgggcagtttcctgccccagacagtcaccagtccagtagtgcggcctctcactgttctgagtcccgcggcgagaccccttgttcattcaacgatgaagacgaggaagatgaggaggaagattcctcctccccagaataaagacaaggaaaaaactcatgttttaacctttgatgctcatgtgtgtctttagtgtgagctcttgtgttttgaaatgattgcttcagtctttgccttttgtttgtcatttgtgttttagtgaaaactagagaaacacaataagcaaattacatgaaggctgcatctgctgccttagcttctagaagggagcaagtgctaccttataagtacctagttgacatttagaataatttacagaacactgaagtgaccatttgtcaatgcattggtgcataggagtttctagggctacttctgggagccaaaatagaatagcatttccatgtgcattaaaacttcgccagcactgccttttgccagcattctaaatttggagttttactgagaaggaaactgtatttacagttttaatcaaagctatgcgtttcatacagcttttgaatttacagttgaacaaagaagcaaattctttgaccaaattgcttgtccatagctgtctgcagtactgtatgattttacccgtgtgcaatttgtgaaaatgaaccaaatgtcattacttttgtctttatttcaagaatatgaacatcattgttctcttatacatgttattcttttcattaatttaattatctaaaatgatcttatcagtatttattccttagggtaaattgctgctctttttctgcatgaagcacacgctggtgtcatgccctaaataatttaaacaaggtaagagggaaatgcaaaccacatctcgcctgcctcttagagttttgttcctaggttgaatacacaggctaatatattattttgtagtatctcagactttgcataaatactattatttttgtatggaattttttatagaagagctatttctgtatacttacttctgtgtttctgaaatgccttccagtaggtaaccggcaggtattaaatagtgtcccacttcgggtggctcagggaccgcctacccagaagagacggggaatttaaattttttcactccctgcacccactccagatagaagctcagggtgtacctaggaagtattagctctgagtgatttttctcatcaattcacacatctttgttcatactgtaagagtgaaagaagataacatctgaaatgagtatgttgagcttgaagaaaaattgtaatcgtactattctgtgatttgagatacagaaaaataaacaaagtaaatttaaaa

SEQ ID NO: 1010 - DNA, 2475 bp, Cricetulus griseus
gctcttggaagtacagggcacttacagaggcctctgggcagggacagccgaagctctcctgccaactgcacctgggttatcctgggcagcaaggaacagacagtgactgtcaggttccagaagctgcacctggcctgtggttcagagcatttactcctgcgctcccctctccagccaccagtctccctgtgtgaggctcctgccagccctttgcaacttccagggggcaatgccaccatcacatacagctatgctggggccagagcacccatgggccagggcttcttgctgtcttatagtcaagattggctcctgtgcctgcaggaagagttccagtgcttgaaccaccgctgtataccagctgctcagcgctgtgatgggatcgatgcctgtggtgatggctctgatgaggcaggttgcagctcagatccattccctaacctgaacccagcccctgtcccaactccaccctgcaatctcaccttggaggacttttatggggtcttctcctcccctggatattcacacctggcctcagtctcccacccccagtcctgcctgtggctgctggacccccacgatggcaggaggcttgcagtacgcttcacagccctggacttgggttatggagatgccgtgcatgtatatgatggtgctgggccacctgacaccccgagactgctacgtagtctcacccacttcagcaatggcaaggctgtcactgtggagaccctgtctggtcaggctgttgtgtcctaccacacagttgcttggagcagtggtcggggctttaatgctacctaccatgttcggggatactgtttaccttgggataggccctgtggcttgggctcaggcctgggggctggtgaaaatctaggtgagcgctgttacagtgaggcgcagcgctgtgatggctcatgggactgcgctgacggcacagatgaggagggttgccctggctgcccacccgggcattacccctgtggagctgctggcacccctggtgccacagcctgctacctgcctgccgaccgctgcaactaccagacattctgtgctgatggagcagatgaaaggcgctgccggcattgccagccaggcaacttccgctgccgggatgagaagtgtgtgtatgagacatgggtgtgtgatggacagccagactgtactgacggcagtgacgagtgggactgctcctacgccctgccccgaaaggtcatcacagcggcagttattggcagcctagtgtgtggcctgttgctggtcatcgctctgggctgcacctgcaaactctatgccattcgcacccaggaatacagcatatttgcccccctctcccggatggaggctgagatcgtgcagcagcaggcacctccttcttacgggcaacttattgcccagggtgccatcccacctgtagaagacttccctacagagaaccctaacgataactctgtgctagggaacctgcgttctctgctccagatcttgcgccaagatatgactccaggaggtcattcagggggccgccgtcgccagcggggccgctcggtgcgtcgtctggttcgccgtctccgtcgttggggcctacttcctcgaaccaataccccagctcggacccctgagaccagatcccaggtcacagcatctgctgctccctctgaggccctggatgacagcacaggccaaagctgtgagggcggagcagtaggaggacaggatggggagcaggctcctccactacccgtcaagccccccatcccaaccccaagcacacttccagcccttgctactgtctctgagcccccaggacctctcccctcagtgcctctagaaccctcactgctgtctggagttgtacaggtcctccgaggccgtctgctacccagcctgtggcccccaggacccacttggaccccagctggacatcacacaacagtcctggccccagaggatgaggatgatgtgttgttaatgccgctggctgagccagaggtctgggtggtggaggcagaggatgagcccctgctggcctgagggagccgtggggctccagacacaatgctatgatcctttggaagtggctaggcttctccactgtgctatctggtgcagaaagttaggtgtcctccaggcagggagagccccttctgtgtatgactagaggctcaaccaccaccgtctgcccatcctgctgtccaggtgactgtgttaagaaaggttcccaaaagatcataggcttggacactccatccttccccacccaaaagtggccttaagtaccagactgcagttgcctagaaatcttctatcccctaagtgggggatttggccagggtgatggttttgccagcttccagttctatggtgcctggcccacttagagaacacaagtgcttttgtcccctagctgcatcattgcctaggaaataaagaggaaaaaataaaaaataaatttcagcccttggtaaa

SEQ ID NO: 1011 - DNA, 2475 bp, Cricetulus griseus
  modified_base (360)..(360): a, c, t, g, unknown or other
catgtccgtgtgaggacgccgcagccgtcaccccctcctctcgggccggtcagccgaaacgcgcaccatgggctccatcctgagtcgccgcatcgcgggcgtggaggacatcgacattcaggccaactcggcctaccgctatcccccgaagtcgggaaactactttgcttcacactttttcatgggaggcgagaaatttgacacccctcatcctgaaggttacctctttggagagaacatggatctgaacttcctgggcagtcgtccagtccagtttccctatgtcactcctgccccacatgagccagtaaagaccctgaggagcctggtgaacatccgcaaagattccctccggcttgngaggtacaaagatgatgcagacagccctacagaggatggtgagaagccccgtgtgctctacagtttggaattcacctttgatgctgatgcccgtgtggctatcaccattattgtcaggcagtagaatgttgtggaagtgacaggccatgctcatgtgctcttggctgcctttgagaagcatgtcgatggcagtttctctgtgaagccattaaagcagaagcaaattgtggatcgtgtcagctacctgttgcaggagatctacggcattgagaataagaacaaccaagagaccaagccttccgatgacgaaaacagtgacaacagcagtgaatgtgtcgtgtgcctatcagacctgagggacacgttgatcctgccctgccgccacctgtgcctctgcacttcctgtgctgacacgttgcggtaccaggccaacaactgccccatctgccggctgccattccgagcgctcctgcagatccgggctgttcggaagaagccaggggccctgtctcccatttctttcagccctgttttggcccagagtgtggaccatgatgagcactctagttctgacagtgtcccgcctggctatgagcccatctccttgcttgaggcactcaatggtctacgggctgtctccccggcctatcccatcagcccccctcctatgaggaagtcacctactcaggcatctcggatggtctgtcccaggccagctgtcctcttgttggacttgatcgaatcatagaaagtggcctacagaagggcaagccacagagcaagtctccagacagcaccctacggtctccatcatcccctatccatgaggaggatgaggagaagctatcggaggactcggacgctcctctcccaccaagtggtgtggagcttgcattgagggagagcagctcccctgagagtttcggaacagaggaggtggatgagccgtcactcaatcaagggagccgagtgccctctattgatgatgtcctgcaggatggcagcccccagcaccatggttgcagtcagcaagtccctcctgccgacatttatctaccagccctgggtcctgagtcctgctctgttggtatagaggagtaagctgtggtccacctccatggagacgccacacagccttggcaccaccagctccccctggcctctgctgagtggctctagttctgagcctggagctactgagctgaccccactctgagagcctgactcagctggcagcacagaaccctcagtatccccaaaattgccaggagacttccctggagcccagtgagaccctggcctctcctgtctgcacgcctgatgtggccactgggctttgagaggccatagtgaacctttatcaaattgcacagtggactactcttccacacaccctccttttctatggtctatatatttgtaaatggtacaagatgaaggacagcaactttctccatgggccataggctctagaggggctcccaactgccaaggctgatgctctgagcacttagcaaaccagcagaagagaatctacccacggaggcagctgacgggcaagactaggaggccagatatgtgaacagcacagtcatttgcagtggttgatatccagtaccccctcacaggtcccgcttcactcggttcctcacatgcctccaagatggagatgttcatgcttgcagggcagcactgcccaccccaccaccagggaagagcctgagcaactcccataacagacccattggcgggtacatgtccttttgtgtttctcattggttaattgtctaaggctcctctcacagtccacctataagcagggtcccagtgatacttggtctttaaggcaaagtgtccatgggtggccccagggcaaaggtgcctaggcagtgaggctcccctggtgtcagcatgtgcatgccgcgccaacccctctcacctgccaacaccctggcctctggccatggtactgctgccagtactttgaaagatgggatgcagactacagactcacgtgtctcagattcacatgtgctatcatttgatgtgctctgattggctagtttttggtttgtttttactgtatatttatagtaataaaatcatgcagcaata

SEQ ID NO: 1012 - DNA, 2474 bp, Cricetulus griseus
gattgcatcagcccggaggcttcctggtgttaacatgttcgagcaaggccatggcaagctggatctgctgcgagcctatcagatcctcagcagctacaaaccacaggcgagcttgagtcctagctacatcgacctgactgagtgtccctacatgtggccttactgttctcagcccatctactatggaggaatgccaacaattgttaatgtcaccatcctcaatggcatgggagtcacaggaagaattgtggataagcctgagtggcggccctatttaccacagaatggagacaacattgaagtggccttctcctactcctcagtgttatggccttggtcaggctacctggccatctccatttctgtgaccaagaaggcagcttcctgggaaggcattgcacagggtcacatcatgatcacggtggcttccccagcagagacggaagcaaaaaatggtgccgagcatacttccacagtgaagcttcccattaaggtgaagatcattccacccctcctcggagcaagagagtcctctgggaccagtatcacaacctccgctaccccccaggctactttcccagggacaacttgcggatgaagaatgatcctttagactggaatggcgaccatgtccacaccaatttcagggacatgtaccagcacctgcgcagcatgggctacttcgtggaggtgctcggtgccccattcacgtgctttgatgctacacagtatggcactttgctcatggtggatagtgaagaagagtacttcccagaggagattgccaagctgaggagggacgtggacaatggcctttccctcgtcatcttcagtgactggtacaacacttctgttatgagaaaagtgaagttttacgatgaaaacacaaggcagtggtggatgccagatactggaggagccaacatcccagctctgaacgagctgctgtctgtgtggaacatggggttcagcgatggcctttatgaaggggagtttgccctggcgaatcatgacatgtattatgcatcgggatgcagcatcgccaagtttccagaagatggtgttgtgatcacacagactttcaaggaccaaggattggaggtcttaaaacaagagacagcagttgttgaaaatgttcccattttggggctttatcagattccagctgaaggtgggggccggatcgtgttgtatggagattccaattgcttggatgacagtcacagacagaaggattgcttttggcttctggatgcactccttcagtacacatcatatggcgtgacccctcccagcctcagccattcagggaaccggcagcgcccacccagtggagctggcttggcccctcctgaaaggatggaaggaaaccaccttcatcgatactccaaggttcttgaggcccatctgggagacccaaaacctcggcctcttccagcctgtccacacttgtcatgggccaagccacagcctttgaatgagactgcgcccagtaatctttggaaacatcagaagctgctctccattgacctggacaaagtagtgttacccaactttcgatcgaatcgccctcaagtgagacctttgtcccctggagaaagtggtgcctgggacattcctggagggatcatgcctggccgctacaaccaagaggtgggccagaccatccctgtctttgccttcctcggagccatggtggccctggccttctttgtggtacagatcagcaaggccaaaagccggccgaagcggaggaggcccagggcaaagcgtccacagcttacacagcagacccacccaccaaggaccccgtcagtgtgatcatcacagtggccagccacagaagccaacaagccttggaccactctgatggccacacagggcatcagaagagcatcctgggaggtgcctatttccaagggaccccatctccagcttgtggctgggttagtgtgttctccccaggcatctctgagttacatcctgaagtacctcactgtgctgggctcttgacaggaggtgctcagtagccctccagtggtgtcagcaggcccagtgacagtgcaccaaagacacagagcctggaagggctgtcgggacacactttctacataaagcttacaatcctgaccaagcgaagaaatgcttgttacaggctattttctatatttattgtggggagagtcactttaaagacttgtactgtttggaagcaaagctgttgtgtttgtcagttgagtgcagttttctgcagtgacatcataaggagtcagatcccatgacctttttgatgagaggacagactgaactgaagggcatgtgcacagatctgggaaatgcaagccttcgctttatttttataagtatcaactgccatcatgttttgtaatttggggtcttgatttcaccattgttggtgaaagaaattttcaataaatatgcataaccttaaaaaaaaaaaaaaaaaaaaaaaa

SEQ ID NO: 1013 - DNA, 2474 bp, Cricetulus griseus
tctatttcagggtcttctgccagcagcacgagcagcacccccgaggtcaagcccctgaaatctctgctgggagattctgcaccagcactgcacttaaataagggcacacctagtcagtccccagttgtaggtcgctctcaagggcagcagcaggagaagaagcagtttgaccttttgagtgatcttggctcagacatctttgctgctccagctcctcagtcaacagctacagccaattttgctaactttgcacattttaacagtcatgcagctcagaattctgcaaatgcagattttgcaaactttgatgcatttggacagtctagtggttcgagtaattttggaggtttccccacagcaagtcactctccttttcagccccaaactacaggtggaagtgctggatcagtaaatgctaattttgctcattttgataacttccccaaatcctccagtgctgattttggaaccttcagtacatcccagagtcaccagacaacatcaactgttagtaaagtttcaacaaacaaagctggtttacagacagcagacaaatatgcggcacttgctaatttagacaatatcttcagtgctgggcaaggaggtgatcaagggagtggttttgggaccacaggtaaagctcctgttggttctgtggtttcagttcccagtcactcaagtgcatcttcagacaagtatgcagcactggcagagttagacagtgtgttcagttctgcagccacgtccagtaatgcatacacgtccacgagtaacgctagcagcagtgtttttggaacagtgcctgtgggtgcttcggctcagacacaacctgcttcaagtgggcctgctccatttggggctccgccttctacgaatccatttgttgctgctactggtccttctgcggcatcatctacaaacccatttcagaccaatgccagaggagcaacagcggcaacctttggcactgcatccatgagtatgccagcagggtttggcactcctgccccatacagtctccccaccagcttcagtggcagtttccagcagcccgccttcccaacccaagcagctttccctcagcagacagctttctctcagcagcccaatggtgcaggttttgcaacatttggacaaacaaaaccagtggtaaccccttttggtcaagttgcagctgctggagtgtctagtaatccttttatgactggcgcaccgacaggacagtttcctacaggaagttcatcaaccaaccctttcttatagccttacacagacactcgctgtactggaacgaactgttatgtgatcattacatctctccgcctcttgcactgttgtcttgtttcactgatcttagctttaaacacgagagaagtctttaaaaagcctgcattgtgtattaaacaccaggtaatacgtgcaaaacagagggctcagcaacaacttttcacttgtgaattggcagaaaaaggtagcggcatcatgtatgttaaaaattggctaatattaagttattgcagatcccacattcattatgctgcagtactgtacatatttttcttagaaattagctatttgtgcatatcagtatttgtaactttaacacattgttatgtgagaaatgttactggggaaatagatcagccacttttaaggtgctgtcatatatcttggaatgaatgacaaaaatcacttgaagcattgcttcttgaaagttgaaagtcaaaatcggaaggtttattcattcttgaatttttccttctaaagagctcttcttatacatggctaaattctttaaagatgtggaggacacctgtctgcggaataaagctgatcatgttttgctacagtttgcaggtgaacaaataaatattagaaaatatgctattgtttttgtgttcttgctgcaatgcctttaccaaagtggccttaaataatgagtagtgagttgaaaacatcttgaattcttaaaagacttctagtgactaactttttttaaaaggccatgtagaaaatttattaaaactactaggactgctatattcaggactgtgacagtggaaaagcatttaaatgtagcttgtcagatacaccatgctacttctaatttctctgcaacgtcataattttgtgaaatttgtaaatatggagaatttgcatgtatgtgtatttacaaatattttttaaagatcttgaattctcagactgcaaaaggcctattttaactattttctgttctccattttaattgtctttgaatgtattggaaacagacatgcattaactgtgacatgattgcccctcattttctggacagactgataactctctatggaacatttgtgtgtttgtttgttttggggtaaagaaacaagaacccaatgttaccttaaggtgatgaaatactttgtgtaaaaaggtagcaatactaagtttagtttatcttttgttaatattcaaatgaacttgtttaa

SEQ ID NO: 1014 - DNA, 2473 bp, Cricetulus griseus
gaggaggagcagaggatcctcggagcgcaataaaacggcggctcggcccgagcccgcagcaaacacagccatagaaggcagcggaggagccgagccgggctgcgctcgctcgccgccccccagcctctttcttctccgctgggtgcactgccccgcgctctcccctcgccgcttccccccctagacaaagaggacagaaagtttgcgcgggggagcgggccaggtgaggaggggcgtgcccggccccccagcccgcgccacagcagccggacacaggccccctgcgcgccatgggcgccgcggcccgcagccttcgcctggcgctcggcctcctgctgctggccacgctgctgcgcccggccgacgcctgcagctgctccccggtgcacccgcaacaggcgttttgcaatgcagacgtagtgatcagggccaaagcagtaagcgagaaggaggtggattccgggaacgacatctacggcaaccccatcaagaggatccaatatgagatcaagcagataaagatgttcaaaggccctgacaaagacatcgagtttatctacacagccccctcctcagcagtgtgcggggtctcgctggacgttggaggaaagaaggagtatctaattgcaggaaaggcagaaggggatggcaagatgcacattaccctctgtgacttcattgtgccctgggacacactgagcaccacccagaagaagagcctgaaccacaggtaccagatgggctgcgagtgcaagatcacacgctgccccatgatcccatgctacatctcctccccggatgagtgtctctggatggactgggtcacagagaagagcatcaacgggcaccaggccaagttcttgcctgcatcaagagaagtgacggctcttgcgcatggtaccgcggagcggcaccccctaagcaggagtttcttgacatcgaggacccataagcaggctgatggagcccctgcggccaactgaaaagcctctgagggtttagactggtccagctctgacatcccttcctggaaacagcatgaataaaacatcaatcatccaagtgggttcacgctagtgtgattctgcaccccccattttccctaaacatggttgtgggtctggaggggcaggcaggccagagtccctgccaaaccccctccatgtgccaggctgagcactgtgtgtctcagtctttgatccttgggtaccaggcaggagtggaaaacagactttttaccaggtctcgtgggcactgtcacatacagctgacaggcaatatttaagggtcccctggccctgctggggcagagcctgggaatgcgcattttgcagaaacacttgacggttgttgtgagactgtgtagctggcctaccaggtccttttcatcctgagagagacatgtccctcgttttctgcagtggccacccctctgagccgtgtttctggcttcagccaaataatttctgtcctacccttccccgtctcttaaggcccttatagggaactggggcacctacttgctccggagtcggcctgccccacctgaggacattttcatgttgtgcagtgatgctcttcccaggatgctgtcatggaccagcccacgagaccctgcggtctatcccacccagcctgtttgcttcctgtgcagtggtatcatacgtaacaatgcccatttctgctgacttcttgacatgttctggtttgtttctgacgttcgctgtgagcattcttgtgctgtgtttatgcccttgatagcatcagaactttgcactttttaaaataaaaacaaaaatgtttcggcatcgaggaagcacttgacccagagtggaaaagcctggcatgacagctggcctgggaccgaggaatcctttcttctgatctttgagttttctgaatatctgattttccagcccgcttgttttttgtgcctggttcagccacaccaggcagacgagagacaggcaaacaaacacacaagctactgggacaaagtgccagatggcagctaagcaacagccattcagatgcctttgcagcaaatcaaccgaaatgtgtagtttaaggctgttgtgttctgagcactgggctttcctctctctactcccatcatgccagcaaactcgaagtctttcagatgacgtttacacgtatatattcccaaatctctgcttgacaaatattaagacatatctgtgagcttgccatgtaatttaaagctttgttgattttgtttccgtttgaactcttggttgttggggggggggggaagcacgtgttcatgctggaatatgaaatctgagacgaaccccctgcactccatgctggcaacacctgagggttgttaaaagtcaacaagccggctgcacgtgtctctgatgctttgtatcagtttttatttttatttttgagtgattgctctgtcaatggacaataaaccatattatcaaagaagaaaaaaaaaaaaaaa

SEQ ID NO: 1015 - DNA, 2473 bp, Cricetulus griseus
gcagcaacatcaaagaatcgaagtaaagtgaccgaattggaggacaagttcgatttactcgttgataccaacgatgtgattctggagagagtgggtatattactggacgaagcatcaggtgtgaaccaagcaccagcagcccgtcctgcctgcaggactgcaggtccccaaaacaatagtgtccagctggaaccggaaggcaggagaatatgggaaaaaagcgaaatctgagactttccgactgctgcatgcaaaaaacatcctccgacctcagctcagatttcgagagaagattgataattccaacacgccatttctccctaaaatctttgtgaagcccaatgctcggaagcccctccctcaggctctctcaaaagaaaggcgggagcgtccacaggaccgtcctgaggacctggacgtcccccctgccctggcggatctcatccatcagcagagaacccagcaggttgagcaggacatgtttgcacatccttatcagtatgaactggatcactttactctgcctgactcggtgctccagaagccacagccccagttgtacagacctgtggaagagacaccctgccactttgtttccaccctggaccaactcgtggagctcaatgaaaagctcctgggttgtcaggagtttgcagtggacctagagcatcactcgtacaggagtttcctggggctcacctgcctgatgcagatttcgacccggacagaagacttcattcttgacaccctggagcttcgaagtgacatgtacattctcaacgagagcctcacagacccagccatcgttaaggtcttccatggtgccgactctgacatcgagtggctacagaaagactttgggctctatgtggtgaacatgtttgacacacaccaggcagcacgacttctcaatctggctcgtcactctcttgatcatctgctgaggctctactgtggtgtggagtcaaacaagcagtatcaactggcagactggaggatacgccctctgcccgaggaaatgctaaactacgcccgggatgacacccactacctgctgtacatctatgaccgaatgaggctggagttgtgggagagaggcaacgaccaacctgtccagttgcaggtggtgtggcagcggagcagggacatctgcctcaagaaatttgtcaagcccatctttacggacgagtcctaccttgagctctatcgcaagcagaagaagcatctgaactcacaacagctggcggcctttcagctgcttttcgcctggagggataaaacagctcgcagggaggatgagagctacggatatgttctgccgaatcacatgatgctgaaaatagctgaggagctgcctaaggagccccaaggcatcatagcttgctgcaacccagtaccaccacttgttcggcagcagatcaatgagatgcatcttttaatccagcaggctcgagagatgcccctgctcaagtctgaagctgcagctggagtgaagaagagcggaccactacctatcgccgagagattggagaatgatctctttggaccccatgactgttcccacgcccctccagataactacccaatcaccccaactgatgggtctgtgccacttcagaaacagccgagcctctttgctgagggcaaagaagggacctctttggatgccagatgccttcttgctacagccgtcatcactctgttcagtgaacctagcgctgaggaaagtggaaagagtccactgacggtggcacagaaaaaagcccagaacataatggagtcctttgaaaacccatttaggatgttcctgccttctctggaacacaaggcccacatctctcaagcagcaaagtttgatccttcttcgaaaatctatgaaatcagcaaccgctggaagctggccagtcaggtccagaaagaacctaaagaagcagccacgaagaaggtagccgagcaaacagctgcccggaaacaggcacaggaggagtctgaagctactgcgttggaacaggccatccccgtgcggcagcaggctgtgctagagaatgctgctaagaagagagagcgagccacaagtgacctgaggaccacagaacagaagcaggagaagaaacgactaaagagctccaagaaacccaaagatccagaccctgcaggaagagaatttagcccttacgactacagccagtcagacttcagggcatttgctggggacagcaaatccaagccctcctcccagtttgaccccaataagccagcaccttctggcaagaaatgtgtggcagtcaaaaagtttaacagtcggtgggaaacaagagcatgtccttcccagctgggaagtcagacagaggcttcaggcacaactggccaaagagatagtgttggagagcctcctggggctgcaggcagtgacactttgtacaaacccattttaaaatcattaaaatccattcctactggaaaaaaaaaaaaa

SEQ ID NO: 1016 - DNA, 2473 bp, Cricetulus griseus
cttccgcgggaggagaagctgagccaggacgagatcgtgctgggcaccaaggctgttatccagggtttagagaccctgcgcggagagcatcgtgccctgctagctcctctggcttctcatgaggcaagcgaggccgagccaggttcgcaggagcgctgcctcctcctgcgccgctccctggaggctatcgagctggggcttggggaggctcaggtaatcctggcactgtcaagccatctgggggctgtggagtcagagaagcagaagctgcgggctcaggtgcggcgcctggtacaagagaaccagtggttacgtgaggagctggcaggaacacagcagaagctgcagcgcagtgaacaggcagtggctcagcctggatgacttgtttcccaatgaggatgagcagagtccagctcccagccctggaggaggggatgtagctgcacaacatgggggctatgaaataccagcacgactgcgtaccctccacaatctggtaatccagtatgcttcacaaggccgctatgaggtggctgtgcccctctgtaagcaggcactggaggatttggagaagacatcaggacatgaccaccctgatgtggccactatgctgaacatcctggcactggtttatcgggaccagaacaagtacaaggatgcggcccacctgctcaatgatgccctggctatccgggagaagacactgggcaaggaccacccagctgtggctgcaaccctgaataatctggctgttctgtatggcaagcggggcaaatacaaagaggctgagccattgtgcaagcgagcactggagatccgggagaaggtcctgggcaagttcacccagacgtggccaagcagctcagcaacctggccttgcaagtaccaggatgcagagaccctgtacaaggagatccttacccgtgctcatgagaaggagtttggctctgtcaatggagagaacaagcccatctggatgcatgcagaggaacgagaggagagcaaagataagcgccgggacaacgccccctatggggaatatggcagctggtacaaagcctgtaaagttgacagtcccacagtcaacactactctgcgaagcttgggagccttgtaccggcgccagggcaagctggaagctgcacacacactggaagattgtgccagtcgaagccgcaagcagggcctggatcctgccagccagaccaaggtggtagagctactaaaagatggtagtggtggacgaggagaccgccgtggcagccgagatgtggctgggcctcggtctgagtctgacctggaggagtcagggcctgccgctgagtggagtggggatggcagtggctctctgcggcgcagtgggtccttcgggaagctcagggatgccctgagacgtagcagtgagatgctggtgaggaagctgcagggggtggcccacaggagccccctaattctaggatgaagagggctagctctctcaacttccttaacaagagtgtggaagagccagttcagcctggaggcacgggcctctccgacagccgcactctgagctccagctccatggacctctcccgaagaaactccctcgtgggctaaagctgaaggggcagcctgtctctagccttcatctgacacgaccccttaccccagccctgcgcatgggcctgctgcttgtcctgcctgcccctcccaaggacccctgtcttttctgttcaatctcagggtaacctcccttgtcatctcagccagggccctggaggccgggcctgcccaccccaactctactccttatttattccttccagcagggggcctctcttccctacattcagggcctgtgggagtggtggcctgcctacccatcctccaaagccaagaacacttaagtacttgctgtcctttagcatctttgactcccccagccctcggccgttgcttctgtatatagagaaataagttattggccatgtcatcctctcagccctcctcccttcagtccacggtattcccgggccaccacctgcctctcccttctccagtggtaccgcccaggccttaaatcacccctgttccgagtggtggtatctcccaagctccaagttctaggagcagaacctcctgaaagggttcccgatctccttgccatcctggttttggagggatgtgctctacccaaccttgcagatgcccggactcccacaacaccgggccctgtgttgcctcccggacttatgcaccgtcctttgctccctgcctccgccccgcccaggcatggcctgaccccaccctgggcacggcccattgagccatcctgccacgccttccttgcctcagcttccaatgtcccctccacgtacccccgcagtaggaggggctaccccatttgatgggtgaggcaatcgcgctctctattttcagatgttgctgtagaaataaagacgatttgaatctagaaaaaaaaaaaaaaaaa

SEQ ID NO: 1017 - DNA, 2473 bp, Cricetulus griseus
gtgcactccccaaagcatttgaggacacatacaaaatcaagttccccgaggatgccttaaaaaatcttgcctcgctctctgatgtgtgcaccataagctacatttccggaaatacccagaaggcaattctttatgcaaaactcccattacccactgacaagatcttaaaggatgaagggcaggcacaaggagattttgacatcaagtcaatgattgaacaagaatatttgcagatagaaaaaaacatggctgaaaatgctgatgagtttgtggaggacataaccgtgccacctctggtgattcctactgaggcctccccatctgtgttggtggttgagctgagcaacacaaatgatgtggttatcaggtatgtaggcaaagactactcagctgctcaggaactgatggaagatgagatgaaggaatactacagtaagaaccccaaagtgacaccaatccagactgtgcacgtggggcagctgctggcagtcaatgcagaggaggatgcctggttacgcgcgcagatcatctccacggatgagaacaagataaaggtttgctacgttgactatggcttttgtgaaaatgttgagaagagtaaagcatacagactgaacccacgcttctgctctctgtccttccaagctacgaagtgcaaactagcagggttggagattctgaacgatgatcccgacctcgtgaaggtggttgagtcattaacatgtgggaagatctttgctgtggagatactcgacaagtcagatatccccctggtggttctgtatgatacctcaggagaagatgatatcaacatcaatgccacctgcctgaaggctatatgtgacaaatctctagaagttcatctccaggtggatgccatgtacacaaatgtcaaagtgactaacatttgctctgatggaacactctactgccaggtgccatgcaagggtctaaacaaactcaatgaccttctccataagacagaggactacttccactgcaagcacatgacctctgagtacttcatctcactacccttctgtgggaagatctgcctcttccattgcaaaggaaaatggttacgagtggagatcacgaacgtccacagcagccgggccctcgatgttcagttcctggactctggcaatgcaacatccgtaaaagtatcagagctcagagaaatcccacctcggttcctgcaggaaatgcttgccataccccctcaggctataaagtgctgtttggccgatcttccacagtccattggcatgtggacaccagatgctgttctttggttaagagattctgttttgaattgctcggactgtagcattaaggttacaaaagtggatgaaaccaagggagtcgcatatgtgtacttatttactccgaagaacttccctgatcctcatcgcagcattaaccggcagatcacaaatgcagacctgtggaagcatcagaaggatgtgtttctgagtgccgtgtccagtgcagtcagctcacctggcagcaggaatggcagcacacctgcaccaggcagccctggagagggtctcagaaagagccacccagaggtcatcagaaagtccgtgctggaccacaccagctctttctctttggaggaactgccccctccagtccacttgtcaaagtcaggggaacacatggatgtgtatgtgcccgtggcctgtcacccgggccattttgtcatccagccttggcaggagatccataagctggaggtgctgatggaggagatgatcttgtactacagtgtgtctgaggagcgccacatagcggtggagagagaccaagtgtacgctgccaaagtggagaataagtggtacagggtgcttttaaaaggaatcctgaccaatgggctggtgtctgtgtatgagttggactacggcaagcatgagctagtcaacataaggaaagtgcagcccctagtggatgtgttccgaaagctgccattccaggcggtcaccgctcaacttgcaggagtgaagtgcagccagtggtcggaggaagcttcgatggtgtttcgaaatcacgtggagaagaaacccctggtggcattggtacagacagttattgaacacactaacccttgggaccggaaagtagtggtctatctagtagacacatcgctgccagacactgacacctggattcatgactttatgtcacagtatctggtggagctttcaaaagttaattaatcactgcttgagacctcgacagcaaattgttctctaagcaataatacaaaatgtgtagtaggccctcaaacatcttattttactacatggctctgactgttgtggaggattgaaaagaatatgctttgtttgatgaaagatatttaacaagttttgtttaacacagttgacttttcaaagaaaaattgcacttgaattattaatataatattagaataaaatagtttaacaatagtaaaaaaaaaaaaaaa

SEQ ID NO: 1018 - DNA, 2472 bp, Cricetulus griseus
  modified_base (19)..(19): a, c, t, g, unknown or other
  modified_base (66)..(66): a, c, t, g, unknown or other
  modified_base (800)..(800): a, c, t, g, unknown or other
caaggacgctgcccatgtntccccccagtgagcgtgttcaggatcagagtgctcgcatgcagcgcnctttcatgctgcagcagctgggactgagcatcgtgagctcagccctcagttccagccagagtggcgaggagccgcctgcccccatgagctcataccatgcgcaatgggatggctgacaaccaggaagacagtgctatgatgtttgataggccttttggtgcccaagaagatgcccaggtgcccagccagtcagatggcagtgctggcaacatggcctctcgtgcaactcaggttgaaactagttttgaacaagaagctgtagctgagaaaggcagtttccaatgtgaaaatcctgaggttggccttggggagaaggaacacatgagagtggtggtgaagtcggagccgctgagctctcccgagccacaggacgaagtgagcgatgtgacctcccaagcagagggcagcgagtctgtagaagtggaaggcgtggtggtcagtgccgagaagatagacctcagccctgaaagcagcgatcggagcttctcagacccccagtccagcacagacagggtcggcgacatccacattctggaagtcacaaataatctagaacataagacctcttttagtatttcaaattttctcaacaagagcagggggagtaactttagcacaagtcagagcaccgatgacaacatcccaaacaccaccagtgactgccggctggagggtgacggccccttacctgttgagtccagaggctgggcctgcaggtggcctcctctgccccnggttcccatgtagagaacccattcagtgagcctgcagactcccactttgtcaggcctgtgcaggaggtgatgggcctgcagtgtgtgcagacctcaggcttccaaggagaacaatttgggatggacttttccaggtctggcttgggtctccactcttccttttccagggcagtgatgggttccccaagaggaggagctagtaactttccgtactaccgacgcatagctcccaaaatgccggttgtaacttctgtcaggagctcacagatccctgaaaactcctctagttcccagctgatgatgaacgggaccacctcatttgaaagcagccacccttcccagcctggccctccgcagttgaccaggtgtcctgtcaaagtgcaagaaggccttatcagagcacaatgtcttggtcgtggagggggcgtcgcaagtatgcctgcaaaatactgctgtaaaacctttacttgactttgacagactgcaagaagcacatccgagttcacacgggcgagaagccatatgcctgcctcaagtgtggcaagaggttcagtcagtccagccacctgtacaaacactcgaagaccacctgcctgcgctggcagagcagcaacctccccagcactttgctctcttagggtggaggaatgcagtcatatagtttgtcattgatgttgagagtgtcaaattttaaatggaagtgatgaaaacatttaacactatattaaagccctgtgaagcatttaattaaatttcctacatcctctggtgggaatatgccatccctgtacagcagtgcaaaaacataacttacgtgtaagcaggtgacttggtgctgtgtgaacaaaggccctggagggcaagcctgtctgtcacaaatgctttaaagtgtatcctgagctaagtccgaggccacagaaagtactgttatccttttttttagtccaagttgcagtcattgacactgccctctgatggtgctgacactgggtccaggtgaacacgcccttggactaacaggtgtatatacttttgaatcatctctgtggaataggtgtttttattaatttttttctggttttaaaaataaacttgtaagtggagtatgtatttgtagggagtgacagtgaggtgtttctgtacgtgctgtgttagcaatgttttaacctttgtattccctatgcagtagttctgttggaagtcagcaggaactagtgtccgtctttgttctggtgatatggagtcctgttttgtgggttttcatggtgcatttgcctttcactccatcccgatgtccaagccagccacaacagagcctgcctctccactgctggatggacctggaatctcatctacctcgtagtcagtctctacgtttgagaagaaagcttgcaggccagtgtcctccaacatgctgtagcacttaaagatttccaagggtccctgggaaactggacccagggctgctgtgacctggagttctactgggattctaactggtactggggacccgacttttgtatttttagccttaattgtagcccggcataatcatgtacaatcttctagagatggcatcaaatatagaggcaccctgtcggtgctaatatactggtcaaaacagattttgaaaataaaaagcctctaaaacaaaaaaaaaaaaaaaaaaaaa

SEQ ID NO: 1019 - DNA, 2471 bp, Cricetulus griseus
caccagcaaagagctgtccatgagtgacaaagaggcggtgcccgtctctgagagctccttcaagctccttggctcctcagatgacctgtccagtgactcagagagccacattgcagaagagtccgctctcctgtcaccccagcaggcattcagaaggagagccaacaccctgagtcatttccctgtggagagccaggcgcctccagagcctgctcagagctctccaggggtctctcagagaaaactcatgaggtatcactccgtgagcacagagacgcctcatgaacacaaggactttgaatccaaaacaaaccacctgggtgacacagatgggacccctgtgaagacccggcggcattcatggagacagcagatattcttcgagtggccactccacagaaggcatgtgactccccaagcagatatgaagattattcagagctgggagagctccctccacgatccccattagagccagtgcgtgaagatggaccatttggccctgtaccagaagaaaagaagaagacatctcgagagcttcgagagctgtggaaaaaggctattctgcagcagatactgctgctcaggatggagaaggagaatcagaagctgcaagcctctgagaatgatttgctgaacaaacgcctgaagcttgattatgaagaaatcactccttgtcttaaagaagtaaccacagtgtgggaaaagatgcttagcactccaggaagatccaaaattaagtttgacatggaaaaaatgcactcagctgttgggcaaggtgtgccacgtcatcaccggggtgagatctggaaatttctagctgagcagttcctccttaaacatccctttcccagtaaacagcagccaaaggatgtgccctacaaagaactcttaaagaaactgacctcccagcagcatgccatcctcattgaccttgggcgaacctttccaacgcatccatacttctctgcccagcttggagcaggtcagctgtcactttacaacatcctgaaggcctactcgcttctggaccaggaagtaggatactgccaaggtctcagctttgtggcaggcattttgcttcttcatatgagtgaggaagaggctttcaagatgctcaagttcctgatgtttgacatgggtcttcggaaacagtatcggccagacatgattattttacagatccagatgtaccagctgtcacggctcctccatgattaccacagagacctctacaatcacctggaagagcacgaaattggccccagcctctacgcagctccctggtttctcacggtgttcgcctcacagttcccactcggctttgtagccagggtctttgatatgatcttccttcagggatcagaggtcatatttaaagtggctttaagtcttttgggaagccataagcccttgattctgcagcaggagaacctggaaaccatagtggacttcataaagaacacactacccaacctgggcttggtgcagatggagaagaccatcaaccaggtgtttgagatggacatcaccaaacagctacaagcctacgaggttgagtaccatgtgctccaagaagaacttatcgattcctctcatctcagtgacaaccaaagaatggataaattggagaaaaccaacagcagcttacgcaaacagaaccttgatctcctggaacaattgcaggtggcaaatgctaagatccaaagccttgaagccacggtggagaggcttctaaccagcgagagcaagatgaagcaggctgcactgaccctggagctggaacgctccgccctgctgcagatggtggaggaccttcgaaggcaaagtgcccagcccagcactcaggagccggattgtacccagcccgaatctaccggtgactgacagcttccaggagagagtgcacacctctaacactgtccaggccttaatcaggagagacgggagctggaggcagagaagagaggactcctcagggaggaattggctcgccagcccgcagatgctttcgagctcagacttggagttgggagggcaaaagtcccagagtttttgttttcagttctatttcatccccctttcagtcctggtttttgtagctttagacagcatggacatgaataaatgtacctttctgtttcctcctacctgaggtgaccatggggaacgactgagaggggtttatttaaattggatgcattgatcgttactgactccactatcactcccactggtactgaagaaactcgtcttttacacagtgttttaatgttttttgctcatcctttcaagtcatggtagataaatgtttcataaggaaatcacagtttttagactccctgttcttgctagtgtgtgactgcagctatggggtctgaaatatttatttgcgagtttcatatccacactatagggtcacttatttatttttgcctattgaaatgatgtccacagccatgtcttccttt

SEQ ID NO: 1020 - DNA, 2471 bp, Cricetulus griseus
attgaagccctgaggactgagctggaccagatgagactgagaggcccttcacttcatcacggccgaccccatttgggcagcgtcccggacttcaggttccctgtggcagacgggcatgtggatgcttacagcaccagtgcagtgttgcggcgcccccagaagggccggctggcagcgctgcgggacgagccctccaagggccaggactccctccacaaagccccaaagaagaagggcatcaagtcctccattggccgcttgtttggcaagaaggaaaagggccggcctgggccactgggcaaggagtcaccaggacaagttggtgtttcagagacagaaaattcatctcaagatgccttgggactcagcaaactaggaggacaagctgaaaaaaaccgtaaacttcagaaaaagcatgagctgttggaggaggcccgcaggcaaggtttgccatttgcacagtgggacgggcccaccgtggtggtgtggctggagctctgggtcgggatgcctgcctggtatgtggctgcttgccgagcaaacgtcaagagtggtgccatcatgtcggccctgtcagataccgagatccagcgggagattggcatcagcaaccccctgcacaggctgaagctgcggctggccatccaggagatcatgtcactgaccagcccttctgccccacccacatccaggacgaccagacgctagcatatggggacatgaaccacgagtggattggcaacgagtggctgcccagccttggcctgccgcagtaccgaagctacttcactggagtgccttgtagatgcccggatgctggaccaccttaccaagaaagacctacgagggcaactgaagatggtcgacagctttcacagaaacagtttccagtgtggaattatgtgcctgagaaggttgaattatgaccgaaaagaactggaaagaaaaagagaagaaagtcagaatgagacaagagatgtgcttgtttggagcaatgaccgggtgattcgctggatcctgtcgattggccttaaagaatatgccaacaatctaatagagagcggtgttcacggagcacttctagccttggacgagactttcgatttcagtgccctggcactgttgttacagattccaacacagaatacacaggctcgagctgtcttggaaagagagttcaacaaccttttggtcacagggactgatcggaggtttgatgaggatgatgataaaagcttcaggagagcaccttcatggagaaagaagttcagaccaaaggacatccgaggcctggcctctggctctgcagagacattgcctgccaacttccgggtcacctcctctatgtcatctccctctatgcagccaaagaaggttcaaatggatggtagtgtgtccggagcacagaggctggactctgccacagtcaggacttactcctgctagagcctcctgctgtttacccacactacttctacagatgacgacgccacggcagagacggtgcagagctcgtctggcaacactcgctatatggacccaagatattttattacagagtttttaaacttgtgggggaaaaaatcacaaataccatagagaaaatattttagaattgactgtttcttatatttatgtaaacttacacttcctcatttatatagttacttactctttcatgtatatccaagctataaatatccttttgagtcaattcatgttcttatacctaattttagtcttttaaatgaatgtactgtaatgcttgtgtgtaaatctgagcaaatatagggcttttgtaaattatgcatttactgtaattattcctgtttaattttttaatgatgaacccgacagaagaaaggattttgctacgtttataaagtcatcatgatacaagccatgtgcgttctcttctacccagctctgcaacaatcactctgaaacaagcagactttatttccagacgtctttctgtcgtgttttaatgactgaccttaactgtactttttctacatgaaatctcagcttccattaggcttgggacagatggtcaggattctgtgaacagcctttacccctggccacatccctggccctgctctggacatgggtcgattatcttcagaggctgagcagggccttgagctgggagcagcactctacaggagcagggtggctggtcaccatcagactgagcagctgatagagccttgcagctgcctccctccacactcttcaaggaccaatcatggggcaggtgctcatttcctgactggggcagagcaggtgaaagcaagacacctcagctgagcgggcagcctgcaactccaataaaggccttattttcttgtataaactgtctttttacatttatttgtaaatgtcttaagggtggaactagctgtacactcatagctgtcttgacagcctcttgactgactctgatgagttaagccacagggctcagg

SEQ ID NO: 1021 - DNA, 2471 bp, Cricetulus griseus
  modified_base (195)..(195): a, c, t, g, unknown or other
tttggacagaaactggaagacaccgtccgatacgagaaaagggtatggaaccgggctggcgcccatgctggtggagcagtgtgtggacttcatcagacagcgggggctgaaggaagagggcctcttccgggctgcctggccaggccaaccttgtcaaggagcttcaggatgcattcgattgtggagagaagcccncctttgacagcaacacagacgtccacaccgtggcatccctgctgaaactatatctccgagaactcccagagccggtcattccttatgcaaagtatgaagattttttgtcctgtgccacgctgctcagcaaggaggaggaagcaggtgtgaaggaattaacaaagcaagtgaagagtttgcccgtggttaactacaacctcctgtaagtatatctgcaggttcctggatgaagtgcagtcctatgcaggagttaacaagatgagcgcacagaacttggcaactgtctttggtcctaacatcctgcgcccaaaggtggaagaccctttgaccataatggagggcactgtggtggtccagcagttaatgtcagtgatgattagtaaacatgaccgtctcttccccacggacttagagctacaaagcaagccccaagatggactgagcagcaacaacaatgatgctcataagaaagctaccatgggtcagttacagaacaaggaaaacaataacaccaaaggagagccccggcagacggtgctcatgggacaagcctgaatcaacccagagaagcagtatggacaatggatcccccacagctctatcaggcagcaaaaccaacagcccaaggaacagtattcacaagctggatgtctccaggagcccccctctcatggtcaaaaagaaccctgccttcaataagggtagcgggatagtcaccaacgggtctttcagcagcagcaatgcagaaggtgtcgagaaaactcagaccacccctaatgggagtttacaggccagaaggacctcttccctgaagagctctggtaccaaaatgggcactcacagtgtgcagaacggaaccgtccgcatgggtattttgaacactgacacactagggaaccccttgaatggccgaagcatgagttggctgcccaatggctatgtgaccctgcgagacaacaaacagaaggaacagactacagagtcaggccagcacaacaggctctccacctatgacaatgtccatcagcagttctccttgatgaacctcgatgacaaacatagcgtggacagtgccacatggtccacctcctcctgtgagatctccctccccgagaactccaattcctgtcgctcctctaccaccacctgcccagagcaagacttttatggtgggaactttgaggaccctgttttagatggccccccacaggatgacctttctcatcctggggactatgaaagcaaaaatgaccgcaggagtgtgggtggccgaagtagccgtgccaccagcagcagtgacaacagtgagacatttgtcggcaacaacaccagcaaccacagtgcacttcacagtttagtttccagcctgaaacaggaaatgaccaagcagaagatcgaatatgagtccaggataaaaagcttagaacagcggaatctgactttggaaacagaaatgctgagtctccacgacgaactggatcaagaaaggaagaagttcaccatgatagaaatcaagatgagaaatgctgagcgagccaaagaggatgccgagaaacggaatgacatgctccagaaggagatggagcaatttttctccacatttggagatctgacagtggagcccaggagaagtgagagaggaaacaccatatggatccagtgagcctctctccgatgtcctggaccactccagggaggaatctgggaacttgggggcaaacagtatgggggaacagtgtgggttcaggtggctagtctgtgtagagcttcatctgatgaggaaatctcatttacagacatcactatccatatctgcaatgtgtaccaaagttctatcgcgctccataatgctactgtcaagtgttacaactggatatgtgtatagaaagtagtctttaaaatgtcagctaatagtaaaatgcacatatctcaatgatgtattttattgcaagtcccgtatttaaatgttgaatcaatcaatatgttgttgcgatttagcttgcattcaagcttcaccccttgcacttaacataagctatttttggcatcgtgttatcatccgcttattttatagatcaatatttttatttccccttttgctgaggaaatgaagatgagaagaaatataaatatataaagatatataagatgagttattaaagtcaaaagaatactttgtggctgtgctgtttgtgccaatagaccttgccatgaccaaaaaagagaaatgtaaaacagttttataaaatatagtagattcaccaaggtaaaaaaaa

SEQ ID NO: 1022 - DNA, 2470 bp, Cricetulus griseus
tcccgctcagccgcgcaggttgaatccaccaaagcgatggttatggagaagcctagtcccctgctggtcgggcgggagtttgtgcgacagtactacaccctgctgaaccaggccccggacatgctgcacagattttatggaaagaactcttcctatgcccacgggggcttggattccaacgggaagccagcggatgcggtctatgggcagaaggaaatccataggaaagtgatgtctcaaaacttcaccaactgccacaccaagatccgccacgtggatgctcacgctactctgaatgatggggtggtggtccaagtgatggggctactgtccaacaacaaccaggctctgcggaggttcatgcagacctttgttcttgctcctgagggttctgttgctaacaagttttatgtgcacaacgacatcttcagataccaagatgaggtcttcggtggctttgtcactgaacctcaggatgaatctgaggaggaagtagaagaacctgaagaaagacagcagacacctgaggtggtgcctgatgattctgggactttctatgagcagacggtcagcaacgacttagaggagcatttagaggaacctgttgtggagccggagccagagccagagccagagccggaaccagagcctgtgcctgacatccaggaggacaaggctgagcctgcattggaggaagctgctcctgaggatgtgcaaaagagtgcttctccggccccagcagatgttgctccagcacaggaggatttgaggacgttttcttgggcatctgtgactagtaagaaccttcctcccagtggggctgttccagtgacggggacaccaccccatgtggtaaaagtgccaccttcacagcctcgtccagaatctaagcctgaatctcagattccaccacaaagacctcagagagatcagagagttcgagagcaacggatcaatattcctcctcagaggggaccccggccaatccgtgaggctggtgagccaggagatgtggaacctcggaggatggtgaggcaccctgacagtcaccagctcttcatcgggaacctgccacatgaggttgacaagtcggaactgaaggattttttccaaaattatgggaacgtggtggagctgcgcattaacagtggcgggaagttgcccaacttcggttttgttgtgtttgatgattctgagcctgttcagaaggtcctcaaccataggcccatcatgttccgaggcgcagtccgtctgaatgtggaagagaagaagactcgagctgccagggaaggagaccgcagggataaccgccttcggggacctggaggcccccgtggtgggccgagtggtgggatgagaggccctccccgcggaggcatggtgcagaaaccaggctttggtgtgggcagggggattacaactccaaggcagtgaattacttggcccagatctccacacagcacacagccctggctcctgcagaatggtgaattccttcaaccagcctttggtgtcttggagtagtctattataaactgctcaagtttgtacaattttaatttcgcttgtgttcatggtgtgtgccccccacttcccctttcctcccctgaccttttagtccttcacttccagttttctggaacgatactttaggaggagtaggattttaagaagaggagggagtctcaccttcctgctcacgctgcagatacagactggagtgtaacggccattccccaaaggagcgcgtctcgcttcactgacaatggatgtttcaattggtgggagacacaggatttagtcacgactccgttctggtgtggaaaaattgccttttggcaactgccactgggtccctgctggtgtggctaactgaataaaaggtgtttccagaactttgttcttttgacatgtgattaccaaacagttccaaacatctgtttttaccattggattttaattgtgacgtagcctgtcaatgtctagaacgcagctaaggatttttgttgaactgttagtttttttgaggttaggtagagtttttctattgttttatttgttaattagtaaaaaaaaaaaaaaaaaaaaaaaataaaaaagttaaaaacccgcaagaaaacaaaccccaaatctgataacaaaaccaagcaaaactgtgccttctatttatctttgattctggccctaggcaaattgtttaaagaaaaaagtaataaaagaattcttagatttgttttctagattcagagtatgtgggggaactgtagaatttttttgtatcacctgtatgtgtcgtgttaacattgttctgccttatcctaaaaatcacgcctcagactggaccgcttttgaggaaggtgcttctgtgaggcctctgacctcagtggctgacgggccacattctactctgctgtctatcgggttcctgataggcccctcagaaggatttggcttgaatcttggacttggc

SEQ ID NO: 1023 - DNA, 2468 bp, Cricetulus griseus
cctacattaacattgatgcaggaacattctctccttatgagcatggagaagtctttgtgctggatgatggtggagaagttgaccttgacttgggaaattatgaaaggttccttgatatccgcctcaccaaggacaataatctgaccacagggaagatataccagtatgttattaacaaggaacgcaaaggagattacttggggaaaactgtccaagttgtccctcacatcacagatgcaatccaagagtgggtgatgagacaggccttaatacctgtagatgaagatggcttggagcctcaagtgtgtgttattgagcttggtggcacagtgggagacattgaaagcatgcccttcattgaggccttccgccagttccagttcaaggtcaagagggaaaacttttgtaatatccatgtcagtctggttcctcagccaagttcaacaggggaacaaaagacaaaacctacccagaacagtgttcgggagcttagaggacttgggctttctccagacttggtggtgtgcaggtgttcaaatcctctggacacatctgtgaaagagaaaatatcaatgttctgccatgtggaacctgaacaagtgatctgtgttcatgatgtttcatccatctaccgggtacccttgttgttagaagagcaaggggttgtagactattttcttcggagacttgaccttcctattgagagacagtcacgaaaaatgctgatgaaatggaaggagatggcagacagatatgatcgcttgttggagacctgctctatcgctcttgtgggcaaatacaccaaattctcagactcctatgcatctgtcattaaagctctagagcattctgcattggctattaaccacaagttggagataaagtacattgattccacagacctggagcctagcaccctgcaggaggagcctgtgcgttaccatgaggcatggcagaagctctgcagtgctcatggagtgctggttccaggaggatttggtgttcgaggaacagaaggaaaaattcaagcaattgcctgggctcggaaacagaagaagccttttttgggtgtgtgcttaggaatgcagctagcagtggtagaattctcaagaaatgtgctgggatggcaagatgccaattctacagaatttgaccctaagactagtcatcctgtggtcatagacatgccagaacataaccctgggcagatgggtggaaccatgaggctgggcaagagaagaaccctgttccagaccaagaactcagtcatgagaaaactctatggagacacagactacttggaagagaggcaccgccaccgatttgaggtgaatccagtcttgaaaaagtgcttggaagagcaaggcttgaagtttgttggccaagatgttgaaggcgagaggatggagattgtggagttggaagatcatccattctttattggggtgcaataccaccccgagttcctgtcaaggcctatcaagccctccccgccctactttggcctcctcctggcctctgttgggaggctctcacactacttacagaaaggctgccggctctcacccagggacacctacagtgacagaagcgggagcagctcccccgattctgaaatcactgaactgaagtttccatcaataaatcaggactgatctggatgattcttcaagaaagcctttgacctgatagtttacaactatgattttacactctgcttttgacacttcctttaaattatgtttttattaagattattttattatgggggaaaggtatttggaaaactttgtcacttgcatgtcctatcatttatattggatcctgtgacatacctgtttgtgagaaaattcctttgcagtttctgtttctgacatgggaagtaggactctggatgtgacctgatggtggccagcggctggtggaaggtcatcaactaccctgtttttccgaccacttgagtcactgtcatccaagtgtgatgctgttatttccctggggtgccagtacttacagtcctgggctgctaactgtgggtgttgctggaatctcagtgctgctgagttgtggggaactcttggtgccagctgtggttggccctggccatctagagggatgtttggttctctggtacatcagacaagctctatgaagtgtcacataaaaaccctgggcgctggctgcatttcctgttcttggggctgagaacactccttgcatcaaggggtcaagaaacaaggaatcttggaaactagttctgaagccctctcgtgtatgcagcattgacttgggggtatttttttcttccagaacggtgttattgcagttgacatgcaattcgaaaagttattttcttaatgtgacaccgcaatgggcatggtcacgtgcctgtactatggtggctggctcagtgtatgctcataacttaataaataatgcagaaaccaaaaaaaaaaaaaaaaaaaaaa

SEQ ID NO: 1024 - DNA, 2467 bp, Cricetulus griseus
aagtactttccgtaccttgctcttatacacaccatcatccttatggtcagtagcaacttttggttcaaatatcctaaaacctgctccaaagttgagcactttgtttcaatattgggaaagtgctttgaggtctccgttggacgactaaagcattgtccgagacagcctgtgaagactctgagggaaaacaagcagagaataacaggtacccagaccctaccaaagcacgtgtccaccagcagtgacgaggggagccccagtgccagcacccccatgatcaacaaaactggcctcaagttctcggctgagaaaccggtgatcgaagtccccagcatgacgatcctggacaagaaggatggggagcaggccaaagccctgtttgagaaagtgaggaaattccgtgcccatgtagaagacagtgacttgatctataagctctatgtggtccagacacttatcaaaactgccaagttcatctttattctctgctacactgcaaatttcgtcaacgccatcagctttgagcacgtctgcaagccaaaagttgagcacctgacggggtacgaggtgtttgagtgcacacacaacatggcctacatgttgaagaaacttctcatcagctacatttccatcatctgtgtctatggctttatctgcctctacactctcttctggctattcaggatccctctgaaggaatattctttcgaaaaagtccgggaagaaagtagcttcagtgacatcccagacgtcaagaacgactttgcattccttctgcacatggtcgaccagtacgaccaactctactccaagcgctttggtgtgttcttatcagaggtcagtgaaaacaaactgagggagattagtttgaaccatgaatggacttttgagaaactcaggcagcacgtgtctcgcaatgcccaggacaagcaggaactgcacctgttcatgttatcaggggtgcctgatgctgtctttgacctcacagacctggatgtgctaaaactcgaactgattccagaagcaaaaattcccgccaagatctctcagatgactaacctccaggagctccacctctgccactgcccggcaaaggtcgaacagactgcttttagctttcttcgagatcacttgagatgccttcatgtgaagttcactgatgtggctgagattcctgcctgggtgtatttgctcaaaaaccttcgggagttgtatttaataggcaatttgaactcagaaaacaataagatgattggacttgagtccctgcgggagttgcggcaccttaagatcctccacgtgaaaagcaatctgaccaaagtgccctccaacatcacagatgtggctccacacctcacaaagctcatcattcacaatgacggcaccaagctcttggtactcaacagcctgaagaagatgatgaatgtggctgagctagaactgcagaactgtgagctagagagaataccacatgctattttcagcctctcgaacttacaggaactggacttaaagtcaaataacattcgcacaatcgaggagatcatcagcttccaacatttgaaacgactgacttgcttaaaactgtggcacaataagattgtgaccataccaccctccatcacccacgtcaagaacctagagtctctttacttctccaacaacaagctcgagtccttgccagtggcggtgtttagcttacagaagctcagatgcttggatgtcagctacaacaacatttctaccatacccatagagataggcttgcttcagaacctgcaacacttgcacatcactgggaacaaagtggacgttctgccaaaacagttgtttaagtgcgtgaagttgaggattttgaacctggggcagaactgtatcacctccctcccggagaaaatcggtcagctctcccaactcacccagctggagctgaaggggaactgcctagaccgcctgccagcccagctgggccaatgtagaatgctcaagaaaagcgggcttgttgtggaagaccaactgtttgaaacgctgcccctggaagtcagagaggcgttgaatcaagacgtcaatgtcccctttgtgaatgggatttaaactaagcggaacgcgggcacgttgtccacgtgcgaggacaacttcctagattggagatgctcacgtgcaagttactacaagataacgcattttaggagtagatacgccctttaaacaaaacccggcggggatgcacagagcctgagaatgacaaaactgaatgttcaatgtttgtagtgtttaagtcattcgtttccaaatcttttctttttgttgtttgtttttttttgcttcttcaggggaaagggaaggaaaagttataatcactgatctcagttccttttaaattgtaagttggatgcagctgctggctgaatgtttacacatcgcttgcctgctaaagcaaatgattaaattgactttcttcttacta

SEQ ID NO: 1025 - DNA, 2467 bp, Cricetulus griseus
ggctgctagttggcgggcggcagcatgttcagctggatgggacggcaggcgggcgggcgcgaacgctcgggcggcatggacgcggtgcagacggtgacgggcggcctgcgctcgctctaccagcgcaaggtgctgccgctggaggaggcgtaccgcttccacgagttccactcgcctgcgctggaggacgccgacttcgaaaacaagcccatgatcctgctggtgggccagtacagcacgggcaagaccaccttcatcagatacttactggagcaagatttccctggcatgagaattggcccagagccgactacagattccttcattgctgtgatgtatggggagactgagggaagcacccctgggaacgctttagttgtggaccccaaaaagccattccgaaagcttagtcgctttggaaatgccttcctgaacagattcatgtgctcgcagctgcccaaccaggttctgaagagcatcagcatcatcgacacgccccggcactcctgtcgtggggagaagcagcgcattagccgagggtatgacttctgccaggtcctacagtggtttgctgagagggttgacagaatcatcctactctttgatgctcacaaattggacatctcagatgagttctcagaggcgatcaaggccttccggggccaggatgacaaaattcgagtggtattgaacaaggctgaccaagtggacacacagcagctgatgcgagtctatggggccctcatgtggtctctgggcaaggtcatcaacacacctgaggtacttcgagtctacattggctcattttgggcacagcctctgcagaacacagacaaccgccggctcttcgaggctgaggcacaggacctcttcagagacatccagagcctgccccagaaggctgcagtgcgcaaactcaacgacctcatcaagcgagcacggctggccaaagtacatgcctacatcatcagctacctgaagaaggaaatgccaaatgtatttggaaaagaaaataagaagcgagaacttatcttcaggcttccagaaatctatgttcagctgcagcgagaataccagatttccgcgggggacttccctgaggtcaaggccatgcaggaacagcttgagaactatgacttcaccaagttccactcgctgaagcccaagctgatcgaggccgtggacaacatgctgagcaacaagatcgcatccctgatgagtctcatcagccaggaagagatgaacatgcccacacagatggtgcagggcggtgcctttgacggcaccacagaagggcccttcaaccagggctatggggagggggccaaggagggtgctgatgaggaagagtgggtcgtggctaaagataagcctgtgtacgatgaactcttttatacgctatcacccatcaatggcaagatatcaggtgtcaatgccaagaaggaaatggtgacctccaagctgcccaacagtgtcctgggcaagatctggaagctggccgactgtgactgcgacggcatgctggatgaggaggagtttgccctggccaagcacctcatcaagatcaagttggatggctacgagctaccgaacagcctgcccccacaccttgtgcccccctctcacaggaagtccctgccaaaggctgactgaggagggcgcaccgctggggtgggaaaggagggggtccctgggcctgaagtatgctatgccactgacttgctgaatgtccttagccaaggttctgtcctctccatatctcagttccctcatacgtagggtagggaagggcagatactggactctagatgaggtcctcttacctctaaaatccctaagtttctatcaaaatattgagaagagcactatatatggagattaaaagtctaagaagaaaaaagtccccagcagagtaggcagccagcccaggaaaatctgctttgtcccagcacccgctgcatggccctgccaagcctccctctgtcttgaattgtatagtcctagagactttggacccaggtagagagagactagccccatctggagctgtcaatggcagagatcaatgtcttgacaattgacactattgtttgatttttaaagaaaaacatgcattttattgtgtcagaaatgaatgaatctgaagagtgcccctgaatcttcagaaaaacatactcccacccttaattccctgcctctggcaacctcagggtcagaactgtagatttaaaagaaaatgccagaagctcacatccatcatcccagtacttgagaggctgatgcaggaggattaccagaagtttgaaacctgagctatgttgttagtttcatggcagtctgtttcaaaaccagggagaattcttatgttaccatccacacttcttatcttactttctaaatgacagttttaagagaaacatggtgtgcattttactttgaatgagcgtgttttgattaatgggacaca

SEQ ID NO: 1026 - DNA, 2466 bp, Cricetulus griseus
caaaatcctcaggaacatccatcccccatcaacgaataccgaatccggtgtgggaagaaacccagccagaaggctgcagccattctaccagaagacataattccgtcagaaagcagttctttgtctgacaccaccacctatgatgatcccaatgactccttcactcttgctgggcagcgaccaagttcagtacctcattctccaagaattctacccccctaaaatctctcggtatcgagcgaatccactttagaaaaatcctccatcaatgaccagttcatggacaccaggcagtccagggagatgctgtccacccacagcagcccttacaaaacactggagaggcgaccccaaggaggacggagcatgcccaccacgcctgtcctgactcggactacagcagcagccacttggaaccccgactcttcatctcagcactgccgccagcggagcggaagcctggagtcccagtcccacctgctttctgagatggacagtgacaagccatttttcaccctctccaaatcccaaagaagcagtagcactgagatcctcgatgatgggtcttcctacaccagccagtcaagctccgagtattactgtgtgacgcctgctctggcccttactataccacccagactctggacacccgagccaggggtaggagaaggtccaagaaacagaatgtttctacttccaattcaggaagcatgcccaacctagcacaaaaggatactttgagaaatggtgtctactcaaagggtcaggacccacctccttctggttactatatctcgggatacgcaccatatgcagaatgtgacttgtattacagtggtggctatgtctatgagaatgacactgagggacagtacagtgtcaatccttcttaccgatcctctactcactatggatatgagcgccagagggactacagcaggtctttccatgaagatgaagtagaccgagtaccccataacccttatgcaactctccggctgccaaggaaggctgccatgaaatctgagcacatcaccaaaaacatccacaaggccttagttgctgagcacctgcgtggctggtaccagagggcttctgggcaaaaggatcaggggcacagcccacagactagctttgactcagacaggggatcacagaggggcctgggatttccagggctacaggtgccctgttctccaagcagtcgagcgtcctcctactcttcagtgtcttctacaaatgcttctgggaactggaggacccagttaactgtggggctatctgaatacgaaaacccagcgcactctccctacaccagctactatggcggcatctacaatcccttaccctctccaagcagacagtatgcagagaccactccgctggacggtacagatggaaaccagctggaagacaacctggagagtagcgagcagagactcttttggcacgaagactaccaagcctggaacattagtctgaatgcagttggacctcctgaccaagcactgcgcgttctcacactagtgtgccaaggcatcaaagggcagagagaagacttctgtggtttggaagtgaatcacacactaagccccacaagccctggatgaggacttgcctttcaaactctaggcactaacctatcactaagtctgatccctttgtggaattcctatcaagagaacgacaggaagccttgacccacagcgagttcttaggaagggaataacaattgtcaaaggcaagccttgagactgggggcatgtttagggagtttgtcccattggaaaggaggatgggaggtgaagcacagttcagaatgctgagagagggagcccagaagctcccgagtcatggctcaccatgacaaggtttgaactcatgagctgacaggaaacacacagttcctacaaacagatgatgataacagaaaagaccccagaggacaaagccaacccacatcatcgtagatgaatcgtgtgccttaacgtggtgaacagtagaaagttaaacctccaatctgaactccagaagtaaatctgttacccggtgacaaaacaagattggtctaaaagaatttacaccaagctgcaggagattgaatcatgaggcttaaactacctcctaccccctctggaggaactcattagctaggtttgttgttcataggattttgcttgcttttagggcagccttgatctttgtctcttttttcggcttccaaatcccacgaaaggtgcttccttcccttttatacgagtttcttgttcatattgtgaatagagacatttctcaacagcttttctgggacagttttctacttgtattccaaagcatgtaatatatacataaaaaaacgatttgttaaactggtccttagtcatttgtatcattagaaatgaagtccggggaaatttttttggaaaaaaaaagaagagcaaagtaaaaaataataaataacttatt

SEQ ID NO: 1027 - DNA, 2465 bp, Cricetulus griseus
tcgggacggaggagacaagatggcgttgcgagcgatgcggggaatcgtgaacggggccgcgcccgagctgcccgtgcccaccggtgggcctatggccggatctcgggagcaggcgctggccgtgagccggaactacctctcccagcctcgtctcacctacaggactgtctcaggagtgaatggtccactagtaatcttagatcatgtgaagtttcccagatatgctgagattgtccatttgaccttaccggatggcacaaaaagaagtgggcaagttctggaagtcagcggctccaaggcagtggttcaggtatttgaagggacatcaggtatagatgccaagaaaacatcctgtgagtttactggggatattcttcgaacaccagtgtcagaggatatgcttggtcgggtattcaatggatcaggaaaacccattgaccgaggtcctgtggtgctggctgaagacttccttgacatcatgggtcagccaatcaaccctcagtgtcgtatctacccagaggagatgattcagacaggcatttctgccattgacggcatgaacagtattgctaggggacagaaaattcccatcttttctgctgctggattgccacacaacgagattgcagctcagatctgtcgccaggctggtttggtaaagaaatccaaagatgtagtggactacagtgaagaaaattttgccattgtgtttgctgctatgggggtaaacatggaaacagcccggttcttcaaatctgactttgaagaaaatggctcaatggacaatgtctgcctctttttgaacttggctaatgacccaaccattgagagaatcatcactccccgcctggctctgaccacagctgagtttctggcttaccagtgtgagaagcatgtcctggtcatcctgacagatatgagttcttacgctgaagcacttcgagaggtttcagcagccagggaagaggttcctggtcggcgcggtttcccaggctacatgtacaccgatttagccaccatctatgaacgtgctggtcgagtggaggggagaaatggctctattacccaaatccctattctcaccatgcccaatgatgacatcactcatcccatccctgacttgactgggtatattactgagggccagatctatgtggacagacagctgcacaacagacagatttacccacctattaatgtgctgccctcactctctcggttgatgaagtcggctattggggaaggaatgaccagaaaggaccatgctgacgtctctaaccagctgtacgcatgctatgctatcggcaaggatgtgcaagccatgaaagccgtggtgggagaagaagccctgacctcagatgacctgctttacttggagtttctgcagaaatttgagaagaacttcattactcagggtccctatgaaaaccgcactgtctatgagactttggacattggctggcagttgcttcgaatcttccccaaagaaatgctgaagagaatccctcagagcaccctgagcgaattttatcctcgagactctgcaaagcactagctactgctgcttgtgtggcgtgaccctcttgtgaagtactggttctgtttcctgattccttttgcactcctccattcccacctgtgtgtgggagtttacctgttaccctgtaattaaaaacaaaggctaggtaactattgtgccagtgttgcaaagtttaaactgctaacaggttgaaagatccctgctcagaaaacctcacctcagtgctttctttaaagtagctgagagctggagtgaagtttgttttctgatgtatgtatttgtacatagtggagagctagttgctaataatgtcttgtttgggtttcccaaaccctacctctcaactccctgaagggtatcactgttttgaagttaaaatgcttcagtctcaaattaggggcaagacggagactggaagaattctccttcagaaaaaccaggaggctcttggctgagtcttccttctggagtgctggtgtgcctgtggttctgtcctctgctctatgtagatgggttttactgtctgctggtgctttctttctgcctagtgctgtgagttgggaattcctgtgtaggcaatctttctctttgtttgaaacgctgttcaatccccaagctttctgacccagctctgctttttccaggtgatcttgtggcacatatgtaatgtttctttcattcctgctccttccaggcgtgagcccttagctatattctgttcacctctgccatgtctgctgttgggtctctgtgctgtgtgttctcaggtgcagcagtaacttccccactctgtgcattccatcttccagttgtttttctctgagggggtggggggggggtcagcatgattatattttaatgtagaaaatgtgacctctcgttataaatgaaaataaatgttaaattaaatggaagttccctgaaa

SEQ ID NO: 1028 - DNA, 2464 bp, Cricetulus griseus
aaaggcattcgtaatttgtctggatggataccacgttcctgaattgattaaggatgttaaggttggctggttgacaaagagaaagtagattcttggaaaacttcacagcttaccccatctgatctggaatcaaaacttgaaaaactccaagctgacaatcagcctataggagatgtcctaaagcagctcatcctgctgctctgctctgaggagaatatggaaaaagctcttgaagtgaaagcaaaatatgaatcagacatggttattggtggctatgcagctttaataaatttgtgctgtcgacatgataatgcagaagatgcattgaacttgaaacaagaatttgaccgcttatatccttctgctgttcttgacactgtcaagtatatacgccttataaaagtattgggaaagcatggcaagctccaagatgctattaaaattctaaaggagatgaaagagaaggatgttgctatccaagattcaacagtcatgtcctttttccacgtcctaaatggtgcagctttaagaggtgaaattgaaacagtaaaacagttgcatgaagccattgtgactcttgggttagcaaaaccatccaccagcataagcatccctttggtcactatgtacctggaaaaggatgatttacctgctgctcttgaagcctgcattgactgccatgaaaagtataaagtattacccaggattcatgatgtcttgtgcaagctaatagagaaaggagagactgatttgatccagaaagccatggattttgtgagccatgaacaaggtgaaatgacaatgctgtacgacctcttctttgcctttctacagacaggaaattacaaagaggccaagaagatcattgagactccaggcattagagctcgacctgcaagacttcagtggttttgtgacagatgtattaccgctaatcaggttgaaactcttgaaaagttagtggagctgaccgagaagctgtttgagtgtgatagagaccagatgtactacaacttactcagactacacaaaatgaatagtgactggcagcgagctgatactgtctggaataaaatgcaggaagaaaacgttatccctcgtgagaggacattgcaactgttagcagaaatcctgaaaaccagcaaccaggaggttccctttgacgttcctgagttgtggtttgaagatgacagctcgtccctgagttcttcatcaccccctgcagtagaaaccatcactgagaagatgttgttggatacctgcaataggcgcaagaacaaagacgcatataatatcttcctcaaagctcaacgacaaaacattgtatttagcagtaaaacttacagcacattgataagcttgctgctgaggagagacagttttacagaagcaatgcaagtgaaagattttgctgagacccacatcaagggcttcacactgaacgatgctgccaacagcctcctcatcatagcgcaagttaggcgggattatttgaaagtggctctggaaactctaaaagcagccttggccctgcagcaggccccctctcaagtagcgatcacccgcctcattcaggcctgtgccttgaagggtgacctggaaagcatagaggccatccgtgagatggtaaacggactggacaagattagactctcaaaaatggttttcatcaataacactgccttggcccagatgaagaataacaacatagatgtcgccatagaaaatattgaacagaagctcatgtcagagaatcaaaccatagatccgaaatactttgatttgtcatatttattcagaaaagtcatagaagaacagatggagacagcgctagagagattgagcatcatgtccgagagactagccaatcagttctcgatttacaagcctgtcactgatctcttcctgcagcttctggactcaggcaaggtggacgaggccaaagctctcttagagaggtgtggtgccattgccgaacaaagcacagttctgttggtgttctgtcgcaggaactgtcagaaaccgaaaaaggcaccggttctgaagactttgttagaattgattcctgagttacgtgataaggaagacgcatactcttgcagcatgagaagctatgccttagacaaagatgtggcctctgccaaggagttgtatgagtacttgacagcaaagaacatgccgatagatgacctgtttctgaagcgctatgcgacattgctcaaggaggttggcgagcctgtacccttcacagagccccctgagagctttgaattttatgtgaaacagctaaaagaagcaagggaaaacccttcatgaaagaagcagcactctctgtgcgtgcgtgcgtgcgtgcgtgcgtgcctctgtgtgtgtgtgtgtgtgtgtgtgtgtgtgtgtgtgtgtgtgtgtgtgtgtgcgcgcgcaaaataaagccaattaaaatgtaaaaaaaaaaaaaaaaaaa

SEQ ID NO: 1029 - DNA, 2464 bp, Cricetulus griseus
tgcccagcagcagcaagactaaacctgtgctcagctctctagaacgttctggcgtatggctggtagctcctctcattgccaaactgcccacctcagtccagggccacgtattgaaagctgctggggaggaattggagaagggtcagcacctgggttcctcttcccgaaaagaacgagatcgacaaaaacagaagagcatgtccctgttgagccagcagcctttcttatcactggtgctgacatgtctgaaagggcaggatgagcaacgcgagggactcctcgcctctctccacagccaggtgcaccagattgtgatcaattggcgagaaaaccagtacttagatgattgcaaaccaaagcaactaatgcatgaggcactcaaactgcggctcaacctggtgggaggcatgtttgacacagtgcagcgtagtacccagcagactacagagtgggcccaggtggacatgcagtctaacaatgagcttttcacaactgtgttggacatgctgagtgtgcttatcaatggaacattggctgcagacatgtctagtatctctcagggcagcatggaggaaaacaaacgtgcatatatgaacttggtgaagaagcttcagaaggacttgggggagcgccagtctgacagtctggaaaaggttcatcaactgttgccactacccaagcagaaccgagatgtcattacctgtgagccacagggctcccttatcgacaccaaaggcaacaagattgccggcttcgattccatcttcaagaaggagggtctacaagtttccaccaaacaaaagatctccccctgggatctttttgagggcttgaagccatcaacagcaccactctcctgggcctggtttggcacagtccgagtggaccgccgagtggcacgaggggaggagcagcaacggctgcttctctaccacacacacctgaggcctcggcccagagcctactacctggaaccactaccactgcccccagaagatgaggagccaccagcccctgccctactagagcctgagaaaaaggctcctgagccccccaagactgacaaacagggggctgctcctcccagcactgaggagcgcaagaagaagtccaccaagggcaaaaaacgacagccagccagccaccaagtcggaggactatggcatgggcccaggtcggagtggccccgtatggtgtgacagtacctccagaccttctgcaccatgcaaaatcctggttccatatcccaccttaactataggcagaactccctaggcctgtacacccagaatcaaccactacctgctggtggccctcgtgtggacccctaccgccctgtgcgattaccaatgcagaagctgccaactagaccaacttatcctggtgtgctgcccacaactatgactactgtcatgggccttgaaccctcatcttataagacctctgtgtaccggcagcagcaacccacagtgccccagggacagcgccttcgccaacagctccaggcaaagatacagagtcaggggatgttgggacagtcatctgtccatcagatgacccctagttcttcctatggtttgcagacttcccagggctatacttcttatgtatcacatgtgggattgcagcaacacacaggccctgcaggtaccatcggtgccccccacgcctactccagccaaccttatcagagcacccacccttctaccaatcctactcttgtagatcctacccgccacctgcaacagcggcccagtggctatgtgcatcagcaggccccaacgtatgggcatggactgacttccactcaaaggtttcacaccaaacactgcagcagacacccatgatgggtactatgactccattgagtgcccagggtgtccaggcaggcgtccgttcaacttccatcctgcctgagcagcaacagcagcagcaacaacagcagcagcagcagcaacagcagcaacagcagcagcagcaacaacagcagcagcaacagcagcagcagcagcaacagcagcagcacatccgacaacagcagcagcagcagcaaattctacggcaacagcagcagcagcagcaacagcagcagcagcagcaacagcagcagcaacagcagcaccagcaacagcaacagcagcagcaccagcaacagcagcagcaggcagcctccctcccccaaacccccagcccccagtccccagccccagttccagcgccaggggcttcagcagacccagcagcagcaacagcagcagctcttgtgcggcaacttcaacaacagctctccaatacccagccacaacccagtaccaacatatttggacgctactgagtcaactggaggaactgcttgtacactggatgtggcccagcttttctgcttaattcccagtccccttcctgggcgagctccagtagtggttggggtccttccctcaggctccatttttaatgaattttt

SEQ ID NO: 1030 - DNA, 2464 bp, Cricetulus griseus
caaagatcacgctcatcttccacatcatcagatcatggaaatttcatgatgccacctgtacggaccccaggccactttgtagtggcataaggttccgcctaggtcaccaaggtcaacaatacggttccccaaggccatcaagtgccatcaacgcccttctaccaagtctgatggacatcatgtaatgtacttaataccccaagcagtgcagcttttcctactgcatctgccggaaatggttctgtaaagagtcagcctggtttgctgggaatgcctttaaatcagatcttgaaccagcacaatgctgcctcctttccagcaagtagtttactctcagcagcagccaaagcacagctagcaaatcaaaacaaacttgctggtaacaacagtagcagcagtaacaattctggagctgttgccagcagtggcaacactgaaggacatagcactttaaacaccatgttccctccaactgccaacatgcttctcccaacaggtgaaggtcaaagtggtcgagcagcactaagagataagttgatgtctcagcaaaaagactcattacggaaaagaaacagccacctaccacagtgttgagtttgctcagacagtctcaaatggatagtctgcagttcctaaacctggagtttgccaagcaatcagtcagacaacagccgagctgagacccatttaaccagccccctgggaaaccctttccgagctttacaggcagtgacactacttttaaccccctgctcctcccagctgtcactggggcctcgggattaatggccttgaatccccagctgttgggaggtgtcctgaactcagcatcagccaacaccgctaatcatccagaggtttccatagcaacctcctcccaggcaaccactaccacaaccactacatcatcagcagtggcagcactgactgtctcaacacttggtgggacagcagtggtgtcaatggcagaaacattgctgaatatatctaataatgctgggaatccacctggtccagctaagctcaacagtaactctgtggtgccacagctacttaaccctctactggggacaggtctgcttggtgatatatcatctataaacaattctttgaataaccatcagctgagtcatctacagtcgctgttaaacagcaatcagatgtttcctccgagtcagcagcagcagcagcacctactccagggacaccagaatctccaggccttccaaggacagcccacagtcccttgcccagctaacaataatcccatggcttgtctgtttcagaatttccaggtgactgtggagagatgtacacacattaatggaaacagacctcggcagagtcggggatttggagagctgctaggcactgcaaacaagacctggtcctagaggggcagtctccaggttcttcgaatagtttggaaagttctctggtcaaagactacatccattataatggagactttaatgccaaaagcattaatgggtgtgagcctagtccctcagatgctaaaagcattagtagtgaagatgacctaaggaatccagactccccttcttcacatgaattgatacactatagaccaaggacgttcaacgttggtgacttggtctggggccaaatcaaaggactgacttcctggcctggaaaattcataagagaagacgacgttcacaattcatgccaacaaagccccgaggaagggaaggtggagcccgagaagttgaagaccctaacagaaggtttagaagcctacagccgagtccggaaaaggaacagaaaaagtggaaagctaaataaccatttagaagctgctattcatgaggccatgagtgaactggacaaaatgtctgggactgttcaccaaatcccacagggtgacagacaaatgaggcccccaagcccaagaggaggaagatctccagataacagagactgttccactgacacatagtgttattaaaggagcatgcacagatacatctgtatgtaggtattgatacaaccatggttagatcagaatgtaaactctggcagatagctaccaccaccacagggtgctaaaaaggagcaacaatggagatgtgttttgatcaggaaggaaaatgaatgttagaaaacaaaaaaaaacaatacaaaatccctgtatgaacaaagtgataagtggtcaagtgattgctgagaaatgttttatattataactaaaattgtgattataagaaatagtaccaaacgtttctagaagaattttcagtgttgtatataaaaaatgcagaatttcatggcgatattagaaatgtaaatattgtacaatattgtcatgtacaagcatacttaatgcacactttatcttttattgtacaaagaaatagtagtacaaaaatactttggtttctatggagtacacctaccagagactaccagtgtaaagtagataaataaaaataacgaacccaaa

SEQ ID NO: 1031 - DNA, 2464 bp, Cricetulus griseus
agcctttatcttcatgatcgatgtctcatacagtaacataaagaaatggactcgtcaagctcatatgtgaagaactgaagactgtgctgcagagactgcccaaggaggagcatgaagagacatctgcaattcgagttggttttatcacatacaacaaagttctccacttctttaatgtgaagagtaatttggcccaacctcagatgatggtggtgacggatgtttcagaggtctttgttcctttgttggatgggttccttgtcaactatcaagaatctcaatctgtgattcacaatttattggaccagattcccgagatgtttgctgactctaacgaaaacgagacagtctttgctcccgtcatccaggctggcatggaagcacttaaggcagcagagtgccctgggaagctattcatcttccattcctccttgcctactgcagaggcaccgggaaagctcaagaacagagatgataaaaagctgcttaacacagacaaagagaagatactttttcagccccaaacagctgtctatgagtctctggccaaggactgtgtggccaatagctgctcggtgactctcttcctctttcccagtcagtatgtggacgtggcttccttggggctggttcctctgctcaccggaggaactctgtacaagtacaatgtttttcgggttaatttggatagccaacagtttttgaatgacctccgaaatgatattgagaagaaaataggcttcgatgctattatgagggttcgtaccagcacaggttttagggccactgatttctttggtggaatatttatgaacaacaccaacggatgtagaaatggcagccatcgactgcgataaggccgtgactgtcgagttcaagcatgatgacaagctcagtgaggatgctggagccttgatccagtgcgctgtgctctacacgaccatcggtggccagcgacgacttcggatccacaatcttgccttaaactgcagcacccagctagcagacctctacaagagctgtgaaacagatgcccttatcaacttctttgccaagtcagcttttaaagcagttttgaaccagcctttgaaagtcatccgggaaattctagttaatcagactgcccacatgctggcgtgttaccggaagcactgtgctagtccatctgcagcaagccagcttatactgccagattctatgaaagtactgcctgtgtacatgaactgtttgttaaaaaacagtgtgctgctcagcagaccagagatctcccctgatgaacgggcataccaacggcagctggtcatgaccatgggtgtggctgacacccagctcttcttctatccacagctcctgccaatacacacattagatgtgaaaagcacagggatgccggctgctgtccgctgctccgagtcccgactctccgaagaaggaatgttcctactggctaatggtctgaacatgttcttatggctcggagtgagtagcccaccagatctgattcaaggaatatttaatgtgccatcatttgcacatatcaacacagacatgacatcactgcccgaggtgggaagtccacactctcaacaactccgaatgataatgaacaatatccagcacaagaagccatactcaatgaagctcatcatcgtgaagcagcgagagcagcgggagatggttttccgacagttcctggtggaagataaaggactctatggaggatcatcttacgtggatttcctctgctgtgtccacaaggagatctgccaactgcttaactgaggagtaccctcccatcccactgagggggcatttcagaggagacagcctccaacttggtgcctaattttcccaatgatagtaggctagttttaatttcttgataattttcaggatagcttgccaagacagcacatagaccttcagctttggtgctcgggtcacaagcccgtgaagtgtggtggtaccataaagggaacagtctatttctggctgttctgcttctaatttctaaagctgacagtttgcatttcataaatacatagtttacagaaccattcgctgtctcaatttcctttctttgtgctagctagatatataaattatttttcaaactgtatagattcatggttcctctttttttcaccatgagagaaaaatatttcattttgccttatacctaatgtttttaaaactctgtgactacattgaacagattttttcaacttaaaatctgcacagcagacttttaaaaaccttgtaatctgtctggtagaacaatttgtgttctcctttttttcataattatatattgtctgtttaaaatattttccagttgttttgtctataaaacagtatctatattcttaatggttctttgtacaattttgatggtttctacctgtatataatgagtcttaaccaatatcaataaattacttcatgtaacaaaaaaaaaaaaaaa

SEQ ID NO: 1032 - DNA, 2463 bp, Cricetulus griseus
cgaaggcagagagctcaggtatggatcttggagggagcctgtcaacccctactatgtcaactctggctatgccctggccccagccaccagcgccaatgacagtgaacagcagagcctgtccagtgatgctgacaccctatcccttacggacagtagtgtggatggaatccccccatacaggattcgtaagcagcaccgaagggagatgcaagagagtgtccaagtcaatgggcgggtgcctctacctcacattcctcgcacttaccgaatgccaaaggagatccgggtagaaccacagaagtttgctgaagagcttattcaccggctagaagctgttcagcgcactcgagaagctgaagagaagctggaggaacggctgaagcgtgtacgaatggaagaagaaggggaggatggtgaactgccttctggccccatgacaagtcacaagctgccttctggcccagcctggcaccatttcccaccccgctatgtggagtatgggctgctccggactgcgggatgctcatgaggagaatcctgagagcattctggatgagcatgtgcaaagggtcatgaggacacctggctgccagtcacctggtccaggccaccgctctcccgacagtgggcatgtagccaagactgcagtactagggggtgtaacctccgggcatgggaagcatgttcctaagttggggttgaagctggatacagctggcctgcaccaccataggcacgtccaccaccatgtccaccataattcagctagacccaaggagcaaatggaggctgaagctgcccgaagggtccagagcagcttctcatggggcccagaaacacatgggcatgccaagccccgcagctattcagagagcacaggcaccacccccagttctggggacttggcctttggtggtaaagctagtgcaccctccaaaagaaacaccaagaaggctgaatctgcgaagaatgccagtgctgaggtacccagtaccacagaggatgcagagaagaaccagaagatcatgcagtggatcattgagggtgagaaggagatcagcagacacaggaaggcaggccatgggtcttctgggatgaggaagcagcaggcccatgaaagctccaggcccttgtccattgagcgtcctggggctgtgcacccctgggtcagtgctcagctccgaaactctgtccagccttctcatcttttcatccaagatcccacaatgccacccaatccagcccctaaccccctgacccagctggaagaggcccgcaggcgcttggaggaagaggagaagagagccaacaagctgccctccaagcagaggtatgtgcaggcagtcatgcagcggggacgcacctgtgtcaggccagcatgtgcaccggtgctgagtgtggtaccagccgtgtcggacttggaactctccgagacagagacaaaatcacagagaaaggcaggtggcgggagtgcacccccatgtgacagcattgttgtggcctactatttctgtggggaacccatcccctaccggaccctggtgaggggccgtgctgtcacgctgggccagttcaaggagctgctaaccaagaaggggagctacagatactactttaagaaagtgagtgacgagtttgactgtggtgtggtatttgaagaagtacgggaggacgaggcagtcttgcctgtctttgaagagaagatcattggcaaggtggaaaaagtggactgagcactgggcaacatacccagggtacaccatcactaaagtgcagtcatcagccagtgagcagtcttgtcctcaggagcctcatgtgggcaacagcacaagattgtgtgtcacaagctcctgggataggggtgggggtctcaggtgtttgccatacctctgtccctctggtcctactgagtggctccatgggtttctctgttttgcttttcaaaagaaaagcctcaccttctcctacatcaccccctgaagcaataccatgagccatctcatgaccctcaacagctcttgcttctgaatgcagactgacccagggatacctttacctggacttttatcccagtgtcctcttctccctctgggacctgtccactgcacctggttgggttcaggcccagtagcaggggatcctgtggggggcctctgtatattgtacatgtcactgagtgccttcaacatagctgtctcttgcctgccactgtgtgagtgtggcggctgagtaactcaggcccctttgcctgtctccagccaccagcttgattcagcagagtgggggtctggtcccttctaagtgtccatgtaaatatgtatatttctcaggccagggccagcagggggtaccctgagccctatttttcatgcgatgacttgtacaattatcttttcaaaggtacttggataataatgaaataaaacagtttttgaacctgacaaaaaaaaaaaaaaaaaaaaa

SEQ ID NO: 1033 - DNA, 2463 bp, Cricetulus griseus
tccacccgcccccggggttcctctttcccccttcctccctccctccaaccccccctcctccgcccgcctagcggggcccccctcgccttcccgcccgcccctattgttccgcccccggcctcccgcccttccccttcccgcccgctccccttttcccctcagtcgactcgcgcctccagttttggctttcactcccaccagtgaccaaagacttgaccactccaagtccagctccctgtaactactagacatggacaccggtgtgattgaaggtggattaaatgtcactctcaccatcaggctacttatgcatggaaaggaagttggcagtatcatcggaaagaaaggagaatccgttaagaagatgcgcgaggagagtggtgcacggatcaacatctcagaagggaattgtcctgagagaattatcactttggctggcccgactaatgccatcttcaaagcctttgctatgatcattgacaaactggaagaggacataagcagctctatgaccaatagcacagctgccagtagacctcccgtcaccttacggttggtggttcctgctagtcagtgtggctctctcattgggaaaggtggttgcaagatcaaggaaataagagagagtacaggggctcaggtccaggtggcaggggatatgcttcccaactcaactgagcgggcaatcactattgctggcattccgcaatccatcattgagtgtgtcaaacagatctgcgtggtcatgttggagtcccccccgaagggcgtgaccatcccgtaccggcccaagccctcgagttctccagtcatctttgcaggtggtcaggacaggtacagcacaggcagcgacagtgcgagctttccccacaccaccccgtccatgtgcctcaaccctgacctggagggaccacctctagaggcctataccattcaaggacagtatgccattccacagccagatttgaccaagctgcaccagttggcaatgcaacagtctcattttcccatgacccatggcaacaccggattcagtggcattgaatccagctctccagaggtgaaaggctattgggcaggtttggatgcatctgctcaaactacttctcatgaactcaccattccaaatgatttgattggctgcataatcgggcgtcagggcgccaaaatcaatgagatccgtcagatgtctggggcgcagatcaaaattgcaaacccagtggaaggatctactgatcggcaggtcaccatcactgggtctgctgccagcattagcctggctcagtaccttatcaatgtcaggctttcctcggagacaggtggcatggggagcagctagagcagtgcaggttcatccatgatcccttcctgctcttcaccaccacccatgatccatctgtgtagtttctcaacagtcagcgattccaggttttaaatagtttgtaaattttcagtttctacacactttatcatccactcatgattttttaattcaaagcgttttaattcctttctctgttcagcagttatgctgagatatccatatttagttttataagcttctcccccttttttttttttttttttgtttttttttggctcatgaatttttgtttgtcatggaaatgtaagagtggaatattaatacatttcagtttagttctgtaatgtcaggaatttttcaaaaaaaattaaaagatggactggagctttttctttgtgaatagaaactggatggcacagtgacttatgtgggttttattcctgtcttgatgttatttttatacctttaaaccttcacagagccctggttgggtttgaatagaattaaggtattttcttccgttttttaccactccatttttatttccactccatccattcatcaagaaaaccctcgacagatgggcctgcatggagtggttatattctagggttttcacaggggttacaatatgatagtccccgccctaccaggcaccagggtaacagtagggggccccaagccagggcttgggcagagaaacagagggacaaagaaatgggttacattgccacctgagagacctcagaggggaggacccagccttagtttccctcctcccaagtgcaaaatgtgtaaacagtaaacggaaaataaaagtgcagtcttaagtggatcctctcctgtcccccagtgtttagggttagacagtgtagagacaagcctggcttttctattgcctagttgcctgctgaacataaggaatggggtgaagcaaggagggaccagtttcctttcctcgtagctctagggtgttacttggaatcattcatttccacagctgccagggtccctagaacttggtaattggtcaggggggggtccttcattctgaagcctgactttaaggcttaagaaagccccatctatctgttgattatgtggcgcatatatattatttatataaatatttctctatg

SEQ ID NO: 1034 - DNA, 2463 bp, Cricetulus griseus
atcagcaagcgtgccaagaagctggcctggccggcccccgtggaatggcgggaagagtgcaactgggcagggaaggacattggcacggagtgcatgaacttcgtgaagctgctccatgcgtataaccacacccacttgctggcctgtggcacaggggccttccaccccacctgtgcgtttgtggaggtgggccaccggctggaggaacccatgctccgactggacctgaggaagcttgaggacggcaagggaaagagtccttatgacccgaggcatcgggctgcctccgtgctggtggggaagaactgtattcaggggtggcagcagacctcatgggccgggactttaccatctttcgcagcctgggccagaatccgagtctccgaacagaaccccatgactcccgctggctcaatgaacccaagtttgtcaaggtcttttggattccagagagtgagaaccctgatgacgacaaaatctatttcttcttccgtgagtctgcagtggaagcagcaccagcaacgggacgcatgactgtgtcccgtgttggccagatctgcaggaatgacctgggtggccagcgcagcttggtcaacaaatggaccacatttctgaaggcgcggctggtatgctcagtacctggagttgagggtgacacccattttgaccaactccaggacgtgtttcttttgtcctcccgggaccgccagacaccacttctttatgctgtcttctcaacctccagtgccatcttccagggctctgctgtctgcgtgtacagcatgaatgatgtgcgccgagccttcttgggaccgtttgctcacaaggagggccctgcacatcagtgggtgtcttaccagggtcgtgtcccctacccacgccctggcatgtgccccagcaagacctttggtaccttcagttccaccaaggacttcccagatgatgttatccagtttgctcggaaccaccctctcatgtacaactcagtcctgcctgtgggggggcgccctctcttcctccaagtgggagctgggtacaccttcacgcaaatcgctgcagaccgcgtagcagctgctgatggccactacgatgttctcttcattggtacagacgtgggcacagtgctgaaagtgatctcagtccccaagggcagccgacctaactctgagggacttctccttgaagagctgcaggtgtttgaggactctgccactgtcaccagcatgcaaatctcctccaaaaggcaccagctctacataggatcaccgagtggggtggcccagattgcattgcatcgctgcactgccctaggccgcgcctgtgcagaatgctgcctggcccgtgacccttactgtgcttgggatggatccacctgcacacgcttccagcctaccgccaagaggagattcaggaggcaagacgtaaggaatggtgaccccagcactctgtgctctggggattcctctcacgctgcgctgttggagcggaaggtcttaggtgtggagagtggcagcgcctttctggagtgtgagcctcgctcgctacaggcacatgtggagtggaccttccatcgtgcaggggaggtggctcacacccaggtgctggctgatgagcgagctgagcggacctcgcgggggctgctgctgcgtggtctgaggcgccaggactctggcgtgtatctgtgtgtcgcagttgagcaaggcttttcacagcccctgcgtcgcctggtgctgcacgtgctgagtgccgtacaggccgaacgactggcgcgggctgaggaggcagctgcccctgcaccaccaggccccaagctctggtaccgggactttctacaactggtggagccaggcggcagtggaggggcaaactccctgcgaatgtgccacccccagcccagaccctcctctgtggcaacagaatcgcgtcgtaagggtcgcaacaggcggatgcaggcctctgagctgcgtgctgagcgtgggccacgtagtgcagcacactggtgactgggctgtcatcacacgggggaccaggctggatatgacactcagaaaaggggacagacagacatcaggaagacatgagttgtggctgaggcacactgaggtccttggaccaatagagacacctaacttatacatcggccctggccaaagggtagcttatttattaacaagataacccgcgaatgtagtctcagaggagtggtccaggctcaattcaggatctagcctggagggaggggacagagaagtggggctccggtgtagaccagggccagagagctgtcttgggtgcctgtcctggggcaagcattctcttgggcagtgagcaggaagctgtagcagattagactgtgggttggagtgaggcagggcaactgtactaaagtaatgcaataaacacattatcagctgacgttggaatggccccagcagataacagctggtccttgaccttgctggg

SEQ ID NO: 1035 - DNA, 2462 bp, Cricetulus griseus
  modified_base (917)..(917): a, c, t, g, unknown or other
agtgcccaggagctgtcccaagaaatcaaggcttttctgacgggtgtagaccccattctgggccaccagctctcagctcgtgaacatgctcgatgtggtcttctcctgctgcgttctttgccacctgctcgggctgctgtactggaccacttgagaggtgtttttgatgagagtgtccgggcccacctagctgccctagaggaaagtcctgtggctggtccacctcacctccgtccacctccaccctcccatgtccctgctggtggacctggcttagaggatgtggtacatgaagtacaacaggtgctgtgtgagtttatccgggccaacccaaaggcctgggcgcctgtgattagtgcatggtccattgacctgatgggacaactgagtagtacatattcgggtcagcagtgagccaggcctctggggctggtgcctaccgcctgctgcagttcttagtggatacagctatgcctgcttcagtcattaccacccagggcctggctgtgccagatacggtaagagaggcctgtgaccggctaatccagctgctattgctacatctacaaaaactggttcatcatcggggagggtctcctggagaaggactgctgggcccgcccccacctcctcgtccagtgccctttcttgatgcattaagaaaccatgttggagagctgtgtggagagacattacggttggaacggaagcgcttcctctggcagcaccagctcctgggcttactgtctgtctatactcgacctagctgtggacctgaggcattaggccatctactgagcagagctcgaagccctgaagagttgagtttggcaacccagctatacgcagggctagtggttagtctctctggccttcttcccctggccttccgaagctgcctggctcgagtgcatgcnggactttgcagcctcccttcacagcccgctttcttcgcaatttggccttgctagtggggtgggaacagcagggtggtgagggcccttcagtcttaggggccaggtttggggaatcggcctcagcccatttgtctgatctggctcctcttctgctacatccagaggaggaagtagctgaagctgctgcctctctcctggcaatatgtccttttccttcagaatccctgtcaccttcccaacttttgggattagtgagagctggggtacaccgcttctttgcttctctaaggctgcatggccctcctggtgtagcctcagcctcccagcttcttacccgcctttctcagacttccccagctgggctcaaggctgtcctgcagctgctagttgagggagccttacatcgaggcaacacagaactgtttggaggggagatggatggggacaatgagactctctcagctgtctcaacccctttggcttctgcctctttgttggacattaaccggaggcatactgcagctgtgccaggtcctgggggtatctggtcagttttccatgctggagtcatcggccgtggcttaaaaccacctaagcttgttcaatctcgaaaccttcaggaagtgatctataacacccagagcctccttagccttctagtgcactgctgcagtgcacctgggggcagtgagtgtgagggttgctggaggcctcccaccctgagcccagaggcagccaaagcagttgcagtgaccttagtggagagcgtgtgtcctgatgcagctggtgctgagctggcctggcccccagaggatcatgcaagggccactgtggagcgggatctccgcattggtcgacgcttccgggaacaaccccttctgtttgagcttttgaagctggtagcagctgctcccccagcactgtgctactgctccgtgctgctgcggggtctgctggctgccctcttgagccattgggaagcctctcgacaccctgatacagctcactccccctggcacctggaggcatcctgcaccctggtggctgtcatggctgagggaagcctcttgccaccagccttgggtaatatgcacgaggtatttagccaactggcaccttttgaagtgcgtctgttgctgctcagtgtctggggttttctccgggagcatgggccattgccccagaagttcatcttccagtctgagcgtggtcgcttcatccgggacttttctagggagggtggaggtgaaggaggatcccatttggctgtgctgcacagtgtcctccatcgcaacatcgatcgcctggggctcttctctggccgttttcaggcaccttcaccgtccactctgcttcgtcaggggacttgaccttttttctgcttcagaaatcgagggaggttgaacagtgaaagaagagactaaggtgctacagaagggtgaaggcttctaagtccgtacataatgagcggtgtcacttttttcaaaccccaccattttttctaaataaaatttgccgagttgagaacaaaaaaaaaaaaaaaaa

SEQ ID NO: 1036 - DNA, 2462 bp, Cricetulus griseus
agtttattgattttgtgaaaagctacaagaatcccaatctgaccatttccttcattgctgagagaagcattgaagatgaactcaatcgggaaagtaacagtgacgtcttcactattgccatcagctacgccatcatgtttctgtatatttcccttgccttgggacacataaagagctgtagcagacttctggtggattctaaaatctcactgggcattgcggggatcctgatagtactgagctcagtggcctgctccctgggcgtcttcagctacatggggatgccactgaccctcattgtcatcgaagtcatcccattcttggtgctggctgtcgggggggagtaacatcttcattctagtgcagacctaccagagagacgagcgtcttcaggaggagacactggatcagcaactgggcaggatccttggggaagtggcccctacaatgttcctttcttccttctctgagacctcggcatttttctttggggcactgtcctcgatgccggctgtccacaccttctctctgtttgcgggcttggcggtcctcattgacttcctccttcagatcacctgctttgtgagcctcttggggttagatattaagaggcaagagaaaaatcggctggacatcctgtgctgtgtgggaggcactgacaatggaagaggcatccaggcctctgagagctacctgtttcgcttcttcaaaaactcctttgccccctttctgctgaaggactggctgcgaccaattgtgatagccgtatttgtgggtgttctgtcattcagtattgcagtcatgaacaaagtggaaatcggattggatcagtctctttcaatgccaaatgattcttatgtgattgactatttcaaatcgctcggtcagtacctgcactcgggtccacctgtgtacttcgttctggaggaaggtcatgactacactacccacaaagggcagaacatggtgtgcggcggcatgggctgtgacaatgactccctggtgcagcagatatttaacgcagctgagctggacaactatacccgcataggctttgccccctcatcctggatcgatgactactttgactgggtcgcgccgcagtcctcctgctgtagactctacaacgccactcaccagttttgcaatgcttctgtgattgacccaacctgcatccgctgcagacctctgactccagagggcaaacagaggccacaggggaaagagttcatgaaatttctgcccatgttcctttccgataaccccaaccccaaatgtggcaaagggggacatgctgcttacagttcagctgttaatatcatcggagatgacacttacgttggggccacttacttcatgacctaccacacggtccttaagacctctgctgactatatcgatgctatgaaaaaagcccaacttgtagccaggaacatcacagaaaccatgaattctaaggggagtaactaccgagtgttcccatacagtgtgttctacgtcttctacgaacagtacctgaccatcattgatgacaccatctttaacctcagtgtgtctctgggctccatatttctggtgaccttggtggttctgggctgtgaactgtggtctgcagtcatcatgtgtatcaccatagccatgatcctggtcaacatgttcggggttatgtggctgtgggacatcagtctgaatgctgtgtccttagtcaacctggtgatgagctgtggcatttctgtggagttctgcagccatataacaagagcattcaccatgagtaccaaaggaagccgagtaagccgagcagaagaggcgctggcccacatgggtagttctgtattcagcggaatcacacttacaaaatttggagggattgtggtgttggcctttgctaaatctcaaatttttgagatattttactttaggatgtacttagccattgtcttactcggagccactcacggactgatatttcttcctgtcttactcagctacgtaggaccatcggtaaataaagctaaaagacacaccactcaagagcgatacaaagggaccgagcgagaacggctcctcaatttttagccttgtagcaggctttggtgactttgtctatggagaggtcaagtttctgcaggaaagctgtactgtcaagttagcaacatttgaggatgttgtaggtacctttattacaacattttgtagtttaaagagctttattaatgcaataaattaactttgtacatttttatattaaaaaaaaaactatcaagggacttcagaatgttgtaggcctcattagagcttgttctccaaaaacctgcttgaaaaaggcgacatgttcttcacagtgttctcctgtggggaaaatgtagcctcagtcaccagctagttatggcatgggaagaaggaaatgcagacaaagctcatgggttttaacttattttcttaataaaatacctcatcct

SEQ ID NO: 1037 - DNA, 2459 bp, Cricetulus griseus
  modified_base (1880)..(1880): a, c, t, g, unknown or other
ctacatgtttcctgtgacaaccttttggatacagatttaacatcaaagtcggaccctttatgtgtgctgtttttgaacacgagtggtcaacagtggtatgaggttgaacggacagaaaggattaagaattcgttgagtcccaaattttctaagacatttattattgattactactttgaagtggttcagaaattgaaatttggaatttatgacatcgacaacaaaactattgagctgagtgatgatgacttcttaggagaatttgaagttactcttggacaaattgtttccagtaagaaattaactcgaccactggtgctcagaaatggcagacctgcagggaaagggactattacgatttcagcagaagaaatcaaggataacagagtggtcttgtttgaaatggaagccagaaaactggataataaggatctgtttggaaagtcagatccatacttggagtttcacaagcagacctcagatggcaactggctgatggttcaccgaacggaggttatcaaaaacaacctgaatcctgtgtggaagccttttaaaatctctcttaactctctgtgctatggagatatggacaaaaccattaaggtagagtgttatgattatgacaatgatggatctcatgatcttattggaacatttcaaaccaccatgacaaaactcaaagaagcctccagaaactcacctgttgaatatgaatgcataaatgaaaaaaagagacaaaagaaaaaaagctacaagaattcaggtgttatcagtgtaaagcactgtgagattactgtagaatgcacatttcttgactacatcatgggagggtgccagctgaattttactgtgggagtggacttcaccggctccaatggtgaccccagttcttcagattccctgcattatatcagccctaatggtgttaatgagtacctgactgccatctggtctgtgggattggtaattcaagattatgatgctgacaagatgtttccagcttttggctttggagctcaggtgcctcctcagtggcaggtttctcatgaatttccaatgaacttcaacccatctaatccctactgtaatggaatccaaggcattatagaggcttatcggacctgtcttcctcagataagactctatggaccaactaatttttctccaattataaatcacgtggccaggtttgcagctgcagccacacagcagcagacagcatctcaatactttgtgctcttgattatcactgatggcgttatcacagaccttgatgaaaccagacatgctatcgtcaatgcttccaagctgcccatgtctatcatcattgtgggagttgggggagctgacttcagtgccatggagtttctggatggtgatgggggaagtctccgctccccatcaggagaggtggccataagagatattgttcagtttgtgcctttcagacaattccagaatgctccaaaagaagcacttgctcagtgtgtcttggcagagattccccagcaggtggtgggctacttcaacacatacaaactccttcctcccaaaaacccagctgcgaaatagaaggagccaggaaaacttcaggattcataagctgtgtggagcaatgccatctcttccacagaatgatatatcttttttgtaagaggacagtagcaagtccatctctgatcaataaattcagtgattgttagtgatttatagaaattttaagagtgctatttggaattgaatttgatgtgggaaaagcagggatttgttggtttgttgtctactttctataatgaaaatggcatttttaaatgttgtcagagtgagtgaataattataggatgatgtggtttgcaggttgctatactgtttatgtaaanattttgtaagccaataaattaaaaaaaagttacttgtgcatgtgtgtgtgtgtgtgtgtgtgtgtgtgtgtgtgtgtgtgtgtgagagagagagagagagagagagagagagagagtccaaggcctcagtgaagttgagtgatataatatgggtaagcccaccagaaacacctcagattcattacacagttggttttgaattaattactgcccattgtgcattagaaaccagaaacctggtactcagggcaggtttttcagtcagtacatgactgcttatggggccatggcccacagttcaagaacctgggctccacagcatgacttattagtaacaaatcagttatcaatagaaaagaccaatacagattttttcttttttttttttctctcttttgaaaccattattttttcacatgtctcagttctctgtgtttgggaagatgtcacagtggttttcaggacttttctttggcatacaaagggagccagcacagaaatggcttacagattctcggtgcatgttaaactgtagcagaggggcttctctggctctgaagcagggctcactggcttgct

SEQ ID NO: 1038 - DNA, 2459 bp, Cricetulus griseus
  modified_base (562)..(562): a, c, t, g, unknown or other
gaaaccaaagccaattacagacgctaagattcctgaaaagcggacctcaccatccaagcctgtatcagccctcagacctggacctaaaaccatcccaactgtttcaaaagccacatctccttcaactcttgtttccactgggccaatcagtagaagtcctgccacacctctgcctaagaggcccatctccactaagactgagggaaaagctgctgatgtcaaaaggatgactgctaagtctgcaccagctgacttgaatcgctcaaagaccacctctgccagttctgtgaagagaaacaccactcctactggggcagcacccccagtaggaatgactgcccctcgagtcaagcccatgtctgcaccttcccggccttctgtagctctttctgtggacaagaagcccatctcagctaaacctagctcctctgctcccaggctgagccgcctgacccccactgcctctggccctagtctgaagagtgttcgctccaagattgggtcgacagagaatatcaagcaccagcctggaggaggccgggccaaagtagagaaaaaaacngaggcagctgccacagctggaaagcctgaacctaatgcagtcacaaaagcagctggctccattgggagtgcgcagagaccacctgttgggaaagtccagatagtctccaaaaaagtgagctacagtcatattcaatccaagtgtggttccaaggataatattaagcatgtccctggaggtggcaatgttcagattcagaacaagaaagtggacatttccaaggtctcctccaagtgtgggtccaaagcgaatatcaagcacaagcctggtggaggagatgtcaagattgaaagtcagaagttaaacttcaaggagaaggcccaggccaaagtgggatcccttgataatgttggccacctacctgcaggaggcgccgtgaagactgagggcggtggcagtgaggcccctccgtgtccaggcctccctgctggggaggagctggccatcccagaggctgagcctgatgctggcgcccctacttcagccagtggcctcagtggccacaccaccctgtcagggggtggtgaccaaagggagccccagaccttggacagccagatccaggagacaaattgagacctacaggctgacgttccgggcaaatgccagggcccgcaccgaccatggggccgacattgtctcccgacctccccacttccctggctgcccaagcttggggccccgggccacgggctccctttcccgggctatctactagaattgtaagctcttgggtgctgggcggccctttaggcctctctccctcctgcctagcttgctcaggcagcagcaaccctgctgccttcaccttcttccaccctcttgtgggcccagctccaacctactatcccaccactgcaccgctgctgtatggagaaagttgggaggaggggtaggagtctactggcatctctgtgggatctatggtggggtgctgggttccagtctcctgatgtttgggttttttggaccaaacccaaaagaaactgacaaaccctctcttccctggtccaacttggagggactagtagaggtgatgaactccaggtggtgaccagcactgactgaatcccctggaacctaaccactgcctttccaaataacctatgaactggtggtgtagtttgctgcgggttgaagccatgtctaaatgagagttctcagtaggtgatgaaggaagcaggggaggaggtcctgagtctgacagctagagccggccagtgtgactggctgtgctggcattgcatgtatgctgcccctaccccaacccagaggctgtttttagcatttgtctcattccctgggatgcagtggtcatggtgtgatacaaaaccagggctggaaaacagaaatgaaggtcaaaatccctgacctgcacctgcaggccaaggcacctaaaccctcacgtctgggggaacctgagatgtccagagtgcatgtgagcagtggggaatcaggtgtggaaattgaaaactagaatgtgtgagactgaggccatcccactttccttctggtgtgactggaaaggaggagtgggtgggatggctgcaatgctgggaaaatcctgggaattatatcaacacaagattcttattgcacttgtattttttgtattaaagtttgcatggtttctaataaaggattcaaacctaagtttgtggtgaaatggcctgggagtgtctaagggctcctctggtggggcattttctgctgtgcagatttgcctgtcaggaggctggcccagatctgaccccccttgaccctcctcctgacacaggctccatctctgctttgggtacagcttgagcaggtagagttctgtgctatctctctacccaaggaagctatccctgtgatttaaacaataaagctgcctgacatacccaaaaaaaaaaaa

SEQ ID NO: 1039 - DNA, 2456 bp, Cricetulus griseus
ggggcgttgccgccgccgccgcccgctccgctttgaagtgacagggatgcccgaaaatgttgatcgagcacgggaagaaatagaaatgcatatcgccatgcgtacaggaaactatatagagctcaatgaagaaaatgatttccattataacggtactgatgtgagctttgaaggtggcactcttggctctgcatggctctcttccaatccagttcctcctagccgtgcaagaatgatgtccaactatcgaaatgatagttctagttctctaggaagtggttccacggattcctattttggaagcaataggctggctgactttagtccaacaagcccatttagcacaggaaacttttggtttggagatacactaccatctgtgggctcagaagatcttgcagtagactctcctgcctttgactctttaccaacatctgctcaaactatctggactccatttgaaccagttaaccactctctggcttgggagtgatcccaatggtggttccacctctagctcacctccagaatcaagaagaaagcacgactgtgtgatttgctttgagaatgaagttattgctgccctagttccatgtggccacaacctcttctgcatggaatgtgccaacaagatctgtgaaaagagaacgccatcatgtccagtttgccagacagctgttactcaggcaatccaaattcactcttaactatatatatatacataaatactatatctctatatggaactcgtaaaggcatgggtataatggtacccccagtaaacttcctaatgaattcttatgactgttatcaggctttattgggattaggctaaagttgttagtacacttataaaaggctgctatggtaacactaaacctaagtggtctcttgtctattagtttggtttgaattattaatactatcttatagactcagagacatagcttgtataagagttgttaaagctgaagttctactttgctgtgtaacctatgagcaaaatgtatacatctgagattgtagtcagtgggtcccaaagcctagccacatgaagagtttatggagggtgcctggcattacagatgactgacacttccagtgctgccttctttacactgccagttttgacaaaacaggtttgttttttattttacaacaacttctgcctaattctgcaggattgcaagtaactttttaaagcattgtgattacttattagtaataatagggctgatggcagtttactagatcactggttacaatttgggacaaaaactgctacattgactttcatctcgcccagagtgctcaaggctggtgtgttcagtggatcaggaatacaattatctttgattgtgaattcctacccattgcctcccttggtgaatgtggaaatagccgactgggttttcccatttcaggatgggctttgggatgcacctatattggctgaaaaatttgagaatgcgaacattccattcattagtctgatcaagctattaatatttagactgtagatcaaaatgtgaaacattttatgttcaatccatatttgtcttgcacattataaatatatttttattttttagtaatgtaggggatggggagggagataataatgcccttggcataattcatgaaagcagctgtgacaacctccaatcagtttacttcatttcaaacctatttccaatcacaaacaaagatttctttaaaacacacttgtacatttcacctgtggatgttttaacttcatcctcagtatgtccccaaatttgctggcattgaaaggacaaaacattatactggtgggtttttctactaattattttttgaagcattattttcccaacacaaaagagctttttttctcagtataacaaaaattgaaatcttatgtctattcaatagtaaatagacaaactttattttttatttccacttgaagagttacatttcgtataaagtttacaaataacggtttttattttgattttttcagtataaaaaagttgccttgatggcatattatgatgtaatgctaattgcttgtaggatagttaattgtcagtattgaattctaatctctagctgccgtcttgtagatatggacgaatgtcaccaagcatgtgttttgtattttgttgcatcgtacactgcaactaataagccaaggaatcgacatatattaggtgcgtgtactgtttctaaaaaccacaaactaagaatgataaattatcaatatagtttagtatttgctaattttactacactcttttgttatgtatatgtagggaagtcatagggattataaattcaatttgagtaaagtttaaaaccatatatttatgataaagggcccttaacttaagatggccaaagcactgatattatatatttgctgtaaagagaattataagagttttattttttattaaaagttacttaataaa

SEQ ID NO: 1040 - DNA, 2456 bp, Cricetulus griseus
ggcgaatggcttcgctttagcgcgccgcgggctcagctgcgaccccggccccgcccccgggaccccggccatggacgatctatttcccatcatcttcccctcagagccaacccaggcttctgggccttatgtggagatcatcgagcagcccaaacaacggggcatgcgtttccgctacaagtgtgagggtcgctcagcaggcagtattccgggtgagagaagcacagataccaccaagacacaccccaccatcaagatcaatggctacacgggaccaggaacagttcgaatctccctggtcaccaaggacccacctcaccggcctcatccacatgaacttgtggggaaagactgccgggatggtttctatgaggctgaactctgcccagaccgctgcatccacagctttcagaacctggggatccagtgtgtgaagaagcgagacctggagcaagccatcagccagcgcatccagaccaacaacaacccctttcaagttcctatagaggagcagcgtggggactatgacctgaatgcagtgcgcctctgcttccaggtgacggtgcgggacccatcaggcaggcccctccgcctgactcctgtcctctctcatcctatttttgataaccgtgcacccaacactgctgagctcaagatctgccgagtaaaccggaactccgggagctgccttggtggggatgagatcttcttgctgtgtgacaaagtgcagaaagaagacattgaggtgtatttcactggaccaggctgggaagcacgaggctccttttctcaagctgatgtgcaccggcaagtggctattgtgttccggactcctccatacgctgaccccagcctgcaggctcctgtgcgtgtctccatgcagcttcggcggccttctgatcgggagctcagtgagcccatggagttccagtacctgccagacacagatgatcgccaccggattgaagagaaacgcaaaaggacctacgagaccttcaagagcatcatgaagaaaagtccttttaatggacctactgaaccccggcctccagcacgacgtattgctgtgccttctcgaagctcaactgtctccaagccagccccccagccctatacctttccaacatccctcagcaccatcaactttgatgagtttccccccatggtgttaccatctgggcagatctcaaaccaggccttggcctcggcaccagtcctcggcaccagtcctggcccaaaccttggtcccctcctctgccatggtgccagctctggctcagcccccagcccctgtctcagttctagccccaggtcctccccaagccctggccccacctgttccaaagaccacccaggccggggaaggcacactgtctgaagccctgctacacctgcagtttgatgctgatgaagacttgggggccttgcttggcaacagcacagacccaggtgtgttctcagacctggcatctgtcgacaactcagagtttcagcaactcctgaaccagggtgtgtccatgtctcaccccacagctgagcccatgctcatggagtacccagaagctataactcggctagtgacagggtcccagaggccccctgacccagttcccacacccctggggacctcgggccttcccaatggcctctcaggggatgaagacttctcctccattgcggacatggacttctcagctcttctgagtcagatcagctcctaagggactgaagctggctctgctcagagcatcaggtttcagggtattgaagccttcccgaagcacttacagattctggggagcatgcgccaactgcccctgacttctttgggtggtatcttctatgggtggcaccttattattggcaatatctcacactctttttggaggtgcttaagcagaagcattaacttctctggatggagctgggaggactcagacttctccacggtaatagtcagctcccttcttggtagggaactctggaatctctcttccaccctccagttccagccctcttctagagagtggggggcaagctggatctgtggcctaaaggccatgacgccttattatcacgtgtcttcctcatcatgggttcctgtacaccttgatccaaagcaatgctcctaatagcagcccttacgtattgctgcccaacaccagcacgaggggctgtttttctctcctgtgatgctcttgccctgccagctctttccatgccaagctgtggctgaggggaacaggtggaatagcactggccaccttcaggatcctgagggagttgagtctgagacatccctgctcccccttttctcaagtgccttaatagcagggcaaattgtgtggagtcagaagggtgggctagatgctcagccacaagacagtcttcactgaaaaaagctgttggactcttgctctttctaactctgaactaataaatgtgttaccatgctg

SEQ ID NO: 1041 - DNA, 2456 bp, Cricetulus griseus
tgaaggaggaactcaaggattgcttggtggctgctgcaccctatgggggtcccattgctctactgaggaactgttggagaaaagagaaagctgccagcatgcggccagtactggagatctactctgcttctggcatgccactggccagcctgctgtggaagagtgggcctgtagtggcccttggctggtcagccgaggaggagctgctctgtgtgcaagaagatggcgcagtactagtttacgggcttcatggagacttccggaggcacttcagcatgggcaatgaggtgcttcagaaccgagtcctggatgcccggatctttcacactgagtttggtctggggtggccatcctcacgaggggcttatcgctttaccctgagtgccaatgtggtgacctcaactccgtcggttcaactgcaacatccgggctcctccgaagcagatggtctggtgcagtcgtcctcgaagcaaggaaaaggctgttgtggtggcctgggagaggcggctgatggtggtgggcaatgctcccgaaagcattcagtttgtgctagatgaggactcctacttagtgcctgagctcgatggggtccgaatcttctcccgcagcacccatgaattcctgcatgaagtcccagtggccagtgaagagatcttcaaaattgcctcaatggcccctggagcactgctgttggaggcccagaaagaatatgagaaagagagccagaaagcagatgagtacctacgggagatccaggagctggggcagctagtccaggctgtgcaacagtgcattgaggctgcaggacatgagcaccagccagacatgcaaaagagtctgctcagggcagcttcctttggaaagtgtttccttgacagatttccacctgacagtttcgtgcgcatgtgtcaggacctgcgagtgctcaatgctattagggactaccacattggaatccctctgacctatagccaatataagcagctcaccatccaggtgctgctggacaggcttgtattgcggaggctttaccccctagctattcagatatgcgagtacctgcgccttcctgaagtacaaggtgtcagcaggatcctagcccactgggcctgctacaaggtgcagcagaaagatgtctcagatgaagacgtagcacgggctattaatcagaagctgggtgacacgcctggtgtttcatattctgacattgctgcacgagcctatggctgtggccgcactgaactagccatcaagctgctggagtatgagccacgatcaggggagcaggtacctcttctcctaaagatgaagaggagcaaactagcactgagcaaggccattgagagtggggacactgacctggtgtttacagtgttgctgcacctaaagaatgaactaaatcgaggagactttttcatgactctccggaaccaacccatggccctgagtttgtatcgacagttctgtaagcatcaggagctagacactctgaaggacctttacaatcaagatgacaatcaccaggagttgggcagcttccacatccgagccagctatgcttctgaagagcgaattgaggggcgagtagcatctctgcagacggcagctgatgccttctacaaggccaagaatgaatttgcagccaaggccacagaggatcaaatgaggctcctgaggcttcagcggcgtctagaagatgagctggggggccacttcctagacctttctctacacgacacagtcaccactcttatccttggaggccacaacaagcgtgcagagcagctggcacgtgactttcgaatccctgacaagaggctctggtggctaaagctggctgccctggcaaatttggaagattgggaggagctagagaagttttcaaagagcaagaaatcaccgattggctacctgccctttgtagagatctgcatgaaacaacataataaatatgaggctaagaagtatgcttcccgtgtgagccctgagcaaaaagtcaaggctttgcttcttgttggggacgtggctcaggctgcagatgtggctattgagcaccggaatgaaaccgagctgagcctggttttgtcccactgcactggagctacagatggggccacggctgacaagattcagcgggccagagcacaagcccagaagaagtgaagtgcctgccctttagggggttagttataacccagaggtgtccagatgtaaataaatttggaacactaattcagaatagttgttgtatgctgtctagcctaaaagaaagcatgcttgaggcagagccttctagccactgcagcagaactccacatatttgattgtatagaggctgggaataggaacttacaaaagagagctgtttattcacatagttaccatagttgctgtctcagaagctgtatcagcctgggggaaggtatggagagaggtggtattaaattcaagcacca

SEQ ID NO: 1042 - DNA, 2456 bp, Cricetulus griseus
caaccttacatgaccaaaagcgttacataaggtatctctctgacctccacgcgcctggtgaccctgcttggcagtgtatcggagctcagcacaaatggaccctcaaactcatgcaagactgcaaagagggccacatgaagagcctaaaaggtaatgcaggcgcacacagccccatgctggacctggataacgatgttcgtccctcagtgttgggccatctcagccagacggcgtcactgaagagggggagcagctttcagtctggtcgtgatgacacatggaggtacaaaactccccacagagtggcatttgttgaaaaattaaccaagcttgtgttaagtcaactgcctaacttctggaaactctggatttcatatgttaatggaagtcttttcagtgagactgctgagaagtcaggccagatcgaaagagcaaagaatgtaaggcagagacaaagtgatttcaagaaaatgattcaggaagtaatgcactccctggtgaagctgatccggggagccctgcttccactcagcctcagagagggcgatggcaggcaatatgggaggttgggaggtacaggcagagctctcagggcagtggcttgcacgtgtcatccagaccataaggctgacttatgaatcattgactgccctggaaattcccaatgacatgttacagattatccaggacctaattttggacctccgtatacgttgtataatggtgacattgcagcacactgcagaagaaataaagagattagctagaaaaagaagattggattgttgataatgaaggactgacttccctaccatgtcagtttgaacagagcatcgtgcactccctacagtcattgaagggtgttgtagattgcaagcctggagaagccagcgtctttcaacagtctaaaacgcaggaggaagtttgccagctaagcatcaatatcatgcaggtgtttatatactgtctggaacaactgagcaccaagcctgatgcagacatagatactactcatctttctgttgattgtttcttctcctgtattttatttggaagcttccatgaagacttcagtttgacttcagagcagcggcttttgatagtcctgagcaattgctgctatttagaacgacataccttcctaaacattgcagagcattttgaaaagcacaacttccagggaatagaaaagataacacaggttagcatggcatcactgaaagaactagaccaacgactctttgaaagttacattgaactaaaagcagaccctattgttggatccttggaacctgggatatatgcaggctattttgactggaaagactgcctgcctccagcaggtgtcagaaactatttaaaagaagcattggtgaatataattgccgtgcatgcagaggtattcactgtttccaaggagctggtgccccgggtcctggccagggtggtagaagcagtctctgaagagctgagccggctgatgcagtgtgtctcatgcttcagcagaaatggagcactgcaggcaagacttgaaatctgtgctctgagagacacagtagccatttacctgaccccggaaagcaggtctagttttaaacaggccctggaagccctgcctcagcttgcaagtggtgcagacaaaaagttactggaagagctactcaacaagttcaagagcagtatgcacttgcagctcacctgtttccaagctgcatctccaaccatgatgaaaacatagccgcctgtggaggaagagcatccagagatagcaggggtgagattgtcctcatcctttggcagagggatgtcccatgtccacgcactgcacttaacttgtgacttttctccagcgtggtggcacggaaagatggtggtgggtgtttaatagtggcctgtttaaacaaccctattttaaatgtacacatacacagcttttattattagctttggtcctgtttggagctgtgtcctaaccctaaaaatcatcatccatacaaatggttctaaagctcctgattttttaaagaaaaatatacagtctatatataaaaatgttaaattttggataatttgtgacccaaatgtccgtaagtgaactctgaattttatagtctgactttaatttttcccagtgctaaacattgaagtttatctggttgtcactcacactcaagttgatctatcagcgtgcagtgtccccctctgccacttcccatctttgaagtgtcctgctccatagctggaaagatgatactctgacacaggctgtgttttgtaaagattcgatgtgcccccgggtcaccaagcattgagcagtgactcactcctgactggcctgcacagtagatccgggtcactgtgacctgcaagcagctcgttcacctcattccatcctatccttccagtcagttgtagttcacttttcaaaataatctatagatagtgtagactcctct

SEQ ID NO: 1043 - DNA, 2456 bp, Cricetulus griseus
caggatcacccagcttcctgtgaaagcattcaagctacccaggactgacacaactggacctgaagtgtgtcatcaccaaccactttggttccacgtactcgcacaaggccaggcttactgtgaacgtattgccatcattcaccaaaattccctatgacatcgctatccggactggcaccacagcccgccttgagtgtgctgccacgggccaccctaacccccagattgcatggcaaaaggatggaggcactgatttccctgcagctcgtgagcgacgcatgcatgtcatgcccgatgatgatgtgttctttatcaccgatgtgaaaatagacgacatggggtgtctatagctgtactgacccagaactcggctggctctgtttcagcaaatgctaccctgactgtcctagaaactccgtccctggcagtgcctttggaagaccgtgtggtaactgtgggagaaacagtggccctccagtgcaaagcaatgggagtcccacaccacgcatcacctggctgaaaaggaggtcgacctcactggtgtgggtgtgcatcatctaccagaccaggaagaagagtgaggagtacagcgtcactaacacagacgaaaccattgtgcctccagatgttccaagctacctctcctctcagggaaccctttctgacaggcaggaaactgtgatcaggactgaaggtggtcatcaggccagtgggcacattgaaagcaatggtgtgtgtctgagagactcgagcctcttcccagaggtcgacgtgcatagcattacatgccggcagcccaagctgtgtgttggatacactagagagccatggaaagtgatggagaaagctgacaggaccactgctccatatacaacagcacacagtggctctgctgtatgcagtgacttcaaccctgacacagtccccagcctgtgtccacagagagtggacagccaggtacaccaagcagccaagagctcaggcagcacaacggagaatgttctccacaccacccttacactgggactgctgatgggtctcacacccactctgggggatccctctatccaagtaaccatgacagaatactgctgtctttgaagaacaagggggcatccccagatgggaaaggagattcctcttggactttagccaagttacatgaaccagactccatagacctacagccttctcctacgttaacttcaggcagcccagagctcccagaagacgccatacctactgaagcccagcacttgcttgtttccaatggccacctcccccaggcctgtgactctagtcctgagtctatgccactgacaggacagctcactgggaaacggaggggaccattgctattggcaccgaaaagctaggcttcatctacctcagctcttttaaagcggttgctacaggaaagaggtaggagaagcggtgggaagtgtgtgtccagatgtcactctggacagttgtaccttccgtgtcgagtgtcagttggctaaaggacttgacatctggagcacggacatgcaggagactatttgtgtacaaaggcaggaaaagtatttgataccattgtacataagagttttcagagagttcatatatattatatatcttttacagagactattttaatccttagcgcatgggtcccgctttcagtgatattttcacactaggttgctgtctaatcttggagagggtcaggaatagttctggtgccttaacgcacagctgagattcaggtaaaaccacattagctgtggctgggggttggaaaggagggcgttctggctggctcagaacaattaagcactgccttttgtctttctttgtaactcactcggtacaagcaaatgtctcatctgcctccaatggttctttgaagcttgttaaggcagtgttggtacacctgtggattttccaatagtgtggtttagttctgccatgtctagggccagctgatttctcttagcaggcctgtccacatgttccctcacatagtcttgtacagtccaagcccagtttcactgagtccttggcctgggtgatttgcactttggggtcctgttgctaaccatcttgtgagtgccaatgtgtaattcaatagaaactacatggaaacaaactcggtccttaaaatccctgaaagctgagggaagtattgacacagtgatggcctgagtcacagtgtactgtcgcccacagtgcacaggacaaagcacattcagaagtttattctccacagttggctgattaatgttacttccacaaaatatgtgaatttgctgcttctgagaggcaatgtgaaagaggaagtattactttttatgtacagagttatttatttatagaaattttggtacagtgtacattgaaaacatgtaagatattgaagtgtctaacaaatggcattaaagtgtctttaataaaggttcatttataaatactaa

SEQ ID NO: 1044 - DNA, 2455 bp, Cricetulus griseus
  modified_base (2211)..(2211): a, c, t, g, unknown or other
tcttcatatactttgcacagctcttcttgccgttcacacctgcaagctttaaaaatgaagcaattagaaaagaaaaaggaaaagacaattttagtgttcaggagactcagactcttttgaaagaaattaccaaaaggaaagaagtcattttttccaagcaactcaacacgacaataaatgtgatgaagcgtatggcttgggaggagattgcacagtgcgtcaatgctgtaggagaaggagagcagaggaccgggactgaggtgaagagacgctacctcgactggcgcgcactcatgaaaaggaagagaatgaaggccaacatgaagctggttggttctgggtttcctcttcctacgtcggatttagacgactccctcactgaagagatcgatgaaaaaattgcattccgaaatgatgcaaattttgactggcagaacgtgtcagatttccgggatgcaggtggatccctaacagaggtcaaggtggaagaggaagaaagggacccacaaagcccagaatttgagattgaggaggaggaagaaatgttgtcatctgtcatacccgattccagaagggaaagtgagctccctgacttccctcacattgacgagtttttcaccctcaattccacaccgtcccgaccctcatatgacgagccccatctgctcatgaacatagagaaacagaaactggagctggaaaaacgccgactggatatcgaggcagaaaggctgcaggtggaaaaggagcggctgcagatagagaaagagcggctgcgccacctggacctggagcacgagcgcctgcagctggagaaggaacggctgcagatcgagagagagaagtggaggctgcagctggtcagcgccgagaaacccgccatagacaacgaactcggccagggggagaagtccatgctgcagccacaggacatagaagcagagaagttgaaactcgagcgagagcgcctgcagctggagaaagatcggctgcagtttttgaagttcgaatctgagaagctgcagattgaaaaggagcgcttgcaggtggagaaggagagactgcggattcagaaagaagggcatttgccttgactggtctctgccctctgcctggcaaagatttatgaactgtagctttccccatcagttgatgcaaaggtggttggtgaattagctactttattgccacccctgtctaatgtcagtgtttttagtaggaaaaagatagtaacacataggtagccacgtggtttagtagtgtgttatataaaagctctgcccaccataaactgatagcagaggatctgttagactcttccacattagtaatactgcatagagtcttgtcttatttgtgcaacccaagtttattgtaatgtctacaataaagttcccatccagtgattctcaagtgcagtttgggctcccagaagacatttgggattgtgtggagactttattttggtggccaaagtagatgggtgtgggctgctacttatccagcccaaaatatcactagtgccaagtttgagaaacctaaccctggcctaactgtgtacctctatagttatctctacagttttagaatattaaaacttcaggtatttatgtgggtagatatttaaatggccaaaagcattttaactgtgagacattactgtgtagtatattggatatagggagtggtggagattgtaggtacttttttattcctatggtgttgcctatcagtagactgaaacttagaagcaaacctgagactatctgagataatataaaatgagtcactttgaaggcattacccctcaagaatgaacacaattgggaagctttagttcccccttctttaaatctgttgtcttagtttgaatacagaatttagcatttcatttacatactgagacgttatgtaagagacagttagaaggtagtaaaaatgataccagtgccaaaatggtggcagtaggccatgttaaaccccatgaactgctgattgagttttaaaagtgaagaatagtcctttgagacagagatgggggcagtgtcctctgcatcagcaacaatggtgttgaaatgatagaagtagctgtgtgctatggttagcagaagcacttgcttaacttaatctctgcaagagtctatgaaagggtaatttctgactccacaatctgaagttcagagcagtcctgcagtaagtaagtgactgatnctttatacagcaggggtagtagttttgtctttgccccttcaggatgactaaaccctggaattctgaaagcaaagggctagctttgcctgatgatttgcctatagtgtcttgatggtggtttatcacaagaaagtgctttctgatgcacaaggaaatgactgcacaagttcactttgtgttttctgtattctagggctgatagctttaatacaatacttctgttgacacactaccttgattctgt

SEQ ID NO: 1045 - DNA, 2453 bp, Cricetulus griseus
ccgagctccgtcggctggtttccggcggtcgcgcgctcttttctcgggacggtggaggccgtgcagcgtcgccgttactctgagcaaagaactgtgggcagaggaagtcgaggttagtcgaggactgggagacagacactttaactgtgctcaaatcgaagtaaagggtgcaaacatgcagagcaataaaacctttaacttggagaagcagaaccacactccaaggaagcatcatcagcatcaccaccagcagcaccatcagcagcagcagcagcagcagcagcagccacccccaccaatacctgcaaatggacagcaggccagcagccagaatgaaggcttaactattgacctgaagaactttaggaaaccgggagagaagaccttcacccaacgaagccgtctttttgtgggcaatcttccccctgacatcactgaagaggaaatgaggaaactttttgagaaatatgggaaagcaggcgaagttttcattcataaggataaaggctttggctttattcgcttggaaacacgaaccctggcagaaattgccaaagtggaattagataatatgccactccgtggaaagcagctgcgtgtgcgctttgcctgtcatagtgcatctcttacagtccgaaaccttcctcagtatgtgtccaacgaactgctggaagaagccttttctgtgtttgggcaggtggagagggctgtggtcattgtggatgaccgaggaaggccctcagggaaaggcattgttgagttctcagggaagccagctgctcgaaaagctctggacagatgcagtgaaggctccttcttgctaaccacatttcctcggcctgtgactgtggagcctatggaccagttagatgatgaagagggacttccagagaagctggttataaaaaaccagcagtttcacaaggagcgagaacagccacccagatttgcacagcctgggtcctttgagtatgagtatgccatgcgttggaaggcactcattgagatggagaagcaacagcaggatcaagtggaccgcaacatcaaagaggctcgtgagaagctggagatggagatggaggcagcacgccatgagcaccaggttatgctaatgaggcaggatttgatgaggcgtcaagaagagcttcggagaatggaggagctgcataaccaagaggttcagaaacgaaagcagctggagctcaggcaggaagaggagcgcaggcgccgtgaggaagaaatgagacgacaacaagaagaaatgatgcggcgacagcaagaaggattcaagggaaccttccctgatgcgagagaacaagagatacggatgggccaaatggctatgggaggtgctatgggcataaacaatagaggcgccatgccccctgctcctgtgccaactggtaccccagctcctccaggacctgccactatgatgccagatggaactttgggattgaccccaccaacaactgaacgttttggccaagctgctacaatggaaggaattggagcaattggtggaactcctcctgcattcaaccgtccagctcctggagctgactttgctccaaataaacgccgccgatactaaataaagttgcagtgtctagtttccccgcaacccttaaaggccctttttggactagccagaattctaccctggaaaagtgttagggttcttcccaatagataggttttccctgcctgtactactctagggagtatgcttggaggcagagggcaagggaggggtggtatttaacaatcaaagtctgtggtatattgctttatcaagtctatctggtgcattcctgaagtgtgttgattgttgagggcctggagaaccatagcaaaatgaactcagagctccattaatcttgatcattcctccctctctccctccctcatgttttgagtactttttcattttcatcttggttcccctcaaccccagagacactgccatatacaccacagaacttttaaacatcctccaatgacctagcccaattcctccattcactcccaggtgagaattcagacaaatgtccacagaggttacagcatacatacggttctgttatatcccatatataacctttcatgtcctaaggaacctcttagaggttttcattttagtatatacttaaaaaaaaaaatcttgtgttaacttgcctccatatttttcttgggtaaggactactttgtgtctataatattgctgtccacagcttttcttgataggcctagtacaatcttgggaacagggttgctgtgtgttgaaggtctgacagtagctcttagccttgcctatcttaggtagttacgctgtgcatttttttattggtgtactatgtttgatttgttcctgataccttcaatttgaaatttttctgaaaaaatggagcagtaatgcagcatcacttattaaaatacatttgaagcctttt

SEQ ID NO: 1046 - DNA, 2453 bp, Cricetulus griseus
  modified_base (2434)..(2434): a, c, t, g, unknown or other
  modified_base (2445)..(2445): a, c, t, g, unknown or other
ctacctttccgaccgtcaacaccatcaccaaagcagctgatgggaccaacacatacaaacaacatcgcaggacaccttcctcctctagcacccttgcctattcgcctcgggatgaagaggacagcatgcctcctatcaacactcctcgccgctcagactccgccatctctgtccgctccctacactccgagtccagcatgtccctgcgctccacgttctcgctgcctgaggaggaggaggagccggaaccgttggtatttgccgagcagccttcagtaaaactgtgttgccagctctgctgcaatgtgttcaaggaccctgtgatcactacatgtgggcacacgttctgtagacgatgcgccttgaagtcagagaagtgtcctgtggacaatgccaagctgacagtggtggtgaacaacattgcagtagctgagcagatcggagagctcttcatacattgtcggcatggttgccatgcagcaggcactggaaagcctggtgtctttgaggtagacccaaggggctgccccttcaccatcaagcttagtgcccggaaggaccacgagagtagctgtgactacaggcctgtgcgctgccccaataaccccagctgccctccccttctgaagatgaatctagaggcccacctgaaagaatgcgagcacatcaagtgtccccactctaagtacgggtgcacgtttatcgggaatcaggacacatatgagacacatttggaaacatgccgctttgagggcctgaaggagttcctgcagcagactgatgaccgcttccatgagatgcatgtggcgctggcccagaaagaccaggagatcgctttcctgcgctccatgctgggcaagctctcagagaagattgaccagctggagaagagccttgagctcaagtttgatgtcctggatgagaaccagagcaagctcagtgaggacctcatggagttccggagggatgcatccatgttgaatgacgaactgtctcacatcaatgcacgcttgaacatgggtatccttggatcctatgaccctcagcagatcttcaagtgcaaagggacctttgtgggccaccagggccctgtctggtgtctctgtgtctattctatgggtgacctgctcttcagtggttcttctgacaagacgatcaaggtgtgggacacatgtaccacttacaagtgccaaaagacactggagggccatgatggtattgtgctggcgctctgcatccaggggtgcaagctatacagtgggtctgcggactgcaccatcattgtgtgggacatccagaacctgcagaaggtaaacaccattcgggcccacgacaaccctgtgtgcacactggtatcctcccataacatgctcttcagcggctccctgaaggccatcaaggtttgggacatcgtgggcactgagctaaagttgaagaaggagctcacaggcctcaaccactgggtgcgggccctggtggcagcacagagctatctgtacagtggctcttaccagacaatcaagatatgggacattcggactctggattgcatccatgtcctgcagacatctggtggcagtgtttattccattgctgtgacaaatcaccacattgtctgtggcacctatgagaacctcattcatgtatgggacattgagtccaaagagcaggtgcggaccctaacgggccatgtgggcacagtatatgccctggcagtcatttcaacaccagaccagaccaaagtcttcagtgcatcctacgatcggtccctcagggtctggagtatggacaacatgatctgcacacagacgctgctgcgccaccagggcagtgtaactgcactggctgtctcccggggccggctcttctcaggggccgtggatagtactgtgaaggtttggacatgctaacaaaatccagaccaagctttggctcccgttgggtctgtcaggcaggctggtcctacataatggcactggacctcctgcctgtcttgtggagacagatagacaggctcaaacagctaggcagtgtcatctctgccctatgcttggtgagggatctttctttaggccccgctcttaacttctaccagagaaatgcccaggcccctctctgggcgccaggtacgatgcttgcccggcccaccattcatttcactccacagagttttgttttgagacaaggtctcactatgtagctctggctgtcctggaagtcactatgtccaccaggctggcctcaaactcacagatccacctgcctccacctcccaagtgctaggattaaaggcgggtgccaccactcctggcaggacccagatggaccgtgggtcttttactcaccttttctactggttttagactgtatatagattttattacttctgttgaaataaaagcttcacagactgtgaaaaaaaaaaaaaaaaaanaaaaaaaaaanaaaaaaaa

SEQ ID NO: 1047 - DNA, 2453 bp, Cricetulus griseus
gcggaggagttcgcgaagatggcggccttctccgagatgggtgttatgcctgagattgcacaagctgtggaagagatggattggcttctgccaactgatatccaagcagaatctagtcccactaatcctaggaggaggtgatgtacttatggcagcagaaacaggaagtggaaaaactggtgcctttagtattccagttttatccagattgtgtatgagaccctgaaagaccaacaggaaggaaagaaagggaaaactactatcaaaaccggagcttcagtgctcaacaaatggcagatgaacccatatgacagagggtctgcttttgcaattgggtcagatggcctgtgttgtcagagcagagaagtgaaggaatggcatgggtgcagagccactagaggattgctgaaagggaaacactactatgaggtatcctgtcatgaccaagggctgtgcagagttgggtggtctaccatgcaggcctccttagacctaggtactgacaagtttggatttggcttcggtggaacagggaagaaatcccataataaacagtttgataattatggagaggaattcactatgcatgataccattggctgctacttggatattgataaagggcatgtgaaattctctaagaatggaaaagaccttggtctggcatttgaaataccagcacatataaaaaaccaagccctcttccctgcctgtgttttgaagaatgctgaattgaaatttaactttggtgaagaagaatttaagtttccaccaaaagacggttttgttggtctttccaaggccccagatagttacatcgtcaagtcgcagcacacaggtaatgcacaggtgtcacaaacaaaatttctccctaatgctccaaaggctctcattgtggagccatccagggagttagctgagcaaaccttgaacaacgtcaagcagtttaagaagtatattgataaccctaagttacgggagcttctcataattggaggtgttgcagctcgggatcagctctctgttttggacaatggggttgatattgttgtcggtactccaggaagattagatgatttggtttcaactggaaagctcaacttgtctcaagttagattcttggttctggatgaagcagatggacttctctctcaaggttattctgactttatcaacaggatgcatagtcagattcctcagattacttctgatggaaaaagacttcaggtgattgtttgctctgccactttgcattcttttgatgtaaagaaactatctgagaagataatgcattttcccacgtgggttgatttgaaaggggaagattctgttccagatactgtgcaccatgtcgtcgtccctgtaaatcctaaaactgacaagctctgggaacggcttgggaagaaccatattcgaactgatgatgtacacgcaaaagataacacaaggcctggtgctaacagtccagagatgtggtctgaagctattaaaatacttaagggagagtatgctgtccgagcaatcaaggaacacaagatggatcaagcaattatcttctgtagaactaaaattgactgtgataacttggagcagtactttatgcaacaaggaggaggacctgataaaaaaggacaccagttctcatgtgtgtgtcttcacggtgacagaaagcctcatgagagaaagcaaaacttggaaagatttaagaaaggagacgtaagattcttgatttgcacagatgtagctgctagaggaattgacatccatggtgttccatatgttatcaatgtcaccctgcctgatgagaagcagaattacgtgcatcggattggcagagtggggcgagctgaaaggatgggcctagccatttccctggtggcaacagaaaaagaaaaggtttggtatcatgtgtgcagcaaccgtgggaaaggatgctataacacgaggctcaaggaagatggaggctgtaccatctggtacaatgaaatgcagctgctttctgagatagaagagcatctgaactgcaccatttcccaggttgagccagatataaaagttccagtggatgagtttgatgggaaagttacatatgggcaaaagagggctgctggcggtggaaactataaaggccatgtggatatcttggcacctaccgttcaagagttggccgcccttgaaaaggaagcacagacatctttcctgcaccttggctaccttcccaaccagctgttcagaaccttctgattccatgtagatggaataggatggcagtaataaagtctatactcttacctctaacacggtggtgctgcttccaagcagcagtatttatggtaaccgacctatgtctgctaactgttgcatgtcaggaaacacaatcttagtaattcttcatagaatgtcagcctaatgaaaataaatttgacaactaataaaaaaaaaaaaaaaaaaaa

SEQ ID NO: 1048 - DNA, 2451 bp, Cricetulus griseus
agtcaccatgtggcaaaattgctgtagctatattagaagaaaccacaagagaaaggacagatttaactcagggagatgaggtaatagaaacaacttcagaagctggagaaacatcaagcacttctgaaacaacaccaaaagcagtggtttctcctccaaagttttgtgtttggctcagagtctgttaaaagcatttttagtagtgaaaaatcaaagccatttgcgtttggcaatagttcagctactggatctttgtttggatttagttttaatgcacctttgaaaaatagcaacagtgaagttactttagcagttcagagtggatctgaaggaaaagtagaacctgacaagtgtgaatcacagactgacatcagacagtcttcggatggcaaagtcagaaatgtcattacctgtccagaggaggagtcttcacttagttacacatttaaagcaccagaaaaggcacaagagaagagtaaacctgaagatcctccctcagatactgatgttctcattgtgtatgagctcactcccactcctgagcaaaaagcccttgcagacaaacttctgcttcctccaactttcttttgttacaagaataggccagattatgttagtgaagaagaggaggatgatgaagattttgaaatggctgtcaagaaacttaatggaaaactctatctggatgacttagaaaaatacagaccattggaagaaaatctagcagataatgacaaagaatgtgttattgtttgggaaaagaagccaaacagttgaagagagagcaaaagcagatactttgaagctcccacctacatttttctgcggagtctgcagtgatacagatgaggacaatgggaaccgggaggattttcagtcagagctacaaaaagttcatgaagctcagaaatcccagagtgagaaaataactgatgcagttggtaatgagcatccaggtgacactgaagtgacaaactcttttgtctataagtctgaagaatctgattctaacagcaaatctggtagctcaccccctgtttctgggactgtggacaagcctgtagatttgtgtactagaaaagaaattgacacggaagtcccaagccaaggagaaagcaagactgttttgtttggatttggaagtggtacagggctgtcatttgcagacttggcttcaagcaattctggggattttgcttttggttctaaagataaaaacttccagtgggccaatactggagcagctgtgtttggaacacagtcaacaagtaaaggagctgaagatgacgagggcagtgatgaagaagtagttcataatgaggatattcattttgaacccatagtctcactaccagaggtagaagtgaaatctggagaagaagatgaagaaattttattcaaagagagagccaaactttatagatgggatagagatgtcaatcagtggaaggagagaggtattggagatataaagattctttggcatacaatgaagaattattatcggatcctaatgagaagagaccaggtttttaaagtttgtgcaaaccatgttattaccaaagccatggaattaaaacctttaaatgtttcaaataatgctttagtgtggactgcctcagattatgctgatggagaagcaaaagtagaacagcttgcggtgagatttaaaacaaaagaaatgactgagtgttttaagagaaaatttgaagaatgtcaacaaaatatattgaaactccaaaatggacaagtatccctcgcagcagagttatcaaaggagaccaatcctgtggtattctttgatgtttgtgtggatggtgaacctctaggacggataattatggaattattttcaaatatcgttcctcaaactgctgagaacttcagagcattatgcactggagagaagggctttggtttcaagaactctatttttcaccgagtagttccagattttgtttgccaagggggagatatcaccaaacatgatggaacaggaggacagtccatttatggagataaatttgaagatgaaaactttaatgtgaagcacactggccctggcttgctctccatggccaatcggggccgggataccaacaattcacagttttttataacactgaagaaagcagaacatttggactttaaacatgtagtatttgggtttgttaaggatggcatggatactgtgagaaagatcgaatcgtttggttctcctaaagggtctgttagtcgaagaattagtatcacagaatgtggacagctataaaataatttcacagtgaattttatctatataaacagttgaattgaattgttacagacaatatgataattatgttcaccttttgaaaacagacatttccaatgtataaatgtaaaattgtagcttatagctgttgtcactttttaatgtgtgataattgatcttgcatggtgtgaaataaa

SEQ ID NO: 1049 - DNA, 2451 bp, Cricetulus griseus
ttttctttgctcctctgatgcatacagagaacacaaaagccttacaggaacagctagatacatgagcataaacacacatttaggaaaagagcagagtagaagagatgatttagaagctctaggccatatgttcatgtacttcctgagaggcagtcttccttggcaaggcttaaaggctgatacattaaaagagaggtatcagaaaattggagacacgaaacgagccacaccaatagaagtgttgtgtgaaaactttccagaaatggcaacgtaccttcgttatgtacggaggctggattttttgaaaagcctgactatgattacctaagaaagctttttactgatttgtttgatcgcaaaggatatatgtttgactatgaatacgactggattggtaaacagttgcctactccagtgggtgcagttcagcaagaccctgctctgtcatcgaacagagaagcacaccaacacagagataagatgcagcagtccaaacggagagttaaacacagatgaccccacggcaggacgatcaaacgccgcccatcacagccctacagaagtagaagtgatggatgaaaccaactgccaagaaagtattgaatatgtggtgctgcttgtttttacaaacgaaggaaaggaaaaccatacaacgtcacaaatgactggatgcagagagatcctggggagttacttacatgttcatacgctgtctcgtgattaaaatcatctctgtagtgaccacatatattttcaaggactcactcttgaaacagaaatgtcataccttcatatttcattttgtggttgtcttacattcatttcccctcctaatttaactttatggaagctttaaaattttgtcaaaatgtgagtgctttgcccatcattgaatggaatggaccagtgaagtggtattgatgaacacagttccagaggacatttttcagaagctcttctgttacagaaaacaatacaggtgtccaagtgtcaaataattgcacataatttgatttttatgtcttctataaaagcataatcaaacaggaattttcttcccaatggatagtacagcagagaaaatagttgcacaaatattaaaaacaactttcttgaaaagttactattttgtaacatctgcattgatttcagtatgacttatggtactgttattcatgaatcatattgacattctctctgtgaaatcaaggtacagtcactgcccataggtactgaggaaaaagcactatgggattggcaagcggtggttgtaaataaatcagaagaaaaatggggaaataggagcttggcttctgtgccactgtgtcaagtgcagctgcagaagtggcagaagcactaataatatttgtacaatgtcactctatgcttccagatgataatgtatgctagatagtgaaaaatgaatactggagaagtaatgtatgctggagtttgaaaactacaccaaggaaaggaaataaatgtgaaacttgttgcagtgtgtaaggctagagccccttgaagcctgctactgggtggccacatctcccagaagcagaaatctgaggatgtggcatacagtggtagctgtttgttgtgtagttctttgattaaagaaaagaaacatattcccagaaataaaccctgggtcactctgtcacccgctgtgcacattagtctcttgtattctctgtcgtaagtgtgaaacttcaggtatgcttatttatttttttgtctcaaagtaacatttaaaatatgtattaaaggaaatgaatccactttttttacttcattattgaatttacaggtatttaattgtattttgtaatttattttcttattagccaaaagttcaatgtgttgcttttgataaattgggcacccatatgaacacgacgaatcaggacattgtttatcattgtttttgattttgaagacatacactcagtctagaaagcattttgctgtgtaatttgatcagcagtttccattctatttgtatactgtcatgatgtctaaactgcaggagttaaatactgtagtttttggttttgtttgctttgagcaaggtagatggatgttttggccatttataatgtgaaaccacttctttacagtatttgaccaaatttgtgtgtctatgatatttgtaaatacatgcaatatctgtatttcttatcataagcctatttagttttattctcagtagggttttttggactgtacagtgtttatatgatctgaactccttatacataagaaggtgtgtatattaatccaattatggacttaaatattttaaaagtatgaatacccttatttgctgcaaaggccagtgtgtagacatttgctttttagcaatatttttaagtgctccatttttagtgtcagagaacaagtctttggcacacagactggtaataggtaatgcaggtatgttcaggttaagcc

SEQ ID NO: 1050 - DNA, 2451 bp, Cricetulus griseus
gcgccttcctcttgcatcgcggctgctgctcgctcctgttcccgcgcccgcttgcacatcctcctgctcgcgcggtcctgctaccgcccggtgctccccgccgccgctcaggccgagaggttttaaaatggaacatttcgatgcatcactcagtacctatttcagggcattactgggcccccgagatacaagggtaaaaggatggtttccttctggacaattacatacctacatttgtctgctctgtcatttacttactaattgtatggctgggaccaaaatacatgaagaataagcaggcattctcttgccggggaattctagtggtgtataaccttggactcaccttgctgtctctctatatgttctatgagttggtgacaggtgtgtgggaaggcaaatacaacttcttctgtcagggaacacgcagtgcaggagaatcagacatgaagatcattcgtgtcctctggtggtactacttctccaaactcatagaattcatggacaccttcttcttcatccttcgcaagaacaaccaccagatcacagtcctacatgtctaccaccacgcctccatgttgaacatctggtggtttgtgatgaactgggttccctgtggccactcttattttggtgcgacactcaacagcttcatccacgtcctcatgtactcgtattatggtctatcctctgtcccttccatgcgtccctacctctggtggaaaaagtacatcactcagggacagctggtccagtttgtgctaacaatcatccagacgagctgcggggtcatctggccatgcaccttccccctcgggtggttgtatttccagattggatacatgatctccctgattgctctcttcacaaacttctacattcagacttacaacaagaaaggagcctctcggaggaaagagcacctgaagggccaccagaacgggtccatgactgccatcaacgggcacaccaacaacttcgcttccctggaaaacagtgtgaagccaaggaagcagagaaaggattgacacggcagagccgcaccctccagaccacggcgtgtgattgtaagcacagtatgagttgtgccctgacgctcgtaacagctgctgtcactagtctggcctactgtagtgtgatttatgtaggaccttttcatcagttcaaaacccctagaatatgtatacagattatacaagtaggcatatacaatttctcacatttctgggctctcatcgacccccgcgctagactgtgggaagggaatgttattgtagtatatgacactgctgttgccttattagttataacacgataggtgctgaattgtggttcacaatgtaaaacactgtaatccaaactttttttttaaaactgtagaccatgcatgtgattgtaaatgtaaatttgtacaatgttgttaacagtagaaaaacacacatgccttaagacttaaaaaagaacagggcccaaagcttattagtgtcattagggtatgtttcaactttgtattcatttgtaatagctctgtttagaaaaatgaaatatgtgatttatgaaactagcgtgcgatgtgtaaacttcaagtgacttggagatgcgaaccctgacggcaccttcagttttataaagctggctttgaataagccggctcaaatctagtggaacagtcagtttaactttttaacagatcttatttttttattttgagtgccactattaatgtgtttaaagaggtggggaacgggtccaaagcagtcgtgagacacttgtgttcttggtcccccaaagtctagggcgactgtagggtgagcaggacacttcccacttctgaagtgcttagtgtttttatacaggagacaaaaaggccattctacttcccatcgtttggaaagaggagacttacctttcaggaagggtgactagatgtttatcacgtgacaggactgcttttcttaaaatcgtgtcttgtgcacctgaggcgtggtggtcatacagatgaggattcttttatgtgtcatttttaaagtgttggaagtttagcctttgactaccttctacattgaaaaaaaattgattgaaccactcatgacacatcttagatgattgacaatgtataaactaattgtgggtttgatatttatgtaaatatcagtttgccatgctttaattttgcacattcatattataaggagccaattggtcctaattagtcttgtgggttttctttttggaaggaattgcagcatctgtttacatttatcttatcaaatctagaatgtgtatatttgtgtgtcttcatcctaggtaccagtttgcaggtgtctttatgtatttcagtacaaaaactataacattcagtagtgtgctgtcaaagtgtgtcttagtctcatctggatataccacactgttaaataatgtctaacattaatcattaaaacatttttgatt

SEQ ID NO: 1051 - DNA, 2450 bp, Cricetulus griseus
  modified_base (2436)..(2436): a, c, t, g, unknown or other
gagggcctgtcatcgccagcgtccacgagagccaatacttgagtccaatgatgaccaacggggtagtacacgccaacttgtttggcattaaggactgggtgacgccctacaagatcgcggtcctggtcctgctgaacgagatgggccgcacgggagaaggcgccgtcagcctcgtggagcggcggaagctcaaccagctgctcctgccactgctgcagggcccagatattacactgtcaaagctgtacaagcttattgaagaatcgtgtcctcagctggcaaattcagtgcagatcagaatcaaactgatggctgaaggcgaattgaaggatatggaacaatttttgatgacctttcagattctttttctggaactgaaccagaggttcacaaaacaagtgtagtaggtctatttcttcgtcacatgatcttggcctatagtaagctttctttcagtcaagtgtttaagctgtacactgccctccagcaatacttccaaaacggggagaaaaagacggtggaagatgctgatatggatagagaggatgcagagagacagatggagaaagaggagcttgatgtgtctgtaagagaagaagaagtatcttgcagtggtcctctgtctcaaaagcaagcagaattttttctttctcagcaggctgctttgttgaagaatgatgagactaaagccctcaccccagcttccttgcagaaagaactgaacaacttgttgaaatttaatcctgactttgctgaagcgcattacctcagctacttaaacaacctccgtgttcaagatgtcttcagctcaacgcacagcctccttcattattttgaccgcctgattctcactggagccgagggcaaaagtaatggggacgagggctatggccggagcctgagatacgctgctctgaacctggctgctctgcactgccgcttcggtcactatcaacaggcagagctcgccctgcaggaggcaattaggattgcccaggagtccaacgatcacgtgtgtctgcagcactgtttgagctggctttatgtgctggggcagaagagagctgatagctatgttctgctggagcattctgtgaagaaagcagtacattttgggttaccgagagcttttgctgggaagacggccaacaaactgatggatgccctaaaggactccgacctcctgcactggaaacacagcctgtcagaacttatcgatatcagcattgcacagaaaacggccatctggaggctatacggccgcagcaccatggcactgcagcaagcccagatgttgctgagtatgaatagtctggagtcggtgaatgcgggcgtgcagcagaacaacaccgagtcctttgccgtcgctctctgccaccttgcagagctacacgcagaacagggctgttttgccgccgctgctgaggtattaaagcacttgagggaacgatttccacccaacagtcagcatgcccagttatggatgctgtgtgatcagaaaatacagtttgacagagcaatgaatgatggcaaattccatttggctgattcccttgttacaggaatcacagcacttaatggcatagaaggtgtatacagaaaagctgttgtaatgcaagctcagaaccaaatgactgaggctcacaagcttctgcagaagttgctgacatactgtcagaaactaaagaacacagagatggtgatcagcgtcctcctgtcggtggcagagctgtattggcggtcttcctccccgaccatcgccatgcctgtgctcctggaggctctggccctctccaaagaataccggttacagtacttggcctctgagactgtgctcaacttggcttatgcccagctcatcctgggaatcccagaacaggctttaacccttctccacatggccattgagcccatcctagccgatggggctatcctggataaaggccgtgcaatgttcttagtgtccaagtgccaagtggcttcagcagcttcctatgatcccgtgaagaaagcagaagctctggaggctgcaatcgagaacctcaatgaagccaagaactactttgcaaaggtcgactgtagagagcgaatcagggatgttgcttacttccaggccagactgtaccatgccctgggcaagacccaggagaggaaccggtgtgccatgatcttccggcagctgcatcaggaattgccctcccatggggtgcccttgattaaccatctctagaaaagactcccttctggctgttgtgacatgttatcttgtcaataaacttagaggctggagagatggctcagcagtgaagagcactaacggctcttccagaggacccaggttcaattcccagctcccacatggcagctcacaactgtctgtaactcctgttccaggggatctggcaccctcacacagacatacatacaagcaaaacnccaatgcaaataaa

SEQ ID NO: 1052 - DNA, 2449 bp, Cricetulus griseus
cagtcagctccagcaggcaccactgtccagcagcaccaccagcacaatctctgtaacaacaacctcatcccggcccccaactggcagggtctttatccccaccatcagagaaagaaatgcggtgatgttcaataatgacttgatggcagatgtacattttgtggttgggccaccaggtgggactcagcggttgccaggacacaaatatgtcttagctgttgggatgttgtgctggatggcaatgaactcagctactttggacaggaaggcatgacggaagttcagtgtggcaaggtgactgtccagtttcagtgctcctcagacagcaccaacggcactggggtacagggggggcagaatcccccgaactcatattctatgcttgaaccttctgttccttatacatcatgagacatccacctgggccctccttgcctgacgcttagctcgtctccagatatgtgatcagcacaggtaatttgtaatgaatgaagcagcggtaggcagtttctaatgtctttgtaaccttttaattatgtacaggctaaaatgacaacattccgcttttaactatatgcttagaagagccaagttcttactcaggcttcgtggttttagagttgcgtctgtatgcctagggagatcatgtgtgttgattctgaacaagtttctggactgctagaacctggcctctggccatcttaaagtgccaatatatgcctgcagggtttttggtaaaaatggttcggagtgacactgggttataccaagtattcacctcatcagcatcacatgcagctcttacttgtccatggtagcataagcaaagagggaaaagctcacagacaactttctccttccatgatggtttgtgctggcttagtgcctgtgaccctggtagtgtccaatgtggtcacttgaaactgaaatgtccatgtgtttctgagcagcttttctgctcagtgtgatcctgagatggctccccgccacccagagtgtggtccctggccgcctccttctcctgctctataagccaaagtaaagttggcttccctggagcaggggctagtcctggggtgtgtgtgtgtgtctgcgcagtatgcgcatgaaagtgtgcttgccaactcaggagctgcctcctcccagcctggctagtggtgggtgtgtcaaaaagccttcccaccccctactggtgccagcaaggccccatgagtgcttccactcactgtgcttctgggccacttcttcccctacagagaagggcttgtggcctttggccagcatccctggtggaggagagcactggattatgggaactgttttaatcattttgccattacttacatctgttagcataggtgactgaaagctattattcatgacaactttacaaaataatctttcaattgcttcctgataaaggagatgacaggttgtagttttggcaaaacatcaataaaataaaggtacattgtcaattaaaattacttctacaaaggcttttgttttaaaattatggttaaacatttcagtaactctgaccagaaggcacttactttaaagccagaggagaagatattttgtttaacactgcttgagtcctgtcagatagttgggctgggtgtgataaccttcaaggggcagcatccaccccaccctcactcttttattgtgacttagctgccctccctgtggctaggcaagtacagttcactgaggatgagagaacatgactttatatttattattattatgtttccaaaaaagacacatccacttactgattagcctccgccaagaactgtgggtaagattggaaagctgtacctaaaacaagaaattttgtgttctgaacctattctcttaactgcattctcagcaaaatgaaagataatgcacttgctttggttttctttgataattttgaactttgtagtttgtaagaatagaaaccattgttctgacagggctggcagctgtagtgtataaacacaactttattaagcagaaaacgctgtagatgcttttcccagcataccttgcagtcttcatcattgttcatactggggataagggtaactaggctagcagttctaatgcagcattctttaatcatatcgtaagatagtatttaagtaaatggtctcatttctacataattattgcactgaactgtctttttttaaaggtgtttaaataagctcagctaattcagtacactgtaggcaactgtgcatcagtgtgcttgactttagcagcttacagcattatttatgaaggaaaaatataaatatgaagtacctcatgttgaatgttattgtactgtatttttaatgtaacagtgcagatcttgttagacacatgaatgtgtataatcatgttaaatgcaaataaaataaaactaggttcataaaaaaaaaaaaaaaaaaaaaaaaaaaaaaaaaaaaaa

SEQ ID NO: 1053 - DNA, 2449 bp, Cricetulus griseus
  modified_base (199)..(199): a, c, t, g, unknown or other
cagacactgggggaggaagaggccacccagcatgggcctgacttgggagcagccctcagtgacaaggctctccaggacaggactggtggaaggtcttcggaaacgactgctgcctgcctggtgtgcccccctggcccatgggctcagcctgctcttggtagcagtggctgttgcggtctcggggtggattggtgccagnttcccccccagcgtgagtgtcatgtggcttctctcaagcagctccagcttcctggcctcatttcttggctgggagccccttaaggtcctgctggaagcccttacttctcactgatagccaaacggctacatcctgatgaagatgacactctggtagaaagcccagctgtaacacctgtaagtgacaggagctaggcctgactctggaggagagccgtgcacggctgaccttcctgcagctatacaactggcttgacagcaggagccgcgcagtgtttgtggaactcacccgctacagccctgctgtggggctacacgctgctgttactctgcgccttgagttccctgtagcaggccactggctgccttcagtgtccgcccgtttgcattacagcgactcagcactggcctgtcactgccactactcacctcggtgtgcttgcttgcgccagtggtcagttttggcaagacattgtaccgggccttgccagagctcatgggagccaccttgggcctggtggtgcttggtgtggcctatgctcagatggcttgttctgcttatttcctctggtgctgacacactccacaacatggcccgagccttcctggtgctgtgtcctggggccagggtccctaccctgtgcccttctgagtcctgttacctgacccctctgctatgtgtgggactttgggctctgcggatgtggggtgccctaaggttaggggctgtcctcctgcgatggcggtaccatgccctgcgtggggagctctaccgcccagcctgggagccccaagactacgagatggtagagctttttctgcgtagacttcggctctggatgggcttcagcaaggttaaggagttccgccacaaagtccggtttgaaggaatggaaccactgccttcccgctcatccaggggctccaagtcatccccagttgaacctccacccagcgcaggctcagatgcttcacacccttccacctcatccagccagccagatgggctgagcgcaggcttgggtcgctcggctttgaggctggaaccagagccctcacgcctgcatgctgtgtttgaaaccctgcttgtccaatttgaccggctcaatcaggccacagaggacgtctaccagctggaacaacaacttcagagccttcgaggccatggacacagcagaccttctctcttaccttcccctggatgcttcccaggccctcagacagctctgcccagccaccttgctagggccagtcaggggctagaccagacagtaggccccagcagggcatccctgcggtctaacaacaaggtccatcccagcagcacttaggccctagccattgcctctcctggaaaggcctatgatttcacactggcttctctgagtcagagccagggtggacaccactcagtattaccttctgctaccctcaaggttgagccaggcagaatggctgcatacaagttccttagggtacaggtattatggccttacctgttttgcctatgggcttcagcactttaaaaaggctgtgtagccagccaggacctaggtcccctccccacaggaggatatagcagtattggaccaagtgagtacccagcctccaagatgctaatttattcccaagtcctcaggtacagcaggctgtgcccagctctacccctaggcggccatctccccttgctaaagatctaagcttgagggagggctaagctacacttccctgtccatcccctaagttattacctctctgactgtttgtgcagcttacttgcctttagccgccatccctttgtatgtccaccatcaataatttatatggggttaaaatgtatatatttttgtatgtcactatttttcacttgggctgaagggcctagtggctgaagttacccatggtaggggtgcaggggaagctgcagccatttactggatccgagtctggccttgggcaggtgctggatggtattgggaccaccgtggcctaattttcctcccttgtctggggccaggcagtacccagatctgctggtatcaggtctgagcaagaccaggactactgtgggttgaaagatgccaagaagttattggacaagacccccattggggctggtccccagggtggggtaagagaatgtgtgtgacagcacctgcctgcttctgtgggctcagttgcagctctagccttgatcctgccccagccccacacagacaagacaaagtcaaataaagaagctgtctgactg

SEQ ID NO: 1054 - DNA, 2449 bp, Cricetulus griseus
gcgctgggctgctgggccgcgctccttcctgctcctccgccccggcgcccttggacatggtggcccccggctcgctgggcagccggctgggcgcggtgttcccgttcctgctggtcctggtggacctgcagtacgaaggtgctgaatgtggagtgaacgcagatgtggagaagcatcttgaattggggaagaaattactggcagctggacagctggctgatgctctctctcagttccatgctgcagtagatggtgatcctgacaactacattgcatactatcgcagagctactgtcttcttagccatggggaaatccaaagccgcactgcccgacttaactaaagtgattgaactgaagatggatttcactgcagcaaggttacagagaggccacttactactcaaacaagggaaacttgatgaagctgaagaggatttcaagagagtgctcaagtctaatccaagtgaaaatgaagagaaggaagcgcagtctcagcttgtcaagtcagatgagatgcagcgtttgcgctcacaagcccttgatgccttcgaaagtgccgactacagcgctgctataagcttccttgatatgattttggaggtttgtgtttgggatgcagagttgcgtgaacttcgagctgactgtttcatgaaggaaggagaacccaggaaagccatcagcgacttaaaggctgctgcaaagctgaagagcggtaacaccgaggcgttttacagaatcagcacgctctactatcagctaggagaccatgagttatccctcagcgaagtccgtgaatgtctgaaacttgaccaggatcacaaaaggtgttttgcacactataagcaagttaagaaacttaataagctgatcgagtcagctgaagagctgatcagagagggcagatacacagatgcaaccagcaaatacgaatctgtcatgaaaacagagcccagtgttgctgagtataccgtgcgctccaaagagagaatttgtcattgcttctccaaggatgagaaacctgttgaagccattagaatatgttctgaagttttacagatggagcccgacaatgtgaacgctctgaaagaccgagcagaggcctatttaatagaggaaatgtatgacgaagccattcaggattatgaagctgctcaggaacacaacgaaaatgaccagcagattcgggaaggtttagagaaagcccagcggttactgaaacagtcacagaaacgagactattataaaatcttgggagtaaaaagaaatgccaaaaaacaagaaatcattaaagcataccgaaaattagcacttcagtggcatccagacaatttccagaatgaagaagaaaagaaaaaggcagagaaaaagttcattgacatagcagctgctaaagaagtcctctcagacccagaaatgagaaagaagtttgatgatggagaagatcctcttgacgcagagagtcaacagggaggcggcggcaaccccttccacagaagctggaactcatggcaaggcttcaatcccttcagctcaggcgggccgtttcgattcaaattccacttcaattaaagcagccgtttcaccactcctctcctttattattgtcattttaacattaaaaacaaaaactgtttgcaattctgatacaaacaaaatttaagaaatgtactgtcagggtttgtatagtggatattttttgccctaaaaatctgttgctaaatcaagaacatagatttatgaactactcatactgcattgaaaatctaaagaattacattactgccattactgcagaaagttttagaaagttttctcttcgttcttgaaacattgtgaaatattttaagtataaaggtctaatatattgtttttatgaaattaagcattttagttaattgtgggaggcatgaatgtagcatccaagcacaaatcattttcttaacctatagtcatatccttgagcatactgaagaaaaaaaaaattaaaatggaaagaaacaataaaatcacatagttgagttgggcaaaacatttacatgctctttgcctgtacttaggagcctatttcttaccaaccagatcatatcattccttttctgttagtggcagaattcattctgtgatttcaaatgatgtttggagggggagatgattctttaacatgatctcatttgctgaatgatttaagagtaaaattagccactgcgtggctttgtgtacagtaacaacagggttatcgcacttgtctgtggatgggatattttcctgtgcagaggatccagggcacagggaaaaatcagagatgtggataagttattaatcttacgtttatatgtgtcttaaatgggacagacctaacaatccatctctaaatttagttttaaataaaaaaggaattaagattatttcaactgggactcatacatgtctatgaatatgggcaatat

SEQ ID NO: 1055 - DNA, 2449 bp, Cricetulus griseus
  modified_base (2395)..(2395): a, c, t, g, unknown or other
gccagtggaagtagttcaattccaccctacttcagatggtgttttggtgagcacagctggcagagctgtgaaaatctgggatgcagccaagcagcagcccctgacagagctggaggcccacaaggacttggtgcagagtgctgtttggagccggaatggagccctggtgggcacaacatgcaaggacaagcagctacagatctttgatcccagagcaagaaccaaagcctctcagagcacacaggcccatgagaacagcagagaccacccggctggcatggacaggcattcaggagcatcttgtgtccacaggattcaaccagatgcgtgaaagagaagtgaaactctgggacacccgccacttcagcagcgccctggcctccatcaccagcggcattggtaccagccccagtcagcggtcacttcagagtctgctgggccccagttctaaattccgccatgctcagggcaccatcctccaccgagacagccatatcaccaaccttaagggactcaaccacacgacacctggtgaaagcgatggcttctgtgctaatcggctgcatgtggctgtacccctgctcagcagtggcgggcaggtagctgtgcttgagctgcagaagccaggccgcctgcctgacacagcattgcccacactgcagaatgggacagcggtaatggatctggcctggggacccctttgacccacaccgccttgctgtggctggggaggatgccaaggatccgactatggcgggtgccccctggaggcctcaagaatgttctcaccacccctgagactgtgctcacaggccacacagaaaagatctactctctgcgattccacccactggctgctgacatactggcttcctcttcctatgacctaaccgttcgcatctgggaccttcaggctggagctgagcagctgaagcttcagggccatcaggaccagatctttagcttggcctggagtccagatgggcagcaactagcaactgtgtgcaaggatgggcacgtacgggtctatgaaccccggagcagccctgtacccctacaggaaggcccaggacctgaaggttgccgtggagcccgcattgtgtgggtgtgtgatggtcgttgtctgctggtatctggctttgacagccgaagtgaacgtcagctgcagttgtacatagctgatgccctggctgacggcccctcagcagtgctgggccttgatgtagctccttccaccttgcttccaagctatgaccctgatactggcctggtgcttctcactggcaagggtgatacccgtgtgttcttatatgaggtgctcccagaggcccctttcttcttggagtgcaacagcttcacgtcatctgatcctcataagggctttgtccttctgcccaagactgagtgtgacatccgggaagtggagtttgcccgatgccttcgactacgccaaacctccctggagcctattgcattccggctgcctcgagtcaggaaagagttcttccaggatgatgtgttcccggacacagctgtgagctgggagccagtactcaatgccaaggcctggctggggggtgctaatggacagccccagctactgagtttacagccccctggcatgaccccagtgagccaagcccctcgagaggcccctgcccggagagccccatcctcagcacagtacttggaagagaagtctgaccaacagaaaaaagaagagctgctcagtgccatggtggcaaagctggggaatcgagaagaccctttgccccaggactcttttgaaggggtggatgaagacgagtgggactagtctgcacaccaggcacccgtggcctcaactgcctctgccaccttctagaaccacctgctgcccttccacaccttatgtctctgcaaactggacagcgctgctgtggccttggcaggcacacccagcccaggagccctgggtttcctgaagacctcaggcactctcactgctgctggacccactgcaactccagggactttgtgctcctctgccctctgtggccagctgtttctcttcagctgcctgttagcatatgacaccagtgggggggaagtagatgccagtagcgtgtctctgggccaaccctggatgccttgtctctcctagtctttctgctggcttcatctaacatcttcagttactacatgccaacctatcttgcctactgccccagctccagtcaaggacattgggggctggtccccaccaggctgttgggagcagctttatcctcaggggcctgggatcattttccctgcttccttggcttgaggccaggagaaagggtctcatggagctaacagcctcattacagtggtgtgggccccaacaacaaccagcctacacatgctctgggtntttcagcaattaaacttttctaagctaacaaaaaaaaaaaaaaaaagaaaaaaa

SEQ ID NO: 1056 - DNA, 2449 bp, Cricetulus griseus
agattcttcttaattctctgaggactctgggaaacaggatggctgcaaataaacccaaaggtcagaattctttggccttacacaaagtcatcatggtgggcagtggtggtgtgggcaagtctgccctgactctacagttcatgtatgatgagtttgtagaggactatgaacctaccaaagcagacagctacaggaagaaggtagtgctggatggggaggaggtgcagatcgacatcttagatacagctgggcaggaggactacgctgcaattagggacaactatttccgaagtggggagggttcctctgtgtcttctctatcacagagatggaatcctttgcagccacagctgacttcagggagcagattttaagagtaaagagaagatgaagaatgttccatttctcctggttggtaaacaaatcagatttggaagataaaaggcaggtttctgtagaagagacaaaaaacagagctgaccagtggaatgttaactacgtggagacatctgctaaaactcgagccaatgttgacaaggtattttttgatttaatgagggaaattcgagccagaaagatggaagacagcaaagaaaagaatggaaaaaagaagaggaaaagtttagccaagagaatcagagaaagatgctgcattttataatcaaagcccaaactcctttcttatcctgaccatactaataaatgtaatttataagcattgccattgaaggctcaattgactgaaattactctaacatttggaaaattgttatgtatcactaaaagcatgaattggaactgcactggaagtcaaattcacttaaaaaagaaattgtgtggcttcacaagaagcagagctcaacttatttcataattgcctacatttatcacagtcctgaatgtagcgtgtaagcttgttttgggggggaggggggatctttcttgaactgttaatcaagaggtgaagatggggtggggtgggaggaacggccacttcctctggtgtttattataaagcttaaattttatattattttaaaatgtcttggtcttctactgccttgataaatgacaattgtgaacatgttaactgtaccactttttaaactgttgttatgcaaatctagaagaagaagttactggcatggttgttgcatatagtaaaactgagagtaattcatctgtgaatctgcatattaattacctggtaattaacttagaaaaatggtgtgaacttatacatggacatttttgaatatgccttaatttagaaactgaaaataatccagttacatcattctgggtgtgttctcactagcacttggggccactcactgcccacatgactggtaacaaggttttatcttgccaggcagtgtaaagctacaaggaagattccttagaaatatgtgtctgctaggagtctgaccaaattaaagatgtgtgccatactctggttcttagagttccagagctccttcattggttttaatgaactataaggtagttaaagatgaagggccagcatatgtttatacaatgattttagattatggatgtgaataccaattaagtttgagtgaatgctccttttatgtaagatgctggtccccagtaatcactttctgcaagtgattcacttttaagtatttaatctcctgggagcagggcatagggaagaccatcaggaaagctaatgtagtttgcactaggacacttgaggaaagatgcttgccacctgtcagttctaaatgtgtactcatgagggtacagtttgggcattagaaggagtctttgtaatctctttatgttcacaatgagtactgtacctgtatttcctaaggttaacatgaagcagttgaacatgtttggcacacattgaccaaatgtcagactgtgaggtttctgctgcaagaattcaagcatgctgttaggagcgtaatttcaatgggaagtaaaccactattagatttttcttttcctctgtggggctaagacacttgattaaacagtttttcttgatgcacagtcctaatctcatcaggtcaaatcgatgctcaggcattccaggaaacaagtgtgtacatgaagttaccagagacaggcgttcaggaactctgctgtctagatactacattgagcatatcataaatatttgtccttaaagggtttgatttaatattttcacagactaggccatttgcaaaattagagttccctgtgtaaccccagccagcaggcccagcatggctgcgtgcattcgttgcagtctgttgaaccagggtcctaaccactaacattgcaatttgctttgagacatttccctcccctgggtaccaggtgctatgaagccagctgacagagatgcatcacatgtcttaggctgatgccactacccggttcatttatttgcaatttgagccatttaaagaccaataaaattcctttt

SEQ ID NO: 1057 - DNA, 2448 bp, Cricetulus griseus
atgaagaacgagaaatgagacaaaagaagctggaaaaggtgatggaagaagaaggcctgaaagatgaggagaaacgactcaggagatcagcacatgctcggaaggaaacggagtttcttcggttaaagagaacaaggcttggactggaagtattttgaggaaaaaagatactctgacagaagaggagactcagttttacatagcagaaacagtattagccatagattccattcaccagctgggattcatccatagagacatcaagccagacaaccttctcttggacagcaagggccatgtgaaactctctgattttggcctttgcacaggcctgaaaaaaagcacacaggacagagttttataggaacctgaaccacagcctccccagtgatttcactttccagaatatgaattccaaaaggaaagcagagacctaggaaaagaaacagacgccagttagccttctctacagtgggaactcctgattacattgctcctgaggtcttcatgcagaccgggtacaacaagctctgtgattggtggtcactcggggtgatcatgtatgagatgcttattggctacccacctttctgctctgagaccccgcaagagacatataagaaggtgatgaactggaaggaaactttgacctttccccggaagttcccatctccgagaaagccaagggccttgattctgaggttctgctgtgagtgggaacgatagagttggagcctctggagttgaggaaataaaagtaaccctttctttgaaggtgttgactgggaacatatcagggagagaccggctgcgatatctattgaaatcaagagcatcgatgatacctccaacttcgatgaattcccagagtcggatattcttaaacccacagtgacaagtaatcaccctgagagtgactacaagaacaaggactgggtcttcatcaattacacctacaagcgctttgaggggctgacggccaggggggccatcccttcctacatgaaggcagcaaagtaagactgtgctgagggccctaactggccagcggtccctgtgcagcactgcagctctcctctcacactcttgaaagacttccaagaagtttgtagaacccgttaacacgcatagtcaagtctctgcaatgtgattgtaagtggctgtgcctccatactgcaccaggaaactgataggacaaagacaagcatttctcctcggccataagcagctgtcttgcttctctagaagccctacgagccagtttgctaggtgtttcaaagagaatttgaatctcctgagttcctcagaatgaaggggggaaagagccatcgcccgccattactgagattatagacactgagtaccagccaatgcctgtgttgtggtgaaatgccacctgccaagcccaccaagtatttcttttctctttatagctgaaaaatctgtagttaaagaaaacgcaataatgaaagtctgtgtgaacacccaacagtgtggctgaaggaacggcctccgttctacaggtgtgggtgttttctccccatacctcagcctgcccgagtgactttccacagccttcattcatggtgcactttacttatggtactagggcaaagaccccaaacccactgacctatctccccatcccaaagcctcgtgctgctctcctgttttggtagggaggcactagtgtgaccctttgttgctgttcgaaagcccacacagccactgggcactgccaaggagctctggaccatgtggcaactctcattttccagcctccgtggaagtcaaggcagaccagcccactgatgagtagtcctcagctcacacccaactcatggtgcaattgtgtttgtcttgctatttcccgatcccaactttaagtagccattttgccttggaatcatgattacaaatttttcctttgcagatgccttcctgggggatacttgcccctgcacccaaaagggttgcctgcaactagggctgccttggctctgctgtggcattctgtcatgagaaacactgaatttagcacaaagtgccttgtctgccacagctgctgccacctttggaaaatgtttgctgcgttagaaaatgtggaggttctatgttaatgtaagcaaaatgactttggtttcatgtcttaggaaaagaaaacagaatgttaggaagtcttgactctgggtaagggcactggcggtgttagctccttgagctgtcatttagagcctggtgcagaggaggtagaagggcctgtgggtggctttgagctatgtattaccaaacagtttggggtcctgaaccctgtgtgtttgcaggagtgtgtgagcatggatggagaagtcagagtagtggtagacccgttgtggtggggatgcttcgttctgggaaatgcccacatttttaactattcaacttttgaataaactgtgaaaacaataa

SEQ ID NO: 1058 - DNA, 2448 bp, Cricetulus griseus
atcgagacccagagcagcagttcggaggagatagtgcccagccccccctcgccaccacctctgccccgcatctacaagccttgcttcgtctgtcaggacaagtcatcgggctaccactatggggtcagcggagggctgcaagggcttcttccgacgtagcatccaaaagaacatggtgtatacttgtcaccgggacaagaactgtatcatcaacaaggtgacccggaaccgctgccagtactgccggctgcagaaatgcttcgaagtgggcatgtccaaggagtcggtgcgaaacgatcgaaacaaaaagaagaaagaagctcctaagcctgagtgctcagagagctacacgctgacgcccgaggtcggggagcttattgagaaggttcgcaaagcgcaccaggagaccttcccggccctctgccagctgggcaagtacactacgaacaacagctcagaacaacgagtctctctggacattgacctctgggacaagttcagtgaactctccaccaagtgcatcattaagactgtggagttcgccaaacagcttcccggcttcaccaccctcaccattgctgaccagatcaccctcctcaaggctgcctgcctggatatcctgattctgcgaatctgcacgcggtacacgcctgaacaagacacaatgaccttctcagacgggctgaccctcaaccggacgcagatgcacaacgctggctttggccccctcaccgacttagtctttgccttcgccaaccagctgctgcccctggagatggacgatgcagagactggattgctcagtgccatctgcctcatctgtggagaccgccaggacctggagcagccagacaaggtggacatgctgcaggagccgctgctggaggcgctgaaggtctatgtccggaaacggaggcccagtcgtccccacatgttccccaagatgctgatgaagatcacggatcttcggagcatcagcgccaagggagccgagcgagtgatcacactgaagatggagatccctggctccatgccaccacttatccaggaaatgctggagaactctgagggcttggacactctaagcggacagtcagggggcggaggaacaagagatgggggtggcttggcgccccctccgggtagctgtagccccagcctcagccccagttcccacagaagtagccccgcaacccagtccccgtgacctccaaatggacagccttcacccctgccctggctttctctgccttcctactggccacgtgacccatcagccctgccccgcctcgtcctcccagacagaactgggaaccttctgccgggacaggagggaggaggcagtgactctgtggacagaggcctggacccaagatggactgccctcttccggcagcctgggctggcatcaggccaagcgttgagccatgtgaggacctgggcctgagccctacgcaccttgccacgtcttcatcaccagcaaatgccgggacctggctccctgtcctccgaactcaagccatcgctccccagttggggaacctacccccggcttcagatggggacgacgggggtggggtggggggtgtccagggtgggggagaccccctggtacatatcctgcgtaccaactcccagatattaattctcgctggttttgttttattttaatttttttgttgtttgatatttttttattgggggagctggatctagagcttgaaggggtgggtcctggggatgggcagagggctctgaagggctcccctctcccttgtcccagcggatgctcccgcccccagcccgtcctcctcagttttctctaatactgtgaaatactaactttccaaggccaccgccttcgtcctcccttatgcaggaaacggcttcccttctcctctctgtccagccattgggcgtgggcgtcttgggcagctacccctgggaggaggggatcctggcttttggctcctgcctctgcccaccaagaagtaggggaagggtaaagctagggccccttggatgggtagggtgatatcatcactgcccatcagagctcacttcatccaagccccagccccactgtgaaggggctggctaaggggtccaagttaccccagcccccagcctcgtagccaccagcaccccaaggggcccttcaacacacacacacacacacacacacacacacacacacacacacacacacacacacttcctacatttccctggcctatccccaacccctctcctgtgccccctccttgccccgcaggacgggactccagggggttccctccctccccctaaacccctgggctgggggagcaggttttaccctgccctcctgcctggatagggtctcaccccggagcccactggtgtacctgttactgctgggtttccactgagatctactggagaaagaataaagttctatttattcta

SEQ ID NO: 1059 - DNA, 2448 bp, Cricetulus griseus
gtcacagacataaaagagaaactgaagctctctaaaaaggtgtggtcagccttgccctacaccatctgcaaggatgaaggcgtgacagcgggcacgtccaatgaggaggagtgctggaacggccacagcaaagccagatattttgcctgagatcatgaatgatgggctgaccaaccaaatcaacaaccctgaggtggaggttgacatcacccggccggatactttcatcagacagcagatcatggctctccgggtgatgaccaacaaactgaagaatgcatacaacggcaatgacgtcaacttccaagacacaagtgatgagtccagcggctcaggcagccaaagagtactgggtgccagaggatctgcttcttaccttctgctgtctgtggggaccttgtttattccagagagaattcttactcaaacctttcgtaccaagagattttttcttacagtcatttgcttttatgctgaaaattaaaggaatttcatgttgtgatcttcttcttcttcttctgcccaataatcatggtacaatatgaattaaatcaactttgattctctaggatatttgagtaataatttatgttttggctctaagctccaactttctttttaaaatatttctgcatcatcttctataacacaaatcaagactcttatttttcctgtgcttttgccccaaatggttttttgaatgtgtatgacaacacattacattaatgaatgcgaacccatgttctgagcacactaatcaaacagacaatatagaaatgcctgcttcctttgtttcagcacctgtattctcaagggtcttcttattgacaagatacagtgatgcgtacgagccaggcagagggttgaaatgaagaccagccaaggaaatcacaccgttagtcaccctgcatggacatggtcaaattactatccacttgcgcttcctggtctttgtcatcatccagcatatggattttagactaacttgacgttaagatgttttgttttgtttttcctgctccctaagccttctcattgagtcaccccttctcagtactgcagaatcctcctcccaaattaattttctcctttcagcatcgtgatagggatgtgtttgtgacacattgtcattcatagcctgtgctcctttgtgatgacgtccctaaattctgtgatcacatcacgacttgtgttatgagtagagaggaatgggaccccaaaattggacactagaaattggtgggtggtgctcataactgaaaacacttagcttattgaagtgcctctatttacatgttctttagttataatatgtatttttctaacagaaatacacgtctgtaattgatgtttattatactttgtatatgttacaacaaaggctaaatggaggctaatgtcttcagcagagaagaatggactgtaaatttatgaataagagcactgtggtcctgcatggacagctaggagacagccttctaccgttgcattgaagaccaagttggcgctttgattacagccctcagactggagcactggaagtctgactcccttaccttggttttccaaggaggaaggtgacatgagtcacctgcttcaaatgtaagggatagaaactactttgtctacactaagaaacattctttaagtcaaacacattgaaaatattattggatgcagaacaaccacaagatttaagttccatcccctgctacagacattagccttccttgattcttcttgccattacatacatattttggctaccagactaagcaccaactgaaatcctcaaggaggaataaaacttggtaaaatcctgacttgtgatctgtttcttgcctttttctgcaaggctggttaccaggtagtaactttaagttccccatgttaatggatgcaggatttgacttctccaaacacttgccgatactcaagctccttttacttgattcacaatctctagcatatttaaatttaaaacaacatagccttgcaaccagaagaggaaagcagtccatatcgtctaaatcgacaatgtgttcctccttggtagagatatcagccagtgcttagttttaggccaacttatacaaatagagtactgatttgtatgcattctggagacttgctatgtcatgttctgctgcagcccagactcagcgtagcatggagcacctgggacttcactgacagtggggtggatactggagtctttggtattgcctcgtaatgagggacttcatgagcagcgcctgatgaaggcaccacagtgcagtctctctgtgtgcatatacagaacacatatgcaggataaatgtgtgcaccaatcaaacctaaaattttatgtgactgtcaaatgactattatttgggttaagatttttcatttctgatttggatagaaaattgctattaatcttgtattaaaatagtttttaaaaatcta

SEQ ID NO: 1060 - DNA, 2448 bp, Cricetulus griseus
agccacgtgtgcatatgggaaccacaactctttgtctcctgtagacggaaatgataagaatccagctgcttcttatctgaagaattttccgctttatagacaggactataaatacccctaaaaccaaaaaccttcaaatgaaattacaagagagtatatacctaaaattggaatgactacttacaaaatagtgccccccaaatccctggaaatagtgaaagattgggaatcagaaacagtggggaataaagatgaccaaaagatgcatgctgaagggcagaagcatatgcttgggaatatggaacaaacagccatgcagacagaaacccttgttacttccaaaggctcacaggagcctcagcctgatcttaagccaaagccaggcttaggcacagagcagcatttgcacaggactctgagcgttggttccgagatgaagcctccaaaacctcccagaatgacgatggacactggtggcattccttttgcaccaaaagaacagattctttctcccttaagtgaatggactcattctgctcagctgcccagtctttcaaaactgatggtgacactaccatccaaaagcctgctgagatctctcttcctcctgtagctcccaagcctgtggctcttcctgctgtgacctctcctccccttgtagctcccaagcctatggctcttcctgctgagacctctcctccccctgtagctcccaagcctatggctcttcctgctgagacctctcctccccctgtagctcccaagcctatggctcttcctgctgagacctctcctccccctgtagcatccaagcctgtggctcttcctggtagtcagggagcatcatcactaaacctgaagaccttgaaaactttcggggccccacgaccatactccagttctggcccctcaccctttgcccttgctgtggtaaaaaggtcacagtcgttcagtaagacacgtccagagtccagtgagggcttctccgcccagcctgcagacacggagggtgaaaagacatatgcagtaaataaatctgccgtggttgcccaacctgatgataatgatgataatgataagcataacaaacctgtacagaatgaacaaagttctcacatgctgactccagctgacggcccatcgttcacccttaagagacagagttctttaacattccaaagctctgacccagagcaggtccaccagagcttgctgaccgcaatccgttctggagaggctgcctccaagttaaagagagttattgttccatcaaatacaatatctgtgaatgggaagtcaggaatcagccacaccatgtcctctgatgcccaggacagtcgcttgacacacttcactgaccagatttctgtctacaaggaatattggcaaatatatattcagatgtacattaatatataaatctgttcaacaataagcatttgtgttaatggatttaataccaaaagaaaaagaactagaatttataatttatataatgtttgggcttttttgtcataactattgctgctttagaactttaaacaaggtataaatgacttttctttccccatggtgaataatcactgcttaatgattgttttcttttatttatggacatactgtgtaccatgcaacaaaggtataaattgagatttatggacatattgtgtgacagagaaataggcaagcacaaactaacatttactgcctcagcgttaggctgtaattagaaacataaattataataaagcctttatgctgaaagatatggaagactagtatataaataatgctcagttattattattgaagaaccacttagtgttgagacttattttgtgcattctttaattacaagtgagttacagatctataggaaataataaagtatttttaaatataatactttaacctttagaagttaaattgcacaaggagactttaagatgttttctgtatataattatgatgttacacagatattacatattttctaatgccagaagtcttaaaacattcctgtgaaaatgttgatatattatgacagatatttcacatttgttatataaggagaataggggctggttgatgtccacatttaatactttaaagactagttagaagtttccaaaatcctgatttaattaaaataaaatgctaagctagtcatttatgtagctcacatgctaatcgtctaaataataatatatattttcctgaaagccaaactggttgaaggaaacaatacttgatgtgttggcttacagtgattctagggtctagaacatcttggtgtcatgaatttccttaagaatttaattgttcctttattccagaaactgtccaaacatcctgacactgttttgactcctaataaaactactgggctatatgccattttgacaaacgtgaatttttttttccatttaataaaagcaaagttatata

SEQ ID NO: 1061 - DNA, 2447 bp, Cricetulus griseus
cgccgatatcctgcggagcgagtttcccagaaattgacgggcaggtcttcgactacgtgaccggcgtcttgcatagcggcagcgcggacttcgagtctgtggatgacctggtggaagctgtgggggaactattgcaagaagtgtccggggacagcaaagatgacgcgggcatcagggctgtctgtcagcgcatgtacaacactctacgcctgtagggctgagccacagaaccagggaaacagccaggtgctactggacgcccccatccagttgtcaaagataatggaaagctacgactgtgacaccaaacttccaggactgctaaagagggaacagtcctcgacagtgaatgcgaagaaactagagaaggctgaagctcgactgaaggcaaagcaggaaaagcgttcagagaaggaaaccctgaagaccagcagccctctagtcctggaggaggcctcagctagccaggcaggcagcagaaaagagagccgtttagagtcatctggcaagaacaagtcctatgatgtgcgaattgagaacttcgatgtgtcttttggtgacagggtactgttggctggagcagatgtgaacctggcctggggccgacgctatggactggtgggacgcaatggtctggggaagacgacgttgctaaagatgctggccacccggagcctgcgggttccagcccatatttctctgctgcatgtggagcaggaggttgctggagatgatacccctgctctgcagagcgtgctggagagtgacacagtccgggaggacctgctacggcaggagcgggagctcagtgtcaagattgctgctggcagggcaggagggctcagaagctgcacagttggcagaaatctataccaaactggaggagattgaggctgataaagcacctgccagagcatcagtcattctcgcagggcttggttttacccctaaaatgcagcagcagcctacgagggagttctctggtggctggaggatgagattggccttagcccgggctctgtttgccaggccagatcttctgctgttagatgaacccacaaacatgctggatgtaagggccatcctgtggttggagaattacctgcagacgtggccctccacaatcctagttgtctctcatgaccgcaacttcctgaatgccatcgccacagacatcatccacctgcatagccaacgactagatggttaccgaggggactttgaaacctttatcaagagcaagcaggagcgactactcaaccaacagcgagagtatgaggcccagcagcagtaccgccagcacatccaggttttcatagaccgttttcgatacaatgccaacagagcctctcaagtgcagagtaaactcaagatgttggagaagctacccgagctaaagccggtggacaaagaatccgaggtggtgatgaagttccctgatgggtttgagaagttctcaccaccaattctgcagctagatgaggtggatttctactatgatcctaaacacgtcatcttcagtcgtctgtctgtctctgctgaccttgagtctcgaatctgtgtggttggggagaatggggctgggaagtctactatgctgaagctactcatgggggacctggctcctgttcgaggtatcaggcatgcccaccggaatctgaagataggctattttagccagcaccacgtggaacagctagacctgaatgtcagtgctgtggaactcttggctcgaaagtttcctgggcgacctgaagaggaatatcgacaccagttgggccggtatggcatctctggagaactggccatgcgcccggttgcgagcttatctgggggccagaagagccgggtagcctttgctcagatgaccatgccttgccccaacttctacattctagatgagcccacaaaccacttggacatggagacaattgaggctttgggccaagccctcaacaacttcaggggaggcgtaattctggtatcccatgatgagcgcttcatccggctggtgtgccaggagctgtgggtgtgtgagaaaggcactgtgacccgggttgagggaggatttgaccagtaccgtgccctcctccaagaacagttccgtcgggagggcttcctctagagcccccagctgaatgaggactgtgcctaggacatggactggtctcacaagaccccagaactaccatgtaggcaaccaactccagacttaggacttccctacttggggacagccttatttcccagacttctcttttcctttcaactggagcatcctctgcacattgtggggagacatgtccaaggcctgcgaagacagtcctgatggaaaaggttggggtgccatctgggcctatacatacataccccctgcccagctcaacagggccccacgtggctgctatgtaaattaaatatcctcctgtatctctcttgcctcatct

SEQ ID NO: 1062 - DNA, 2447 bp, Cricetulus griseus
gggcggggcgggtccgtgctgtgggctgccgagcggtgtccggcgtgctagcggatagagaaaatcaagaaagatgtctaagcaacaaccaactcagtttgtaaatccagaaactcctggctatgttggatttgcaaatcttcccaatcaagttcaccgaaaatcagtgaaaaaggggttcgagttcacactgatggtggttggtgaatctggtctaggaaaatcaactctcataaacagcttattcctgactgatctctacccagaaagaattataccaggagcagcagagaaaattgaaagaactgtccaaattgaggcttcaactgttgagattgaagagcggggcgtcaagcttcggcttacagtagtggacacacctggctatggggatgccatcaactgcagggattgttttaagacaatcatctcctacattgatgagcagtttgaacgctacctgcatgacgagagtggtctgaacaggcggcacatcattgacaacagggtacattgttgcttctacttcatctcaccgtttggacatggattgaagcccttagacgttgcatttatgaaagccatacacaataaggtgaatattgtgcctgtcattgcgaaagcggacacactcactctgaaggagcgtgagcggctaaagaaaaggattttggatgaaattgaagagcataacatcaaaatctaccatttaccagatgcagaatcagatgaagatgaagattttaaggaacagactagactcctcaaggccagtatcccattctctgtggttggctccaaccagttgattgaagccaaaggcaagaaggttagaggtcgtctctacccgtggggtgttgtggaggtggagaacccagaacacaatgacttcctgaagctgagaacaatgctcatcacccacatgcaggacctacaggaagtgacccaagaccttcactatgaaaacttccgttctgaaaggctgaagagaggtggcaggaaagtagagaatgaggacatgaataaagaccagatcttgcttgaaaaggaggctgagcttcgccgcatgcaggagatgattgcaaggatgcaagcccagatgcagatgcagatgcagggtggggacagtgacagcgggacactcgggcaccatatgtgaggttgttttttgtttcttgtttttgtgggttttttttttttttttcttttcttttgtaacatttgcctctggtatgaagtacatttaacatttatatttcattgctatgttacactttatgttgcgtgaagtaaaccctgattttcttcttccttaaccactaatgttagaatttatttctaagaatcagtcaacctgtctactggtaatagtgaatttctttgattgagctggcctgactaatcattgacaagtactcttgatttatgtctagacatttttgtttgctcagaatatccctgtgtggtggacatgatgtgcctgtgacagaggtggctgtgcatacttggtggcagaatatttgcttaatagaatgaagtcacactgttaactttatatttgtgcagaacacctaaaactgcttttgctgctgtagttaatacggttaattcatctgcacatttatctgttaaccaggcagaacagagggttatctaatgagagaatgtttatacttcaatagcttttaaaaagcaggatttcagggttgaattttaagagctctggattctagtgccagatccttttcaaacctctgtagagaactcactacaaggacgttttatactgtggatgctgattatgctacgccttggagaaaaccaaagcagctatgagctccagcttcttattgtaacaagactctacacagtaagagtcaataaactttttactcaactaagaaggcaatacttttttaaagaaaccaaatgtttatattttatactgcactttaatgtactttgtataactaggtgcaaaagatcagccatggcagtggaaatcatagtccttagctggcatggatctgaacccaggcttgtgattgggaggtgctcttgcacaaaagccacttgaagccccaatgcctgccaggttttcctctaactcttccctttttcagtgattttctactgagaggaaaataaccgtttttccatttgcagactgtctcatctgttttcagtcattgtcattttcctcagtttgtgtagtataaaatgtcttcatggcaggaatgaaaggcaattcagatctgtgccgcaaacagatgagcaaagccgtgcctggtttatagtctggcactctggcctgccttctcttgccatgtcttctaatgtcagacttatacctgtagaaatgtattttgaaacacattttacacatcaactttgtagccatttaaactaaccctttttcaataaagcactattgtttagatattaaa

SEQ ID NO: 1063 - DNA, 2447 bp, Cricetulus griseus
  modified_base (885)..(885): a, c, t, g, unknown or other
gaaggaccttcctgcagaaagttgtgggcctactaaggacacttcagacgaccatcagatgtgggaatcgtcagaggttccttatcgtaataaggtaggaaagtggtcaaggaccagagcatcctgcttgtttgacatagaagcctgccacaggtacctgaacattgcgctctggtgcaaggatcctttcaagttaggaggcctcatctgtttgggtcaatgttagtttaaaacttgaagaggtggctttaggatgcctagctacatcaaacatggaatacctttcaaagtttagactggaagcccctgctcctaaggctatggtcactagaactgcactacgcaatctgagtatgcaaaagggcttcaatgacaaattttgttatggtgacattactgttcatttcaaatatttgaaggaaggagaaccagatcaccacatagttcctaaatgtagagaaagaaaaagaactccatttgggtgaggaagttgctgcactccctaaagaggagcattttgtgggacagatgagtttgtcagaaaataaacatagtttccaagatacgcagttccaaaacccaacttggtgtgattactgtaagaaaaaagtctggacaaaagctgcttcccagtgtatgttctgtgcttacgtttgtcataaaaagtgtcaagaaaagtgtctagctgagacgcctctttgtggagcaactgagaggaaatagaccataccctgaaaaacctcaggctggaaggacaggagccactcatgggccttcctcctcatgttgagatggaagctaacaagtcagttcataaaacaacaggtttgacaaggcacatgaaccaggaacagatcttgtgggaaccaatcaccaaaagcacanacccaacacatcggacaatgaaggcagtgatacagaggtgtgtggtcccaacagtccttccaaacgaggacacagtgcgggaataaagctagtgagaaaggaaggggggctggatgacagtgtttttcatttgcagtttaaagaaattggccgtgatctgtatagaggcttgccaacagaagaaaggatccaaaagctagagttcatgctggataaactgcagaatgaaattgatcaggagttagaacacaataattcccttgtaagagaagaaaaggaaacaactgatacaaggaaaaaatcccttctttctgctgcgttggttaaatcgggtgaaagactacaagctctgacacttctgatgatccactacagagcaggcattgaagatattgaaaccttagaaagcctgtctttggaccagcactaaaaaaaaaataaacaagtacacagacgatacagaagaagaccttgatagtgaaataagccaactgatagactctcagccatttagcagtatctcggatgacttgtttggcccatctgagtctatggtgtggagggcaattatacaaaatgtttactacatcatttggtgtcttgtggccttaaaggaatgtcaggcattctgaataccttagtagtttagaccatcttcatttattgtaaagaaaaataaaaatagacagtgtacataggccttgggactagttcttccaaaaacgaaggcctgctgtggcactgggttcatctaaaggatgctggcaacacacaactgagagaaatatgtgagcttgacccctactcgatgtatctttaaaagcctgagcctgttatacctgtagaatagaatgtttatttaagcatgctctacaattcaaaagaacagcacaacagaaaactttccacaacaaaccccagaagctaaaatgttgtcccgcatcttatgcttgaaacagtctgcctgatatagagccatgtttcatcttgtaaacagtaacttgccattactactgaaggtgatgtgtctgtaagtggctggtgtgcttatggatcaaaccatggaagtttcagtggtgcccaagcatgctcctgcactgatccatttgaaagagctgtagaaataatgcaaagctttagttctgagaatctactcgtgctttaaagtatttatctctgtagaaccacaatcatggaaagctcaacagtgctgctaatggtgtttgtaaaatagacctttaaatgtagtgcaatatttttctattgggagagacagtagaggcttctcagttgctccaaatatcctagagcatagtaagggataaggcttcagtttaaaggttgtattatattacattactcatgtaatcttgctgccatgctatgttatcaatagctaaactaataataaagactaccaaggaaaataagaatatcttcatttgatgcatctgcaaacatggtgattggttcatctctgtggcattagcctggtgtattggccatgcagaccaagctaacaatccactttttttttttttttttttttttttttatttatc

SEQ ID NO: 1064 - DNA, 2446 bp, Cricetulus griseus
atgagtccgatgtggtggagagcctggatgaaatctaccacacaggaacgtttgctcagatccatgaaatgcaggaccttggagacaagctgcgcatgattgtcacaggccacagaaggattcacatcagtcggcagctggacgtggagcccgaggggccagagccagagtcagagaataagcagaagtctaggaggaagctgaagagaggcaagaaggaggcagaggatgagtcaggcaccaagccccagctggaggtggtgcctgacggtccccactgacacccctaaagacggtcctcatggtggaggttgagaatgtgacccatgaagacttccaagttacagaggaagtgaaggccctgaccgcggagattgtgaagaccattcgggatatcattgccctgaaccctctgtacagagagtcggtgttgcagatgatgcaggcaggccagcgggtagtggacaaccccatctacctgagtgacatgggcgctgcactcacgggggctgagtcccatgagctgcaggatgtgctggaagagaccaatatacttaagcggctctacaaggccctatcactcttgaagaaggagtttgagttgagcaagcttcagcaacgcctgggccgagaggtagaagagaagatcaagcagacgcacaggaagtacctgctgcaggaacagcttaagatcatcaagaaggagctgggactggagaaggatgacaaagatgccatcgaggagaaattccgggagcgcctcagggagcttgtggtccctaagcatgtaatggatgtggtggatgaggagctaagcaagcttgcactgctagacaaccactcctctgagttcaatgtcacccgcaactacctggactggctgacatccatcccatggggccggcagagtgatgaaaaccttgacttgactagggcccaggctgtgctggaggaggaccactatggcatggaggacgtgaagaagcgtgtcctggagttcatagctgtcagccagctccgagggtccacccagggcaagatcctctgcttccatggcccgccaggtgtgggcaagaccagcatcgcacgctccattgctcgtgcccttggccgtgaatacttccgttttagtgttggtggcatgacagatgtggctgaaatcaaggggcacaggcgtacctacgtgggggccatgcctgggaagatcatccagtgtctaaaaaagaccaagacagagaacccactggtgctgattgatgaggtggacaagattggccgaggctaccaaggagacccatcatcggcattgctggagctgttggaccctgagcagaacgccaacttcctggaccactaccttgatgtgccagtggacctgtccaaggtgttgttcatctgcacggccaatgtcacggacaccatcccagagcccctgagggaccgcatggagatgatcaatgtgtcaggctatgtggcacaagagaagctggccattgcagagcggtacctggtgccacaggcccgcaccctgtgtggtctggatgagagcaaggcccagctgtctgcagccgtgctcactctgctaatcaaacagtactgcagggagagtggagtgcgaaacctgcagaagcaggtggagaaggtgctgcgcaaagctgcctacaagatagtgagtggtgaggcagaaactgtgcaggtgacgccagagaacctacaagacttcgtggggaaaccggtcttcactgtggaacgcatgtacagtgtcacgcctgctggcgtggtcatgggcttggcctggactgccatgggaggttccaccttattcgtggagacgtctttaaggcggcccctgcttaggggcaacagagaggacaaggagggcagcctagaggtaacaggccagctgggggatgtgatgaaggagagcgcccgcatcgcctacacctttgcccgtgccttcctgatggagcaggaccctgacaatgacttcctggtcacctcacacatccacctgcacgtgcctgagggtgcaactcccaaggacggccctagcgcaggctgcaccatcgtgaccgcgctgctgtctctagctctgggacagcccgtgctgcagaacctggccatgacaggggaggtctcccttaccgggaaagtgctgcccgtgggtggcattaaagagaaaaccatcgcggccaagagagccggtgtgacctgtattgtcctgccggccgagaacagaaaggactttgcggacctggcacccttcatcacggagggcctcgaggtccacttcgtggagcactaccgcgacatcttccgcatcgccttccctctgcatgagcagcgtgaggcgctggccctggagcggtggacccgggggcggggagctccctgaaaatcatggtgtggcgcagccacgagcacaggtgtagaatcatgaataaag

SEQ ID NO: 1065 - DNA, 2444 bp, Cricetulus griseus
ctttcagatgaaggcattgaagcttgtacaagctcttccggcaaaattcaatataaatgacatcatcctgattgctctcaatacagatttgagaacgattggcaagaagttccttcccagtgacatcaacggtggaaaggtagaaaagcttgaaggtccgtgtgttttacaaattcagaaagtccgaaatattgctgcaccaaaggataacgaggaatcacaggctgcaccaaggatgcttcgtttacagatgactgatgggcatacaagctgtatggcagtagagttcaattatatttcaaaactaagtctgaacacaccacctggcacgaaactgagactctcgggcgtcgtggacgtaaagaacggattcctgctcttgagtgactccaacaccacagttcttggtggtgaagtggagcacctgattgacaaatgggagttacagagaagattatcaaaacataatagaagcaacattggaactgaaggtggcccacctccttttttgccctttggacagaaatgtgaatctaatgtccaagtggatagcagagaacttgatcggcgaaagacattacaagtttcattgcctgtcaagcctacaaatgataacgatgaatttgaaaagcaaaggactgctgcaattgcagaggttgcaaagagcaaagaaaccaagacatttggaggaggtggaggtggtgccagaagcaatctcaatatgggttctgtcagtcaccgaagcagggagggtttacagaaggaaaagccttccaaaccagagagcagacatgaaggtgtctatagagaactggttgatgaaaaagctctgaagcatataacagaaatgggcttcagtaaggaggcgtcgaggcaagcgcttatggataatgccaacaacttagaagcagcgttgaatgtacttctaaacagcaataaacagaagcctgtcgtgggtccacctcctagaggtagagggaaaggcaggggccgcacacgatctgaagatgaagaggacctaggaaatgcaaggccatcagcaccaagcacattatttgatttcttggaatccaaaatgggaactttgaatgtggaagaaccaaagtcacagccacagcaccttcaccaaggacagcacagagtgtcgaatactgaacagaatgggataaaagagagcagcaatcaatcaagacatcttcctcgaaatgataccaggcagccaagaaatgagaaacctcctcgttttcaaagagacacccccaattcgaagtcagccttagaaagcagtgtattatcaagaaatagaggttctgaaagatccggcagttcttttggttcagaagggtgggcagaagagaagatcaagtgtgataggccatattctagatatgatagaactaaagacactttatatccgttaacttctcagcacaacgatggcgcttttaaaaaaagagataactctatgcaaaacagatcaggacgaggtccagtgtatgtggagccaaaagaaaacccacttcctccagagttcttagattacagtaatcaaaagcgtgggaaaagagaaaaccaaacaggtaatcctgatcacttttatgacaggaaatcacggacaatgaataatgaaacttttagtggtctcaaaattgaaaaacattttagtgtaaatactgattaccagaatcctgtccgaagtaatagttttgttggtgttccaaatggagagctggaaatgccactgaaaggaagacgcataggaccaattaagccagcaggccctatcccagctgtaccctatgatgataagatattttataatagtgggtccaaaagaagatctgggccaattaagcctgaaaaggtgatagaatcatctattcctgtggagtatgcaaaaatgtggaaaccgggagatgaatgttttgcactttattgggaagacaacaagttttaccgagcagaaattgaagccctccattcttcgggtatgacagcggttgttaaattcactgattatggaaactatgaagaggtgctattaagcaatatcaagcccattcaaacagaggcatgggaagaagaaggcacctatgatcacaccattgagttccgtagaggaggtgatggccagccacggagatctactcggccaacacagcaattttaccaacctcctcgggctcggaactaatgtgaaaagattgtttgtgaaggaagaagctgctgactgaaacatcctgaaaggccgttgatagatttttccatatcttcacaataagaatcaccatgctggctatgatatttggagaaagaaaaaaaaagcagttttagggaaaagattcaacctatacagagcaagggggaaaatactaagttcagtagagcaaatacctttacaagtggaaggaagtatctttcttctgccatcaataaaaccattg

SEQ ID NO: 1066 - DNA, 2442 bp, Cricetulus griseus
  modified_base (339)..(339): a, c, t, g, unknown or other
aaggttcggggatctgccttgatcctacagctggctcgaaatcctgataacttggaagaactactattaaatgaaactgcccttggtgcgctagcaagagtcctgagagaagactggaaacaaagtgttgagttagctacaaacatcatttatatcttcttttgcttttctagcttttctcattttcatggactcatcactcactataaaattggagcactgtgtatgaatatcattgaccatgagttaaaaagacatgagctttggcaagaagaactctcaaagaagaagaaagctgttgatgaagaccttgaaaatcagacgttgagaaaggattangataaaacctttaaaagaccagggacttgtggtaaaacaggaacagctattgagagtcgctctctatttacttctgaatcttgctgaggacactcgcacagaactgaagatgaggaacaagaacatagtccacatgttggtgaaggctcttgatcgggacaatttttgagctgctcattctagttgtgttcattcttaaagaaactcagtatttttatggagaataaaaatgacatggtggagatggatattgttgagaaactggtaaaaatgataccctgtgagcatgaagatcttctgaatatcaccctccgccttttattaaacctctcatttgacacaggcctgaggaacaagatggtacaagttgggcttctcccaaagctcaccgcactcctgggtaatgaaaactacaaacaaatagcaatgtgtgtgctttaccatataagcatggatgaccgctttaaatcaatgtttgcatatactgactgcataccacagttaatgaagatgctcttcgaatgttcagatgaacgaattgacttggagctgatttctttctgcattaatcttgctgctaacaagagaaatgtccagcttatctgtgaaggaaatgggttgaagatgctcatgaaaagagctctgaagctcaaggacccactgctgatgaagatgatcagaaacatctcccaacatgatggacccactaaaaatttgttcatcgattatgttggggaccttgcagcccagatctccagtgatgaagaagaggagtttgtaattgagtgtttggggactctggcaaatctgaccattccagacctagactgggagctggttctgaaggagtacaagctggttccattcctcaaagataagctgaaaccaggtgctgcagaggatgaccttgtcttagaagtggttataatgattggaactgtatctatggatgactcttgtgctgcactgctagctaaatctgggataatcccagcactcattgaactgctgaatgctcagcaagaagatgatgaatttgtgtgtcagataatttatgtcttctaccagatggttttccatcaggccacaagagatgtaataatcaaggaaacacaagctccagcatatctcatagacctgatgcatgataaaaataatgaaatccggaaagtctgtgataacacattagatattatcgcagaatatgatgaagaatgggcaaagaaaattcagagtgagaagtttcgctggcataattctcagtggttggagatggtagagagtcgtcagatggatgagagtgaacagtacttgtacggtgatgatcgaattgagccatacatccatgaaggggacattcttgaaagacctgaccttttctacaacgcagatggattgattgcctctgaaggagccataagtccagatttcttcaatgagtttcacctccagaatggagatgtggttggacaacactcatttcctggcagcagccttggaatggatggctttggtcaacctatgggaatccttggacgtcctgccaccgcgtatggattccgccctgatgaaccttactactacagctttgggtctcgatagtcaccacttttcatgtgtatgcccagcttaagagaaatctgtgtggtgtgggttaaccttgaatcttgatttaataatgcatgttggtattcctgtgggactgtgtttcttctttctccatgttgttagctgcaggttaactctgaccctcatgtcgtctgttaaatacaaactgctatcctggaaaaacagatactacattatgtacaataagtgactaatttctattaaaaagtggcattcatgcaaaggaatgagccaaagtcatgtgttcatatttactgggtttcataggaaccactcacacacatggaatacaggtatttttttctttctttctacttacatactccttaatgttttgtgtgagctctgctacctttaaattttattttaaatgaaccccactcaaccttttattccatgctgtgtctggaagcttcttttgcaaggttattaacaataggagtttttaaccaacggtgaacatatgttgtaagt

SEQ ID NO: 1067 - DNA, 2441 bp, Cricetulus griseus
gtctacacccgccagggaccctgaatgagcactgtccagagtggagcttcgtaccctgacctgcaggaatttgtagctgacgtctaatgtgctgatggccctgattatcaatggtcccataaagtcattctgctaccgccgactacagtacctgagctccaaattccagatgcatgttctgctcaatgagatgaaggagctggcagctcagaagaaagtgccacaccgggacttctacaatatccgtaaggtggacactcacatccatgcctcatcctgcatgaaccagaagcatctgctgcgtttcatcaagcggggcaatgaaacgacacctggaggagattgtgcatgttgagcaggggccgtgagcagacgctccgagaggtgttcgagagcatgaatctcactgcctacgacttgagtgtggacacacttgatgtgcacgcggacaggaatacctttcatcgatttgacaagtttaatgccaaatacaaccctattggggagtccgtcctccgagagatcttcatcaaaaccgacaacaagatttctgggaagtactttgctcacatcatcaaggaggtgatgtcagacctggaggagagcaaataccagaacgcagagctccggctgtccatctacgggcgttcgagggacgagtgggacaagctggcacgctgggcagtggtgcacaaagtgcactctcccaatgtgcgctggctggtgcaggtgccccgcctctttgacgtgtaccgcaccaagggccagctggccaacttccaagagatgctggagaacatctttctgccactgtttgaggctactgtgcaccctgctagtcacccagagctgcacctctttctggagcacgtggatggttttgacagtgtggatgatgagtccaagccagagaaccatgtcttcaacctggagagtcccctcccagaagcttgggtggaggaggacaacccaccctacgcctactacctgtattacaccttcgctaacatggccatgttgaaccatctgcgcaggcagaggggcttccatacgtttgtgctgaggccgcactgcggggaggctgggcccatccaccacctggtgtcagccttcatgctggccgagaacatctcccacgggctgcttctgcgcaaggcccctgtcctgcagtacctgtattacctggctcagatcggcattgccatgtcccctctcagcaacaacagcctgttcctcagctaccaccggaaccctctacctgagtacttatcccgtggcctcatggtctcactgtccacagatgatcccctgcagttccatttcaccaaggaacccctgatggaggagtacagcattgccactcaggtttggaagctcagctcctgtgacatgtgtgaactggcccgtaacagtgtgctcatgagtggcttctcccacaaggtaaaaagccactggctgggacccaactataccaaggagggtcccgagggcaatgacatccgccgcaccaatgtgccagacatccgagtgggctaccgccatgagaccctgtgccaagagctggcgcttatcacacaggccgtccagagtgagatgctggagaccatcccagaggaagtaggccttgtcatgagcccggggccttagtgagccaagttcatgcagtgctcgccccatctcagcaacttgatcgtgtgtgtctctgattggacctttcgcacctggtgtggtctctgcatgtcgctgttctttgtttctgtcctgcatgtctttgaccatgtcttgcctctgggccaccgcaatgagagcaagtccaggaatctgcttcactgttttcttggctcaggtggtacctggtggctgagatctaagggctggccctgctagtgacccgtccaggattgtcagaagcctgactgtcctatggtgtcttcagtgtccacaggggcttgggatagttgtgtgaggctggccccccaggctttggctagagttcaagttgagtttccctcttgttttatgtggccatggggcagtcaggaggggctcgtctgtgctaggcagagcagggcttgggcttgctcatggccccagaggcctgctcaggggctggatatgtccctgccaagtcactgcccatcagactcctctgttcctttctattccacatatccctttgttaccagctcccttgtacttgtgggagggagcagctaccctgatctgtgtctacagttggaggctaccgtagttggaggatgctgcgtccgccgttagccctgggggtggtaccacccttgagggtttccaggtctttggccagacccagatcccagttagcctcttgttgtgttatgttctagaccaaggcctttgctatgaagaagtgtttcatatgaaccattttcctagtgcatgagaaataaagactatttaagtaa

SEQ ID NO: 1068 - DNA, 2441 bp, Cricetulus griseus
tttatagagaaagtgcctgtggtggtgcttgaggacatcctgaccactaaacctctccacacttctcttcccaccacgtccctggagaggagtgtcacttcagagagtgaagtgctggaatcctgccctgaagatgactccacactgagcctctcctccacaagctcctcttctccaaccagctctcccgagggaccatctgcacccccagcacagctcaatggaacaagcccccactccacacccatctgcaaagttaacaagaaactcgtcagaggctccacagagaagggcaggagcaaactacacagagacagagaacagcagagggaggagaaggagaagctgagggaagagacgcggcaagccaaggaggaggctcgaagaaggaaggaggaagagaaggagctgaaggagaaggagcggagggaaaagcgggagaaggatgagaaggagaaggcggaaaagcagcggctcaaggaggaacgacgcaaggagcgacaggaggctctggaggctaaactggaggaaaaaggaagaaagaggaagagaagcggttacgggaagaagagaagcggttacgggaagaagagaagcgcattaaggcagagaaggcagagatcaccaggttcttccagaagccaaagactccacaggcccccaagaccctggccggctcctgtggtaagtttgccccctttgaaatcaaagaacacatggtgctggctccacggtgccgggctaccttggaccaggacctttgtgatcggctggaccaacttctacagcagcagagtggggccagctccttcctcagtgacctgaaaggccggctgcccctgaggtctggacccacccaggtgtgcagccgcaacaccaacatcatggacagggggtcattgtggagagcaaggtggatggtgtgcctgacaggaggaggtttggccgcatgaagctcctgcagttttcagagaaccaccggccagcatactgggggacatggaacaagaagacggtggtcatccgcccccgtgacccctgggcccaggacaagaaccttcttgactatgaggtggacagtgacgaagagtgggaagaggaggaacctggggagtccttgtcccacagtgagggggacgaggatgatgatgtgggggaagatgaggacgaggacgatggcttctttgtgccccatgggtacctgtctgaggatgaagacgtgactgaggaatgttcggaccccgagaaccacaaagtgcgccagaggctgaaggccaaggagtgggatgagctcctagccaagggcaagcggttccgtgtactgcagcctgtgcaagtgggatgtgtatgggcggctgaggcggccaactgcgcaagctccgacttgaagctgctgcagcagttcactgcgtgcctgctggatgcagcaccccctgaagagccagagcccaaggcctccagttgggagaagaggaaccagcatatcctggcccagctgctaccgctgttgcatggcaacgtgaatggaagcaaggtgatcatccgagaattccaagagcgatgccgccgtggcctgctgagccccacaaacgccacttcacacccacagacacctaactcagaagatactgtggtcgtgccatccaaggccaggctgaagcgcctcatctctgagaactcggcctatgagaagcggcctgacttccgtatgtgctggtatgtgcacccacaagtgctcaggcgcttcggccaggagtgtctgcctgtgccctgccagtggacctacgtcaccgctgtgccctcaacacccagggaagacaatggcaatgcttccaccgaggtgcctggccagggcacacccatgccaatcaagcggaagccagcagccaccatgtgcattacacagttcatgaagaaaaggcggtacgatggacaggttggctctggggacatggatggcttccaggtagacacagaagaggacgaggatgacgatacagactgtgtgatcgtggatgtgtcagaagtggagtgcaggcgcctggagtgcaaggctggtatatggcatggcctgggcagtggtggccatgcctcccctcagccttgtagagctgctgagggaggtggggatgggcactagcaacagcctgctatgtggcacttgagcagccaccaccagactcgcctcctgctgactcccatgtaaagagcactttgtccgacacccccagggtgtggagtctagaggaggcctgagcagttacttccagactgtaaagcccccagggctatgtgctgatctacccttcttagttaagcattatcgacagctgattgacaggtgcctgctgtggtcaaacacctgctaatgaattgtaccagggacactgaggctgctatgcaggccctgggcaaacatgaacgtgtataaacatactcta

SEQ ID NO: 1069 - DNA, 2440 bp, Cricetulus griseus
acagagcagagcacctcctctcggctaattcgtaagcacaaatgtcgtcgtcggaagcagcgcttgaggcagacagaccgggcatcctccttcagcagcatcaccgactccaccatgtccctgaacatcatcaccgtcactctcaacatggagaggcaccacttcctgggcatcagcatcgtgggccagagcaacgaccggggtgatggcggcatctacattggatccatcatgaagggcggggctgtggctgctgatggccgcattgagccaggcgacatgctgctgcaggtcaatgatgtcaactttgagaacatgagcaacgatgacgctgtgcgggtgcttcgggagatcgtatcccaaacggggcccatcagcctcacagtggccaagtgctgggacccaacccctcggagctactttaccatcccaagggctgacccagtgcgacccatcgacccggctgcctggctgtcccacacagcagcgctgacgggtgctctgccccgctatggtacgagtccctgctccagtgccatcacacgcaccagctcttcctcactaaccagctcagtgcctggcgccccacagcttgaggaggcaccactgacagtgaagagtgacatgagcgccattgtccgggtcatgcagttgccagactcaggactggagattcgggaccgcatgtggcttaagatcaccattgccaatgctgtcattggggcggatgtggtggactggctgtacacgcatgtggagggcttcagagagcgaagagaggcgaggaagtatgccagcagtatgctgaagcgcggcttcttgaggcacaccgtcaacaagatcaccttctctgagcagtgctactatgtctttggggacctgtgcactaaccttgcatccctgaacctcaacagtggctccagtggagcctcagatcaggacacactggcccccctgccccacccatctgtaccctggcccttgggtcaaggctacccctaccagtacccagggcccccgccctgcttcccacctgcttaccaggaccctggcttcagctatggcagtggcagtgctgggagtcagcagagtgaagggagcaagagcagtgggtccacaaggagcagccatcggaccccaggccgagaggagcgccgggcagctggagctgggggcagtggcagcgaatcagatcacacggcaccaagtgggtctggtagcactggctggtgggagcgtccagtcagccagcttagccatggcagtagccctagaagtcaggcgtcagctgttgccccaggtctccccccactgcaccccctgacaaaggcctatgcagtagtgggtgggccacctggagggccacctgtccgggagctggctgctgttcctccggaacttacaggtagccgccagtccttccaaaaggctatgggaaatccctgtgagttctttgtggacattatgtgactatcaaccagtgttttcagtggtgcctgtggcaagagtctgtggtcctgctgtgccaggacctctatgggcttgccttagtgatggccagccaagatagatcagccgtggggtctgggccagggcagagggagcaggctgcagaggaagggctgagggcagcagccatattactaggatatgggcttggcattctgcctgctctgtgggctctgtggtggtgcggcccaagtatctgtagagtcttgtgaggggacatctctgtctttagatccttaacacaagtctcagggaccaccttctggttccttttttggaagtgacctccatttaggacaagacggactcttttgggctctgtgctctcccctcacccccagcctgaaactcccagaactgtgcacagggacccaggcctactctcactgagttcatgggcctcacctgtcaggccaaggtggggggttcttgaggggttagaccaagcctttaaacctctctggctgcccatgtggggtctaacttatttatttattgctagtctgcctgctctgagggtggcagctggttacccaatgggggcaggtgcatgtccctttccccacttggtactcagcacatgacagcacagtttgtactgaaagtatgtggaggatggctagtacgggagacaagagaggccaggcacctgtatactgtcttagcctcaatggaggagtgatagcgcacacaatagctacggagatggaggtcctgtcctgtcattgctatcctggtggctctctaccagcttgtgccactgccattctggcatcacagtcccacatgtctgcactgtagatactgtgtcaaagtctgagcaactgggtagttcacatagagctgcttctgtgtaaatgctgcttctgtgtaaatgctattttaaacactaaaaagcgtttaattttatgggaaaaaaaaaaaaaaaaaa

SEQ ID NO: 1070 - DNA, 2440 bp, Cricetulus griseus
tcccgccctcacagacccaatccaggaatcgaaactgcaccggtttccatgcagaaggcgcccgcatcctctggatctccctgcctccagcaggaatccatcctgacctctacgcccaccatgccttcccgggaggacccctccgaagaccatgaacacagccagagccccacggagcaagccatgaaggaggaattccagtttctgcgctgcctgggctgccaggcccaagccaagtgccccaagctgctgccttgcctgcacacgctgtgctctggatgcctggaagcgccgggcttgcagtgccccatctgccaggtgcctggggccggcgctaatgcagaagccctagataacgtgttcttcgagagcttgcagcggcgcctggcggtgttccggcagatcgtggatgcgcaggcagcgtgcacccgctgcaaagagtccgctgacttttggtgtttcgagtgtgagcaactcatgtgcggcaagtgcttcgatgcacaccagtggtacgtcaagcacgaggcccggcccctggccgagctccgtgaaaactcagtttgcgaattcctcgacagtacgcgcaagtccaacattctttttgctccaattccaaccatcgcaaacctacgcagaccaacatctactgccgaggctgttccaagcctctgtgttgcgcatgcgcgctcctggaccggggccacaaccatctccagtgcgacattggcgaggagatccagcagcggcatgaggagctgggcaccatgacgcaggcgctgcaggagcaagacaagaccttcgacaatgctcacgcgcagatgcgctccgccataggccagctggagcaagcacgtgcagacactgaggagctgatccgagctcgtgttcgccaggtggtagagcatgtgcaggcccaggagcgcgagctcctcgaagcggtgaatgcacgcttccagcgcgactaccaggaaatatctggtcagctgggccgcctggaagctgtgctgcagcgcatccgcactggtggggagctggtcaagaggatgaagctctatgcctccgaccaggaggtgctggacatgcacagttttctgcacaaggcactgtgccgcctgcgccaggaggagccccagaatcagaaagtccaactgcgaaccagtggcttcgaggagttcaagacgtgtctgcaggacttcatgtcctgcatcacccagagaacagatgaagcggtagccagaggaggcctctcagacagtcacccccaggaagaggaagtgctgccacaggaattgctctgggaagatcatcaaggtggagtccacagaagagaatgaggacaggttgagcactagctcccctgagcagcccaggcccagcacttccaaggccatctcacctcgccatgtggatgggcctgccaacactgatgagagtccagtcctagaagaagacaccctcctgctcaccagcaaccttgttaccagtgacacaggggaagcagaagagccaattgtggtgatcagcagctcagaagactcagatactgagaatctgtcctccctcgagctggaagacagcagcagtgaatccagtgacctccagctggagggccccaatttcctcaaggcatcggacgagagcctcgctgacccccaagcggaagacagggccctggttttctttgacctcaagattgacagtgaaacccagaaaattagccaactggcagctgtgaaccaggaaagcaagttccgagtactcatcgagccggagaccttcagtgtctactctaaggcagtctccctggaggtcggactgcagcacttcctcaactttctcacctccatgcagcgccccatcttggcctgctctaagctgtgggggcctgggctccccattttcttcaaggccctggatgatattaacaagctgtgggaattccaggatgccatctacggcttcttggctgtgttgcctctcattcaggaacgcatacccggtgccagcagcttcaaactcaggaacctggccaagacctacctggcgagaaacatgagtgaacggagtgccctggctgctgtgctggccatgcgagacttgtgctgcctccttgaggtctccccagggccacaactggtccggcatgtctaccccttcagtaacttacagtgcttctcttccctgcagcccctagttcaggctagtgtcctgcccccggccgacggcccgcctccttcggccctccacaatgtgagctttctagaattgctgactgcataccgcagcaaccagcaagagggtttgaagaggtatggccgctatctgagcccgcagacctcttcctcatccggcttccacccaacttgcctcaataccttcaggctctgaacacctacatggaagaactgtcagaagggtgtgccccagccaggtcagaagg

SEQ ID NO: 1071 - DNA, 2440 bp, Cricetulus griseus
ggcggcgccaacccaaccgccccgcccgctgccgacgtccgacatgctgagccgttccctgctgtgcctggccctggcctgggtggccagggtgggcgccgacgccccggaggaggaggacaacgtcctggtgctgaagaagagcaacttcaaggaggcgctggcggcacacaactacctgctggtggagttctatgccccatggtgtggccactgcaaagctctggcccccgaatatgccaaagctgctgcaaagctgaaggccgaaggctctgagattcgactggccaaggtggacgccaccgaagagtctgacctggctcagcagtatggcgtccgtggctaccctacaatcaagttcttcaagaatggagacacagagtcccctaaggagtatacagctggcagagaagctgatgacattgtgaactggctgaagaagcggacaggtcctgctgccacaaccttgtctgacactgcagctgccgagaccttgatagactcaagtgaggtggctgtcatcggtttcttcaaggatgtcgagtcagacactgccaagcagttcttgctggcagcagaggctgttgatgacatcccttttggaatcacgtccaacagtggtgtgttctccaagtaccagctggacaaggatggcgtggtgctctttaagaagtttgatgaaggccgcaacaactttgaaggtgaggtcaccaaggagaagctgttggactttattaagcacaaccagctgcctttggtcatcgagttcactgaacagacagccccgaagatttttggaggcgaaatcaagacacacattctgctattcctgcccaagagtgtgtctgactacgatggcaagttgggcaacttcaagaaagcagctgaaggcttcaagggcaagatcctgtttatcttcatcgacagcgaccacactgacaaccagcgtatccttgagttctttggcctgaagaaggaggagtgtccagctgtgcggcttattaccctagaggaagagatgaccaagtacaaaccagagtcagatgagctaacagctgagaagatcacagaattttgccaccgcttcctggagggcaagatcaagccccacctgatgagccaggaactgcctgaagactgggacaaacagccagtaaaagtgctagttgggaaaaactttgaagaggttgcttttgatgagaaaaagaacgtcttcgtggaattctatgcaccctggtgtggccactgcaaacaactagcccccatttgggataaactaggagagacatacaaggatcatgagaatatcgtcattgctaagatggactcaacagctaatgaggtggaagccgtcaaagtgcacagctttcctacactgaagttcttcccagcaactgcagacagaacggtcattgattataatggtgagcggacgctagacggctttaagaaattcctggagagtggtggccaggacggtgcaggagacgacgatgacatggatctagaagaagctttagagccagacatggaggaagatgatgatcagaaagctataaaggacgaattgtagtggaaaagccagatctgggcacccggacccaagacctcggtgggccatgctcccagcagctcacatccccggagcctgagcctcacctaaggagggagcatcaccagaacccagggaatctttctgaagccacactcatctaacacacgtacatttaaacctgtctcttttgcttttcaattttggaaagggatctctctccaggccagcccatcttaaagagctgtcttttgttttaattgtgatgtactttttatatgtgcattttgtcccaagtgctcgctaaaatatttgggggtctcacactggtaatgtctttcctgttagagaggtttatgatattgcttcaaatttcatctgtgagacattgcatcttttagacagcttttgacatcgagacgcttgttccacagtggaaggccgccccgaaacgccttcctgccctatgtaggaagtggtggatctgggttggatagtcactctctaccttgtactagtgttgccacggcagcatggcttttgtagttttcagttaaccctgggacttaagcatcctctcagagggtggatccccccacgtgtggaagagagacagtgtggctggccgctgggcccaggccaggcccgagcagctctcactcttcatggcagagctaccgaccagccggctatgggcacatcactctgtggctgctggattttcttccagcatggcctgtggcctgtgtgaggcagaactgggacccttgattcccaaactgggagtcagccaaggacactggggctgaatcagacgcccattcttgaggcatttctaccgtaatattggaattgaacacattggctaaataaaattgaaattttact

SEQ ID NO: 1072 - DNA, 2440 bp, Cricetulus griseus
ctgtataagtgagctgaattcaaagactgcaggacactttggtaacaaattagaggaacagttggacgtagctctttccaaaatactgcaagaattttgtacattaaccattataccaaggttcagcaagcttatcgacttcttggaaaagcacagactgcaatggatcaactccatatgcacttcactcaagccattcacaacactgtgtttcaagtcgtgcttggctatgtggagctgtgtgctgaaaacacagacacgaaattccagaagctgcaatataaagatctctgtacgcatgtaacaccagacagctacattccatgcctggcagacctttgcaaagcactgtgggaagtcatgctcagctattacaggaccatggagtggcatgagaagcatgacagtgcggatgcagcttcagcatctgaaggaagtaatgtgatgagtaccgaagaaaccaattttgatcgtggctacataaaaaagaactagagcatggccttatcgaatatggcagggatgttttcaaaacctgtgactttgtttgagcagtactgtagtggtggaaatccatttgaaattcaagccaaccacaaagatgaagaaacagaagatgtcttggcttctaatgggtacgagtctgatgagcaggagaagagtgcctatcaggagtatgacagtgacagcgacgtccccgaagagctgaaacgggattacgtggatgagcagacaggcgatgtgcccgtgaagagcgtttcacgagagacccttaagagcaggaagaaatcagattacagtctaaataaagtgaatgcgcccatcttaacaaacacaacactgaatgtaataaggcttgttgggaagtacatgcagatgatgaccatcctcaagccgatcgcctttgacgttatccactgcatgtcccagctgtttgactattacttgtatgcaatatacaccttttttggccggaatgattcattggaatccacaggacttggcctcagtagtagcagactaagaacaacgctaaaccgaatacaagaaagccttattgacctggaagtttcagctgatccgactgccacactcacagcggcagaagaaagaaaggagaaggtacccagcccacacctcaatcaactagtgattttgacatctggggatacattatatgggttggcagagagagtggtagccacagaatccttggtgttcctggctgaacagtttgagttccttcagccacatttggatgctgtgatgcctgcagccaaaaagccctttctgcagcagttttactctcagacagtctcaactgccagtgaactacgaaaacccatttactggattgtggctggtaaagctattgattatgaacagatgcttctcctgatggctaatgtgaaatgggatgtcaaagagatcatgtcacaacacaacatctatgtggacgcattgctgaaggaatttgagcagtttaacaagcggttaaatgaagtttctaagagagttcggatacctttgcctgtatcgaatatactttgggaacattgtatacgattagccaacagaacgattgtggaaggatatgctaatgtcaagaagtgcagcaatgaaggtcgtgccttgatgcaattggattttcaacaatttttaacgaaacttgaaaaactaactgacattagacccattcctgataaagaatttgtggaaacgtatatcaaagcctactacctaactgagaatgacatggagcgctggatcaaagagcacagggaatattcaacgaagcagctgaccaacctggtgaatgtttgcctgggatcgcatatcaataagaaagcaagacaaaagctcctagcagctatagatgacatagacagacctaaacgataattaacacagctctttcctcgggcactaatcttctctccacctataagacatgaaaggcagttcttcatgcactcctgacaaaaattctctgctaaggcaactctgagcatgtcctttggaactggaaacagaaaatactcaagtgtgtgtggtgttctcaagtgacttttatatgcccagtctcttcagattttgctctcatttgttgtaaccttttcctgaaattatcttattgtcgtaattattattatgtggctacacttacacattttgcagaagactgtattataaatacagagtcagacggaacagtgacgagtgtgtctgtgattagtttttagaaagtgtattaataaatataagagggtgaatgtacagtattcctaattatgaacattgcatgagaatttaaaagaccgtgtcagtaaaatagttgaaaatcagtatgttctctgtttttaactgtcagagcttctgccagggttgatttggttacaacggtgatcataaatgatgaaatttaataaatgttacactc

SEQ ID NO: 1073 - DNA, 2440 bp, Cricetulus griseus
ttcctcgtccctctgcctacatcaggctgtcgggtcctatgtcgcgccgggccctccggaggctgaggggggaacagcgcggccaggaacccctagggcccgacgcattgcagtttgtcctccttgatgacgatgacgcggaggaagagggaccaaaacaagggtcgggtggccggcgccccgggggcgcagggaaggaaggagtccgtgtcaacaaccggttcgagctgataaacatcgaagaccttgaggatgaccttgtggtaaacggggagagatctgactgtaccctgccagatgctgtgtcatcagggaacaaaaggaagggctccaacgtggaaaaccagagacaaagcaagatgaggacgtggccaaggcagggtcccagaacagtctaatgcaagtggcaaaactccgaaagaagaaaaagaagcagaaaaataagaaaaactgcacaggagactcctcggaaaatgggctagaggatattgatcgtatcttagagaggatcgaagacagcagtgggttcagccacccaggcccccctccactgaactccaggaagcaagtcctatatgtggagcacagacacttaaatccagatacagaactgaaaaggtattttggtgctcgagcggtcctgggagaacaaaggcctcgacaaagacagcgtgtatatcccaagtgtacatggctgacaacccctaagagcacttggccccgatatagcaaaccaggtctgtcaatgcggctgctggaatccaagaaaggcctttctttctttgcatttgagcatagtgaggagtaccagcaagcacagcacaagttcctggtggctgtggagtctatggagccaaataacattgtggttctgctccagacaagtccctatcatgttgactcacttctgcagctcagtgatgcctgtcgctttcaggaggatcaagagatggctcgagaccttatagagagagcactgtacagcatggagtgtgcattccaccccttgttcagtctcaccagtgggacttgcaggctggattaccgcagacctgagaacaggagcttctacctggccctctacaagcagatgagtttcttggagaagcgaggatgcccacgtactgcactggagtactgcaagctcatcctgagccttgagccagatgaggaccccctgtgcatgctgctgcttattgaccatctggccttacgggcccggaattatgagtacctgatccgcctcttccaggagtgggaggcacatcggaacctgtcgcaactcccaaattttgccttctcggtcccattggcatatttccttctgagtcagcaaacagacttacctgagcatgagctcacctctgccaggcaacaagcttccctcctgatacagcaggcacttaccatgttccctggagctcttatgccattgctggagtattgcagtgtgcggcctgatgcaacagtctcaaaccaccgcttctttgggccagatgctgagataagccagccccctgccctgagccagctggtgagtctgtaccttgggaggtcacactttctttggaaagaacccgccactatgagctggctggaggaaaacgtccgcgaggttcttcaagcagtggatgctggggactctgctgtggaggcctgtgagaataggcggaaggtgttgtaccagcgtgcacccagaaacatccaccgccatgtgatactctctgagatcaaggaggctgttgctgccctaccctcggatgtaactacacagtctgtgatgggatttgatcctctgcctcccctggataccatctactcgtacgtcagaccagagagactgagtccagtcagccatggaaacacaattgccctcttcttccggtcattattgccaaattacactacagagcagctgtaagtcgatccagatgaggatatggtatctggagctgcagcaactattctacaaccacgaggcaatgaactccaaaatgaagagccagtgtactaggaacagagaagcagaggatgccctaggccttcaggaaacttcccacctccaggcctgtatcctgagaggccattaaatgatcggcttcagaagtgttgctcagacttttaaaagcgtgcaccaccacacctaatctgcatgtcatctacagctttaaagtctgccctgccacccaggtgggagtgatagtgtaacccactcctccctggacccagtctcagcaagaggtgcctgcctgtgtgctcctgtgcagaattgttggttatttgtgtattttcatgtagtcagggagaaaacctgtttgctgtctcccacagaaagttcagaggaaatgaatgactttaaaaacaaaaacataggtgattaacttttttttttttttgtgtgtgtgtgggtgtgagacagggtttctctgtgtagctttgg

SEQ ID NO: 1074 - DNA, 2439 bp, Cricetulus griseus
ccgatgactacaaggtcaccagccaggtgctgggcctgggcatcaatgggaaggtgctgcggatcttcgacaagagaacccagcaaaaattcgccctgaagatgctccaggactgtccgaaggcaacgcaggagaggtggagctgcactggagggcctcccagtgcccacacattgtgcacattgtggatgtctatgagaacctgtatgctgggaggaagtgcctgctgattgtcatggagtgtctcgatggtggagagctctttagtcgaatccaggaccgaggagaccaggcattcacagaaagagaagcgtcagaaatcatgaagagcattggtgaggccatccagtatttgcactcaatcaacattgctcatcgggatgtcaagcctgagaacctcttatatacttccaaaaggcccaatgccattctgaaactcactgattttggctttgccaaggaaaccaccagtcacaactctctgaccactccgtgttatacaccatactacgtagctccggaagtgctgggtccagagaagtatgacaaatcctgtgacatgtggtccttgggtgtcatcatgtatattctgctatgtgggtatccccccttctattccaatcatggccttgccatctctccgggtatgaagacacgtatccgaatgggacagtatgaatttcctaacccagaatggtcagaagtatcagaagaagtgaagatgcttatccggaatctgctgaaaacagagcccacccagaggatgaccatcacagaattcatgaaccacccctggatcatgcaatctacgaaggtccctcagactccactgcacaccagccgtgtcctgaaggaggacaaggaacggtgggaggatgtcaaggaggagatgaccagtgccttggccacgatgcgtgttgactatgagcagatcaagataaagaagatagaagacgcatccaaccctctgcttctgaagaggcggaagaaagctcgtgccgtggaggccgcagcccttgcccactgagccgctgtgtttcccaccccactggaggacaagcaataactctacatgaatatattttttaaacaaagagacacaagctgcccactgctgcctcctgtcctcctgggctatgtggagcccagatatgcctctggctgattctgcccttggctctgacctccctggagaggagggttgggggatgtgtgaggaggggtgaggtgctcttgagcccgggctccttttgcattttatctgtaatttgacgtagaatttttatggaacttcttttattgtccccttccctactcgtcctttccccaagtccattcccatcttcaaaggctggggtttacccaagggtgttgtggaagttgttacagggcatgtccctgggttgttccatctggtccccctggcctcctactgtaacctggggtctccactggctctagaatctgggagctccagggagaggggcaaggagtggcagtaggtgtcactcagcctcatgctgaagccctcagacatcaccagtgtgcacaacagaggagtatgtgtgtacatgtgtgtatgcccaggtctgtaccagtgactgggcgttggagggtctagggaaggcagggctgcagggactcctgcttgaactgaacctgcctaaatgcctaggtagcttgtctagatccagagccaggtagtcatggcctctgtgttagctgggcaggggaggcagtgagtggtgagtgggcactggcagccgtcagaaggactgggcccttgcagggtgccctgtccaatgctggtcctagggccccgaggcactgaccactgagtagcctctgcttgctcatcttgccgttattaacccactcttgttgagttctctgaaatttttagccatttctcaatgggctgtctctccgctcccatgggtgagcctgggaaggttatacttcaaggtgtttgtatttcatgcatctcccccgagctctggggtacctgccaacctcccttctttagcaagggcaggaccacgtgtggtcttcctggatttccactatatggcctggtgggccagacagtcttctcaccaaagatgtcttgactctgtctctgcccactagccaccttaccctctaacaactcagcctgggtggggactccccaggattgaggaggaacaggttgggaagagtctttgtgccatggtcccccattcccctcttgctggaggaggggtggctccctcaggggttggtggaggaggggctcctggacatctctgggcctggggtcagagtccagatgcctgcagctcctccctcgtctttgaaggtgtgttcagcactcagactgttgtaaactgttgttttgtatgagcaaaattgtctttactaaacaaatttaataagttaaaaaaaaaaaaaaaaaaa

SEQ ID NO: 1075 - DNA, 2439 bp, Cricetulus griseus
cctgtttcaggtgatgttcctactagtcctgactgcatagacaaagttatggattatgttccaggaactttccaagacaatagttttacaatccagtacattttggataccagtgataagctgagtactgagctcttccaagacaaaagtgaggaagcttcccttgaccttgtatttgagctagtaaaccagctacagtaccatactcaccaagagaatgggattgaaatttgcatggactttctgcaaggcacttgcatttatggcagggattgtttgaaacatcacaccatattgccctatcattggcagatcaaaaggacaaccactcagaagtggcaaagtgtttccaatgattctcaggagcacttggaaagattttattgtaacccagaaaatgacagaatgagaatgaagtatggtgggtttatatgcatccatctcaggacttcatccaagtgcctgtttctagcagaggataaaagttatcgaatcatttacaatctttttcataaaactgtacctgaatttaaatatagaattttacaaattttgagagttcaaaaccagtttctttgggaaaaatataaaaggaaaaaagaatatatgaacagaaaaatgtttggccgtgaccgaataataaatgagagacacttatttcatggaacatcccaagatgtagtagatggaatctgcaagcacaactttgaccctcgtgtctgtggaaagcatgctacaatgtttggacaaggcagttatttgcaaagaaggcaagctactctcataacttttctaagaagtcctccaaaggagtccatttcatgtttttggtccaaagtgttgactggcagatatacaatgggcagtcatggcatgagaaggccccctcccagtcaatcctggcagtgtcaccagtgacttatatgactcttgtgtggataatttctttgagcctcagatttttgtctatttttaatgatgaccagagttacccttattttgttatccaatatgaagaagtcagtaacactgttgccatttgaaaaccttggtactactaagttatttgatatgaactcaatccagcatttgtagcaggtttgggtgggactgggtgggaaacagcattgaacagaagtagaattcttttcaggcccaatttttttaagtgctagaaagtaatttttttttttaaagaaataatgggtttttaaatggccactcattatttaattatttactaattgttagtgtactcagtgtggaaaagactaaagagtgcatattcttcattcacacttgtacatataggcagcaatattagtagaagtgtttggagacaaaaaaaaaacaaaaaaactgactagcctaattaaatgttgcttgggtctggtaggagtttggtcaaaacaaatagaggctgtgagcaaagtggggattctgtttacttaacattgataaaaccaactggaactgatactaccatgcttattacctatccaaagcattatgtgttatactttggggtagtataggttcatgtaattttggaaggtgggaagaatttttcattctgtgggcagaactgaaatacatgacccactcagaaacctccaaaattttcctgaaaattcagtatctatacagaggaagtaaaataataacaataaaggaaccatttggaaaaaattgtcaccaacaaaattccattaattagttgtggagtgtgatacatgtgttaaattcagccatggaaactttgccacagctgctgagttgagttgttaaagacagcaagcccacccctatgcctgctttgccagatgcactggatttcttggctgactctgtaccttacactacttactttaatagaaacacaaacttggaaatagtgccactggcccagcaagagcattgttgggtgaatgtgctgttgcctcaattcacagaggtagtacttttaagcaaagtaaaaacctgaataactaaagtgaaagtgactgttcataaaataatttaccacagaagtccttcagataccaacctctccttgtatgtttgtggttatctcatttacccaaactttacaggaaattctttgttatttaaagcaaagtatagctgtacagacctctcagtgaatcagtctgtttaagcacttaccagggcttccacataattatttattttgccctagttgttcctgttgtttgctgccattggcaggaggaaaagggcaactgtggcagtcgttcattcaattataacttgtaaaccagtgattcccaagtcgttttcaagttaagacatgttaccattgcttgtttgattttatggaacttgttcctttttttctccctaaaggaaacaaaagctttatgacatatttattttttaataaaactaagcaaaaataaaagttaattactttaaaaa

SEQ ID NO: 1076 - DNA, 2439 bp, Cricetulus griseus
  modified_base (1536)..(1536): a, c, t, g, unknown or other
catgtctgggctactgccaccttaggaatccagggcctggagatagcgaactcttctgtgggaagccaggtggggtgtgacccaggaacaagaagcatatcctcaccaatgacatcatgacagcaagagagcacagccctcgccatggtgccagggcccgtgcaatgcagcgggcttccaccatcgacgtggcagcggacatggtgggcctctctctggcaggaaatattcaagacccagatgagcccattttagaattcagcttaggtccatgcacgcaagaataagaacgtggacatcctctggcaagctgctgaggtctgtcgccgccttaatggagtccgattcaccagctgcaagagtgccaaggaccgtacagccatgtcagtgacgctggagcagtgcctgatcctgcagcatgagcacggcatggcccgcaggtcttcacacaagccctggaatgcatgcgcagtgagggttgtcgaagagaaaatacaatgaagaatgttggaagtcgcaaatatgcatttaactccctgcagctgaaggccttccccaagcattacaggcctccagaagggacttacggaaagttgagacatgaacacacggtttcctctaattagctgttatgtaactcaatgtgggtaccctctagtgtcacatatgattcttcaagaagacctgaaggattcgttttttatttttgtgtttttaaaaatacttcactaaagagtctatggagcatgatttttgtgttggaatctgtagggggtcatgtgtggctcaatagtgtggatagtaatggctgccctaacaatagcttccagctgtaactatatagttaacatagtttctagaagaagccagcttggtttgtctaaaactccaggagactttttcaaatacctacgtaggcactgctcacccaacttatttttctattcagtaactcacaggtgagcattgacttaaaatctactttcaaaaagtctgaatgtaaaacaggaggtacctcccccattaaacttcaggtccagagacagtagacactttaaatattttcagaataaatgttcttctaggagctttctaataatcttccagaagaccataaatcacatttgaatgtctaaagaaaccattttagtttttggtttgcaataatggttattgttggacaactattaagaaacagttaaaactatcccctacattgagagcctgagagggctttgtgagacagggaagttatgtatttcatagacaatttagtctggtcatctttttacaaggtgatgatgagtcttatctgcacatagcagatttttttccttagaatttatatgttttataaattctgtttatcataattctgtttacatgttatttaaatggctagtaaaaagaagtgtatatggagtatatccatgatgcatactaatgacttgtgaacaccatgggaattcttgtatatgtctagctagttttctttttttttttttttgcagtattttttgtatttattttgttttnttttttttttttttgttttttttttttttttttttttttttttttgcctgctgagagggagatgcactctgctgatgggtggctcactgctccgctctcagggcatggcacatggaaggtgagtggcagggaagctcttaccacccaaccttccacacaggggactgctctgctggtatcagattctcccgaagcctcagtccctgatcaaaggcccctgaggcttagtgtggctggctaagccctttacctcttccttggtcctatttaacttttaagtttttagtttctatttttttcttactttgacatcactgcctttttaaatatttctttggactttaaagttaaatgtttgccatgttctccagctttcctttctgtccaaaggacattacctgtccacactcacaagggaatagagcagaactggctcacctgtcagcaggtttgcatgtgaatcattttctcaattcttttttataatatgaatcactgtaaaactctaagaattggttaatcacggaaaagatgtggcttcagtgttttctctgaaggcattgtgactggcttccagcgaatcacacccccacttaaaaggaatgtgtggcgtctggacagctgggaatgccatgtggattctgtcagagctcctgcagcgcagctgcctttactttcctttgaagatgtaaaaatattgtataatactgttttatccccctcacttgtatttgccaagcttagtgcatttaaatacttttatttatttgtttgggacagtattaatatatatgaacatatagttactgttttatatattcttagctcatttaaagccatgtatgctgtaaatgtgcttgtctttagaatgataaacaataaaaactgacaagaacaattaaa

SEQ ID NO: 1077 - DNA, 2437 bp, Cricetulus griseus
ctgtattgtctgctcttgaccaaagccaggcacagccctcttctaaaccagcagaaatccctgcagtggcttcatgttggagtgggctgcaaatgtctccagaacataaagaactatctcattcttcccctggggagaatagctttgagtcatctttagagcttagaaactcgggccctatttcagaagtaaatgctggattttctcctgaagttaaagaagaattgaatgggccatttcttaatcaaacagagacagatccctctttggacatgaaagaacaatcagcaagatcctccaggcgcagcagttctgagttatccccagcaagagacgctctaggtctcggacaccactgttgccacgcaagcgctctcgaagtcgctcaccacttgctatccgtcgccgctctaggtctcgtactcctagagcaactcgaggcaagcggtccctaacaagatcccctccagccatccgtaggcggtctgcatctggaagtagttctgatcggtcacgttctgccactcctccagcaacaaggaatcattctggatctcgtacacctcctgtagcactcagtagctctagaatgagctgcttcagtcgtcctagcatgtcaccaacgcctcttgatcgatgtagatcacctggaatgcttgaaccccttggaagtgctagaacacccatgtctgtgctacagcaaagtggtggctccatgatggatggtccaggtccccggattccctgtatcatccaagagcatctgttccagaaaccattgctagtgccagtaacatctgctatcccagcatcagtgaaccttgctgactcgagaacaccagctgcagcagcagccatgaacttagccagccctagaacagcagtagctccttcagctgtgaaccttgctgatcctcgagcccctgcagccacagctgtgaacctagcaggagctagaacaccagctgcactggcagctttgagtctcacaggctctgggacacccccggctgctgcaaattatccctccagttccagaacaccccaggctcctactcctgcaaacctggtgggtcctcgatctgcacatggcacagctcctgtgaatattgctggctctagaacccctgcagccttggctccctcaaatctctccagtgccaggatggctccagcattgtctggtgcaaatctcaccagtcccagggtgcccctttctgcttatgagcgtgtcagtggcagaacctcacctttattgcttgaccgagccaggtccagaacaccaccaactgcccccagccagtctagaatgacctctgagcgggcttcttcccctgcttcaagaatggtccaggctccttcacaatctcttctccctccagcacaggataggcctcggtcccctgtgccatctgctttttcagaccaatctcgttcaattgcccagaccactcctgtagctgggtctcagtccctttcatctgggactgtagcaaagtccacatcctctgctagtgaccacaatggcatgctttctggccctgccccagggctgccccatgctgaaggtggggaaccaccagcctctactggggcccagcagccttcttcactggctgctctgcaaccaacaaaggaacgtcggagctcttcctcctcttcatcatcatctagctcctcctcctcctcatcttcatcatcatcatcatcctcttcctctggctccagttctagcgactctgagggctccagccttcctgctcaacctgaggtggcactgaaaagggtccccagccccgtcccagccccaaaggaggctgttcgagaaggacgtcctcaggagccaaccccagccaaacggaagaggcgctctagcagctctagttccagctcctcttcctcctcctcttcttcctcttcatcctcctcctcttcttcctcttcctcctcttcctcttcttcctcctcttcctcttcttcctcctcttcctcctccccttcccctgctaagcctggccctcaggccttacccaaacctgcaagccccaagaagccaccccctggcgagaggaggtcacgcagccctcgaaagccaatagactcccttcgggattcccgatccctcagttactcacctgtggagcggcaccagccctcgccccagccctcaccaagggatcaacagagcagtgagcgggtttcctggagaggccagcgtggggacagccgttctcctggacacaagcgcaggaaggagacacccagtccccgacctaatcgccaccgctcctccaggtctccataatctggacataatctggaacatgagtattcctcattttttcccagaagaatcatggaaggagtctttgtctgccttcccttgaaccttggcagcatcttgaggggagggctcttccccccaccccttgttttt

SEQ ID NO: 1078 - DNA, 2437 bp, Cricetulus griseus
ctggggcttgttcatcggcctcttgggtgtcgggtggctactgtgctctggccacggcgaggagcggcagcaggagaccgcagcgcagcgctgcttctgtcaggttagtggttacctggatgattgtacctgtgatgttgagaccatcgataaatttaataactacagacttttcccaagactacaaaaacttacttgaaagtgactactttagatattacaaggtaaacctgaagaagccatgtcctttctggagtgacatcaaccagtgtggaagaagagactgtgctgtcaaaccctgccattctgatgaagttcctgatggaattaagtctgcaagctacaagtattctgaagaagctaacctcattgaagaatgtgaacaagctgaacggcttggagcggtggacgaatctctaagtgaggaaacccagaaggctgttcttcaatggaccaagcatgacgattcttcagacagcttctgtgaagttgatgacatacagtctcctgacgctgagtatgtggatttactccttaaccctgagcgctacacaggctacaaggggccggatgcttggaggatatggagtgtcatatatgaagaaaactgttttaagccacagacaattcaaaggcctttggcttctggtcaaggaaaaagtaaagagaatactttttacagctggctagaaggcctctgtgtagaaaagagagcattctacaggcttatatctggtctacatgcaagcattaatgtacatttgagtgcacggtatcttttacaagatacttggctggaaaagaagtggggccacaatgtcacagagtttcagcaacgctttgatgggattttgactgaaggagaaggtccgaggaggctgaagaacttgtactttctctacttgatagagttaagggctctatctaaagtgcttccgttttttgagcgcccagattttcagctcttcacaggaaataaagttcaggatgcagaaaacaaagtgttacttctggagatccttcatgaaatcaagtcatttcctttgcattttgatgagaattctttttttgctggggataaaaatgaagcacataaactaaaggaggacttccgactgcattttagaaatatttcgagaatcatggattgtgttggttgttttaagtgtcgactgtggggaaagctccagactcagggtttgggcactgctctgaagatcttgttttccgagaaactgatagcaaatatgccagaaagtggaccaagttatgaattccagctaacccgacaggaaatagtatcactgtttaatgcatttggaaggatttctacaagtgtgagagaattagagaacttcaggcacttgttacaggatgttcactgaggaggacaggttgaaatgtgcctgtttctgtattagggcttctatttatactaaaagtaattaacttgttttaagttcaggtttaactgggaggactgtgttttcctggctaccttaatatacactggtatgcaacattccttttagagttatatagctattttaattgtgctgttttggtttgtagggaagtagaataactcaaaggcacaggagatttctaaacattgtagaaagataatagattatatatttattctcgtaatgcttcccctaatagtaaaattttgggggaaattttattttatataatttcagatttacagaaaagtttcaaaactagtataaaaaatctgttttattcaaattcattgattgttcacctgtgttgtaatgtcttaccctatcccacactggggattgagcccaggacctcaggcatcctcaggcctcgctttaccttctatgtagacgtggatatcctgtttttatttattgtttgaaaagtagtcatgggcatcatgctttaacccaaaatacttaaatgtgatgcttgggaaatttcccaaaaaaattattatttttttaaaagagggaaaaacaaaaccttacaaatctgagctaaactactataggccttaaaataaggaaacatctcacgccctagtcacctaaagtttgagttttgttcccttttttgacctgtgtaatcatagggtatacaattcatgtttttatacatgaaactaatttaacatcacatggcaattatagattctgtatacctcaaaattatgccccctttatatcatatataatgtctgagcaattaggacaggttgagatgtcacataagaaaagcaagatttatatatgtaatggttagaaatgtcactttacactgctgagtatctaatttgtccctaagacttggtccattgccaacatatagttggtgtctagtatttgttgatttgaatatgtaagtatgtatttaatatactctaagtgaatgatcatataactatgtttaacaatgtgtccaactttcc

SEQ ID NO: 1079 - DNA, 2437 bp, Cricetulus griseus
  modified_base (292)..(292): a, c, t, g, unknown or other
caaccagatcctagtggagcttcgggatgacatccgagaccaggtgaaggagatgtccctcatccggaacactgtcatggagtgtcaggtgtgcggtttccacgagcagcgttcccactgcagccccaacccctgcttcagaggtgtggactgcatggaagtgtatgagtacccaggctaccgctgtgggccctgcccccccggcctgcagggcgaacggcacccactgtgatgacatcaacgagtgtgctcactctgacccctcgcttcccgggctccagctgcatcaacnccatgcctggcttccactgtgaggccctgcccgtcaagggtacaagggtactcgagtgtctggtgtcggcatcgactatgctcgggccagtaagcaggtctgcaatgacattgatgaatgtaatgatggaacaatggaggatgtgacccaaattccatctgcaccaacacgctggggtctttcaaatgtggtccctgccgcctgggtttcctgggaaaccagagccagggctgcctcccagcaaggacctgccacagcccatcccacagcccctgccatgtccacgctcactgtctctttgaacgcaatggtgcagtctcttgccagtgcaatgtgggctgggcagggaacgggaacgtatgtgggcctgacaccgacatcgacggttacccggaccaggcccttccctgcatggataacaacaagcactgcaaacaggacaattgccttttgacacccaactctgggcaagaagacgctgataatgatggtgtgggagaccagtgtgacgatgatgctgatggggatggtatcaagaatgttgaggacaattgccgactgtttcccaacaaagaccagcagaattcagacacagattcatttggtgatgcctgtgacaactgtcccaatgttcccaacaatgaccagaaggacacagatggcaatggagaaggagatgcctgtgacaacgatgtggatggggacggcatccctaatggattggacaattgccctaaagtacccaacccactgcagacagaccgggacgaagatggagtgggagatgcttgtgacagctgccctgaaatgagcaatcctacccagacagatgcagacagcgacctggtgggggatgtctgtgacaccaatgaagacagcgatggagacgggcatcaggacaccaaagacaactgtcctcagctgccaaatagctctcagctggactcagacaatgatggacttggagatgagtgtgacggggatgacgacaatgatggcatcccagattatgttcctcctgggcctgataactgtcgtctggtacccaatcctaatcagaaagactcagatggcaacggtgttggtgatgtgtgtgaggatgactttgataatgatgcggtggttgaccctctggatgtgtgtccggaaagtgcagaagttaccctcacagattttcgggcctatcagactgtggtcctggatcccgagggtgatgctcagattgatccaaactgggtagtgctcaatcagggcatggaaattgttcagactatgaacagtgacccaggtcttgcagttgggtacacggccttcaatggtgtggactttgaaggcactttccacgtgaacacggtcactgatgatgactacgccggcttcctcttcagttaccaggacagtggccgcttctacgtggtcatgtggaaacagacagagcagacctactggcaggccacgcctttccgagcagtggcccaaccagggctgcagctcaaggcagtgacatcagtatctggcccaggtgagcacctccgaaatgctctgtggcatactggccacacccctgatcaggtacgactgctgtggactgacccacgaaatgtgggttggcgtgacaagacatcctatagatggcagctgctgcaccggccccaagttggctacattcgggtgaagctctatgagggtccccagctagtggcggattctggggtgattattgacacgtccatgcgaggggggcgtctcggtgtattctgcttctcccaagaaaacatcatttggtccaatctccagtatcgatgcaacgacacagtgcctgaggactttgagccattccggaggcaactgctccagggaagggtgtgaggtgccgccaccagattcagaaccctgactggagacctttgaccttggactctgttctggagaccttggggtctaatctacagctcctcagcctaactgatggttctctggcacccatcagggagcgcagctccagaggggtggtgaccccattgtgcaggggttggggaccttcgaaggggtatattactcaggtacgaaccccaggaaagacatcatcagcacattgccataaagtttcagctatttactaaaaaaaaaaaaaaaaaaaaaaaa

SEQ ID NO: 1080 - DNA, 2436 bp, Cricetulus griseus
cagactacaattcaccaacatattccatttaactgggattcagaatttgtacaactacatttttggaaaaaaaagaatgtctagtagctgccgctggaggcactacatcccatcaagttagtttctcctatttttaaattggatttaattcgctcttaacaacatggaactcattagaaagatctacagcactctggctggcagcaggaaagatgtggaggtgactaaggaggagtttgctctggcagcccagaagtttggtcaggttacacccatggaagttgacatcttgtttcagttagcagatttatacgagccaaggggacgcatgaccttagcagacattgagcggattgctcccctggaagaaggaatgctgcccttcaacttggctgagacccagaggcagaaagcctcaggggatgcagctccaccctttcttctccagctcgctgagtcagcctacaggtttggtctgggttctattgctggagctgttggagccactgctgtgtatcctattgaccttgtaaagactcggatgcagaaccaacggtcaaccggctcgtttgtgggggagctcatgtataaaaacagctttgactgttttaagaaagtgctccgctatgaaggcttctttggactgtacagaggtttgctgccgcagttactgggagtcgccccggagaaggccataaaacttacagtgaatgattttgtgagagataaatttatgcacaaagatggctcggtcccactttcggcagagattttggctggaggctgtgcaggaggctcccaggtgattttcacaaatcctttagagatcgtcaagatccgcttgcaagtggctggagagatcaccactggccccagagtcagtgctctgtctgtggtgcgagaccttggcttctttggcatctacaagggtgccaaagcatgctttctgcgagacattcccttctctgccatctacttcccctgctatgcccatgtgaaggcttcctttgcaaatgaagatgggcaggtcagcccaggaagcctgctcttagctggtgctatagctggtatgcctgcagcatccttagtgacccctgctgatgttatcaagactagattacaggtggctgcccgggctggccagaccacttacagcggtgtgatggactgctttagaaagatccttcgggaagaaggccccaaagctttgtggaaaggagctgctgcccgtgtgttccggtcctcaccacagtttggtgtcaccttgctgacttatgagttgctgcagcgatggttctacgttgatttcggaggagtgaagcccatgggatccgagccagctcctaaatcccggattactctgcctgctcccaatcctgaccatgtcggaggctataaactggcagttgcaacatttgcagggattgaaaacaagtttggactttacctacctctcttcaagccgtcagcatctacctcaaatgttactggcgggggcccgtaggagggctgccctggacgtggctgtagaatggttggaactgcagtgagccccatctcagattgaagcgtggcttcaccccttctgcatctgtctcatttaaattcaggtcaatgctttctatattaaatgcaatcattcgttttctggatgtttttgtaccaagatcatgtggaattattcctaattattctttggcactctgcccacaaacctgtgtttgtatcttttatacactgggatttgggcaacactaacttgatctagagtaagtctgaaaggaaattagggatgtctcctacctgaatgatagtctcgctgagtctactgaaaggcaaccatggttcctagagcaaagagttctgaggatgtttaaggtaatagaaagctgggtatatatttataaaaatgaaaaacactggaagggaaaaacccaaatatccagccccgactcaaattttaaacatgcacaaatttggcctctggattatattatgaaaggtttatgtgaaacatgttttttcataatgaaagccacattgaggatgtttagtaatcatcttctcttactagtaccaagtctactagggaaaagttttggatgttaaggaagtgcttttggcattctttattagagagacaggagaaacacaatcctactcctgagtgtgctgatttggggttaatacttgtatgatgagcacatgctgattcctgccacttttaccagacactgtaagaataatgtccaccacctcatgctggcacaagcgtactcccaccccctagctggcacccatttgcctttaaaatcactttatcttgaatcatgtcagacaaatgttctctaagtttttatttaatctggggtgctttgtatcatggtcagaagcttgtgtgtttgcaaagtgggaaataaactatttttaaagcta

SEQ ID NO: 1081 - DNA, 2436 bp, Cricetulus griseus
gtttgccatccagccaaacaccaccgggaaacagctttttgatcaggtagtaaagactattggcctccgggaggtgtggtactttggcctccagtatgtggacaataaaggatttcctacctggttgaaacttgacaaaaaggtgtctgcacaagaagttcggaaggagaaccccgtccagttcaaattccgggccaagttctaccccgaggacgtggcagaggagctcatccaggacatcacgcagaagctgttcttcctccaggtcaaggatgggatcctcagtgatgagatctactgcccgccagagaccgcggtgctactggggtcctatgcagtgcaggccaagttcggggattataacaaggaaatgcacaagtctgggtaccttagctcggagcgactgatcccccagagagtcatggaccagcacaagctcaccagggaccagtgggaggaccgaatccaggtgtggcacgcagaacaccgaggaatgcttaaggacagcgctatgttggaatacctgaagattgcccaggacctggaaatgtatgggatcaactattttgaaatcaaaaataagaaaggaacagacctttggcttggagttgatgcccttggacttaatatttatgagaaagatgacaagttgaccccaaagattggcttcccttggagtgaaatcaggaacatctctttcaatgacaaaaagtttgtcattaagcccatcgacaagaaggcacccgactttgtgttctatgccccccgcctgagaatcaacaagcggatcctgcagctttgcatggggaaccatgagctgtacatgcgccgcaggaagcctgacaccatcgaggtgcagcagatgaaggcccaagcccgggaagagaagcaccagaagcaactagagcggcaacagttggaaacagagaagaagaggagagagaccgtggagagagagaaggaacagatgcttcgggagaaggaggagctgatgctccggctgcaggactatgagcagaagaccaagagggctgagaaagagctctccgagcagatcgagaaggccctccagctggaggaagagaggaagcgagcccagaaggaggccgagcgcctggaggctgaccgtgtggctgccctgcgagccaaggaggaactggagagacaggcacaggatcagataaagagccaggagcagctggcggcagagctggcagagtacactgccaagattgcactgctggaggaggctcggaggcgcaaggaggacgaggtggaggagtggcagcaccgggccaaagaagcccaggacgacctggtgaaaaccaaggaggagttacacctggtgatgacggctccgccacctccgccacccccggtgtatgagcctgtgaattaccacgtacaggaggggctgcatgatgagggtgcagagcccatgggctacagtgctgagctctccagtgagggcattatggatgaccgcaatgaggagaagcggatcactgaggccgagaagaatgagcgtgtgcagcggcagctgctgactctgagcaacgagttgtcccaggcccgggatgagaataagaggacccacaatgacatcatccacaatgagaacatgcggcaaggtcgggacaagtacaagacactgcggcagatcaggcagggcaacaccaagcagcggatcgacgaattcgaggccatgtaaaggccaggccacactgcgaccaaagggcggagggcacctcccagcagggtgtcacacttggctctttagtactcttaagtctagaaacccccttgacaggttccagtcccttaaagagcagttacgggccagaactgttctgcaccaggccccagtggaagcccccctggttacttccagttgtatcatagtgccaaacaggccagattttttttgacagttacagaatcacttcctgtctgaatcagggggtgccatactctctctagttttgaaatgagctcaaatcgattttgttcttgatttctatgaaggatccatcttcgtgttttgaggggtgaaaatgattttgaaatttaaagcacgctcccgcacagtttccttcctccacaccgctggcagagtctacggtggtccttcagagtgcatggtacactctgatataaaactttgttttcatgcttactggtagcatacgttgttggacttattatacctaatgatctgctatagagaatagtatttatataagtgataatatgggtttgtaacattagttttaaaaagggaaagttttgttctgtatattttgttaccttttacagaataaaagaatattaagaaccatgtaatggagacacttaatccgacatgggagcagttgggaaactgactactgtggtgattgtgtctgtatatatgttagtgggttttgtgcatgtaaa

SEQ ID NO: 1082 - DNA, 2434 bp, Cricetulus griseus
aagaaggaaggaagaatagatgatttgttaagagccaactgtgatttgagacggcagatagatgaacagcagaagatgctagaagaaatacaaggagcgattaaacagatgtgtcaccatgagcaagaagcttcttatagaaaagtcaaaacaagagaagatggcatgcagagataagagcatgcaggaccgactgcgattgggccactttactactgtccggcatggcgcctcttttactgaacagtggacagatggctatgccttccaaaacctcatcaagcaacaagaaaggataaattcacagagagaagagatagaaagacaacggaaaatgttagcaaaacggaaaccccctgccatgggtcaggctcctccagcaaccaatgaacagaaacaacggaaaagcaagaccaacggagctgaaaatgaaacgttaaccttagcagaataccatgaacaagaagaaatcttcaaactcagattaggtcatcttaagaaagaagaagcagaaatccaggcagagctggaaaggctagaaagggttagaaatctacatatcagggaattaaaaggatacataatgaagataattcacaatttaaggatcatccaacgctaaatgacagatacttgttgttacatcttttgggtagaggaggtttcagtgaagtttacaaggcatttgacctaacagagcaaagatatgtagctgtgaaaattcaccagttaaataaaaactggagagatgagaaaaaggagaattaccacaagcatgcatgtagggaataccggattcacaaagaactggaccatcccagaatagtgaagctgtatgattacttctcgctggacaccgactcgttttgtacagtattagaatactgtgaaggaaatgatctggacttctacctgaaacagcacaaattaatgtcggagaaagaggcccgatccattattatgcagattgtgaatgctttaaagtacttaaatgaaataaaacctcccatcatacactatgacctcaaaccaggtaatatccttttagtaaatggtacagcatgtggagagataaaaattacagattttggtctttccaagatcatggatgatgatagctacaattcagtggatggtatggaactgacgtcacaaggtgctggtacttactggtatttaccaccagagtgttttgtggttgggaaagagccaccaaagatctcaaataaagttgacgtctggtcagtgggtgtgatcttctaccagtgtctttatgggaggaagccttttggccataaccagtcccagcaagatattctacaagagaatactattcttaaagctactgaagtacagttcccgccaaagccagtagttacacctgaagcaaaggcatttatccggcgatgcttggcctatcgaaaggaggaccgtatcgatgtccagcagctggcctgtgacccctacttgttgcctcacatccgaaagtcagtctctacaagtagccctgctggagctgctattgcatcaacctctggggcgtccaataacagttcttcgaattgagaccaactccaaggccacagactgtttagcacagagtggacacatggcatcagcagtgggtttggaacagtgaatccgaatggatctcatgaaacctgtaccaggtgcttttcttttcttgctttttttcccatccatagagcatgacagcatcgattctcattgaggagaagccttgggcagctctggccaggcctcataggagaagaccccgcccggggtccggcgtcaacggtcactgtgtgtggctgctctgagtgaggaaaaaattaaaaagaaaaaactggttccatgtactgtgaacttgaaaacatgcagactcaggggattccctgatgcagtgcttcagatgaagaatgtggacttgaaaatacagactgggctagtccagtgtctatatttaaacttgctcttttcttttaataaagtttaggtaccatctcctgaaaagcttgtagcacagaggctcagctggggatggtgtttgacttcggaggaaaaagttgctatcgcccattaaaggcactagagttagtgttctatcccgaaataatttcagtttttaaaaacatgcagcttccctcaccccttttttatttttgaaagattacatttggtcataaagtgaaacccgtattagcaagtacgtggcaatgttcattccagtcagaggcagctcctgccctctggtctcccgcgggagctctgagatgcctgggctttgccatccgacgaagaatgaggttagaagactgcagctggaggctctcgaggttttcagatatttcttcacaatttgaacacttgacggttgtcccttttaatttatttgaagtgctatttttttaaataaaggttcatctgtcca

SEQ ID NO: 1083 - DNA, 2434 bp, Cricetulus griseus
aagaagatgaagaaacgcatctgcctcgtccttgactgcctctgtgcacacgacctcagcgacaagaccgccgacctcatcaacctgcagcactatgtcatcaaggagaagaggctcagcgagcgggaggctgtggtcgttttctacgatgtggtccgagtggtggaagccctgcaccagaaaaacatcgtgcacagagacctgaagcttgggaacatggtgctcaataaaaggacccatcggataactatcaccaacttctgccttgggaaacaccttgtgagtgagggggacctgctgaaggaccagagggggagccctgcctacatcagtcctgatgtgctcagtggccggccataccggggcaagcctagtgacatgtgggccctgggtgtggttctcttcaccatgctctacggccagttccccttctacgacagcatcccacaggagctcttccgcaagatcaaggctgcggaatacaccatccccgaggatgggagggtctctgagaacacagtgtgtcttatccggaaactgctggtccttgaccctcagcaacgcctggccgctgcggatgtccttgaggccctcagtgccatcattgcatcttggcagtccctgtcctctctgagtgggcctttacaagtggttcctgacattgatgaccaaatgagcaattctgacagctcccaggaggcaaaggtaacagaggaatgctcccagtacgagtttgagaactacatgcgacagcaactgctgcttgctgaagagaaaagctccattcacgaggcccggacatgggtgcccaagcggcaatttggtagcatgccaccagtgcggcggctgggacacgatgcacagcccatgacttccttggacacagccatcctggcacagcgctatctgcggaaatagtgccctcagctagggcaccagccccagcacagctctcctcagcccatttttttaattctgagaattctagatacctgatctgcttttaatcatgacattttaatctacctctgtctacctaaccatgctgtctctggtccgagtgccgggaggaaaaagaggggagcctatgctcgccatccaggctctggaacagctacagcctggccaggccactgctcctcacagtccatataagctgaccttgcagctcgctactggcccccagtaagcacccttgccactgaccatgtccccaccactaccccagggcccgcccccagtctaagctttggaacactttcacctcatctcccgcccaattcaaatatatttattttttactgcacccaactttcagagaacctcacctcacagcgagacttggagaaaacctgtagggaacggggacctacctacctacctggcttgagaacagccctgctatcctttttgagccgaaattttgaagtggatgcccgtcttgccagaaatgctgttctctccagaatgccccttcctgcactggacttggcacacccagtaccaagcaaagacccaattttggaggcctacaccctgtgtaccctcagagaggacgatcgatctccccctctggcagtcctagacttcctgcctcttgctctccagtgggggaggccatgtttcctagagtgtgagctgcccctcaccccctgaaaagctgactcactgtgagtgaccttgggcaagttacccaaaccttgtgcctcagtttccccatctggaaaaaatggggccacctcttgccagccgtagcagggccgcccatgccccttcctccccatatcccctatctagccctgggcgcctgtgcctctgttttgctgggtctgcaggaacccacctgagcccagcacttcccctagcacccagccctgcctctagttcagccatctggccgctgagagtcagggcatggtgctgggggcagtgggggctcttttctatatttatttgataacaaaaagtctcctaagggagcagaaatgcagtcagcctggactccagcccatgactgccctccagtgaggctctgaggcctggttaaacgggccctcctgggtggacgcccctgcctagtgtcttaggcctgcatccatagtcctccttttaaaagcaataccttcaggtctgcagagcccatcagaccgcctgattcctgccgaggtcaaccctaggactgatggtatttttggcaatgcagataagaggaggttgggccttccctcactggtgtcatacactgagaagtcctattagtaaaagaaaaaacaaaaaacaaacaaaacaaaaaaaaacaaaaaaaaaaacaaaaataggaaaaagtacaacaaaaaagtttagtataaagacgttatttttgtactacatggggactcttcctgcatgtcagcaataaaacttcctgatctggagcaaacaaaaaaaaaaaaaa

SEQ ID NO: 1084 - DNA, 2434 bp, Cricetulus griseus
gctggaccagatttgtcatttcttttgatgaaggcaaaaccactatgaacttcattgaggcagcactgttgatccagggctcagcttgtgtgtacagtaaaaaggtggagtacctctactcgctggtctaccaggctctcgattttatttctggcaagaggcgagccaagcagctctctttagtacaggaagatgggagcaatagggctgtcaactcaggaactctctatgaaacagaggatgagctccggtcactggatgacttccctgactcccgggctaatgtggatctgaaaaatgaccaggcatccagtgagctgcttatcataccccttctgcccatggccctggtggcccctgatgaagtggaaaagaacagacaaccccttgtatagctgtcagggtgaggtcttggccagccggaaggattttaggatgaacacatgtacccccgatcccagaggagaaggcccagtgcccagcgatgcagatgaggatgcagaggatgcagcagagctcccggaggtggctctagagcctgcagagcccaggacctcacagcagagtaccaccttgccaaggagatatatgctgcgggagcgacacggggccctggagcctgccacccagccacaggagacccaagacgcctggcagagcctggacccttttgactccttggactctaagctcttccagaaaggtaagccctattctgtgccacccggtgtggaagagcctccaggacagaagcgcaagaggaagggtgctaccaagctgcaggacttccaccagtggtacctggctgcctatgctgagcatgctgacagcaggaggcctcggcggaagggcccgacttttgcagacatggaagtgctgtactggaaacacgtaaaggaacagctagagacccttcagaagcttcagagacgtaagatgactgagagatggctgcccagggccacggaggatctgtggcctgtagaggaagaacgcttggaagaccccctagaagacctaggggtagcagatgattttctggagcctgaagagtatgcagagcctgagggggtggtgcctggggaagctgctgacctagatgcagaggctatgccagagtccctgagatatgaggagctggtccgaagaaatgtggaactcttcattgccacctcccagaagtttgtgcaggagacagagctgagccaacgcatcagggactgggaagatactatccagcccctgctccaggagcaggagcagcacgtgccctttgatatacatacctatggggaccagttggtttcaaggttccgccagctcaatgagtggtgcccttttgcggagcttgtagctgggcagcctgcttttgaggtgtgccgctccatgctggcctctttgcaactggctaatgactatacggtggagatcacccagcagccaggactggaggcagctgtggacaccatgtctttgagactgctcacacaccagcgagcccatacgcgtttccagacctatgctgccccctccatggcccagccttgagtgaagagcactgaggcagggtggaagagtagtgtatacctgataatcttgtttcccttgtgcggtggggccatttactccagtgctggcctctatgtgctgacgtacactgtctacaatctgttctgctgacctactccgaccatagtagtctgtgaagagtccatctgggttgagcaagtagatggcaatggagtggtccacaatatagtcctggtcctcatccttgggaccagcactgtagtatacacggtagttgcgactagcctgggccacttgttctttagaaccagtcagacccagcagtcttgggtggaagtcctgcacataccgggccatggctgccacgtcatcccgttctgggtccacagtgatgaagacaggctgcaccaggggcaggtcaggctctgtctccagcttctgtaccacttgaaccagcttttccagctcatcagggcagatatcagggcagtgagtgaagccaaagtacatcagtacccactggccttggaagtcagctttgcatcgaggctggcctttgtggtccagtaggctgaagtcaccctggcccacagcagcctggcgcagggcctccgttcgttgctgttgacgcctctgttccttctcagctcttgctgccagccaggcccagcccagcccagctccaaacagggcagtgatcagcagcctagttcttagcccgggaccttggggctggctctgccctgaccagtgtctggactttacatacagagtttcgcctcctgggatcctgaggactggaggtttgaactgggagagcctgggccaaactctgggccctagagcctgtagcaccatggacatgaagctcctggaaaagaacagaatatgctttgcctgggca

SEQ ID NO: 1085 - DNA, 2434 bp, Cricetulus griseus
gaagctgttaaaaatgaactccgaaggcaagcaccaccacctcctccaccctcaaggggagggccgccacctcctcctcccttctgatggtgaccatcaagttcccgctccttccggaaacaaagcagctcttttggatcaaattagagagggtgctcagcttaaaaaggtggagcagaacagtcggcccacgtcctgctcaggaagggatgcgcttttagaccagatacggcagggcattcaactgaagtctgtgtctgatggccaagagtccacaccgcccgcacctgctcccacctcagggattgtgggtgcactgatggaagtgatgcagaaaaggagcaaagccattcattcctcagatgaagatgaagatgatgatgatgatgaagattttgaggacgatgatgagtgggaagactgatctatatattatatatatatatttttaaggtgaaatactaaacactactttctgtctatggatctgtaaaattatcatgtaaatgttctaccaatttgctgtatatttttgttgccttttgcttttttttaaattaatctgtgcaatacctcaatttaatctgtaaaggtttgttataatcctacacaaaccttaatgtaatttagttagaacgtcagaaggagaacactattttcataccctacttttctgtacctaaattttcttaataaaatttagcatagcactacattctttttcaagtgatgtaaactttagtttctttagccccttcattttgaatatgatgccacatatgaatgttgaagctgatacattgcacagttctctagacatcactacactgatgaagtttttcaaattttagcaatatgttctgcttaaaaatcactacagacactagtgaagagaaacagtaggcacctcttctgtagtattgcttgccattgtaagcagtggcatctgcaggcaggaatcctggtgagccctcacacatctatacttgaccaaaggggcttcatgttgtggcaaatgtgacaggctcttttgcattgttgtattcagaaatgcaaattgtaagtgtcagattgttgggcaacagtatgcacaaatgctaaacctcacgtacaccgtatgtttttacttttgatggtttctccaggtttttttcaaaaatctgatgaaaagtaacattttttcttaaaagattgatggtaccaatggcaaatttcttagaatacataactaatttgatagatttttttaaaaaaataactttacagcctgcacacttgttatgcatattagatggtgtgttaaaattaggttttccttgcctctttacagtacactaatctgcctaaagatggccatttcatatttatagtgataattatcttacctacctacctactttaaattttaggtagacaattatctgatttaaatagtcatatttttctcatattgagttgtatgcagaatgtagcttcaaatgtattcattatagtcacaatatccaactaaaaattatgatatctagaagtataccgaccaaaatctagtattgacatgatcttgacaggctggacctgcaagatatggtttgaattttaacagtttatcacataatctttagtgatcatgcatctagttattgtcaggaataatttaaaaggtttagttgctgaaagcagttaagtggtacagtaagacggttaagttattcaaagaacgttaccttccttgcaagagtaattacagcacattggaaagattctcaattttgtgtttcttagttaaaaacctaaaaatgtcttttgagataatgccaattctgatgtcccttaccttttgccaagaagtttgggatttgtttccaacttatttgatatttgaccaggagcttgcctagagactctcaattctttgagttgcatatacatgggaggttatattatttgccaaaggcagttgagttcattcttttttcatacagaagaagtgttttgtttttgttttgcttcttatttttgtgcaaagtctaaattataggagctctggaactcagtacaggcatgaagagtaaatccactctgccgagtaaggtaccagttgtacgtctcagtcctcactatcttgcactatgggtggcactatacctgtgcatcatctgcaagtctcactgatatatcagctacgtgattgtctggtagcctttgcatttaacaaactagcatgaggccttttatatctaaatgctatgtgatagacaatttcagctagccacatattgtattatgaaattcataaagattttcaatcattcaattccatttatcgactgaaattttgtttagtatgtgaatttttttttgaaatgtatagtgaataggatgttgcactggtggcaattcatcatggagcataataaaattaatttgacccaaa

SEQ ID NO: 1086 - DNA, 2432 bp, Cricetulus griseus
aataaggagatcacagaaggtgagtgaggtcgaggtttattcaagagccaatgaacaggaaccttgtggttggtggctggcccggttcggatgatgaagggagatttttatgtcattgagtatgctgcctgtgatgctacctacaatgagattgtcaccctggaacgacttcggcctgttaatcccaacccccttgcaaccaaaggcagcttcttcaaggttaccatggctgtgcctgaagatctcagagaggcctgctccaatgaaaatgtccataaagagttcaagaaagcactgggagccaattgcatctttctcaacatcacaaacagtgagctctttattctgtcaaccacagaagcccctgtgaagagggcatctttgctgggtgatatgcattttcgaagccttcgaactaaattgctgcttatgtcccgcaatgaagaagccaccaagcacctagagacaagtaagcagttggcggcagcgttccaagaggagtttacagtgagagaggacttaatgggcctggcaattggaacacatggtgccaacatccagcaggctcgaaaagtgccaggagtgactgccattgagttgggtgaagagacctgcactttccgaatctatggggagacgcctgaggcatgccgacaagctcgaagctacctggaattttctgaggactctgtacaagtacccaggaacctggttggcaaagtgattggaaagaatgggaaagtgatccaggagattgtggataagtctggtgtggtgagggttcgtgttgaaggtgataacgacaagaagaacccccgggaggagggaatggttcccttcatatttgttggcacccgagagaatatcagcaatgcccaggcactgctagagtaccacctctcctaccttcaggaggttgaacagcttcgcttggagagactgcaaattgatgaacagcttcggcagattgggctgggcttccgtcctcctgggagtggacggggtggtggtggtggtggcagtgacaaggctggctataccacagatgaaagctcctcttcttccttgcacacgacccgaacatatgggggcagctatgggggccggggccggggccggaggactggtggccctgcctatggccccagctcagacccatccacggcttctgagacagagtcagaaaagagagaagagcttcatagagctggacccagtgaccgagatcgagatcccccaaaccgtggagaagagagccggaggcggccgattgggggccggggaaggggacccccgcctgttccccggcctacctcaagatacaactcgtcatctattagctcagtgctaaaggatccagacagtaacccttacagcctattggacacatctgaaccagagcccccagttgattcagagcctggtgaaccccctccagcaagtgcccgccgtcgccgttcccgccgccgtcgtactgatgaagacaggacagtcatggatggaggcctggaatcggatggtcctaacatgacagagaatggcctggaagatgaatcaagaccccagcgacggaatcgaagccgccgtcgccgcaatcgtggtaatcgaactgatgggtccatcagcggagaccgccaaccagtgactgtggcagactacatctcacgggcagagtctcagagccgccagcggccacctctggaacgcacgaaaccctcagaggattctctttcaggacagaagggcgactctgtcagcaggcttcccaaggggagctctctgcccccttggagttgggtagcttggtgaatggggtttcataaacctccagtccacatccctcctttctccatctcgcttgctgcccaccaccatgaccctcatgggtccaactgacctgcgctggagctgctcttatctacgggggaggggggtggcacagcagcttgggtccccccaatctccaggagctagtggaggggtgtgtaacagggtcaccccctccctcttgtccacccttcacccccagggtgaggggagcctccccttccctatcagactggatgtgcctttatcctctaatgccccgacctctaaacacccccgttctccgcctgttggtgggggtgctccttgacccacccagatttgacagttcaggggggctcccctgctatccctcctcccatcctgtaccccccatttctggggcctcatcactgtggaagacggggatagtgagggtatttgtgggtgggaggcatggggaaggttttggagtagaaccaggggtgtgtatgaaggggggtgacaaggtcccccagggagttggggggaacaaccttgtctggtggataagaaggcgtatttatttttcactgtacagtatttaaaaagagaataaaaaaatccaaatggacaaaaaaaaaaaa

SEQ ID NO: 1087 - DNA, 2432 bp, Cricetulus griseus
gacaatggtaaccaaatgtcagatacggtcactgtagaagttactcagtacaacccacctttccagtctgaagacctgattacatgtcggttaatggtgccaaacttttcaagccagatgacctatctttttatggagaatgccgtcttcgtgtgctccacgggaactggggaagttttctcttcctcaggagaaaattgtctttgatacacaaggagatggcattttgggtgctggttcttgtggcggtgttccgatccttttctctaggatagtggtctggtgtctgtcactccgagggaaaatgtgtccctattagcagaggacctggaagagtctttggcctattcagttggtggacgaggcaatgagagtatggtttttgagaccacaacaaaaaatgaaactgtagcccatgaagataagacaaaactccttaaagctgcattccttcagtactgcaggaaagatttgggccgtgctcagatgatggctgatgagttgttttcttctcaaactgacttggattcggactctgagttagacaaggctgtgactcagatcagtgtggacctggtggatgactacccagcctcagacccacggtgggcagaatcagtcccccaagaggcccctgggctgagcaacacatcgctgatcattctgcaccagctggaggacaagatgaaagcccactgcctcttggtggacttccttcaccaagttggcttgtttagacgtctgggctcttatccaatcagagggacacccatgaccacccgactgctgctctgcgaacatgcagaaaagctgtcagctgccatcacactcaaaaaccaccactctcggctgcctgacctggtgaatgcagctatcctgcttgccctgaacaagagggagtgtgaggtcccatccagcctgactcctgccgatgtcttctttcgtagaggtgtcccaggtagacactatctgcgagtgcctgctggagcatgaggagcaagttcttcgtgatgtttcgttagactctcaggagtgggctgaggtggcgatccatgtcaatacagtcctcaaggacatgctacaggctgccactcattatcgcctaaacagaagctccatgtacagtcgggaagaaccacaaggggaagaaccagagtatgtgccatggacagctacaagtggtccatccggtatccgcacagcaatcatgcgccagcatgggatcatcctgcagatggtgtaccctcaagctgatagcaacctccggagcattgtaatggagcagcttgtggcactgattgactgcttcctggacagttacgtttcccagctgaagtctatagagaaatccagtgaccaagaaagatacagcaatctagaagtggaatacctgcagaaaagatccgaactcctctccccccttctcacactaggccagtatccatgggcagcttctctggcagagaagtactgtgactttgatatcctggtgcagatgtgtgaacagacagacaaccagtcccgactccagcgctacatgacccagtttgctgaccagaatttttcagactttctgtttcgttggtacctggaaaaaggaaagcggggcaaattattgtctcaacccatttctcaccatggacagttggcaaattttttgcaagcccatgagcatctcagctggctacatgaaattaatagtcaagaattagaaaaggctcatacaacgctgctcggtttggcaaatatggaaactcgttacttcgcaaagaaaaaaacccttcttggcttgagtaaactggctgcattagcttcagacctttcagaggacacgctgcaagagaaaattgaagcaatggctgagcaagagcgcttcctgctgcaccaggagacgctgccagagcagctgctgaccgagagacagctgagtcttagtgcaatgcctgtgttgactgcaccacagctcatcagtctgtacatctgtgaggaaaacagacgagccaatgaatatgattttaagaaagccttggacttgttggaatatattgatgaggaggaagatgtgagcattgatgacctgaagctggagatcctgtgcagagctctgcagagagatgactggtctagttcagatggcaaagatgatccaatcgaagtgtctaaagacagtgtatttgtgaagattttgcagaaacttataaaagatggcatccagctcagcgaatacttgccagaggtgaaggacctacttcaagcagaccagctgggaagcctgaaatccaatccttactttgagtttgttctaaaagcaaattatgagtattatgttcagggacagatatgacatttgtagaaattgttgcttctaaaattttataaatatttgcttataaaaaaaaaattttgatgccaaaaaaaaaaaaaaaaaaaaa

SEQ ID NO: 1088 - DNA, 2432 bp, Cricetulus griseus
gagaagacactaaagcttcaaaagttgttagaaagggaaaaagatgtccgaaagtggaaggaagaattactagatcaacggcgtaggatgatggaagagaaattacttcatgctgtaatttaaaacggggaggtactagctacaagcaattgtgaagaaggctcaagaggaagaagctaaaggtaaatgagattgcctttataaatacccttgcaagaagctatggaagagctgcagaaaaattcagctcaagcatgatgaaagcattcgaaggcacatggaacagattgaacaaaggaaggaaaaggctgctgagttaagcagtgggcgacatgcaagtactgattatgcccctaaactgaccccttatgaacgaaagaagcagtgttctctctgcaatgtcctgatcgcttcagaagtttatctctttagccacattaaagggaaaaacatcagcaagctgtgagagagaatagcagtatccagggcgtgaactttcagatgaagaagtggaacatttgtctttgaagaaatatgttgttgacattgtgattgaaagtgcagctccaccagagcctgtagaagatggagaagaacgaacaaaagaataaagaaaaaagcagggctaagaatatgagagtttagtggaaaccaaaaaattctggctctgattcaccttataaagcaaagcttcaaagattagccaaagaccttgtaaaacaatttcaagtacaagacagcggctccctgggcaaacaataaggcttcagctttggatcggacccttggtgaggttgctagaatattggagaaagagaatatagcagatcagattgcatttcaagttgctggtggattaacagcccttgaacacatccttcaagtagtggccccagcctcaaacatgaacacagtttcacgaattcctcctaagtctctctgcaatgcaatcaatgtttacaacctcacctgcaataactgttcagaaaactgcactgatgttctgtttagtaacaagattaccttcttaatggatctcctgatacaccaattgacggtttatgttccagatgaaaataatgctgttttgggaagaaatacaaataaacaagtttttgaaggattgacaactggacttctcagagctggtgctgtggtttttagctgtctgattgccaaccgaccagatggaaacagccggccagctacaccaaaaataccaacacaggaaatgaaaaacaaaccctcacaaggtgatgcttttaacagtcgagttcaagacctcatcagctacgtggtgaacatgggtctgattgacagactgcatggctgcttcctctcggtgcaaggcccagtggatgagaatcccaaaatggccacatttttgcagcatgccgcaggattcttacgtgggatgtgctcactgtgctttgctgtcactggaaggtcctacagcatatttgacaataatcaccaggatcccacagggttgacagctgcccttcaggccacagacttggctggagttctacatatgctctactgtatcctcttccatggcaccatctcagaccccagcactaccagtcccaaggagagttacacccagaataccatccaagtagccattcagagtttacgtttcttcaacagtttcgcagttcttgatttacctgcttttcagtctattgtaggggcagagggcttgtcccttgcattccggcacatagctagctccctgctgggccactgcagccaagtctcctgtgaaagcctccttcatgaggtcatcgtctgtgtgggctacttcactgtcaaccacccagataaccaggtaattgtacagtctggccgccaccccacggtgctacagaagctctgccagctgcccttccagtatttcagtgacccaaggctcatcaaagtgctgttcccttcgcttatcgctgctagttacaacaaccttcagaacaagatcattctggagcaagagatgagctgtgttttactggccacattcattcaggactttgcacagactccgggtcatgtggataaccagtctgcctatcccaaaggaaaacgtgggaacctgggggactacctggagctggctaacagatttcctcagcaggcctgggatgaagctcggcaatttttcttgaaaaaagagaaaaaataaatgttttttagctaattctgtatttgagtacctttgttagtgttttacattgtttcttcagggaccctggtgtgtttataatctcctgctgtagatatgttcctctgtggactgtttataaagactgtacatactggactgttcttcctaattttgcaaattgagtttatttcatttctgcacaatattttggagtttgtttacttccatactatgtaatttgcatttgtaatatgagtaaaattagaca

SEQ ID NO: 1089 - DNA, 2432 bp, Cricetulus griseus
attgaattcaaatgactatggttatggggacaaaagagacccttagaagatggagatcaaccagaagctaaaaaagtttgctcctcaaaatgactcttttggagcacagttacctccgatgcatcagcagggtcttgtatgctaactggaacacctgaatctgtccagtcagcaaaaagattactggaccagattgttgaaaagggaagaccggcccctggctttcatcatggcgatggacccggaaatgcagttcaggaaatcatgattcctgccagcaaggcgggactcgttattggaaaggggggagaaactattaaacaacttcaggaacgtgctggagttaaaatggttatgattcaagatgggcctcaaaatactggtgctgacaaacctcttaggatcactggtgacccgtacaaagttcagcaagccaaggaaatggtattggagctaattcgtgatcaaggtggtttcagagaagttcggaatgagtatggttcaagaataggaggaaatgaagggatagatgtcccaattccaagatttgctgttggcattgtcataggaagaaatggagaaatgattaaaaaaatacaaaatgatgctggtgttcgaatacagtttaagccagatgatggaacaacaccagataggatagcacagataacaggacctccagacagatgtcagcatgctgcggagattatcacagaccttctacgtagtgttcaggctggtaatcctggtggacctggacctggtggtagaggacgaggtagaggtcagggcaactggaatatgggaccacctggtggactgcaggagtttaatttcattgtgccaactgggaaaactggattgataattggaaaaggaggtgaaactataaaaagcataagccagcaatctggcgcaagaatagagcttcagagaaaccctccacctaacgcagaccctaatatgaagctttttacaattcgtggcactccacagcagatagactatgctcggcaactcatagaagagaagattgggggcccagtaaatcctttagggccacctgtaccccatgggccccatggggttccaggtcctcatgggcctcctgggcctccagggcctggaactccaatgggaccatacaaccctgcaccttacaatccaggaccacctggcccagctccccatggtcctccagccccatatgctccccaggggtggggaaatgcttatccacattggcagcaacaggctccccctgacccagctaaggcaggaacggatccaaactcggcggcgtgggctgcttactatgctcactattaccaacagcaggcacagcccccgcctgcagcccctacaggggcaccaactacaacccaaaccaatgggcaaggtaactacggagatcagcagaatccagctccagctggacaggttgattatacaaaggcctgggaagagtactacaagaaaatgggtcaagcagttcctgctcccactggggccccaccaggtggtcagccagattatagtgcagcatgggctgaatactatagacagcaagcagcatactatgcccagacaagtccccaaggaatgccacagcaccctccagcacctcagggccaataataagaagtggacaatacagtatttgcttcattgtgtgggggaaaaaaacctttgttaaatatatggatgcagacgacttgatgaagatcttaattttgtttttggtttaaagtagtgttttcccccccttttttattttgaaaatgtacaaaatatctatcactactgataggaggttactatttctgtgtagaaatgaaaattggtttgtttttagtccttagtgtagatgtacacattccagcaaatgtatttgcaactattatgtggtcaatgctttgtgatataaatgtactttttcaatgtatactttcacttttaaaatgcctgttttgtgctttacaataaatgatatgaaacctcctgtgtcggtaagttggatatatgtgggtaaaggattcataatttcttagcagtgataaattaagatacatatacacaaatctataagctttccccatgaagtactgagtttttaaacactggcatgtttttcccccttgtagtatagtggtagattggaggatcttttctgttgtatttggctgtttcagcacaagtaatcctgatgtcttcatttttcccttctgtttgattagaaactgcatgtgtatacagtgatctttagtatacttcattgcattaacagtgaaatttccttttatatatgagcactgtttcagacctgtactgctgctacaacagttaacctttctgttcttcacttatttccaagactgtttcagcataactcatttgaacagttttcagtacaagtgtatttgagttagttt

SEQ ID NO: 1090 - DNA, 2432 bp, Cricetulus griseus
  modified_base (1160)..(1160): a, c, t, g, unknown or other
ggagtacgtgatggggctggagagtcgagtccggggactggccgccgagaaccaggagctgcgggccgagaatcgggagctgggcaaacgcgtgcaagcactgcaggaggagagtcgctacctacgggctgtcctggccaacgagacgggactggctcgcctgctgagccggctgagcggcgtgggactgcggctgaccacctcgctcttcagagactcgcccgccggtgaccatgactacgccctgccggtggggaagcagccgccggagctgctggaagaggacgacgcggcgggaggagtgtgtctccatgtggacaagggataagggtgtcggtggagttctggctcggcgtgcgctcggaaggcgtcgtcgtctcttaaaatctttttgaaaggtgggagggaatcttaatttggcctgtccaccctggaaacagacttgtgctggtcaataatgttacttaaattgcttttggttgaactagctgttaaatgtgtccccttgttcagagttgcgtgtacctagctcttctgtccccagtgtggacatggccttggatgacatcggttccaactgtacactgaaacctgctaatagagatacagtttggagacagtgaaacaggtgaagttgaatggaagttccgagttgtacaaggtgcaaattggaattccaattgtagcaacttttcagaggttgacaataagtatttgaggcatgcacaaatgtgggtatttttctggagatgaaaaatctcttaaaatacttaagaatgccttctaattttcagtagaaaataaatacaatctatataagatcccaatatttcatcacttgaaaacttggaagttaacatacccatcagatttctgtgttttaattagaggaagaatgattaatgaaatgtttgaggaccagcacagtaattaagtatgaagaaattgttgaaagcatttatttttgttgtattaaaatttaggctaaatttgtgtatgattagatattgaaggttgtgaaaagtgaatgaaaacatgtaaagtgaggcttcacaaaagaatcttattttccatatttctaaaacttttgcctttttaaaattaaatagttctggccacttaatgatatgactgaggctgttttccaaagatggaaaatnttcttcccttgaaatactgtttattgtccacttgtctaaatctgtgttatgatgtcttgaagtgcaagaggccacatttcctgctttattttaaaaggtagtataagaaataaggaaaagaggtaatatcagggcttctgctgtcttttatttttaaaatgttcataattaagtattttccagcagtccaaagatgtaagttatcttacacgtaagatgtcttattttgttacttggttatggaaatggaatcttgttcttgcacaactaactgtaaatgttttgttgctagataatatgatttgagacctaaattagtctctggttttcagtatatcacattttgtaaagttatccactgcacttgagcatgaatgggtagtagccaaactctcacaacttggagtgatggacctgcttcttcaagggcaggaacaagtccccacaatgcagctgcatggattttagtgcctactgaaatatatatatatatatatatatataatatattagtcaaaaggttctggaagcagtaagcttgatttccaaaaaagtataccatttccatggaatattttcttaacatctgtgcttttctcctgcatttgaggtgtgggcttggggagaaccagtttctggattgggatgttttgaaattccaagtacagacttttagaatgtcattttataaatgacagtttggagaattaagagctcttgacagtggcaagattagaatggcctaattttaaatctgctttttttttgtcatcaactcatggtcttgtttttacatggtaactgcatgtatttaggacctatcaggggcttgaaatagattttatcatattttatgtgtaagcacattttactgtaaatgtttgggtttctcaatcaacaacagttgtttatttcagtgtgtagtaaacagtattcttaaagtgtcctgttcactacttgttaattaaaaaagtttaaaagcttagcagtacctgcaaaaacgaatcttttcctacaacctgttaactgactggactgatggtaacagtaattgtgggagccatgtcggtcaaaaatttggcatctgctgcaaaacatgaatgccatttccaagttcccaaattacttctatactgattacactttccagaaatggagatatgaaaagattctctggaatgcttgaaagacttaatagaaatccatgagactaagttaattttggaacaaaattacacctaagtccttaactaaaaaaaaaaaaaaaaaaaa

SEQ ID NO: 1091 - DNA, 2431 bp, Cricetulus griseus
aggtacaactaatgagaaaaaagaaccagagaggaaaggggagaactctgctgccaccatgcagaaaagtatcaggtcatttttccaacccatgaaagagggtaaagcacagaagccggagaaggagacagctaacagcaccaaagagaaggagccacctccaaaggtggcactgaaggagaggaatcgagcagtgcctgagagtgattctccagtgaagaggcctggaaggaaggcagcccaggtcctaagcagcgaaggggaggaggaagatgaagccccagcaccctaagtccagaagtctgtgtcagactccaaacaaagctctcctcccagccctgacgcatgtcctgagaacagtcctcagaaagtcccttttctcgctgtggcccggacctttgagaagattgaggaggtttctgctcggctcaagatggtggagacactgagcaacttgctgcgctcggtggtggccctgtcacctccagacctgcttcctgttctttacctcagcctcaaccgccttgggccacctcagcagggactagagctgggtgttggtgatggtgtcctccttaaggcagttgcccaggccacaggccgtcagctggagtccatccgggctgaggtagctgagaagggtgacgtgggactggtggccgagaacagccgcagcactcagagactcatgctgccccctcctccgctcaccacctccggggtctttaccaaattctgtgacattgcccggctcactggcagtgcttccatggccaagaagttggatgtcatcaagggcctgtttgttgcctgccgtcactcggaagcccggttcattgccaggtccctaagtggacgcctgcgcctcgggctggctgagcagtccgtcttggctgcccttgccctggctgtgagcctcacaccccctggccaagaatttcccccagctgttgtggatgctgggaagggcaagaccacagaggccagaaagacatggttggaagaacaaggcatgatcttgaagcagaccttctgtgaggtacctgacctggaccgaatcatcccggtgctgctggaacatggcctggaacgcctcccagagcactgcaggctgagcccaggggtccctcttaaaccaatgctggctcatcccactcggggtgtcagcgaggtactgaaacgctttgaggaggtggactttacctgcgagtacaaatatgacgggcagcgggcccagattcatgttctggaaggtggagaggtgaagatcttcagtaggaaccaggaagacaacacaggaaagtacccggacatcatcagccgcatccccaagattaaactcccctcggtcacctcctttatcctggacactgaggctgtggcctgggaccgggaaaagaagcagatccagccattccaagtgctcaccacacgcaagcgcaaggaggttgacgcctcggagatacaggtgcaggtgtgtctgtatgcctttgatctcatctacctcaacggagagtccctgattcgccagcccctgtctcgacgtcggcagctgctccgggagaactttgtggagacagagggtgagtttgtcttcgccacctccctggacaccaaggacatcgagcagatcgctgagttcttggagcagtccgtgaaggactcctgtgagggactgatggtgaagaccctggatgttgatgccacctatgagattgccaagaggtctcacaactggctcaagctaaagaaggactaccttgacggtgtgggcgacactctggaccttgtggtgattggcgcctacctgggccgggggaagcgtgccggccggtatgggggcttcctcttggctgcctatgatgaggagagtgaagagctgcaggccatatgcaagctgggaactggattcagtgatgaagagctggaggagcatcaccagagcctaaaggccctagtgttgccgaccccacgcccctatgtgaggatcgatggggcagttgccccagaccactggctggacccaaaggtcgtatgggaggtgaagtgtgcggatctctccctgtcccctatctaccctgctgcgcggggcctggtggacaaagagaaagggatctcccttcgtttccctcggttcattcgtgtccgtgaagacaagcagccagagcaggccaccaccagtgaccaggtggcctgtttgtaccggaagcagagtcagatacagaaccagcacaactcagacttggactccgactttgaggactgctattaaccccctggcctcttggacctggggtggaggttgagggaaccgggtactgtttgcctggtggtgttgactggtgtgtgtggggacataggggttggagactggggctggagtgcttccttttctttaataaatgactattaagtgcctacaaaaaaaaaa

SEQ ID NO: 1092 - DNA, 2431 bp, Cricetulus griseus
gctctgtacgctctggaggtgatggagtctgtggtaaagaactgtggccagacagtccacgatgaagtggccaacaagcagaccatggaggaactaaaaggagctgctgaagaggcaagtggaagttaatgttcggaacaagatcctgtacctgatccaagcctgggcacacgccttccggaacgagcccaagtacaaggtggtccaggacacgtaccagatcatgaaggtagaaggacatgtcttccccgaattcaaggaaagcgatgccatgtttgctgctgaaagagcccctgactgggtggatgccgaggaatgccaccggtgcagagtgcagtttggcgtggtgacccgcaaacaccactgccgggcatgtgggcagatcttctgcggcaagtgctcttccaagtactccaccatccccaagttcggcattgagaaggaagtgcgggtgtgtgagccgtgctatgagcagctgaacaagaaaacagaaggaaaagctgcttctaccacagagctgcccccagagtacctgaccagccccctgtcccagcagtctcagctgcccccaaagcgggatgaaacagccctgcaagaagaggaggagctgcagctggctctggccctttcacagtcagaggctgaagagaaagagaggatgagacagaagtcaacatacacaacgcacccaaaggcagagcccacacccctggcatcatctgcacccccagccagtagcctgtattcctcacctgtgaactcatcagcacccctggctgaggacatcgaccctgagcttgctcggtacctcaaccggaactactgggagaagaaacaggaagaggctcggaagagccccacgccatctgcacctgtgcccttgacagagccagctgcccagcctggagaggggcataccgccccaacagcatggtggaggctcctcttccagagacagactctcagtccgtacctccctccagtggcccctttagtgagcagtaccagaatggggagtcagaggagagccacgagcagttcctgaaggccctgcagaatgcggtcaccacctttgtcaaccgcatgaagagcaaccacatgcggggccgaagcatcaccaatgactcagccgtgctgtccctcttccagtccatcaacaccatgcacccgcagctgctggagctgctcaaccagctggatgagcgcaggttgtactatgagggccttcaggacaagctggcccagatacgtgatgcccgaggagctctaagtgccctgcgagaggaacaccgggagaagctacgccgggcggctgaggaggccgagcgccagcgtcagatccagctagcgcagaagctggagatcatgaggcagaagaagcaggagtacttggaggtgcagaggcagttggctatccagcgcctgcaggagcaggagaaggaacggcagatgcgcctggagcaacaaaaacagacggtccagatgcgcgcccagatgcccgccttccccttgccttatgcccagctccaggctatgcccacagctgggggtgtactctaccagccctcaggcccaaccagctttcctggcaccttcagcccagcaggctcagtagagggctccccgatgcatggtgtgtatatgagccagccagccccagccactggcccctactccagcatgcctggcaccacagcagatcccagcatggtcagtgcctacatgtacccaacaggtgcccctgcggcacaagcagccccacaggcccaggcggggcccaccaccagccctgcctactcttcctaccagcccactccaaccccaggctaccagactgtggcttctcaggctccgcagagcctcccagccatctcccagcctccacagaccagcaccataggctacatggggagccagccaatgtccatgggttaccagccgtacaacatgcagagtctcatgaccacccttccaggccaggatgcatctctgccagcccagcaggcctacatcgcagggcagcagcccatgtaccagcagatgccaccctctgctggccctccccagcagcagccccctgtggcccagccaccacctacacagggaccgccagcaccgggcagtgaagcccagctcatctcattcgactgaccttgagtctagcactcaccatccagagtaacactacggttcaccagaaaccaattatgtgtctaagtagccatctcttcccccattactgccctatagtctccattctcctgtgagcaaggagtggcccttcacccttgaccctctcccatgtcctcagtggtctggttcctgtcactggttccctgctttgatcctgatgcagtctgacttttcccaaggctgggactctgcagggcaagtaggaccttctctggggagtatccagctctgtgttggg

SEQ ID NO: 1093 - DNA, 2430 bp, Cricetulus griseus
  modified_base (305)..(305): a, c, t, g, unknown or other
ggattgccttgagaatctttactgaaatctttgctggcagtcaataatggcaagtaaggggccctcgacctctacatccactgagaattccagtgcaggggggcccagtggcagcagcaatggcactggtgaaagtggagggcaggacagtacctttgagtgcaacatatgcctggacacagccaaggatgctgtcatcagcctgtgtggccacctcttctgttggccgtgtttgcatcagtggttggagaccagaacctaacagacaagtgtgtccagtttgcaaagctaggaatcagccgganaaggtcatcccactctatggcaggggcagcaccgggcaacaggaccccagagagaagactcctcctcgtcctcaaggccagaggccggagcctgaaaatagaggggggatttcaaggatttggatttggagacggtggctttcagatgtcttttggaatcggagcatttccatttgggatatttgccacagcatttaacataaacgatggacggcctcctccagctgtccctgggacaccccagtacgtggatgagcagttcctgtctcgcctcttcctgtttgtagccctggtgatcatgttctggctcctgatcgcctaatacaggacccctattcgcatctacagcagcacctctggactggtgatatgccacacctgctcctggtgtttgacttgtttaatcccaacccctggaatcaagggtcagaaacacatcaaggagtccccagtttcactactgctgtaaacaccctctataacctcaggtcttgtgttggatcacctctcatgggtgacaatgtgaagtcctgttgcagccttctcagcaggtcccagctctacatggggaagagatgggaagagaaaaacagtttctttcaccagaactttatattacaaaaatgaagggatgaaccaaatggtatttatggaaacttactttcatcttttttaaatacccttggtaagtggactccactccctatactgagagattcccttccagattccacttctactctgtctgccttcctgccctccccttcctcaacaaagaaggtcataattgcagcattagaagctgaagatgctgtgtgacattgtgagactctggtctttgattggctctgggcctctgtcagtttcttgaccttagaaagcagctttgacctcctggtttcttggccgattatccctggtatcacttgggtcagatttcctgtcagctttctcctctaaactactgctgcatttgaaccatctactctgcttcagagctttgatgcagggacagcggggcaagtagccctgcccctaggctgtggaagcctgagtaatcctctctcagaacttgcccagagaaactggaggctttctcaggtcagccccgatacacatagaactaccatcctcagaagccattgtcctttttaaaaaaggaccacagtgatgaagtgtggttttccttccgtattcttcccacacattgatttgttgttgaaattcataagctgcttcctctgaacctgattgtggaggtgtggtgccaggcaggagaatagttcacctgctcaaacaactcttgctctgcctttgaggcttcatcttagaaatgtctcttcctggagaccttaacagggcagcaagatgaacttctactagatctttttgttcacttctctagcacccactgccccagcaataaccagaaactacattcttgccttgcctgctgatttttctagatacagctctgcataatgtacagaaccctagaccttgaggatggcaagagagccgtcctcctcactgcacggtccccacctgccaatgccagtattagtattgaagtggatacagtatgaagtattgagtaggagggtggtttggcaaatacagctggtaagaataagccaccaactttagtgtgctgacagattttaaatactctttgtcacatggaaatccccagttgcaggggcccttggagtgtctctgttttagggagaattggtaggatcccgtagtgtagtatagccttaagtagtagagggaaaatctgaacaataaacacaaaagaaagaagagttctgagtagtggagaaaatcatttggaatctggtgaaatggaatgagcccaggtctgtgctcagcagaggcatcccaggagcctgccggtagcaaaactgtggtggccatgtaccctttgcgaacattacagggctacacacctgccagcagctaagacaggagaaccaacttaggacccttagcctcacctttctgccacctgcatggacaaggacagtcagaaaatgggaacatgtaaggcagcataccttgaccagcactgattttcactgttgtgaaagtgatttgatttagaattaaatggttttacatt

SEQ ID NO: 1094 - DNA, 2430 bp, Cricetulus griseus
cttcgtgtatgatgtgaaacccggagccgaggagcagacccaggtggccaaagctgccttcaaacgcctcaaaactctccggcaccccaacatcctggcctatattgatgggttggagacagaaaagtgcctccatatcgtgacagaggctgtgaccccactgggaacatacctcaaggcaagagcagaagcaggtggactcaaggagcaggagctgtcatgggggctgcaccagatcgtgaaagctctcagcttcctggtcaacgactgcaacctcattcacaataatgtctgcatggccgctgtgtttgtggaccgggctggcgagtggaaacttgggggtctggactacatgtactcagcccagggcaacggtgggggaccacccagcaagggtatccctgagctggagcagtatgatcctccggagttggctgataacagtagcagagcagtcaaagagaagtggtcagcagacatgtggcgccttggctgcctcatctgggaagttttcaatgggtccctacctcgggcagctgcccttcgaaaccctgggaagatccccaaatctctggtgacccattactgcgagctggtgggagccaaccccaaagtacgtcccaacccggctcgcttcctgcagaactgccgggcacctggtggcttcatgagcaaccgctttgtggagaccaacctcttcctagaagagattcagatcaaagagccagctgagaagcagaagttcttccaagagctaagcaagagtctagactcatttcctgaggacttctgtcggcacaaggtgctgccccagctactgactgcctttgagtttggcaatgctggagctgtggtcctcacgcccctcttcaaggttggaaaattcctcagtgctgaagagtaccagcagaagatcatccctgtggtggtaaagatgttctcatccacggaccgtgccatgcgcatccgccttctccagcagatggagcagtttatccaatacctcgatgagcctacagtcaacacccagatcttcccccatgttgtacatggcttcctggacaccaaccctgccatccgggagcagacagtcaagtccatgctgctcttggccccaaagctgaatgagaccaacctcaatgtggagctgatgaagcactttgcaaggctgcaagccaaggacgaccagggtcccatccgctgcaacaccacagtctgcttgggcaaaattggctcctacctcagtgctagtactagacatagggtcctcacctccgccttcagccgggccactaaggacccatttgcaccatcccgggttgcgggtgtccttggctttgctgccacacacaatctctactcgatggatgactgtgcccacaagatcctgcctgtgctctgcggccttactgtggaccctgagaaatctgtgcgggaccaggcctttaagaccatccgaagcttcctgtccaagttggagtctgtgtcggaggatcctacccaactggcagaagtagagaaggatgtccatgcagcatccagccctggggcaggaggagctgcagccagctgggcaggctgggctgtgactggggtatcatcactcacctccaagcttatccgtgcacaccccacacctacgacatccgagaccactgtgccccagagaccagtgccagagggaaatcctgctccagcacctgcccctgacaccccaacaacctcaggccactgggagacacaggaagcagacaaggacacagcagaagacagtgccactgctgacagatgggacgatgaggactggggcagcttagagcaggaagctgagtctgtgctggcacagcagggtgactggagtgtcaagggtccaggaggccgagctgcacaggtcagccacccagaccacaaacctttggaatcagactggaacagctgggaagctgagggctcctgggaccagggctggcaggagcccagttctgtggagccacctccagaaggcacccggctagcaagcgaatataactggggtggtgcagagtccagtgacaagggtgacccctttgctgccctgtctgttcgtcccagcacccagcccaggccagacccagacttctggggtgaagacaactgggaaggcttggaggctgagagcagacaggtgaaggcagagctggcacggaaaaagcgtgaggaacggaggaaggaaatggaagccaagcgggcagagaaaaaggccaccaaggggcccatgaagctgggagcccggaaactggactgacaaccctacccccaaaccctgggcacttccaatcattggagagcaggcctggcggatgtatttattgtacaaaccatgtgagcctggtcaccaggccaggcacatctagtgtacataatcagagccacaataaattctatttcaca

SEQ ID NO: 1095 - DNA, 2429 bp, Cricetulus griseus
tcctctgacgggaaaggtcgcggcctgcggcccgcgggcagccgtgccgagatgaaccccagcgcccccagctaccccatggcctccctgtacgtgggggacctgcaccccgacgtgacggaggcgatgctctacgagaagttcagcccggccgggcccatcctctccatccgggtatgcagggacatgatcacccgccgctcgttgggctacgcgtacgtgaacttccagcagccggcggacgcggagcgtgctttggacaccatgaattttgatgttataaagggcaagccagtgcgcatcatgtggtctcagcgtgatccatcccttcgcaaaagtggagtgggcaacatattcattaaaaatttggacaaatccatcgacaataaggcactgtatgatacgttctctgcatttggaaatatcctctcatgtaaggtggtttgtgatgaaaatggctccaaaggctatggatttgtacactttgaaacacaggaagctgcagaaagagctattgaaaaaatgaatgggatgcttctaaatgaccggaaagtgtttgttggacgatttaagtctcgaaaggaacgagaagcagagcttggagccagggcaaaggagttcaccaacgtttacatcaagaactttggagaagacatggatgatgagcgccttaaggatctcttcggcaagtttgggcctgccttaagtgtgaaagtaatgaccgatgaaagtggaaaatccaaaggatttggatttgtaagctttgagaggcatgaagatgcgcagaaagctgtggatgagatgaatggaaaggaactcaatggtaaacagatttatgttggtcgagctcagaaaaaagtggaacgacagacagagcttaagcgcaaatttgagcagatgaagcaagataggatcaccagataccagggtgttaacctttatgtgaaaaatcttgatgatggcattgatgatgaacgtctccggaaagagttttctccatttggtacaatcaccagtgcaaaggttatgatggagggtggtcgcagcaaagggtttggttttgtgtgtttctcatctcctgaagaagccactaaagcagttacggaaatgaatggcagaattgtggccacaaagccactctatgtagctttagctcagcgcaaagaagagcgccaggctcaccttactaaccagtatatgcagagaatggcaagtgtgcgagctgtgcccaaccctgtgatcaacccctaccagccagcacctccttcaggttacttcatggcagctatcccacagactcagaaccgtgctgcatactatcctcctagccaaattgctcaactaagaccaagtcctcgctggactgctcagggtgccagacctcatccgttccagaacatgcccggtgctatccgcccagctgccccccggccaccctttagtaccatgaggccagcctcctcgcaggtcccccgcgtcatgtcgacacagcgtgttgctaacacttcaacacagaccatgggtccacgtcctgcagctgctgctgctgcagccacgcctgctgtccgcaccgttccccagtacaaatacgctgcgggagtccgcaacccccagcaacatcttaatgcccagccgcaagttaccatgcaacagcctgctgttcatgtgcaaggtcaagaacctttaactgcttccatgttggcatctgcccctcctcaagagcaaaagcaaatgttgggtgaacggttgttccctcttattcaagccatgcaccccactctggctggtaaaatcacgggcatgctgttggagattgataactcagaactacttcacatgcttgagtctcccgagtctctccgctcaaaggttgatgaagctgtagctgtactacaagcccaccaagcaaaagaggctgcccagaaggcagtgaacagtgccgctggagttccatctgtttaaatttatcagggaccacgaaaagaaactcgtgcttcaccgaagaaaaaaatatctaaacatcgaaaaatttaaatattatgaaaaaacattgcaaaatataaaataaataaaaaaaggaaaggaaactttgaaccttatgtaccgagcaaatgccaggtctagcaaacaatgctagtcctagattacttgatttaaaacaacaaaaaaatacaaaaaaaatagtaaaatataaaaacaaattaatgttttatagaccctgggaaaagaattttcagcaaagtacaaaaatttaaagcattcctttctttaattttgtaattctttactgtggaatagcttgggatgtcagttctgtttcaactagcagaactgatggactgagcaaggaaacgtaatttggattataaaattcttgctttaataaaaattccttaaacagtaaaaaaaaaaaaaaaaaaaaaaaaaaa

SEQ ID NO: 1096 - DNA, 2428 bp, Cricetulus griseus
tcccgggatcctggacttcctctttgtcagccacgcttatcatagcatcctgacccgggggggcttctgtgcagctggtgtttggctttgagtacgccattctgatgaccatggtgctcaccatcttcatcaagtatgtgctgcactctgtggacctccagagcgagaacccgtgggacaataaggctgtatacatgctctacacggagctgtttacaggcttcatcaaagtcctgctgtacatggccttcatgaccattatgatcaaggtgcacaccttcccgctctttgtccattaggcccatgtacctggctatgaggcagttcaagaaagctgtgacagatgccatcatgtctcggcgagccatccgcaacatgaacacactgtacccagatgccacccctgaggagcttcaggcaatggataatgtctgcatcatctgccgtgaagaaatggtgacaggtgctaagagactgccctgcaaccacatcttccacaccagctgcctgcgctcctggttccagcggcagcagacttgcccgacctgccgtatggatgtcctgcgggcatcattgccagcccagtcaccaccaccccctgagcctgctgaccaaggaccacctccctgctcctcatcctccaccactgctgccacagcctcccaatttcccccagggccttctgcctccttttcctccaggcatgttcccactctggcccccaatgggcccctttccacctgtcccacctcctccaagttcaggagaggccgcagctcctccgtccaccagtgcagctgtttctcggcccagtggaacagccaccaccacagctgctggccccagtacctctgccccagcatctggctctgttcctggcccagaggctgggcctgcccctggcttcccttttccccctccttggatgggtatgcccctgcccccaaccttttgccttccccccaatgcctgtgcctcctgcgggctttgctggcctgaccccacgaggagcttcgggcgctggagggccatgaacggcagcacctggaggcccggctgcagagtctgcgcaacatacacacactactggacgctgccatgctgcaaatcaaccagtacctcactgtgctggcctccttggggccccccaggccagctacttcagtcaactccactgaagagactgtctctgcagtggtatctgctgccccctccaccagcgctcccagctctgaggcccctaccccatctccagggacttccccatcagtccctgaagctgaaaagcctcccgctcccgagtcagtgggcgctgcagaggagcttcctgaggatggagagccggatgctgcagaactccgccggcgtcgcctgcaaaagctggaatcccctgttgcccactgacactgcccagacctggccctggccctgctttcgagtggccctctctggaacaagtcctgccaccaagtgccagctctctgtctgcaccagggagtagtaacccccagctgagaaagaagtggcaggacctctgaggccaaggagaagtgctgggttcccagttgatcgtccccgatggccctggcagccatggggatgttgttcaactctaaccttcctttaccattctgctgtgttctgctggggcgttgaaagaagaggctgagcctctgggaagcctcctctcctgtgctttctgtgagaaggtgaagccccccccccccaagccctgcttgtgagtgtgggaccatgctgcagtgccgaacagtattagcttctgttcccaagtgtggagacccaggggggctgaagacagaccaggaccttgccccaccctcctgccaagactggtaccagtctccttcctctaccccaatcttcccagaaacccctttgtgatggtggctgtgccccctaagccctgtggcacttccatgtcttattggcaaccacacaactcagggaaaggagtgcctgggggtgggggacaggcgggcagcactgagggaccctgtcctgcccctccccaggctctttccccatctcacccagcagccactgcctggtgggcctggctgagggtgtgtgctgccccttaaccactgctccccagaacccgaggcaggccacctccaacctgtgggacttgagttcaggattggaactatttctgtacctagtagcttttggcttaaattttgtctttttgatttgaatgcttgaccccaggaaggaggagcaggagtgaggctaggtggagccaagacctagctgcttcttccttttggttttgtgttacaggagtttctggagacagttttcaagatgattatttaatttgtaaatattgtacaaaattttaatagcttacattgtacatacagccaaataaaaacttgcaatttaatgatagaacaaaaaaaaa

SEQ ID NO: 1097 - DNA, 2428 bp, Cricetulus griseus
  modified_base (2236)..(2236): a, c, t, g, unknown or other
tctgaatatgagaaagaaatctccagtttacagagcagtttccagcttaggtgtcagcagtgtgaagaccagcaaagagaggaggcaacgaggttacaaggtgaactagaaaagttgaaaaaggaatggaatctattggaaactgaatgccattctctaaaaaaggaaaacgttttgttgtcgtcagaactgcagcagcaagaaaaagaattgcacaattctcagaagcagagtttggagcttactagtgacctcagcatcctccagatgaccaggaaagagcttgagaaccaagtgggatccttgaaagagcaacaccttcgagactcagctgacttaaaaactcttctcagtaaggctgaaaaccaagacaaaggatgtcagaaagagtaatagaaaagaacaacagactgtactctcagaactgaagttgaagtttgaaatagactgagcgaggaaaagacgaatcaatcacagatgagctcaaacagtgtaaagacaacctgaaactgctgcaagagaaaggaaataatccctccatattacaacctgtcccagccgtaatcatcggcctattcctggctttcctgttttggtgtttcggtccattgtggtagagaaagaaaccctggccctggatgcccatgttggcggccctggttgcggtgacagccatcgtgctgtatgtgccaggtctagccagagcttctccgtgacagtgtgtcttgagtctgtacaccgtcctccctctagaagctgcctctcactcatgctggggacaaagcagaaccattttcttcctttttacctcttaaaacagcaaagtgcaagaatacagctgtagggtcattgctttaacttatataaaaatatatctgtctatagagaggatataaagttgtgaatttattcggattttcatgtaatttttaaattagtatgttgagattctgaatattatggtggcctaaagtaggcttcttgtgcaccaaaattatttataccataaatttatagatattttactctgaattcttatggccacatagttcatttttctgattcgataactactcaaaccgaacaaccaatatatacatgggaagagaggccctgtgtgctcagtgcctatcagtttgaatatatacacacacacacatatatatttttttacatatttacgccatttttacttgttataaaaccactgagctattgggaacaagacttagacaattatttgtgtggatttttttttaaaggaaaacacatttggaaaatattctgttataatgataatttgggaaatacatacatgtttgttcagccttaatgtgacttgaagatgtgaaggacatcagctttgaaaactttccatgagagtttgtattttcttgagcaaactgaaatatttctgggagcaaaaacataattgcataatttcagtgcaatcaaccaaactgttgagtgaattggaatgtaacttactaaacctcatgtatttaagaaatgtttctttaaaagccaagttaccttctcatatgcagcagtttagaaagcatgattttttcctgtcatctgttcctccaagcatgtttaattgaaggaagaattctatctgtttagataagcttttattgacttaatttggttatgatgtggagctaattcacattcaaggtgaactgatgttacctaccaagatttcttgcttgggcatacaaatgttttttttttttcccttttttattgttaattcggacagcctgttaattagtagcactattcccaagattggtagtgttccatgcacagtgacacacctaagcactgcttgatattatatatttaaaacacaggggttaaagtttagctatggttttgtgcagcaccatagtgatgtcagtatcctaaaacatcacatagttcagttttcttcagtcagtgaagactgggagggaacattggtgaattggcttgaatgttctatgagaatacccagatctagccgatactgagaataggagtttaggatataatttgccccttgtgatgtttggcagtcatttgtttttactttaaaagttgtatttaaagctatttgggattgttgccggaagaatcactagatttatggaggaattagccacaaatgacttgtaagaaaaatactgtcatatggttcattttaccatttctttgttgcaggaagccactccaccacagaatgctaatntgccagtggtacccagtacctcttgtattatagttattgcaaacataacttcaaaattacctttttaaagtaaataattgtttgaaatctattttgtaaagaaaacgtacaatagaatttctggagtacagattaaactatttgcactaacacacgtgatgtgcatgatttataaaataacttttaatctcc

SEQ ID NO: 1098 - DNA, 2428 bp, Cricetulus griseus
gatgaagtccagtctcctacaggtgtttgcctcagaaatcgtagcctccttatcagaaattgggtttgggaaaatggaaacctacatcaaattggaaaagcttggggagggtacatatgcaacagtatataaaggaagaagtaaattgacagagaatttggtggcgttaaaggagatccgcttggaacacgaagaaggtgcaccctgtacagctataagagaagtctcactgctaaaggatttaaaactaatagcaaatatagtaaccttgcatgacattgttctacacagataaatctttgactctggtctttgagtatctggacaaagaacctgaaacaatacatggacgactgtggaaacatcatgagtatgcacaatgtaaagctgttcctgtaccaaatcctccgtggtttggcatattgccatagaagaaaggtattgcaccgggacctgaaaccacagaacctcctcattaatgaaagaggagaactaaagctggctgactttggactagccagagccaagtcagttcccacaaagacctactcaaatgaagttgtcacactgtggtatcgaccacctgatgtgcttcttggttcctcagagtactcaacacagattgacatgtggggagttggctgtattttctttgaaatggcttctggaagaccactgtttccagggtcaactgtggaagatgaactgcaaggacacgggaagaacagaagacagagcatgctcttttaagtctggtagcatggtttcaagcccagccccagcctttcttagcagtcatggactcagagctgacttatttcttgtgctggacttggaatctccgtctgtctacactgtcctcttcacagtggagtctttcatttcagacctacagattgtttttatatttgttgtcacagtgtgacaaattgtttttgtacagttggttttaaggtcttctctgccagtagagccagtaggttacagctatcccatgtaactgtagctgcagatttgtgcaggactgagaaacacagtgcattatttattgcggaatcattgctgctaaataactactgtttatttaacacaacagttgaatgcctgaagaagttgcagtggctttattatatgtgaacctgtttctcctcacaaattgttttactgctgcatttttcttttgtttgttttttgtttgttttaaaactaaactgcagtgtttcctggaatgtatatttagctttgcttaacagtaaaacgtgagccatcttgaacatgcttaagttcgtgctacatataatttcgtaggaacattggctaatagagtagctgagaggtcaacagcacagtgtgtttaagaagtgtgcagtgtaagagttgattcaagcaagtgaatatcagatatttttggagtctcacattagacaccaataaattaagaaccaagttatttatttttatctactcctcattttagaaatgtctactgcatagtggtatgctcctccccttgatgaactcttttacactgtgcttttagttaacttgtaaccatagacaccattcaaacaggaaaggtcttgctgctgtttgtcttaagcacatttcctttattagaagatacttcattttgaggaatagtttctttcattcgggggctgtgtgtgtttcagtgacattcacttggaatcagctgaaggctgtactgtgtctttaaaatgagccatgagaaatgagaaacaggaacccagtggagtgctcaaaagcattgtgggtattatctgctcatcagacactaactagtgtaacttgaattatgcatcttcttgagcatcacagacacttcggtgttggtaacagtgtttcaggcatttatgttcatttttaagaactattggttagtgcatcctataactagaaatcctaattggtatattttgaaatggtcatgtacatttttgccttatatcatgaaaatagttataacttaattttgtcctgccattcactgtaaaaacattcagggtcctctcatttctgttcaggaaatcctgtagtttattgttgttatttaacagtattaagtgagtttttgtatatttcattttaactttatttgtgaatagtgattgtggcatgtttggggtgttattttaatatttcatgatactgaaattttaattttttaaaaaaaaagaaagttctggaagaaacagattcatgtataatggtgaatattggaccactactgcttttcacatttgtcagctggtttaatgttaaaccctgtagcctaactgctgttatttctaactgacagacatatgtattaatattgtactttgaaggttataaatattatgtgaaaattccttcattttgttttgaaatttataataactaaatctctgtgttatataaaatgtga

SEQ ID NO: 1099 - DNA, 2428 bp, Cricetulus griseus
atatagacattatcctgcttaagggtgatgtgggaagaggacgaaacaattcctgacagtgagcaggacataaggccacggtttcatcgctcaaggacagtggctcagcagcatgaagaggatgggattgaagaggaagatgacgacgacgatgaaattgatgatgatgacacaatttctgactggaatctgagaaagtgttctgctgctgctctagatgttcttgcaaatgtttatcgtgatgaactcttgccacacattttgccacttttgaaagaattacttttccatcatgaatgggttgttaaagaatcaggcatcttggttttaggagcaattgctgaaggttgcatgcagggcatgattccatacctgcccgagctcattcctcaccttattcagtgcctctctgataaaaaggctcttgtgcgttctatcacctgctgggctgaagcgtatcttggatagcaacaagagagtacaagaagccgcttgcagtgccttcgctacattagaagaggaggcttgtacagagcttgtcccatacctcgcttatatactggataccctcgtcttcgccttcagtaaataccagcataagaacctgctcattctgtatgatgccatagggacactagcagattcagtgggacatcatttaaacaagccagaatatattcagatgctaatgcctcctctgatccaaaaatggaacatgttaaaggatgaagacaaagatctcttccctttacttgagtgcctctcatccgttgccacagccttgcagtctggcttccttccatattgtgaacctgtgtatcagcgttgtgtaaacctggtacagaagactctagcacaagctatgctaaacaatgctcaaccagaacaatatgaagctccagataaagactttatgattgtggctcttgacttactcagtggcctggctgaagggctgggaggtaacattgagcagctagtagccagaagtaacatcctaacactaatgtatcaatgcatgcaggataaaatgcccgaagttcggcagagttctttcgccttactaggtgatctgactaaagcttgctttcaacatgttaagccttgcatagctgatttcatgccaatattgggaacaaatctaaatccagagtttatttcagtctgcaacaatgccacctgggcaattggggaaatatcaattcaaatgggtatagagatgcagccttatattcctatggtgttacaccagctggtagagatcattaacagacccaacacaccaaagacgctgttagagaacacagcaataacaattggtcgtcttggttacgtttgtcctcaagaggtggcccccatgctacagcagtttataagaccctggtgtacctctctgagaaacataagagacaatgaagaaaaagattcagcattccgtgggatttgtaccatgatcagtgtgaatcccagtggcgtaatccaagattttatatttttttgtgatgctgttgcatcatggattaacccaaaagatgatctcagagacatgttctgtaagatccttcatggatttaaaaaccaagttggggatgaaaattggaggcgattctctgaccagtttcctcttcccttaaaagagcgtcttgcagctttttatggtgtttaatctaatacacttaagctgcagtcccagaattaggggtccatcagtcttggagactataagggagcctctgcacccagggaaaatgttaccctttacaggggggaagggtaaaccagtagggaatacagtacaatcccaaccctactgggaggggcgggagggaggtgttgccgtcactgtattaagtcgatgttgggaaatgttttaacatctggagcctttgtgggtggaaatctgtctccaattacaactctgcactggatgtgaagaagcaaaaactattcagtctactcacagaacagtactttctggaatattatggggaattgtacctaaacaagaaccatataaacaatgcgtagggatgaggaggaggaggaggaaaatcctatggtccacagccaaggaaacctgagagtgggaagctacaacagtaaggaagcttttttcattaaaggtttttatataaaatttcccacgttacggggccttgttttgcatgctgatgaagaactacacaaaactaacagttaaaatcagcttgcctcccctagtagaagcaggttcttggacgttacaatttaaggtacccccaaaaagttggaaataaaacgaaacaaatttgaacaatgaagcaccctgtgagatgccaacgagtcactcctttaaccttgcgggctgggcagggagggaggaataaagtgggggtcgggtatcaaactaaaggtgacatctaatttttacattaaaacgttagtagga

SEQ ID NO: 1100 - DNA, 2427 bp, Cricetulus griseus
gggcgtatcccagacggcctgagagcgacgctgtctatgaccagttcctcctcagttttgaaccgccctcgtcccatggcgtcggagcacccccgggtcaatgagaagtgacgtctgctcctgatcccaagcctgtgctgggaccactgggtgaacagggtcagatcctcgcgcgtgaatctaaagaagccctggtcctttgggaactctgtggagttacaccccaggccaccacctcccgagttctgacagattcgcgggagcttcagaaagtgggccttctgacagaaggagtgtttgggtctcggggctcaggggaggaggccatctgtatctctgtcgggcaccccagttccagcacccccaacctggatcagttggctaacggggggactgcggttcacagatttctatgtgcctgtgtctctgtgcacaccatctcgggctgccctcctgactggccggctcccagttcgatcaggcatgtaccctggagttctggggcccagctcccaagggggcctgcccctggaggaggtgactctggctgaggtcctggctgctcgaggctatcttacagggatggctggcaagtggcatcttggagtggggccagagggggccttcctgcccccgcatcagggcttccatcgattcctaggcatcccatactcccatgaccagggtccctgtcagaatctaacctgcttcccaccagacatcccctgcagtggtagctgtgaccaaggctatgttcccatcccattgctggccaacctgtctgtggaggcccagcccccttggctacctggactagaggcccgttatgtgtctttctctcgagacctcatggctgatgcccagcgccagagccgaccattcttcctatactacgcttcccaccacacccactaccctcagttcagtggagaaagcttctcacagcaatcagaccgtggaccatttggggactccttgatggagctggatgcagctataggggccttgatgacagctgtgggtgacctaggtctgctcggagagacactggtcatcttcactgcagataatggtcctgagttgatgcgtatgtccaatggtggctgctctggcctcttgagatgtggaaaaggaacaacttttgaaggtggtgtccgagaacctgccttggccttctggccaggccacattactcctggtgtaacccatgagttggccagctctctggacctgttgcccaccctggcagccctgacaggggctccactgcccaatgtcactctggatggtgttgacatcagccccttgctgctaggcacaggcaagagcccacggaagtctgtcttcttctacccgccctatccagacgaggtccatggggtctttgctgtgcgggatgggaaatacaaagctcatttctttacccaaggctctgcccacagtgacaccacttcagattctgcctgtcatgctgccaaccctcttacttctcatgagcccccattactctatgacttgtctgaggaccctggtgaaaactacaatcttttggaaactatggatgagatctccccagaagctctacaggctctgaagcaccttaggctgctcaaggcccagtatgatgcaactgtgaccttcagccccagccagatagccaaggctgaggaccctgccttgcagatctgctgtcaaccaagctgcacgccccacccagtctgctgctactgccctgacacccaggccacagggggtcctcaagggtagcccaggaaccctaactctatgctgagtgtgtgatggctcaccagaagggcaggggcaagtatgtagtttgtatctggtaatgtaataacatcagctgagatttgcaggtgtgctaattcatctagtccttgtggtaactctgagatcagtgcctattctcctgtgctaccaatgaggcctggggaaatctcatggacctgttcaaggccaatgtcaccttaccagaaatagcttgagctaggatttgaactcaggtatcccaggtctgaaatttgccctgccctggtgatctgcatgtgtccatggacacatcgctgaaagattctccattcacagaagccgggagtgcattcagttgccaggaactgtgagggaggggtggtgagggcatggtatccaggagaccctaaaggtacaaagcctctggaacacaggttttccttgagaagcattcttagaggccctggagctggccaccttggtccttacaagaaatctgtcatctagaattaggtgataaaactgttcattccagatagagttaaggaattggggccctgctagatcccaagaaggaacacgagcagctcctgagaagtcccacgggcttgcccaccttcccaagctctgccatttcctccgttgtgtcatacttcaagt

SEQ ID NO: 1101 - DNA, 2427 bp, Cricetulus griseus
gtttttctcatatcaactatggaaatggaacaagaaaagatgaatgtgaggaaggagttgagccctgattcagcctcataccactgctcagcatgtcatggggatgagacctggagctacaatcatcctatcagaggccgggccaagtctcggagcctgtcagcctcacctgccctgggcagcaccaaggagttcaggaggacccgctctctccatgggccgtgcccagtgaccacatttggaccaaaggcgtgcgtgctacagaacccccagaccatcatgcatattcaggaccctgcaagccagcggttgacatggaacaagtctcccaagagtgtgcttgtcatcaaaaagatccgagatgccagcctactgcagcccttcaaagagctctgcatatacctcatggaggagaacaacatgatcgtgtatgtggaaaagaaagtgctggaggaccctgctatagtgagtgacgaaagctttggaccagtgaagaagaaattctgcactttccgtgaagattatgacgacatttccaaccagatagacttcatcatatgccttggaggagacggcaccctactctatgcctcctcacttttccagggcagtgtgcctcctgtcatggccttccaccttggctccctgggcttcctgaccccattcaactttgagaacttccaatcccaagtgaatcaggtgatagaggggaatgccgctgttatcctgaggagccggctgaaggtcagggtggtgaaagagatcagagacaagaagatagccatccataatggcctcagtgaaaacggcctggacacagagggcggaaagcaggccatgcagtaccaggtcttgaatgaagtggtgattgacagaggcccctcctcatacctgtcgaatgttgatgtctacctggatggacaccttatcaccactgttcagggcgatggagtgatcgtgtccaccccgacgggcagcacggcatatgcagctgcagctggggcttccatggtccaccccaacgtgccggccatcatggttacacccatctgcccccactcgctgtcattccggcccatcgtggtccctgcaggggtcgagctgaagattatgctgtccccggaagccaggaacactgcatgggtgtcttttgatggacggaagaggcaggaaatacgccatggagacagcatcagcatcaccacctcctgctacccgctgccctctatctgtgtgtgtgaccctgtgagtgactggtttgagagccttgcccagtgtctacactggaatgttcgaaagaagcaagctcacttcccagaggatgaggaggacagctaggcctcacttcccagcctccaacctgagccctcaagcccttgggggctttcttccctctcttgctctcccgctggccttctggctgacctggccttgacaaaccacatggctgtcaggcatctgtgtcctgcctgccttgctgggagagcttgggtctgccttttgaagaacacatcagctttttaatgtttttaaaccctttttcatttctaaagaagcaaaataagaactgggctgggtgtcctacatctctcccatgggcccccgccccctgagatcccaggtcaggaattcccataaatcagtctgttgaaattctgaggggggtcaaaatgaattgatcttccttttgatattggaataaatgtctcagccagaaatcttcctttagctgcagtgcttttccccagggcctgtacctttcccctctgcaactcttggggtcacttggcagctttgccataggttggcaaggcgtgtcatggctaggtgcctctgagtctggcccaaggcctctgactacgttccagagaagacagaggcaacactttgcacagccatcggcaacatcacattcctcatagcagggcagcagctcctgagatgttttaaatcctgtgtacactttttagagattattttaaactttctgaagtgattatgtacatattttcttgtacacgccttgtgaagatttagaggggactgcctgctgtccagtgtttacattgtgtgcagagcacctgtggagccctatgtggtctggcttcagtgctgttaagctgtggtagcttatccccaagagctgtgctattcatctgtgattgtgagcacagtaggcctctgctgtgatccagaggagagcagggtctggagcatgggtcatgcatctaaaaagcaagtgttgacaagtctagaagcaagctgctaccagactgatctagaacacatggagttttcacgtaaattcttaatgtttcatattaatatcttaaaatttgttaattgttaatgaaggccttattactattttcagattctttcaataaataaacttgtttaaaaaaaacaaaaaaaaaaaaaaaaaaa

SEQ ID NO: 1102 - DNA, 2427 bp, Cricetulus griseus
  modified_base (2390)..(2390): a, c, t, g, unknown or other
  modified_base (2400)..(2400): a, c, t, g, unknown or other
tttttggtgcttcgcgctgacctcacaggcactggggtgcagaatccccctctggatgtccagtggcgaggccatggccagctgggcctgctgggtgtccccttcgcttccttgaaggagcaggttgacaatatgcgacggcagcaactgcttgaggaggccccaagagctctcagacactctacatagtctcaggtctgaaagggtggacgctcttctggaggggacccctgaggaagacccagcccctggccagcacactactcagcactgcctctgggtggatgcatttgcaccccagcactacacggagctgctcagcgatgacttcactaaccgctgcctcctcaagtggagctatgggaccttgtggtgtttggccatgagaggcctgcccggaaggccaggcccagtatagagccaacccggattgggaaggaggccacagcccctggcaagtggaaaagtcatgagcccctccaggactaggcaagaccacactggcacacgtggttgcacggcatgcagggtattgcgtggttgagatgaatgcgagtgatgaccgtagtcctgaggccttccgtacacgcattgaagcagctacgcaaatggagtcggtgctgggtgcaggtggcaggcccaactgcctggttattgatgaaatcgacggggccgtccacggcagccatcaatgttctcttgagtgtcctgaatcgcaagggtccacaggaggcagagcaaggagacacagctgcacctgcagggggtcggcggcgcagggccgagggggggcctccgtgacaaaaggcccatcatttgcatctgcaatgaccagtttacaccttccctgaggcagctaaagcagcaggcttttctgctccatgttccgccaactctaccctccaggctggtgcagcgactccaggagatctctctgcagcatggcatgcggtctgacccaggtgcactagctgccctctgtgagaaaactgacaatgacatccgtgcctgtatcaacaccctacagtttctctatgggaggggccggcgggagctgagcgtgagggatgtgcagaccacccatgttggcctgaaggaccagcgcaaggggctgttctctgtatggcaagaggtcttccagttgcccaaggctcaaaggcgagttgtgggccaagacctgatcttaccaacccatgctctcttgctcaatgatggggacaagggctccctgaccctggcctcccagcgcttttaccatatcctacgtgtgaccacctctgcaggcgagcatgagaaggttgtccagggcctgtttgacaactttctacaccttcgcctccgagactccagcctaggcaccgtgtgctgtgcccttgactggctggcctttgatgacctgctggagcaggctgcccaccatggccagagcttccagctgctgcgctacctgcccttcctgcctgctgccttccatgtgctctttgcctccagccacgtgccacgtatcactttccccagcagccagcaggaggcccagacccggatgagccagacaaagaaccacatccagacattggtgtcaggtatggcaccatccacccgcagcagggccacacctcaggcccttgttctggataccctctgcctgctcctggatgtccttgcacccaagctgcgccctgtgagcacacagctgtacagtgcccgtgagaagcagcagttgtccagccttgtgggtaccatgcttgcctacagtctcacctaccaccaggagcgcacacctgatgggcagtacttgtacaggctggagccgaatgtggaggaggtctgccgcttccccgagctgcctgcccgaaagcccctcacctaccaggctaagcagcttattgcccgggagattgaaatggagaagatgcggcgggcagaggctttggccttggctagaggtggcccccaggtggaccagggtccctcagggcctgcaagtctgcagacggacagtggggataaaggggtgaggcaacctgctccacgtaaccatgagcagcggctagaacacatcatgaagaaagcagtcgtgcaagagcagcccgagagggacttctttggacgtgtggtcatcaggagagtggctgtcccaagcagagaagctgaagccccagagaaggacacagacgagtggcgcatgggtgtggcagtgggcaggagtgaggtttggttccggttcaacgagggtgtttccaatgctgtgcgacgcagcctgtacatcagggacctgctgtagcccccgctgccctaggacatcagatcacagtgactcccacagggaatgtacaaaagcaaagacatctggagaagtctatttataaagtcacaccttacacaaaaanaaaaaaaaanaaaaaaaaaaaaaaaaaaaaaaaaaaa

SEQ ID NO: 1103 - DNA, 2426 bp, Cricetulus griseus
aggggcactggccgggctcattgctaagcaggaattgttggaaactttgctggtgtggttgcagtgggctgaaactacactaagtgagaaagataaggaagtcatcccacaggaaattgaagaagtgaaaaccctcattgcagaacaccagaccttcatggaagaaatgaccaggaaacagcccgacgtcgataaagttaccaagacctataagaggagggcagctgagccttcctcgctgcaatctcacattccagtcttggacaagggacgagccggaaggaagcgcttccctacatcaggcttgtatccatccggaccgcagacacaaatcgaaactaagaatcccagggttaacctgctggtgagcaaatggcagcaggtctggctcctggctctagaaaggaggagaaagctcaacgacgccttggaccggctggaggagctgagggaatttgctaacttcgattttgatgtctggcgtaaaaaatacatgaggtggatgaatcataagaaatctcgagtgatggacttcttcaggagaatcgacaaggaccaggatgggaagatcactcgtcaggaatttattgatggaattctttcctccaagttcccgaccagtcgcctggagatgagtgctgtggcggacatctttgacagagatggtgatggatacatcgactactatgagtttgtggcagctctacatccaaacaaagatgcttacaaacccatcacagatgctgacaaaattgaagatgaggtcacgaggcaagtagctaaatgcaaatgtgcaaagcgattccaagttgaacaaatcggtgacaacaaatacaggttcttcctgggaaatcagtttggagactcccagcagctgcgactggttcggattcttcggagtaccgtgatggttcgtgtcggaggtggatggatggctctggatgagttcttagtgaaaaatgatccatgcaggggctaaaggaaggaccaacatggagctgcgtgagaagttcatcctagcagacggtaccagtcaggggatggctgccttccggccacggggtcgcagatcacggccttcatcccgaggggcttcccccaacagatccacttctgtatccagtcatgctggccaggcagcctccccacaggtgccggttgctgccagcacacccaagggaacgccaatccagggaagcaagcttcgacttccagggtatctgtcaggcaaaggcttccactctggggaggacagagccttgataacagctgcagctgccagagtccgaacacagcttgctgaatccaggaagactcccagccgccctggaagcagagccggaagcaaagctggcagcagggccagcagccgccgaggcagtgatgcatcagactttgacatttcagaaatccagtctgtgtgctcagacgtggagactgtcccacagacgcacagacctgtgccccgagcaggttctcggccatccacagccaagccttctaaaatccccatgccccagaggaagtcacctgccagcaaattagacaagtcttcgaagagatagtgctattggctccagcaagcccttccctgagcatttattatttaagtgaatgatgtaaaatacgatgtagagattactgtgaaatattgcaggcggcgagtttttaattctgcagatggccttatttgtgtatttgtcttttttatttgatctgtgtcactttttggtcagactttttggggtaaaagtcacatcatatgtgataaaggaagaaagaatttaacatgaactaatgttcctgcactgtcaggtgtaggccacacactaaagtcagtcactgtacctacaggtaagtctacatcctctctgacaaccacagcactacatagctgacattaagggatacctcatgtcacttcttgtttctatgaaaattctcaacagctgacagacatagcagggaaatctcttttttttttttttttatttttattaattgtctttaactgtaaatctagaaggaaagacaaaaggaaaaacacaattaacacacagttcttcaagcagtaaccaacagagaatcagaatcacaggagattgcttcaagcagctgcgggtaccatggtgtgcaagcacctcccagcatccttgttccgttgctttagattcagccagacgtgccctgggtatcagccgtctatactttaagaatgtgatgcaaaacgcattcatataaacgtgaggttcgctttgcttgggtggacagcagcccctgtatcattgaactcattttgtaacagcaatttcgcttgcaaaaaaaaaaaaaaaaaaaaaaaaaatttacttgaaaaaaaaaaaaaaaaaaaaaaaaaaaaaaaaaaaaaaaaaaaaaaaaaaaaaaaaaaaaaaaaaaaaaaaaaa

SEQ ID NO: 1104 - DNA, 2424 bp, Cricetulus griseus
ggccggccggccgcagtatggcgtcacgggcccggcgcgctgatgctcaagtgcgtggtggtcggagacggggcggtgggcaagacgtgcctgctcatgagctatgccaacgacgccttccccgaggagtacgtgcccactgtcttcgaccactacgcagtcagcgtcaccgtcgggggcaagcagtacctgctgggactctatgacacagctggacaggaagactatgaccgtctgaggcctttgtcttaccccatgactgacgtcttcctcatatgcttctctgtggtaaatccagcctcatttcaaaatgtgaaagaggaatgggtaccggaacttaaggaatatgcaccaaatgtccctttcttattaataggaactcagattgatctccgagatgaccccaaaactttagctttctatagtgaagcttaatgtgctttcttaaagaatgccaaaagtttaataggtcataactgcatttactatgaacactaaaaatttacacattttagttaatgtgcattaaaaggtaatgaggcttccagcaactgtagatttagtttgatgttccccaaattgcatgaaatacatgctaaagtacaaatttaaaaattgggacatagtttgccataatcatgaactcagtttaagctctctgaagtaactagttggccatttttctaattcccactttggctgtgtgcatcaaatgaagtaagtcttggaagcaaactttgtttctttgtaaagtttatttgcagtgctggagccatttctaacccttctctggggaattggccttcaaaatgtactggaggcaaaaccaccttcataactggctggtaccatttggctttcttcctccgtctgctatagatctgccttattctaaatgccatgcaacagacagtagtgtttgttagaagcttccattcgaaccagctcatgcagtttagggaagcataatctaatccatatcgtgttgccagcctttcttaggttgaaattcgctgttgcttaaactacaatttcttggtctttatcgagcttctgttatcttccagggtttgtgcttacagctttgtctattgcacagattgggtaatggaacactaaacattgatacttgaaaatgacagccttaaatgttcataccagtcacaaatctagatgtactgtcttgcatgtgagctttgtaggagtttttgaagtataagcaccacactcccccacttggtagtggatggtctactggacaagagctttctcttggaaggggacatgggatatctttttttccaagcagtggtgattcacattaagcatcatagccttatgtatgctcaaatgggatttctgtaactttcccatttagttttggtcttgtttttagatagaattgacagaaattgtataatgagttaacatgctagctaagttgtcaaacccatgatatgaaggaatcccgacagtaaagtattattcatttccaagttgcctttggagatttgatgggtgttggttggttttcttcaaatctacatttgtgaaacccttgacacgtggtgtccttctccaggtggtaggaaccatgtatatagaacactcgaactctaagcagaagattgtatcatctgaacctgaggtgccttaggtactctatttaccttgatggggtttggagtttcccattgcttgttaagagctctttgtgttggttatttagtatttctttttgcaaaatcttctctgccactttaaccaaaaaagaaaaccaaagatttgttttctattcatgagcagattatagagaagctgccttattttcagaagcatatcttcattaaaggcataggttgcaacagaaattcagactaatctctggaaaaactttcaaactagtgaaataactgggaaataaaatgcttctcaaaacttttactaacatgaattgtgccagtgaataccctgcttcaaacaaggtcatgtacaaaagaacttagagggaattctcactgatcagggtttgcacagaaaatctgttctaaaaccctttacacttttggggactcttgaaatctaatagaacttactttgctaatgtgtgcccttactctatccttacaggtacattgtagcttacttgcgatgaattatcatatttccaataagtagagcttgagttgtgccatttgttatgaattatcttagttcctttagacactgcttccatttgattttaattattggttttaaataccaaattaaatactggtttgttggttgttgctttttaaatgattgttacttcaacagtgtcccttcctcacgtatagggtcataaataaaatgaaatgcagtttgctacttatgtaaaaaactaaaaaaaaaaaaaaaaaaaaaaaaaaaaaaaaaaaaaaa

SEQ ID NO: 1105 - DNA, 2424 bp, Cricetulus griseus
caaatgaatgacttgacacagtaggatcttgacaatcgctgagcagcgcttgcagcaccacgcagacaaagccctgaccatgaataacttgacgttcgacgtcatccaccaaattaaactgacagactttggagatgctgtccagctcaacaccacctactacatccaccagttgctggggaacccggagtttgcagccccagaaatcattcttgggaaccctgtctccctgacctcggacacatggagtgttggagtgctcacctatgtgctgctcagcggtgtgtcccccttccttgatgacagcgtggaagagacctgcctgaacatttgccggctggacttcagcttcccggaggactactttaaaggagttagccagaaggccaaggagttcgtgtgcttcctcctgcaggaggacccggccaagcgtccctcggctgcactggccctgcaggagcagtggctgcaggcaggtaacggcagctgcaaaggcacgggcgtccttgacacgtctagactgacctccttcattgagcggcgcaaacaccagaatgatgttcgacctattcgtagtcattaaaacttacttactagagcaggcttctgcctagagtttgacctatcttgaagttctttctcattctctttcacctgccaatcagctgttaatttgaattttgaagaggaaaccaaaccaaactaagtgaccggctggctgcctgctgttcatcgtgtgaaattgcattccaagtgagctgtgctcagtagcgcttgggctcggagctacaagctgcgctggggtggaggaccttcagttacactctgcaagggcagagatcgcatcgctgtttcacagtattttattcaggtttctgcaaaaataaaataaatacttttttaaatgaacatggatagaattttgcaatttaacattttcaagatttattcaaggaaacacatgcctatgttcaaaccactggtgttacacaaaacaaagatactgtgcatttctgggaaagactcgccaggtggcagccactcccatggcctcagccagtgcttggtgcccacctggcacagagctttcccagctgcctcatctgcgtacgtcttgccaggcaccagacttggcttctgaaatgtacgttcaacctcagtcttttgcataaaatagaatgaatggttttgctctgatgaattgtaggccttacatgtatatatgactcttcctgccttctatctggcatcccccacccccccccccacccaccgcctgggccttcctgtggggggccaagggggcctgcccatccaatgaagactttgggctgggtccagcccccactcgaacccccccctccccaaccccatcccaaaccgtcaatcaaattgttgaacggtatacagtcagatgaaaatactgtaaatgcactcatttggggttttagttttttttgattttatttcatatcatgtgcaatgttgtggctttaacattttctgcaactatttatgaagacttctgttgtacctgtaataaatatatagaaaaagcacatacttcgccagtgagctttatggttctgtgtatgttggggatgggttgtagccctgtgccatcagttcaaggacacttaactctccgtgaaatttgtcagttttgaggactgtaaaaaaagtgatttcatactctgaaaataaaactggataatagggtaatgttttaaattttattatgctattattcagaatgccaaagtattattttttcccaaaatcagtctgaacatttactactttttagactttttgacattcaactttctgtataaaaattggctggattttcagcttttggtaagaaagccaattaagtactggccaccctgaggctggtacccagtgcccgagtcactgtggcagagctggcgctggcgtgggaagtccttcaacacaagaagttgggtttctggcacgcttgaaatttttctggatgtctttttatctttattgtgtgaaatacactaaaaacacagagatcagattgcttcccaagccagccagacatctgggtcttgagccataaactggcaaaattaagctttgcagtttccaatgtattttatttattcttttgttgggtttttttgtttgtttgtttgtttcctgtaaaattgtacagaaactttttaagagaaattggattcaaaaactggatgtgtatccgtaacctcataacttttatttgtgtactgtttcttttattatttcagttaaatttttacattattttttgcatgtatatttctttgtacagagaccttacatgtttacacgttatgatgtgatgtaaatattttattttgccatcagttattttaaaaaattaaacatatttgcctgaaaaaaaaaaaaaaaaaa

SEQ ID NO: 1106 - DNA, 2424 bp, Cricetulus griseus
tcctgctttcagaaagtgtctgtccatactacccagattgtggtctccatggaaactgccccacatcctcacaagccgtgtgtgttagcgtcactgtcaaacctcgatggaagccttagtgtcaaagcagcgcaaaaagtgcctggcctaagtcttggatcatcactcatcctcagcataagcgatttactccttaaaactagcctcaaagaaagaagccggactctgataggaccattctctactacggtcagcctggaagctaaatggtgcaaacacagtggcaatcctggcccacaacagtccataccaaaaatagccatggatttaagaggcggtctcctgcagatcttctggggtcaagaacatttgaattgcttggcccttctgcatgagttactcagtggctatcttaaggaggagggaaagttggaagtgccagctcctgaatcaacgcccccagcctgtcggaaagcaaagtctgtgaactgcagttgccggatgtcaatctttgtgagtgacagagaaactggtgtcgtcagatctgtggagaatcgtcctgaacaacaatcagaatgcagcagacgaccaaagctctgcaagtgagtctggttcccaaagcacctgcgagccactggtgacccccacggccctggcggcttgcacccgagtcgactcctgtttcaccccctggtttgtcccgtccctcggcatatccttccagtgtgctcacctggagttgcgtctttgtcatcatttggaccagctcggcacagcttcaccacagcacctacagcccttcgtttccgataaaaacgtgccgtctgaactagagtacatggttatctccttcaaagagccaaacctgtatcttcgccagtggaacagtgctgcggtttggccaggtggatactgatgaaaatattctgctggcgagtctccacagccaccagtacagctggcgctcccacaaatccccacagctgttacacatctgtattgaaggctggggcaactggcgctggtcagagcccttcagtgtggaccatgctgggacatttattagaacaattcagtacaagggtcgaacagcttcactcatcatcaaggtccgtccactcagcggagtgcagaaacagggacatcagaagctgtgccaattctgcatctcctccatggtgcagcacggcatacagatattcagattgaagataagactacagtaatcaataacacaccgtatcaaatattctataagccacagttgtctgtcgccagcccctgctctggaaaggagcatttccatgtcccagacggtgccactttcagcatttgcccaggtggagagcatcctgctatgaaatccagctccctgccttgctgggacttcttgcctgatgtggggccatccgtggacacagctgctcttcaaaaacagatcctgctgggcttttctcctgcgccaggtgccgacagctctcagtgctggagcctgccagcgaagacccaagtcctcgagtcattttccacaacaggtgcccagtagcgatgctcgtcaaggagaatatgagagaaattcccaagtttgaggtttattgcaaaaagattcctccggagagttcagttcaccatgagctgtaccaccagattatgggttacccagactgcaagaccaaagacttacttcccagcctgcttttgaggatagagacggcgggagaggtggtcgtggaatggagcgatgctgtggacatcaacagccaagggacacagaggatagagaacagacactggtcaggtgcaattgctggtatagttgatcagccaatgcagaacttcccagaaaacatctgagacccaggcttcagcaggacataaggccaaggggtgtcatctcgggcgtggggaaaggaatcatgggggtattcaccaaacccattgggggagcagcagagcttgtgtctgtagttctggtgagaggctcaggccaggagcatgaaggatgcttgctgttgacctcagaagtgctctttgtcgtaagcatcagtgaagacacacagcaacaggccttccctatcacagagatcgactgtgcacaggacaccaagcaaaacaacctgctcactgtgcagctcaagcaaccacgagtagcctgtgacgtggagatggatggtgcccgggagagactgtcggagcaacagtttaacaggctcgtggactacattgcaaaaacatcttgtcacctggccccaagctgcaatcccatgcagacagcgtgttctgtggtggctgtggagcccccgccggccactgttaaaacctaccgttacttagttgacccacctttcgctcaggtcttcattagcaagttcaccatggtaaagaacaaagccctgaggaaagggttcccctgagtccccttta

SEQ ID NO: 1107 - DNA, 2423 bp, Cricetulus griseus
tgttcaagagcttcgccatgtctgctgtgattacagagggtgtgaagcccaccctgtcagaactggaaaagtttgaagatcagcctgagggcatcgacctggaggtggtgactgaaggcacagggaaggaacgggagcataatttccagcctggggacaatgtggaggtgtgcggaaggggagctcatcaacttgcaaggcaaggtcctcagcgtggatggcaacaaaatcaccattatgccgaagcacgaggacctgaaggacatgctggagttcccagcccaggaacttcggaagtacttcaagatgggggaccatgtgaaagtgattgctggccgattcgagggtgacacgggtctcattgtgcgggtcgaggagaactttgtcattctcttctcggatctcaccatgcatgagttgaaggtgcttccccgggacctgcagctctgctcagagacagcctcaggtgtggatgtcgggggccagcatgagtggggtgagctggtgcagctggatccccgcactgtgggtgtcatcgtgcggctagagcgagaaaccttccaggtactgaacatgcatgggaaggtggtgaccgtcaggcaccaggccgtgactcagaaaaaggacaaccgcttcgctgtggccctagactcagatcagaacaacatccatgtgaaggacattgtcaaggtcatcgatggcccccactcaggccgcgaaggtgagatccgccatctgtatcggagctttgccttcctgcattgcaagaagctggtagagaatggcgggatgtttgtttgcaaggcacggcacttggtgttggctgggggctcaaagccccgggatgtgaccaatttaactgttggtggcttcactcctatgagccctcggatcagcagtcccatgcaccccagtggtgaaggccagcatggtggctttggtagcccaggtggtggcatgagcagaggtcgagggcgaagagataatgagctcataggccagactgtgcgtatctcccagggaccctacaaaggctacattggtgtggtgaaggatgccacggagtccacagcccgagtggaactgcactctacctgccagaccatttctgtagaccgccagcggctcaccacggtggactcccagcgtccaggtggcatgacctccacctatggacggacacccatgtatggctctcagacacccatgtatggctctggctcccgaacacccatgtatggttcccagacacctttgcaggatggtagccgcactccacattatggttcgcagacgcccctgcatgatggtagccgcactcctgctcagagtggggcctgggaccccaacaacccgaacacgccttccagggctgaggaggaatacgagtatgcctttgacgacgagcccaccccatccccacaggcatatgggggaaccccgaatccccaaacacccggctacccagacccatcatccccccaggtcaatccacagtacaacccgcagacaccagggacaccagccatgtacaacacggaccagttctctccctacgctgccccctctccacaggggtcctaccagcccagtcccagtccccaaagttaccaccaagtggcaccaagcccagcaggctaccagaacacccattccccggccagctaccaccctacaccttcacccatggcctatcaggccagtcccagccccagccctgttggctacagtccaatgacccctggagctccttctcctggaggctacaacccacacacgccaggctcaggcattgagcagagctccagtgactgggtaaccactgatatccaggtgaaggtgcgagacacctatctggacacacaagtagtggggcagacaggcgtcatccgcagtgtcacgggaggcatgtgctccgtgtacctgaaagacagtgagaaggtggtcagcatttccagtgagcacttggagcccatcacccccaccaagaacaacaaggtgaaagtgattctgggtgaggaccgggaggccactggggtcctgctgagtattgatggtgaggacggcatcatccggatggacctggaagaccagcagatcaagatcctgaacctccgcttcctggggaagctgctggaggcctgaagcccaagggtgcagtgcaggcgtggggcgggccgtccaccctctgccttgcttggcccggcatggaaccctgaatctggagcaagccggggtgatgattctggagtaccttttcctccttccctgatactctagacatcggtagagtctgagaaaggttcccaccttttcttctgctgccccagcttgccttcatgttcaggtctttcaataaagagaaactgtttgaaaaaaaaaaaaaaaaaaaaaaaaaaaaaaaaaaaaaaaaaaaaaaaaaa

SEQ ID NO: 1108 - DNA, 2423 bp, Cricetulus griseus
ccatgggatgacaaggatttcagattgtactttctctggactgctttcttttggggttggagtctattgatttacttcctgttcaaaagttcttgggagagaaatcacatggaaagactttgtaaataactatctttctaaaggagtggtggatagactagaggttgtcaacaagcgttttgttcgtgtgactttcacaccaggaaaaactccggttgatgggcaatatgtctggtttaatattggcagtgtagacacctttgagcggaatctggagactttgcagcaagagctgggcatagaaggggagaatcgagtacctgtggtctacattactgaaagtgatggttccttcctgctgagcatgttgcccacggtactcattatcgcttttctactctataccataagaagagggcccgctggcattggtcggaccggccggggaatgggtggactcttcagtgttggggaaaccaccgccaaagtcttaaaggatgagatagatgtgaagttcaaagatgtggctggctgtgaggaggccaagctagaaataatggaattcgtgaatttcttgaaaaacccaaagcagtatcaagacctaggagcaaaaatcccaaagggtgccattctcaccggccctccaggtactggtaaaacactgctagctaaggccacagctggagaagccaatgttcccttcatcactgtcagcggatctgaatttctggagatgtttgtgggtgttggtccagccagggttcgagacttatttgcccttgctcggaagaatgccccttgcattctcttcattgatgagattgatgctgtgggaaggaagaggggtcgaggcaacttcggagggcagagtgagcaggagaacacgctcaaccagctgctggtggagatggacggcttcaacacaaccaccaatgtggtcatcctggcaggcacaaatcggccagacattctggacccagcccttttgagggccaggccgcttcgacaggcagatctttattggaccccagacataaaaggacgagcatcaatcttcaaagttcaccttcggccgttgaaactagacagtgccttggaaaaggagaaattggctagaaaactggcatccttaaccccagggttttcaggagctgatgttgccaatgtctgcaatgaagctgctttgattgctgcaagacacctttcagatgccattaatgagaagcactttgaacaagcaattgagcgagtgattggaggcttggagaaaaaacccaagttctacagcctgaggagaagaagacagtagcttaccatgaagcaggccatgcagtcgccggctggtatctggagcatgcagacccactcttaaaggtgtccatcatccctcgtggtaaggggctgggctatgctcagtacttgccaaaggagcagtatctgtacacaaaggagcagctgctggacaggatgtgcatgaccctgggtggccgagtctctgaagaaatcttctttggaagaatcacaactggtgcccaggatgacttgaggaaggttacccagagtgcctatgcccagattgttcagttcggcatgaacgagaaggtggggcagatctcgtttgacctcccacgccagggggacatggtattagagaagccttacagtgaagccactgcgaggatgatagatgatgaagtgagaatacttattaatgatgcctataaaagaactgtggctcttctcacagagaagaaggctgacgtggagaaggttgctctattactattagaaaaggaagtattagataagaatgatatggttgaacttctgggccccagaccatttacagaaaaatccacatatgaagaatttgtggaaggcactggcagcttggatgaggacacttcgcttcctgagggcctgcaggattggaacaaggagcgggagaaagagaagcagaaagagaaagagaaagacgagcccctgaatgagaaggctgtcagctaggcccagggctggaagccgctttacctagtcctctgggcttcagtcctcagccttggcctcaggagcagtggctggaacaggggagagagcaccacctgccaaagctgtcttgtggaatctattacatggtagaagaatgtttccccatcacccactctccattcctcctcctctgatatctctacaggagtgctgtgtgaaattcagctggagtcccgataagaatattttgattcaagcaaatattttaaaatttgaattcagatcacttattgctgttttaatggaatggttttctatagagaactgtaacatatttaaaaacatgaatgtattgtgtaaatatgggttctttacatcagaaataaaaggtggacattgtactttttcctgaaaaaaaaaaaaaaaaaaaaaaa

SEQ ID NO: 1109 - DNA, 2423 bp, Cricetulus griseus
ccatctccacagaagttccaagctgtaaggagccatcggcctctcttaggatgacgtcaccctccagtcctccagcttttaggctggagacatcagatggagaccaagaagatagtgctgaaagtggacaaaggaagaaatgagccaccccccatggaatcaccattccagggcgaggaccggaatttcgtcccctcagatcaaagtgaatcgaaagggacgaggtgccagccagcaggacccaaacaggtttgaccgtgaccgactcttcagtgtggtctctcggggtgtccctgaggagctggctggactgcgagaatacctgtgccggaccagcaagtacctcactgactctgcgtacacagagggctccacagggaagacatgcctgatgaaggctgtgctgaaccttcaggacggggtcaatgcctgcatcctgccgctgctgcagattgacaaggattctggcaatcctcagcccctcgtcaatgcccagtgcaccgatgagttctaccgaggccacagtgcgctgcatattgccatagagaagaggagcctgcagtgcgtgaagctgctagtagagaacggagcaaatgttcacatccgagcctgtggccgcttcttccagaagcacccagggacttgtttctattttggtgagctacctctttctctggctgcatgcaccaagcagtgggatgtggtgacctacctcttggagaaccccgcaccagcctgccagcctggaggccactgactccctgggcaacacagtcctgcatgctctggtcatgatcgcagataactcccctgagaacagtgcactggtgatccacatgtatgatgggattctccaagtgggggcccgcctgtgccccactgtgcagcttgaagatatctgcaacaatcaaggcctcacacccctgaaactagctgccaaggaaggcaaaattgagattttcaggcacattctgcagcgggagttctcaggactgtaccagcccctttcccgaaagttcaccgagtggtgctacggtcctgtccgagtatcactgtatgacctgtcctctgtggacaactgggaaaagaattcggtgctggaaatcatcgcctttcattgcaggagcccgcaccgtcaccgcatggtggttttagagccgctgaacaagctgctgcaggagaaatggcaacggctcatccccaggttcttcttcaacttcgcctgttacttggcctacatgctcatcttcaccattgttgcctaccaccaaccttccctggagaagccagctgttccctcatcaaaagcaacttttggggaatccatgctgctgctgggccacatcctgattctgcttgggggtatttacctattactgggccagctgtggtacttttggcgccgtcgcctgttcatctggatctcattcatggacagctactttgaaatcctgttccttgtccaggctctgctcacggtgctgtcccaggtgctgcgtttcatggagactgaatggtacctacccctgcttgtgtcatccctggtgttgggctggttgaatctgctttactatacacgtggcttccagcacacaggcatctacagtgtcatgatccagaaggtcattcttcgagacctgctccgattcctgctggtctacttagtcttcctttttggcttcgctgtagccctagtgagcttgagccgggaggcccaaagccccaaagcccctgctgataacaacaccacagtgacagaacagcccatgctgggccaggaagaggaggcagcaccatatgggggcattctggatgcttcactagagctcttcaagttcaccattggtatgggtgagctggccttccaggaacagctgcgctttcgtggggtggtgctgctgttactgttagcctacgtccttctcacctacgttctactgctcaacatgctcattgccctcatgagcgagactgtcaacagcgttgccactgacagctggagcatctggaagctgcagaaagccatatctgtcttggagatggagaatggttactggtggtgcaggaggaggaagcatcgctcagggaggctgctgaaagtcggcaccaggtgggatggtgtgcctgatgagcgctggtgcttcagggtggaggaagtgaactgggctgcatgggagaaaacactccccaccttgtctgaggatccatcaggggaaggcatccttggttatgacaagaacccagcttctaaatctgggaagaacagtgtctcagaggaagaccatctgcccctccaggtcctccagtctcagtgatggcccagatgctgcagcaggctggcagggctgagtgggggatctttccagccatacctgctggctctgaggctactgcattttggtggaaatataatatatattttt

SEQ ID NO: 1110 - DNA, 2422 bp, Cricetulus griseus
  modified_base (111)..(111): a, c, t, g, unknown or other
caacctggcccaacaggaacaggatgtcctctatcgccgcctgaagcttttcacccacctgcggcaggacctggagagggttaggaacctgtgctacatggtgacaaggcncgagaggggacgaaggcacaccatctgcaaactccaggagcagattttccacctgcagatgaagcttatggagcaagatctgtgtcgagagccttctgggaggagaccaaagggcaagaagagtgactcaaagaggaaaggccgagagggtcccaagggcagtagccctgagaagaaagagaaggtgaaggctgcgccagagtctgtcctggggcagctgggtctgtccacctcgttccctatcgatggcactttcttcaatagctggttggcacagtcagtgcagatcacagcagaagacatggccatgagtgagtggtctttgaacagtgggcaccgggaggatccagctccaggtctgctgtcagaggagttgctgcaggatgaggagacgttactcagcttcatgagggacccctcattacgacctggtgaccctgccaggaaggcccgaggccgcactcgccttcctgccaagaagaaaccacccccgcttcaggatgggcccagtgcacggaccactccagacaagccacccaagaaaccctgggcccaggatggcagaggcaagcgcgtgcaaggaccacccaccaggaagccaccacggaggacgtcttctcatttgccgtccagccctgcagctggggactgtcctgtcccagcagcaatggaaagcccccccccactggcctctgaaaccctggacgagacagccctcatggcttccgacttgaatgtccaagtgcctggccctacagtgagccccaagcccttgggcaggctccggccaccccgagagatcaaggtcagtcggaaatctccgggtgctaggtctgacgctgagacagggactgccatctgctgtggccgagaggccaaaggtcagcctgcactttgacactgaggctgatggctacttctctgatgaggagatgagcgactctgacatagaggcagaggacagtggagtacaacgggcttccagggaggcaggggcagaggaggtggttcgcatgggggtactggcctcctaactcaccagggtactgccctggtcccccacagggcctcagcccaatcacaactgccatttccaactgctgagtgtcccagacccaccactctgtcgtggttttatttttaatatatagagagttctgaattccagatccccagcctgtcaattcactgctgctgctgttggtttacggtccctgggctgggccgctgtgagtgtggtcctaaactttgaggactcctcccctctgggggggagaatcctgactatgagtccagcgtggttcccccccccatcgccaccacacagatacaacaaagagacaaatagtaccgggtaccttccacccacctcgactccaaaactatcaaggtacgacagtgagtttgagcaaaatcagaagcaaagataatgacttcagtttggtggattggactgtgtgtgtgtgtgtacagatcgctgtgcacataacgtgtgtatgcatggacaccctatgggacttgctagggtttctaaagaatccactgcctgattctccaggaatgttggtaacaggttagacttagggtttgctcaccattgccacatatggcccacctgtgcccatgcctgaagctctgtggaaccacgtgtgatctctgtagtaaggtccttgagacaactctcccatgcccttggcctagctggccacattggcccgagagccagaggtgttggagtcggggacccttggttgttctttaaggctcttcctgccgccttccctcgaggatgcacacttgtgctccatccaaatcatttgggggtggcggtggggagggtgatatgaatgtcacaggaggagacaccttctgtctttgtttcaaagaaagtgatgtgccatttgttaatatacaagagaaatactgaaaatatattgaaaagagcaattttaaattatttttggcttatgttgcaatatttattttcttgtattagagaagattcctttgtagagaaaaatgtatttttcattaccgcaaagacctatttctcctttttgtacattgtccttgttcgcaacccttaacgagcaatagaatgtccggtcacccccgcgtggccagtgcccactgtgccctgcatgattgtgttgctgctgctgctgctgctgctgcatagtttccgcccctgtcctgtcctgctcactcactggggcttctggattttggcccctgccagggtctatgtctaagaagcccattgcactcctgtgtgttggcaaattcagttaataaagcaatgttttctgtg

SEQ ID NO: 1111 - DNA, 2421 bp, Cricetulus griseus
ggagacagcatcccagagaaactcccgaagtttccatcttagaccacccacttgtagcttgggacttgatggcatctggattcttcgttctgactgggggcatcgatcagactgggagagctttgctgacgatcacaccaccgcctccatgccttcctgaggagccctcaccctcccaagagacactcaacactgctcttcgttacctctactcactgctcaggcctgatttgcagttattggggctcactatcctgcttgaccttcgcaaggcacccccactgcctccagcacttattcctgcctgggccccagagcccagtgcaggcactttccaggagatgcgagccctggccctggacctgggcagcccagcagtccttcgagaatggggccgatgccgagcacgctgccaagagctggaaaggaggattcagcagcagctgggagaggaggccagtcctagaggccacagacgacgacgggcagacagtgccagcagcacaggggccagcatggagcccatagcccttcgcccagcctcagctccctgcttctcccagcatatgaggaggaaggccttgagctagctccagaagcagatggaagacccccaacggctgtgctgatccgaggcctggaggttaccagtacagaagtggtagacaggacgtgttcaccccgagaacatgtgttgttgggtcgggctggaggaccagatgggccctggggaataggtacccctcgaatggagcgcaaacgaagcatcagtgcccagcagcgtctagtgtctgaactgattgcctgtgagcaagaatacataaccactctgaatgagccagtgccaccacctgggcccgagctgactcctgagcttcggtgtacctgggctgcagccctgagtgccagagagagacttcgcagcttccacgggacacactttctacaagagcttcagggctgcaccacccatcctctgcgcattggggcatgcttccttcgccatggggaccagttcaacctctatgcacagttggtgaagcacagacacaaactggagagtggtctggctgccctcacctcctcggccaagggttccatggagagcagcccttgcctgccccgagccctgcaacagcccctggagcagctggctcggtatggacagttcctggaggagctcctgagggaagctgggcctgagctaagctctgagcgccaggccctcagggctgctgtacagttgctccaggaacaagaggcccgaggcagggatttgctcgcagtggaagctgtgcgaggctgtgagatagatttgaaggaacagggacagctcttgcatcgggacccattcactgtcatctgtgggcggaaaaagtgcctccgccatgtctttctgtttgaggacctgctcttgttcagcaagttcaagggctttgagggaggatctgagaccttcgtttacaagcaggctttcaagactgctgacatggggctgacagaaaacatcggggacagtggactctgtttcgagctttggttccggcggcggcgcgcacgagaagcatacactttgcaagctatctcaccagagaccaaactaaagtggacaagttctatcgcccagctgctatggagacaggcagcccacaacaaggagctccgagtgcagcagatggtttccatgggcattggcaataaacctttcctggacattaaagccctgggggaacggacactgagtgccctgctcactggaagagccgcccgcacccgggcctccgtagccgtgtcatcttttgagcatgctggcccgtcccttcccggcctctcaccgggagcctgctccctgcctgcccgcgtcgaggaggaggcctgggatctggacgtcaagcagatttccctggcctcagaaacacttgactcttcgggagatgtgtccccaggaccaagaaacagccccagcctgcagcccccgcaccatgggagcagcactcccaccctggccagtggagggatcttagggctctcccgacagagtcattcccgagccctgagtgaccccaccacgcctctgtgaccccatcctgtgctgctgcacaaccacaggacgctcactgctgacagcctgcttctcttcccatcccctgactctcctggaagattcatctctgccaggtcggatggaattccattccggggtatcatgggacatgacgtgttctaagccattgaaggagatggggtgggcgttgcagactttatatatgtaattactgttgttatactattgttatattaaatgtatttactctcactgtgcctcccaagggccagagcaggcctctggattaaggtgtctgaacgaacttgaatacttccctacaaccactaactaggactcagaaaataaaaccaagg

SEQ ID NO: 1112 - DNA, 2420 bp, Cricetulus griseus
cggctggtactccagcgtcaaacgtccatcacacagaccatccgcagggggacagcagactggtttggagtgagcaaggacagtgacagcacccagaagtggcagcgcaagagcatccgtcactgcagccagcggtatgggaagctaaaacctcaggtcattcgggaactggacctgcccagccaggacaacgtgtcgctgaccagcactgagactccacctccactctatgtggggccatgccagctgggcatgcagaagatcatagaccctctggcccgtggccgggccttccgcatggctgatgacaccgctgatggtctgagtgcccgtgaatcagtggccaagatgagcttccgggctgctgcagcgctggtgaagggtcggtctattagggatggcactttacgaaggggacagcgtcgaagtctttacgcctgccagcttcctggaggaagacatggtggacttccctgatgagttggatacgtctttcttcgcccgggaaggtgtcctccatgaggagctgtccacatacccagatgaggttgtttgagtccccatcagaggcagcgctgaaggactgggagaaacgaggctggcggaagcagaaggagggcagcacattagccccgcagcccaaggtgcggcttcgccaggaggtagtcagtgcggctggacccaggaggggtcagcgcatcgctgtgccagtacgaaagctcttcgcccgggaaaagcggccctatggtttggggatggtgggaaggctcaccaaccgcacctaccggaaacgtattgacagctatgtcaagcggcagatcgaggacatggatgaccacaggcccttcttcacttactggctcaccttcgtgcactcactggtcaccattctggctgtgtgcatctatggtattgctcctgtgggcttctcgcagcatgagacagtggactcggtacttcggaagcgtggtgtctatgagaatgtcaaatacgttcagcaggagaacttctggatcggccccagctcggaggccctcattcacctgggtgccaagttttcaccctgtatgcgccaggacccacaggtgcacagcttcatccttgctgcccgggagcgtgaaaagcactcagcttgctgtgtacgcaatgaccggtctggctgtgtgcagacttcgaaggaggagtgctcgtctacgttggcagtatgggtgaagtggcccattcatcccagtgccccagaccttgcaggcaacaagaggcagtttggttctgtctgccaccaggaccccagggtatgtgacgagccttcctccgaggaccctcatgagtggccagaagatatcaccaagtggccgatctgcaccaaaaacagtgctgggaaccacactaaccaccctcatatggactgtgtcatcacgggccggccctgctgcattggcaccaaaggcaggtgtgagatcacttcccgggagtactgtgacttcatgaggggctacttccatgaggaggccacactctgctctcaggtgcactgcatggatgacgtctgtggcctcctgcctttcctcaatcccgaggtgcctgaccagttctaccgcctgtggctgtccctcttcctgcacgctgggatcctgcattgtttggtatccgtctgcttccagatgacagtcctgcgggacctggagaagctggcaggctggcaccgcatagccatcatttacctgctgagtggtgtcacaggcaacctagccagtgccatcttcctgccataccgggcggaggtaggtcccgctggctcacagtttggtatcttggcctgcctctttgtggagctgttccagagctggcagatcctggctcgaccctggcgtgccttcttcaagctcttggccgtggtgcttttcctctttgcctttggcctgctgccctggatcgacaacttcgcccacatctcaggcttcatcagtggcctcttcctttcctttgccttcttgccttacatcagctttggcaagtttgacctgtaccgcaagcgttgccagatcatcatcttccaggccgtcttcctggggctgctagctggcctggtggttctcttctacgtctacccagtccgctgtgagtggtgtgagtttctcacctgcatccccttcaccgacaagttctgtgagaagtacgagctggatgctcagctccactgaagcagctgcaggcaccccagaacacccagccccctggggctgaagagacggtgctccctgaagactgacctctgtgccttgctcactcctgttgagcccttctactgctggacacttatactacatgagttcccatgataaccttctaactagtccccttgaccgaccacttcatgtggccaataaatggactgggagtcgttttagctgccactaact

SEQ ID NO: 1113 - DNA, 2420 bp, Cricetulus griseus
ggtggacgccgtgcgggccacccggatccagtactcgcgctcgcctccgccaggccggctccgccgcgccccggctcccgcgggccccgcagccacagccaccatccgagaaattctacagcatggctgcccagataaagctgctgttagaaatccctgagaagatctggagctccatggaaacctctcagcatctccaggccacacaactctacctgctctgctgccatctgcacagcctgctccagctggactcctctagctccagatatagtcccatcctctcgagatttcccatactcatccggcaggtggcagcagccagccacttccggtcaactattttgcacgaaagcaagatgctgctcaaatgccagaatgtgtcggaccaggctgtggccgaggccctctgctctataatgctcttggaggagagttctccccgacaacccctcacagacttcctgatggccagaaaggcgactattcagaaacttctgaaccagccccatcacggtgctggcatcaaggccagattggctcgtttggtggaactgctggctaccaccctgaaccaagcccatgcccttttctacactctaccagaaggcgtgctgccagacccatccctgccctgtggcttgctcttctctaccctggagacaatcacaagccagcatcccacgggaaagggcatcggtgtcctgcagggggagatgaggctgtgcagctggttcagacacccaggaactggaggccagcaactccacatcaaataagcatgtccactttgagcagaacatgtctctcttcctctggtccgagagtcccagcgatctgcctcctgatgctgcctgggtcagcgtggctaaccgggctcagtttgccaacagtggtctctccatgaaagcccaagcagtcagtccctgtgtacagagcttctgttctgccctggactctaagctgaaggtcaaactggatgacctcctggcctacttccatccagcgacacaccaccaacccaaggaccccctcccccatctgcaccaggctaagaactctgccttcgacagatactcggatgctgggactgtgcaggacatgcttcggactcagtccgtggcctgtatcaagtatgtggtgggctgcatccaggcagagctgcagaccattgaagaagtcacccgagaccagaaggatgtccttcatggcaccaagctgcacgcagtcctcttcatggccagactctgccagtccctgggagaattgtgccctcacctgaagcagtgtattgtgggaaaagtgtgggggctctgaaaaaccagcgagagaggccaggactctcaagaagcagggcaaagggaaagctcaggaggtgctccctgcgcaggcccagtggcaggaagtgaaggaagtcctgctccaacagagcgtcatggcctaccgggtctggagctcagcgcttgtgaaatttctcatttgtggattcactcagccattgcttttaagtgacgctggctcaatcctggccactgccaccaactgggatgaactagaaattcaagaggagacagagtctggcagcagtgtcacgtctaagatccgccttcctactcaaccgtcctggtatgtacagtccttcctgttcagtttatgccaggaagttaatcgtgttggaggccacgccttgccaaaggtgaccctgcaagagatgctgaagaactgtatgggccaagtcatagctgcctatgagcaactcacagaggagcaacaggtaaagaaagaagggacgtttccaatgacccagaaccgagccctgcagctcctctatgaccttcgctacctcaacatcgttctgaccagcaagggggaggaggtgaagagtggccggagcaagccagactccagaattgagaaagtgaccgagaggctggaggccctcattgaccctttcgacctggatgttttcacaccacatctcagcagcaaccttaaccgcctggtacagcggacttctgttctatttggattggttactggtacagagaatcagtttgcctcccggagcagcacattcaactcccaggaaccccataatatcctgccactagcctccagccagatcaggtttggactgcttcccctgagcatggcaagcacgagaaaggcaaaggcaaccagcagaggcgttgaaacacaagcccaggttggctcccaggcactctccagagtaggtgaccagacgcatcctggctccttgttcagacagctcgccggcgaggaagacgactcacctgcgccttccttattcaagcttgcctggctctctagtatgacaaagtagcatggaaacaatgtcccggctctctattaaatactagtgcaccgttttgaactaaaaaaaaaaaaaaaaaaaaaaa

SEQ ID NO: 1114 - DNA, 2420 bp, Cricetulus griseus
ggttcgcacgccacgactggaccccctacgcggcggctgcagaggtcggccctgcccggtgggaccgccgagactgacctttgccgggagcccatcctggccgacgacgtgtgcgggtccctggcgtcccctccggcgcgctcttggacccacttcccacagcggaagtctgcctgctcgggctccgccgggacctgctcggaggaatggcgccgccgggttccagcgctgtcttcctgttggccctgacagtcgtagccaccacccaggctttgacacctacccactacctcaccaagcatgatgtggagagactgaaagcctctttggatcgtcctttcacaaatttggagtctgccttctattccatcgtgggactcaacagccttggtgcccaagtgccagacgtcaagaaagcatgtaccttcatcaagtctaaccttgaccctagcaacgtggactctctcttctatgctgcccagtccagccaggtcctctcaggctgtgagatatctgtttcaaatgagaccaaagatctgcttctggcagcagtcagtgaagactcctctgttgcccagatctaccatgcagttgcagcactcagtggctttggccttcccttggcatcccatgaagccctcggtgccctcactgcccgtctcagcaaggaggagactgtgctggcaacggtccaggctctacagacagcatcccacctatcacagcaggctgacctgaggaacattgtggaggagattgaggaccttgttgctcgcttggatgaactagggggcgtttatctccagtttgaggaaggactggaaaccacagccttgtttgttgctgccacctacaagctcatggaccatgtggggaccgaaccatccatgaaggaggatcaggtcatccagctaatgaacacaatcttcagcaagaagaactttgagtcactctcagaagccttcagtgtggcctctgctgctgctgcattgtcccagaatcgctaccacataccagtggtggttgtgcctgagggctctgcttctgacactcacgagcaagctatccttcggttgcaagtcagcaatgttttgtctcagcctctgactcaagctgcagttaagctggaacatgctaaatcagtggcttccagagctactactgtcctgcagaagatgcccttcacgcttgcaggggatgtttttgagctaaacttcaagaatgttaaactttccagtggttactatgacttctctgtcaaagttgaaggtgacagccgttacattgcaagcactgtagagcttagagtcaagatctccactgaagttggcattacaaatgtggacctttccactgtggataaggaccagagcattgcacctaagaccacccgggtggcctacccagccaaagccaagggtacgttcatcgcggacagccatcagaacttcgccctgttcttccagttggtagatgtgaacactggtgctgaactcacccctcaccagacatttgttcgacttcataaccaaaagactgggcaggaggtggtgtttgttgctgagccagataacaagaatgtgtataagtttgaactggacacctctgaaaggaagatcgagtttgactctgcctctggcacctacacactgtacttaatcattggagatgccactttgaagaacccaatcctctggaatgtggctgatgtggtcatcaagttccctgaagaagaagctccctccactgttctgtcccagaacctctttaccccaaagcaggaaattcagcacctgttccgagagcctgagaagaggccccccaccgtggtgtccaacacgttcacagccctcattctctcgcccttgctcctgctctttgcactgtggatccggattggtgccaatgtctccaatttcacctttgctcctagcacaattatctttcacctgggacatgctgcaatgctggggctcatgtatgtctactggactcagctcaacatgttccagaccctgaagtacctggctgtcctgggcactgtgacatttctggctggcaatcgaatgctggcccaacaggcagtcaagagaacagcacattagttcctgaagaaggttgaagacccctgcaaactgaaatgattggttagcaaggagtgaagacaattcatagtgtgaaaggaataaggggaaaacaaaacagaaaatgaaaagattctgttatttaaaaagaaaagagttgagatatggttacacttttacttgtttcttactttctgttttacagagcagatacgtttgggcccagattgtctgtccctttgtcatgatgcctggcaagatgctgtgactatcccaaatgttgttcatttgaaaagttgaaatctgtaattcatctactttggaataaagagaatg

SEQ ID NO: 1115 - DNA, 2420 bp, Cricetulus griseus
tttcgttgcatgattcaggatatgtttgaccctgagttttacatgggagttttatgaaacagttaaccagaccacaaaagcacgagttcttcatttttggaaaatacagagatgtagcagaatgtgggcctcaactctaccactagcagaaagacagacttctactgtgttccagtggacctggggaatacgttcatgggtcaaagaagcctatgtcaatagcaaaccaagctcgagtcagtccctcaacttcctatactcccagtcggcacaagaggagttatgaagatgatgaagatatggacctacagcccaataaacagaaagaccaacatgcaggtgcccagcaagcagggggcctcggtggccttcactggtgtggagaaccaaagcgcttagaaactgaagcttccagtgggcaacagctgagctccttgaacctctcttcaccattcgatctgaacttccccctgccaggagagaagggccctgcctgcctcgttaaggtctatgaagattgggattgcttcaaagtcaatgatgttcttgagttatacggtgtgctgtctgtggatcctgttctgagcatattgaataatgaggaaagggaggcgtctgcattactagaccccatggagtgtacagacatggcagaagagcagagggtacatagtcctccagcttcattagtgccaagaattcatgtgattttagcccagaagttgcagcacatcaatcctttgttacccacttgccttaacaaggaggagagcagaacttgtaagtttgtgtccagtttcatgtctgagttgtctccagtcagagcagagctgcttggattcctcacacacgcgctcttgggagatagtttggctgctgaataccttatattgcatctcatctcaacagtatatacaagaagagatgttcttccactaggaaaatttacagttaacctgagtggctgcccacaaaatagtaccttcacagaacacctatatcggatcattcaacaccttgttccagcctcttttcgtctacagatgacaatagaaaacatgaaccaattgaaattcattccccacaaagactatacagccaatcgattggtcagcggtctcctccagctgcccaacaacacgtccctggtcattgatgagactcttctagagcaagggcagttggacacctcaggtgttcataatgtgactgcgctgagcaacctgataacctggcagaaggtggattatgacttcagttaccaccagatggagttcccgtgcagtatcaatgtgctcgtcacatctgaggggcggtcactgctcccggcagactgccagattcacttacagccccagctgatcccgcccaacatggaagagtacatgaacagccttctctcaactgtgctgccatctgtgctcaacaagttccgaatctatctgaccctcttgagatttctggattacaacatatcagatgacataaccaaggcggttgaagatgattttgtggaaatgcgtaaaaatgatcctcagagtatcacagctgatgacctccaccagttgcttgtggtggctcggtttctgtccctgagtgctggtcagacaacactatcaagagaacgatggctaagagcaaagcagctggagtcttccagaaaaaacaggcttcagcagcacaaatgtgtgaatgggaatgaactttagagttctgaacttaagaagagaatgggcaagctatagcctccatgctgtacaattcagattcgtttataacatattgttttatagataatttgtatctaaaaacaatgacttttcctgaaatcaagcctggtgacacctaaagtttatatgattctctgtaagggcttttaccttactggttttatggagttttggagtttgttttataattagttatgatgtacaaaaatgtctttgatattaaaggtttaattatgataatgttgctgatcataccatctccttagctatagctccatcttaggccagactcttgaagtaccagcttcgcctgaagacagttactggaagaactgtgcactgtgatcaccattttgttttcataaaaggacactcagataagagacttctttccttggaataaatgcagctttgtgaaggtcaaccaacaattgtccttagcttttctcatctttttttttttttttttttgtttttttttgggtgctatgaaaggaactacaaactaccatttcagcattattttcctagcctcaaatctatttttataagctaatataaataatgttcatattagaattctaactggttttcatttttataactggtagataagatcttccttaaacctttgaaaataaaatgttcacgtagatttttgaaaatgcattttccttgtcctagaacaaa

SEQ ID NO: 1116 - DNA, 2418 bp, Cricetulus griseus
aaattttgtttgagaagggaaatctttcaacagaaaccaaaacagtcctaaagggttcactgtcctcttgtcttcaggaaggtctgataccaggttctcaattttgggatgccactaagactttgagaacacttcttgaagaagggtattttagtgggaagtcagaaggcagtggtgtagtgctgcctggggtgcttaaaagtatgacctcggagtcggattctattggcctgacaccaggggagaagagtgaattggccctgtctgctctaggtggttgtgttttctaacctcaaaaatgcctgattgaccaggagcttctatcaatggctaattttgaggaatattttcccttggattctgacaaggtcacaacagtaagacctggtgcgatcttcactacagccagtcagcgaatggtgctagatgcagtgacattaaacaatttggagattttcctgaatggaacaaatggttctactgaagggactctgctagagaggcttgatacttgccatactccctttggcaagcggctgctaaaacagtggctttgtgctcccctctgtagcccctctgctattagtgaccgtttagatgctgtgggagacctgatggctttgcctgacaaagtcaatgaagtcacagacctcctaaagaagctaccagatcttgagaggctactgagtaagatccataacattggatctccactgaagagtcagaaccacccagacagcagggctataatgtatgaagaaaccacatacagcaaaaagaagatcattgattttctgtctactctagaaggattcaaagtagtatgtaagattatagagcttatggagggtgtcgctgatgattttaagtctaaaaccctcaggcgggttgttactctacagacaaaaagtcctgaagggcgctttcctgatctgagcgcagagctgaaccgatgggatacagcttttgaccatgagaaggctcggaagacaggactcatcactcccaaggcgggctttgatcctgattatgaccaagcacttgctgacatcaaagagaatgaacagagcctcctagaatacttggataaacagcgcagtcgcattggctgcaggaccatagtctactggggaattggtaggaaccggtaccagttggagatcccagagaattttgctacccgtaacctcccggaagaatatgaattaaaatctactaaaaagggctgtaaacgatactggaccaaaacaattgagaagaaattatctaatcttataaatgctgaagaacgtagggacatgtctttgaaagactgcatgaggcggctgttctataactttgctaaaaattacaaggactggcagtctgctatagagtgcattgcagtgttggatgtcttactgtgcctggctaactatagtcaaggaggagatggtcctatgtgtcggccagtaattctgttaccaggagaagatacacaccccttcctagagcttaaaggctcacgacatccctgcgttacaaagactttttttggagatgattttattcctaatgacattctaataggctgtgaggaagagggagaagaaaatggcaaagcttattgtgtgcttgttactggaccaaatatggggggcaaatctacactcataagacaggctggtctgttggctgtaatggcccagctgggttgttatgtacctgctgaagaatgtcggctcacgccggtagatagggtgtttaccagacttggtgcctcagataggataatgtcaggtgaaagtacattttttgttgagttgagcgaaactgctagcatacttaggcacgcaacagcacattctttggtgcttgtggatgaattaggaagaggaactgcaactttcgatgggacagcgatagccagtgcagttgtcaaagaacttgctgaaaccataaagtgtcgaacattgttttctacacactatcattcattagtagaagactattctaaaaatgtttctgtgcgcctaggacatatggcttgcatggtagagaatgagtgcgaggaccccagccaggagactatcaccttcctctacaagttcattcagggagcttgtcccaagagctacggcttcaatgcagcaaggctggctaatcttccagaggaggtcattcgaaagggacacagaaaagcaagggagtttgagaagatgaatcagtcattacgattatttcgggaagtttgtctggctagtgacaggccgactgtagatgctgaagctgtccacaggcttttggctctgattaaggacttgtagactacattggaagctaagctgacttttgacaaaggtggtaaattcagacaacattatgatctaataaactttatttttaaaaaatgaaaaaaaaaaaaaaaaaaaaaaaaaa

SEQ ID NO: 1117 - DNA, 2418 bp, Cricetulus griseus
cccgcagcatggccggcgtgagcttcagcggccaccgcctggagctgctggcggcgtacgaggaggtgatccgggaggaaagcgcggccgactggactctgtacacatacgaggatggctccgatgacctcaagcttgcagcatcaggagaagggggtttgcagggagctttctggccacttcgagaaccagaaagtgatgtatggcttctgcagcgtcaaggactcccaggcggccctgccaaaatatgtgctcatcaactgggttggtgaagatgtgcctgatgcccggaagtgtgcttgcgccagccatgtggctaaggtggctgaattcttccagggtgttgacgtaattgtgaatgccagcagtgtggaagacatcgatgccggtgccatcgggcagcggctctccaatggactggcacggctctccagcccagtattgcatcggctgcggcttcgggaggatgagaatgctgagccggtgggcactgcctaccagaagacagacgcagccgtggagatgaggcggattaaccgcgagcagtttgggagcaggccaagaaggaggaagagctgaggaaggaggaggagcggaagaaagccttggacgccaggctcaggtttgaacaggaacggatggagcaggaacggcaggagcaggaggaacgagagcggcgttaccgagagcgggagcagcagattgaagagcacaggaggaaacagcagactctggaagctgaggaggccaagaggaggctaaaggaacagtctatctttggtgaccagcgagatgaagaggaagagtcccagatgaagaagtcagaatccgaggtggaggaggcagcagccattattgcccagcggcctgacaacccgcgggagttcttccgacagcaggaacgagttgcatcggcttctgctggcagttgtgacgtgccctcacctttcaaccaccgaccaggcagccacctggacagccaccggaggatggcacctactaccattcccacccggagtccctctgactccagcacagcctccactcctgtcactgaacagattgagagggccctggatgaggttacatcctcgcagcctccacccccacctccaccaccccctccagctcaagaggccccggagtcaaccaccaggctggatggtgaagagaccagcaaggaggccaaggcagcagcaagccctggggcctgggctggctgctcagaggagccccctcaggcacaggaacctcccctggtgccaagcagccccatggaggacttcgtgtgcacagaatccccagagcaggctgtcctgggtgcccctgccgagcctgctgcctctgccgcctcagtagctgatgcccacgtggctgacaccattgagacctccactgccactactgacaccactgttgccaacaatgtcacccctgccgctgccagcctcattgatctatggcctggcaatgggaaagaggcttcagcacctcaggctgagcccagggtgcccacaccaccctcaggtgctgaggcctccctggcagaggtacctctgctggatgaagcagctcaggagccgcagccaccagtgggtgagggctgtgccaaccttcttaattttgatgagctgccagaacctccagccaccttctgtgaccctgaggaggaagaagggggggcgctgggtgcctcccaggtcctaactatgccctcagctctagaggaggtagaccaggtcctggagcaggagctggagccagagcctcacctgctgaccaatggagagaccactcaaaaggaggggacccaggccagtgaaggatacttcagtcaatcacaggaggaagagttcgcccaatcagaagagccgtgtgcaaaggctccacctcctgtattctacaacaagcctccagagatcgacatcacctgctgggacgcagacccagtaccggaagaggaagagggcttcgagggtggtgattaatagtggcaactgtcccccggctgccttcgccaaggctgcccacctgcggtagcctctggccagacggcttgcagcgcctgcattagcggcggccccgcctggcacccactctggactccggccctggccggggatctgtctgcttccctacccacagggcctgacttttacagcttttctcttttttttaaagttgatagacttgtacagttgactggtttcctcccgttggtagttgagatgatgttgcagattccacccccttgctgcccagaccagattgtagcttagtctctccgctcggccgaccagggtggaggccacaccctgcttgggacctggtgggagttgggggttccggtgggaaaatgttccccatcacttttcctagttttatgtttcttggaaaaatatcactttgtattctcta

SEQ ID NO: 1118 - DNA, 2418 bp, Cricetulus griseus
gtggtgtgtttctacagaaggcgggatatttccagcagtctcatcgccctggctgacaagtcggcagttggagtcgctgcctgccacccacatcaggggcaagtgcagtgtcacactgctcaatgagaccgagtcgctcaagtcctacctggagcgtgaggatttcttcttctattctctagtctacgacccacagcagaagaccctcctggctgataaaggggaaatccgagtaggaaaccggtaccaggctgacatcactgacttgctgaaagaaggtgaggaggatggccgtgatcagtcgaaattggagaccaaggtgtgggaagcgcataacccacttgtggataagcagatcgaccagttccttgtagtggcccgctccgtgggcacctttgcacgggccctggattgcagcagctccgtgcggcagcctagcctgcacatgagtgccgcggcagcctcccgagacatcaccctgttccatgccatggacacgctgcacaagaacatctatgacatctccaaggccatttcagccctcgtgccgcagggtgggccggtgctctgcagggatgaaatggaagagtggtctgcatcggaagccaacctttttgaggaagctctggaaaaatatgggaaggatttcacagacattcagcaagattttctcccctggaaatcgctcaccagcatcattgaatattactacatgtggaagacgaccgacagatacgtccagcagaaacgtttgaaagcagctgaagcggagagcaagttaaagcaggtttatattcccaactataacaagccaaatccaaaccagatcagcgccaacagtgtcaaggccagtgtagtgaatggcacagggacaccaggccagagccccggggctggccgggcctgcgagagctgttacaccacacagtcttaccagtggtattcttggggtccccctaacatgcagtgtcgcctctgcgcttcttgctggacatattggaagaaatacggtggcttgaaaatgccaacccggctagatggagagaggccgggaccaaatcgcaataacatgagtccccacggcatcccagcccggagcagtgggagccccaagtttgccatgaagacaaggcaggccttctacctgcacactaccaagctgacacgcattgcccggcgcttgtgccgtgagatcctacgcccatggcatgccgcgcgacacccctacatgcccatcaacagtgcagcaatcaaggctgagtgcactgcacggctgccggaagcgtcccagagcccactggtgctgaagcaggtagtgcggaagcccctggaggctgtactccggtatcttgagacccatccccgcccccctaagcctgaccctgtgaagagttcatccagtgtgctcagcagtctgacccctgccaagtcagcccccgtcatcaacaatggctcccccaccatcctgggcaagcggagctatgagcagcacaacggggtggatggcaacatgaagaaacgcctcttgatgcccagtaggggtctggcaaaccatggacagaccaggcacatgggaccaagtcggaatctcctgctcaacgggaagtcctaccccaccaaagtgcgcctaatccgcggtggctccctgcctcctgtcaagcggcggcgaatgaactggattgacgccccagatgacgtattttacatggccactgaggagaccaggaaaatccgcaagctgctctcatcctcagaaaccaagcgtgctgcccgccggccctacaagcccattgccctgcgccagagccaggccttgccgctgcggccacccccacctgcaccagtcaacgatgagcccattgttattgaggactaggtggccacccgcagtgtggcctgcctgggcccctgcatcagccccagagtatccagtgaggcctgcagaggccaagtggcctccctcccccaccagactgctgcccacccaccccctctgtttccgtagtgccccaactccaactcccgccctcacatgcagagaaactgctcctctggtggacatgcgggggaagaagtgtggtctaacttattccaagacaccgaggagtcttttttagctttgtgtttactttctggctggagcagagatgaggaatgccctgggccctgtgctacaggacttctcacccggggtgggctctaaggttttgttgtgttctgttgaaggtgccattttaaattttatttttattacttttttgtagatgaacttgagctctgtaacttacacctggaatgttaggattggtgcggccagcagcagcaaagttgcctggcggggttggtcccttgtcttttcaagtaattttcatattaaacaaaaacaaagaaaaaaaactcataaaaaggaaaacccca

SEQ ID NO: 1119 - DNA, 2417 bp, Cricetulus griseus
atcttgtggctgtgccgtgcgcgtgagccccgtagggccggggaggcaccagctgccgcgcggggaggaggccgaggccgaggccgcagctcgagggaggccccggcccctctgcgcctgtgtctggcagagccgctgggagagaagagacgatccatcctcgccgctgggataatcaagagttttcggccgggcctttgagtacacatcgggatagtgaggagcccggcgaaaagcacagactatggcgctgaaacggattaataaggaacttagtgatttggcccgtgaccctccagcacaatgttctgcaggtccagttggagatgacatgtttcattggcaagccacaattatgggacctaatgacagcccatatcaaggtggtgtattctttttgacaattcattttcctacagactaccccttcaaaccacctaaggttgcatttacaacaagaatttatcatccaaatattaacagtaatggcagcatttgtcttgatattctaagatcacagtggtctcctgctttaactatttctaaagttcttttatccatttgttcactgctatgtgatccaaacccagatgaccccctagtgccagagattgcacggatctataaaacagacagagataagtacaacagaatatctcgggaatggactcagaagtatgccatgtgatgctaccttaaagtcagaataacctgcattatagctggaataaactttaaattactgttccttttttgattttcttatccggctgctcccctatcagacctcatcttttttaattttatttttgtttacctccctccattcattcacatgctcatctgagaagacttaagttcttccagctttggacaataactgcttttagaaactgtaaagtagttaacaagagaacagttgcccaagattcagaaatttttttaaaactggagcatgtgtattatgtggccaatgtcttcactctaacttggttatgagactaaaccaatcctcactgctctaacatgctgaagaaaccatctgagggggagggagatggatgctcagctgtcacatcaaaggaagcagcattattctagtgcatccattcttgtttaagccttccactgttagagatttgaggttacatgatatactttatgctcataactgatgtggctggagaattggtattgaattatagcatcagcagaacagaaaatgtgatgtattttatgcatgtcaataaaggaatgacctgttcttgttctacagagaatggaaattggaagtcaaacaccctttgtattccaaaatagggtctcaaaacattttgtaattttcatttaaattgttaggaggcttggagctattagttaatctatcttccaatactgtttaatatagcactgaataaatgatgcgagttgtcaatggatgagtgatcaactaatagctctcctagtaattgatttatttttcttcaataaagttgcataaaccaatgagttagctgcctggattaatcagtatgggaaacaatcctttgtaaatgcaaagctgtttttgtatatactgttgggatttgcttcattgtttgacatcaaatgatgatgtaaagttcaaaagagtgaatatattgccatgttcagttaaagtgcacagtctgttacaggttgacacattgcttgacctgatttatgcagaattataagctattcaaatagtgtagctttaatgtgctgcacatgattctggcagccctagagttcataaatggacttgggactcagcaggtttgaaacatgtatatggagtttaagaaatttattttccaggtgcatccccttctaactaaaatttcatctgtacacttaacagctgaaatatatatatatatatataaaacttgggagtaataatgggtcaaaatttacaaaataaagtactgttttggtgtgggagttgtcgtgaggctgtgttgaagtgacttaactgtgggatatgactatccattgagatggatttgttcagccatttacattaatgagcatttaaatgcaacagataccatttcaggtgactcaacatgaatgaataaaagtcaatgctattggattgtttgtttgtacaagtgctatctgtgccactaaatctgtagtaataagggcattaccattcttcaccctaattctgaacctgtagtttcacttttttctagctttgatttattcattgctttatttcttaagtcttgtatttgatttctagcacatgtgatatgtctccacttccacatttgcactgcttatatttacatgcaaatttattccttgtctgcacacagatgtggaaagttagaaataaatgtaaaagcttaattttttataaacatttaaatatgtaatttggacat

SEQ ID NO: 1120 - DNA, 2417 bp, Cricetulus griseus
tctctccctctcccaacatggcggcctcagcaaaaaagaagaataagaaggggaagaccatctccctaacagactttctagctgaggatgggggtactggtggaggaagcacctatgtccccaaaccagtcagctgggctgatgaaacagacgatctggaaggagatgtgtcaacaacttggcatagtaatgacgatgatgtgtatagagcacctccaattgaccgttccatccttcccactgctccacgggctgctcgggaacccaatattgaccggagccgtcttcccaaatcaccaccctacactgctttcctgggaaacctgccttatgatgtgacagaagactccattaaggaattctttagaggattaaatatcagcgctgtacgcttaccacgtgaacccagcaatcctgacaggttgaaaggctttggctatgcagaatttgaagacctggattctctgctcagtgctctgagtctcaatgaagagtctctaggtaataggcgaattcgagtggacgttgctgatcaagcacaagataaagaccgggatgatcgttcttttggtcgggatagaaatcgggattctgacaaaacagacacagactggagggcccgtcctgccacagacagctttgatgactacccacctagaagaggtgatgatagctttggagacaagtatcgagatcgttatgattcagaccggtatcgggatggatatcgggatggatatcgggatggcccacgaagagatatggatcgctatgggggccgggatcgctatgatgaccgaggcagcagagactatgaccgaggctatgactccaggataggcagtggcagaagagcatttggtagtgggtaccgaagggatgatgactacagaggaggtggggaccgctatgaagaccgatatgacagaagggacgatcggtcctggagttccagggatgattactctcgggatgattataggcgtgatgacagaggtcccccccaaagacccaaactgaatctaaagcctcggagtactcctaaggaagatgattcctctgctagcacctcccagtccagtcgagcggcttctatctttggaggggcaaagcctgttgacacagctgctagagaaagagaagtagaagagcggctacagaaggagcaagagaaattgcaaaggcagctggatgagccaaaactagaccgccggccacgtgagagacacccaagttggcgaagtgaagaaactcaggaaagagaacggtcgaggacaggaagtgagtcatctcagactgggacctcagccacatctggcagaaatacacgaaggagagagagtgagaagtctctagaaaatgaaaccctcaataaagaagaagactgtcactctccaacctccaaaccttctaaacctgatcagcctctaaaggtaatgccagcccctccgccaaaggagaatgcgtgggtgaagcgaagctctaaccctcctgctcgatctcagagctcagacacagagcagcagtcccctacaagtggtggagggaaagtagctccagctcagccctctgaggacggaccatcaagaaaagatgaaaataaaatagatggggtaaatgtcccaaaaggccaaactgggttcccaagtcgtggccctggagatggagcaaacaaagaccactggaagggttggacaggaaagatggcaaaaaagatcaagactccagatctgcacctgagccaaagaaatctgaggagaacccagcctctaagttcagttctgcaagcaagtatgctgctctctctgtggatggtgaagacgagaatgagggagatgaccacgctgagtagacctccacatgctgtgctttcttctagtctccaccccggaagattcaagagcaaatcaaacctctatccagacaagaaaaaataaagctcaccatctcctgaacctagacctgctctgcaggagcgttggtttcatgggctgcagcagtgggcatagcaagtcgctcatccagtggacttgattggctagtagctaggaagcgggcctttagagagacccaccattgaatggggttttttttaaaccttggttgtagacaatgaaaaggtagatagccctcttcatgtctatttcccttccagatagttgcatccagaagaaagctgttctgtcccatgctctcctactttgctcctctgttaaaataaaaacaggggttgacttatgtcccgctcctgaatacatgtaaaatttgtacaaaactatcttctatgaaaatgatttgtaatctgtagacattacttgggagatgtcttgagatgtaaaatcccatcctttgggttgtagggtttttttgttttcctccaaataaacccagtctttaaagttaagaaaaaaaaaaaa

SEQ ID NO: 1121 - DNA, 2417 bp, Cricetulus griseus
ctgagcagtcccggaagcgaagcagcgatggcggagagtccgactgaggaggcggcgacggcgacggcgggcgccggagcggcaggcccaggggcgagcggtgttgccggtgtggtcggcgttagcgggagcggcggcgggttcgggccgcctttcctgcccggatgtgtgggcggcggcggcggcggcgggcggggccggggggccggggacaacgagccaggctttgaacaggaaagacatccaggagacagcaaaaactataatgaatgtatccggcacgagaccatcagagttgcagtgtgtgacatgatggagggaaagtgcccctgccctgaaccccctgcggggagtgatggagaagtccttcctggaatattatgacttttatgaggtggcctgcaaagatcgcctacatcttcaaggccagactatgcaggacccttttggagagaagcggggccactttgactaccagtccctcttgatgcgtctgggactgattcggcagaaagtgctggagaggctccataatgagaatgctgaaatggactctgatagcagctcatctgggacagaaacagacctgcatgggagcctgagggtctagaccctgctcccttgccccttccccaactctgttgagagtcccagcagacgccccctcccctcaaccccagggacggagaggcactgtgcatctcccttcaaaagtgtccgcaagatgacaagaagcaagcaaactcaatcccagggtgtgggagtggggctgtttccaatctgacctccttggtgctggagcacctggggctatagtcaatcctggatcagggccagggtacttttgtgagagtacctggagtgctggcctctggcaaagctaaacaaccaacacacctctctgcagggccagctaattagggataggagaagacagaaaatgagaatccaagagggagcatgcccaagtggtttatagggataactgggagtttgggtgggggtgctgtctgtgacacttaagcagtctggttggttatctgtttgtcttcagtcttgaagcagggcttcccaacacccttttcttcccttcccctattatttcccatgggccagcataactttgtttttcctaatttatatagtcactgttctaggcagaccaaagagaaggaacagtggtggagtctgggctgctgtcagtaagctttacctagcacctgagcacctttctcccttgctccatttcctcagcattctaggttacaggtagaaagtaagtcccactgggactgagcccaggtctctgtgaagcctgcacaggcatcagaggaaagctgcttactgtgttcccacaatcactgatttgaaaggttcccagcacaggcagctgcagcgtgtatgggacttgagccactacataaaatagtctcttacagattttcctgaatactagtcaatgagggtgtttttcttggggtagagcacggggagactgatggtagtccctattttgtttagctgttgtctgtagttctgtcctccttcagccccacctacatcccctggggctttgtgaacatggagagcctttggcgagaggggattgtggctgggactctggaaactcctccttttacctttcccctttttgtctcagtggctctgttttttgaatttaactacagtgatccttcagctggttgaatcagaaaaatatgttttcagtggctcgaggtcagaggaatccatcccagtttgatacagttcacacttttcaggtttgctgttctgactcctagtaggtgggtggtgatccgtgtgatgcaggccttctggtcagtgtccagccctgaggaatggagagaactacctgccctgcccgctgctataaaggtctctgccttgtggatcatgggactccttggagagacggggagaagatagggcacagagagggacctcttgggagggcagaaagcagagaactggacaaagacagctcacttggggaacagaagttcgtttaggctacctggaggctgggtcagatgtggagacttggaaaaggaccctgcttccaattcccctcttccattcccagatctagtccagggccgagaagaatgcctttggtctgtgggtccagtgttgtctgtcatccatttaagtgttcccactttcaagtgacaatcttctccttggccctgccatggggcagagtgtgtctggcatagcagcctgacttttatgccctaatcttaagttgaggaaatatatgcacaggagtcaaagagatgtctttatatctgactgtacataaatgaagttttctttttttccttttttttggtgcaataaagttttgttttggcagaaggaggaagcgcctgtgggtatgggagggtttgtataaa

SEQ ID NO: 1122 - DNA, 2417 bp, Cricetulus griseus
ggttgtggcagcactgccggaagatatgacagcaagctttgattctagtggggcatcattccaattggtgatatgtgtgcttactcttggactgcttgctgtttttttacttctttggagaggcttccgatcaattcaaagccgattttatgtggtaagagagaaaagacttgctcttgaactttctgtgctaatggaagagaaatgtaaactacttgaaaaagtgagccttgctcaaaaggagtatgaaggcttagagtcatctttaaaggaggccaactttgacaaggcgccaacagaagcacagagtttggagacctatgaaaatctagaaagagataaatctaaacttgaagatgaaatactacttttagagaagaaactagaagaagagagagctaagcataatgaacagaatgaattgatgacagacatttcaaaaagtatacaatctctagaagatgaatcaaagtctgtcaagacacaagtagctgaagccaaaactaccctgagaatatttgaaataaatgaagaacgacttcagggaataataaaagataccttgaatgaaaattctcaacttcaggaaagccagaaggagcttttacaggaagctgaagttatgaaagaacaagctgaccaactgaataatcagaaagtaacatttgaagaatccaaagtacaggcagagcaagtcctaaatgataaagaaaatcagatcaagtctctgatggagagcctgctaaagatgaaagattggacttctgtgtttggagaagatgtaacagatgatggtaatcttgatttagaagtcaagagtgacttagaaaatgatgtgcacttaggtaaccagccgaagggagctttgaagaagctaatttatgctactaagttaagtgcttctttaaaagccttagaaggagaaagaaaccaaaattacactcagttatctgaagtagataaagcaaacgatgatcttacagagtgtatcagaagtctggagtctgaacaagtgtctctgcagtcagctaactcagaacttgaaaaggagaaacagaagcttcagcagaaactcacagtgatgacggaactgtaccaagacaacgaaatgaagcttcacaggaaattaacagtagaagaaaattgccgattagagaaagaggaaaaactttccaaagtggacgagaggatcagccatgcgaccaaggagctggagacctacagacagcgtgccaaggatgtcgaagaagagttggagagaacaattcgttcttatcaagggcaggttattgctcatgaaaaaaaggcacatgataattggctggcagctcggactttggaaagaaacatcaatgatttaaggaaagaaaatgctctcaatagacaaaaattaactgaagcagaatttaaatttgaacttttagaaaaagatccctatgcacctgatattccaaatacagcatttggcagagagcactccccatatggtccctccccactgggccgaccttcatctgaaacgagagcttttctctctcctccaactttgttggagggtccactcagactctcacctttgcttccagggggaggaggaagaggttcacgaggccctcagaatcctctggaccatcagatgaacactgaaagaggagagacaagctataacagattatctgatgctcccagagcaccttctgacaggtccctgtcacctccatgggaacaagaccgaaggatgatggcccctcctttgcaggggatccaagaagacccattatgagagggcctcccccattcccaccacctcctccaggaaacatctatgcaggtcctccagactattttccaccaagggactttgctggcccacccttcccgccattcccagggagaaatgtgtacgaaccgaggggctttccaccttaccttcccccaagagctgggttcttccccccacccccacatcctgaaagtagaaatgagctgcccccagacttgattcctccttccaaacaacctgcacctgaacctccagaaacacaggagacctgacaggtttcctcggagtcagtcatttcttctccttttctttttaagtaactgctgttacttatgtgattacattgttgctcaaattgaagcttaatggaattataattctcaggatagtattttgtaaataaaggatttaaatatgaattttatgagtaaattatttccattttatttcattctggatagtatattttactttgattacctcatccataattatggtagttttatacatgtaatcttagagttggggatatcttaaaccaaaaggctgtgtgtttctaccaggaatatgttcaccatggtgtagacaaatgtaaaggtaactgtttaatcaaataaattttaattcaattaaa

SEQ ID NO: 1123 - DNA, 2416 bp, Cricetulus griseus
ttttagagctggagtcggagtttcaggtgccatgggcccggtgaagaaaaccctgaggggacgcgaggctgggcatggccggcgctcgggccgccgcctccgccgaggcggggtccaccgcctcttcgggcaacccgccgcctcaggagccggggcttggggagctgctggaggagttctcccggactcagtaccgggccagggacggcggcggggcgagcggctctaaggttgaacgcattgagaagagatgtctggagctatttggccgagactactgtttcagcgtgattccaaatgtgaatggtgatatctgcggccactacccccgccacatcgtatacctggagtatgagagttctgagaaagagaaagacacgttccagagcaccgtgcaggtgagcaagctgcaagacctcatccatcgcagcaagatggccaggtgcagaggacggtttgtctgccctagttgtatcctgttcaaaaggcaagcacatttgcaggtcagccacactggctggatggggagagctgtatggacgctctggatacaactattttttctcagggggaacagatgatacctgggcagatgtggatgatgtcacggaggaggactgtgctcttcgaagtggtgacacacacctttttgataaagtgagaggccatgatatcaggctgcttcgatacctgtcagtcaagtacatctgtgacctgatggtggagaacaagaaggtgaagtttggcatgaatgtaacctcctctgagaaagtggacaaagcccagcgctatgcagatttcactcttctctctatcccatatccaggctgtgaattcttcaaggaatataaggatcgtgattacatggctgaagggctcatatttaactggaagcaggactacgttgatgcccctttgaacatccctggcttcctgactcagtctctgaacattgactggagccaatatcagagttgggacctggtgcaacaaacacaaaactacctgaaactgctgctttccattgttaacaatgatgatgacagcgggctgctggtacactgtatctcaggctgggatcggacccctctcttcatctctcttctacgcctttccttatgggcagatgggctaatccacacatccctgaagcctgctgagatcctttacctgactgtggcctatgactggttcctctttgggcacatgttggtagatcggctcagcaaaggagaggagattttcttcttttgcttcaattttttgaagcatatcacctctgaagagttctgtctgaagacccagaggaggaagagtttgccaactcgggatgcaggcttcactctggaagacatctacacgttgagacgcagagaccgaggcagcaccaccagcctaggcagcgacttctccctggtcttggagaactcaccaggagctgtggggagcctcacctgtgagactgtggaacttgtcccggcaggagcaccaactcaggcagcttggaggaagagtcactcatcctcaccacagagtatgctctggagccgaccacagccctctgaggaccgcctaccttcccaccatgggctggctgaagccaagtcttccagctcttcatcctcaaaccattctgacaacgttttcaggatgggcagcagtcctcttgaggtccccaaacccagatcagtggaccatcccctgcccggatcctctctctccacagactttggcagctggcagatggtaacaggctgtggcagtattcaggaacgggctgtcctgcacacagactcctctctccctttcagcttcccggatgagctccctaacagttgtctactttcagccctgagtgaccgggagacaaggctacaggaggtgcgctctgccttcttggctgcatacagcagcacagtggggcttcgagcagtaacccccagtccctctggtgccattgggggcctgctagaacagtttgcccgtggtgttgggctccggggaacaagcaccagcgccttgtgaagttgacagcacacagccatttcctgctcctgtttcagttgagccctcagtggaatcaagccatgcctggcaaaggggcacttggagagcagggggatatctcacaccctccatctctatcatgcacatagcagccccacacctgagcaggcctgaggatgggattttctagctcccagcctcctggatggtgacctctctcgacactgcctcccaccaaccctggtctttggattcctatcaactttcagaattcctagggcctcacggaggtcatgatgttatagaagaccccattctgcaatttttgtttcctggaaggagagtcacccgcactgaaaatgaggcagtttcacaccaatcacaaaataaaatcaaggtactttttgaa

SEQ ID NO: 1124 - DNA, 2416 bp, Cricetulus griseus
ggtcggtaccgagcggcgcaggttctgttgctgacaatggggggctctcacaaaagactccagtgccaccatggccgaggcagtggccgaagaagtgtctacttttcagcacgacggacttggttctgttttctctcattgtgggggtcctgacctactggttcatctttaagaaagaagaaagaagaaataccagagttcagcaagatcccaacaacgaccccgtctgtcaaagagagcagtttcgtggaaaagatgaagaaaacgggaaggaacattattgtattctatggctcccagacgggaactgctgaggagtttgccaaccggctgtccaaggatgcccaccgctatgggatgcggggcatgtctgcagaccccgaagagtatgacttggctgacctgagcagcttgcctgagatcgacaagtctctagtagtcttctgcatggccacgtatggcgagggagaccccaccgacaatgcccaagacttctatgactggctgcaggagactgatgtggacctcactggagtcaagtttgctgtgtttggccttgggaacaagacctatgaacatttcaatgccatggggaagtatgtggaccagcggctggagcagcttggcgcccagcgcatctttgaattgggccttggagatgatgatgggaacttagaagaggatttcatcacatggagggagcagttctggccagccgtgtgcgagttcttcggggtggaagccactggggaggagtcgagcattcgccagtatgagctcgtggtccacgaagacattgacactgccaaggtttacactggcgagatgggccgcctgaagagctacgagaaccagaaaccccccttcgatgccaagaatccattcctggctgctgtcaccactaaccggaagctgaaccagggcactgagcggcatctgatgcacttggaattggacatctcagattcaaagatcaggtatgaatctggggatcatgtggctgtgtacccagccaatgacgccaccctggtcaaccagattggggagatcctcggggctgacctggatgttgtcatgtctctaaacaacctcgatgaggagtccaacaagaagcatccgttcccctgccccaccacctaccgtacggccctcacctactacctggacatcaccaacccaccacgcaccaatgtgctctacgagctggcacagtatgcctcggatccctcggagcaggagcagctgcacaagatggcctcctcctcaggcgagggcaaggagctgtacctgagctgggtggtggaggcccggaggcacatcttagccattctccaagactacccatcactgcggcctcccatcgaccacctgtgtgagctcctaccacgactgcaggcccgctactactccattgcctcatcctctaaggtccaccccaactccgtgcacatctgcgctgtggctgtggagtatgaagcaaagtctgggcgactgaacaagggggtagctaccagctggcttcgggccaaggagccagcaggagagaatggccgccgggccctggtacccatgttcgtacgcaaatctcagttccgccttcctttcaagtccaccacacctgtcatcatggtgggccctggcacagggattgcccccttcatgggtttcatccaggagcgagcctggcttcgggaacaaggcaaggaggttggagagacactgctctactatggctgccggcgctcagatgaagactatctgtaccgcgaagagctggcccgcttccataaggagggtgccctcacccagctccatgtggccttttcccgggagcaggcccacaaggtctatgtccaacacttgctgaagagagacaaagaacacctctggaagctgatccacgaaggcggtgcccacatctatgtctgcggggatgctcgaaatatggccaaagatgtgcagaacaccttctatgacattgtggccgagtttgggcccatggagcacacccaggctgtggactatgttaagaagctgatgaccaagggccgctactccctggatgtgtggagctaggagctgccacccgctcaccttgctccctgtaatcacttccttaactcccttctgccgacctccacctctggaggttcctgcttggcctcgacacagggaggccaagggaccgactcctggcctgactgatgccctcctgggcccctaggctgagcctggtccactataccaggcagcccagccccagggcacatggcgggtgatgggtgccttaggccctcggcagatgtacagaggggctcttctctccactgagctgggctgtagccccaccacatgattttgaatgagtgtaaataactttaaataacctggcccttggaataaagttgttttctgt

SEQ ID NO: 1125 - DNA, 2414 bp, Cricetulus griseus
cccgattgatcttgctggtcttcttcagtatgtagccaatcaattaaaggcaggcaaaagttttgatctactaatattgaaagaagtggtacaaaaatggcaggaatcgaaattacggaggaaatgacaacggagcaattagaggccatgactggtggggagcagctaaaggctgagggtggttattttggccagatcagaaacactaaaaaaatacttctccagagattaaaggatgcactgctggaccatgatcttgctcttcctctttgtctgcttatggctcagcagaggaatggggtaatttttcaggagggtggagagaaacacttgaaacttgtgggaaagctctatgaccagtgtcatgataccctagtacagtttggtggatttttagcatccaatctaagtacagaagattatataaagcgagtgccttcaattgacgtgctctgtaatgaattccatacacctcatgatgcagcatttttcctgtctaggccaatgtatgcacaccatatttcgtcaaaatatgatgaacttaaaaaatcggaaaagggaagtaaacagcaacataaagtccataaatacattacgtcatgtgagatggtgatggctcctgtccacgaagcagtggtctccttacacgtttccaaagtctgggatgatatcagccctcagttctatgctaccttttggtcactgacaatgtatgacattgatagacaatacaggaaaagtagacccccaaataaaaagaaaaaagaagaaggagcgttgcacagcccttcaggacaagcttctagaagaagaaaagaaacagatggaacatgttcagagagttcttcagagactgaaattggaaaaagacaactggcttttagcaaagtcaaccaaaaaatgagaccatcacaaaatttctacagctgtgtatatttcctcgatgcattttttcagcaatagatgctgtttactgtgctcgttttgttgaattggtacatcaacagaaaactccaaatttttccacacttcttttgctatgaccgagttttttctgacataatttacacggtcgcaagctgtactgaaaatgaagctagtcgatacggaggttcctctgctgcatgttagagacagtgaccaggtggcacagtgacagagccacatatgaaaaggaatgtggaaactatccaggattccttaccatattgcgggcaactggatttgatggtggaaataaagctgatcaattagattatgaaaattttcgacatgttgtacataagtggcattacaaactaaccaaggcatcggtgcattgccttgagacaggcgaatatactcatatcaggaatatattgattgtgctaacaaaaatacttccttggtacccaaaagttttgaatctgggtcaggctttggaaagaagagtgaataaaatatgccaagaagaaaaagagaagaggccagatctatatgcattggctatgggctactgggggatgttgaaatatagaaagtcacacatgatacctgaaaatgaatttcatcacaaagatcctcctccaagaaatgctgttgccagtgtacaaaatgggcctggtggtgggacttcatcatcatccctaggaagtgcatctaaatcggatgagagtggtactgaggagactgataaaccaagggagagatctcagtgtggtacaaaaagctgtgaataaaggcttctagtaccacaccaaaagggaattacaagcaaccaagggtgtggacagacccctaagctgaacgtctcccagaggaggatgccaaagctccatgagtcactctcagaataatatctcccataattaagagcttctggtgctgtccattttatgggaatctgctttaagtcagaagatgcaaacacaccaccatccttttgacaagacattccaaagtcactgattttcagaacattattttcacctgcaggcaatttcttggagcaaggtccctgtgcataccaattttacttgagatatgccatccagaagcaacgtctaatgaaaaattcactagctgacttttagttcacccttctttctcagaaaggagaggaaattgcctcctggaaccaattccttaaagatgtagataggttgcctttgtgtgtgaactctttaagtgtgaaaacattgggatgattatgttgtttggagggttttggcttcttgtaaaattttaattttaattccagttgctgggaaagatctttatatgcttcaacaacatttttatcctttaatgtacccttaagtatgtcatcaaaagttccttgtccttaaggaattctcataatgtgacatcatcatgattgagaccccatttcttactctgattatggtcatgtggataccatgatgtttcttttt

SEQ ID NO: 1126 - DNA, 2412 bp, Cricetulus griseus
cgcctgcatcagttcttccgcgacatggatgatgaggagtcctggatcaaggaaaagaagttgctagtgagctctgaggactatggccgagacctgacaggtgttcagaacctgaggaagaaacacaagcggctagaagccgagctggctgcccatgaaccagccattcagggtgttctggacactggaaagaagctgtctgatgacaacaccatcgggcaagaggagatccagcagcgtcttgcacagtttgtggagcattggaaggagctgaagcagcaagcagctgcacggggccagcggctagaggaatccttggagtatcagcagttcgtagccaatgtggaagaggaagaggcatggatcaatgagaaaatgactctggtggctagtgaagattacggagacactcttgctgccatccagggcttgctgaagaaacacgaagcttttgagacagacttcactgttcacaaggatcgggtgaatgatgtctgtactaatggacaagacctcattaagaagaacaatcaccacgaggaaaacatctcttcaaagatgaagggtctgaacgggaaagtgtctgatctggagaaagcagcagctcagagaaaagcaaagctagatgagaactcagccttcctgcaattcaactggaaggctgatgtggtagagtcctggattggtgaaaaggagaacagcttgaaaacagatgactatggtcgagatctgtcttctgtccaaactctgctcaccaagcaggagacctttgatgctggcctgcaggccttccagcaggagggcattgccaatatcactgcactcaaggatcagctgctagctgccaagcacattcagtctaaggccatcgaggctcgacatgcttccctcatgaagagatggacccagctgttggccaactcagctaccaggaaaagaagttgctggaggcccagggtcatttccgaaaggtagaagacctcttcctgacctttgccaaaaaggcatcagccttcaacagctggtttgagaatgcagaagaggacctgacagacccagtgcgctgcaactctctggaagaaatcaaagcccttcgagaggctcatgatgccttccggtcatccctcagctctgcacaggcagacttcaaccagctagctgagctggaccgccagatcaagagtttccgggtggcctccaacccctacacctggttcaccatggaggccctggaggagacctggaggaacctgcaaaagatcattaaggagcgggagctggaactgcagaaggagcagcggcggcaggaggagaatgacaagctgcgccaggagtttgctcagcatgccaacgccttccaccagtggatccaggagaccagaacgtatctcctcgacggaggtcctgcatggtagaagagtcgggaactctggaatctcagctggaagctaccaaacgcaagcaccaggagattcgagccatgagaagtcagctgaagaaaattgaggacctgggtgctgccatggaggaagccctcatcctggacaacaaatacactgagcacagcactgtgggcctggcccagcagtgggaccagctagaccagctgggcatgcgcatgcagcacaacctggaacagcagatccaggccaggaacacaacaggagtgaccgaggaggccctcaaggaattcagcatgatgttcaagcactttgacaaggacaagtctggccggctgaaccatcaggaattcaaatcctgtcttcgttccctgggctacgacctgccaatggtagaggaaggagagcctgatcctgagtttgaggcaatcctggatactgttgatcccaacagggatggccatgtctctttgcaagaatacatggctttcatgatcagccgtgaaacagagaatgtcaagtccagtgaggagattgagagtgctttccgggccctcagctcagagggcaagccttatgtgaccaaggaggagctctaccagaacctgacccgggaacaagctgactattgtgtctcccacatgaagccctatgtggatggcaagggccgagaactgcccactgccttcgactacatcgagttcacccgctcgctctttgtgaattgatccttggctcgtaggtgagcctgacccatactgcttgccctgtcaccttgctgcatgtcacttcctctgtgctttcaaggaaaatattccagacagtgttactttccagtgtaaccataggcctgcttagcttggggtaagacttcgtagaaaatggtgcttcagtaaactgcttacattctagttcacaatcattatgttgctgtgggacccaaacccgtttgaaccagttgccctcattcccacttcaaatcaaagcagctggttcatcttccttgttctct

SEQ ID NO: 1127 - DNA, 2412 bp, Cricetulus griseus
agatttttccagcaccattctgcagaaactaaaccagcagcgccaacaaggacagttatgtgacgtctccattgttgtccaaggccacattttccgggcacacaaagctgttcttgctgccagttcaccctacttttgtgaccaagtactcctgaaaaacagtaggagaattgtgttgcctgatgtgatgaacccaagagtatttgagaacattctcctatctagctacacaggacgccttgtgatgcctgctccagaaattgttagttacttaacagcagccagcttcctccagatgtggcatgtggtggacaaatgcactgaggttctagagggaaaccccacagttctttgccagaagctaaatcatggcaatgaccaccagtctcccagtagcagtaactataatggcctggtagagagctttgagctgggttccggggggcacactgatttccccaaggcacaggagctgagggatggtgagaatgaagaggagagcaccaaagatgagctgtcatctcagctcactgagcatgagtacttgcccagtaactcatccacagagcatgaccggctgagcactgagatggcgagccaggatggggaggagggggccagtgacagcgcggagttccactacacccggcctctgtacagcaagcccagcataatggctcacaaacgctggatccatgtgaagcctgagcgcctggaacagacgtgtgagggcatggatgtgcatgcagcctacgacgagcaccaagtcactgagtccattaacaccatgcagacagaacacttggtccagccttcaggagtggaagaggacttccaaattgtggagaagaaagtagaagcagagtttgatgagcaagcagaggagagcaactatgacgagcaggtggacttctatggctcctccatggaagaattctctggagaaaggttggatgggaatctaattgggcacagacaggaggctgccctcgcagcaggctacagtgagaatattgaaatggtgacggggataaaagaagaggcgtcccacttagggttctccgccactgacaagctgtatccttgtcagtgtgggaaaagtttcacacacaagagtcagcgagatcgacacatgagcatgcacctcggtcttcgcccttatggctgtggggtctgcggtaagaaattcaaaatgaagcaccatctcgtgggccacatgaaaattcatacaggcatcaagccctatgagtgtaatatctgtgcaaagagatttatgtggagggacagtttccacaggcatgtgacttcttgtaccaagtcctatgaagctgcaaaggctgagcagactacaactgaggctaactaaaaatagggtctggcccttgagtggcatgcacaaaaataaactatggtaattaatgcaaatctgggcacagatgatgcgtgccacttgctattatgagagaagacttaaaaaaaaaaaaaagaccagctctaataggccattaaaaattaattcctcaaatttgtatgttctggtcctggcctagaatggatgatggggataagttcacccagtgcccaactggcaagatagcccttccagccagcagtgactgccgcggtggacttggtggcagactaacccaccagttcactcaggtggtagcagttgtctatcacacagtgccctgaagtcctgttgcattttattttcccctggtggatgcagaggttctggggctttgctttgttagcgcatcactggatgctactcccctcaaggctgcagcagcctgactcgtgggctgagttgtgaactgagctctttcatgtctagtttcatgttttctaaagttctagctgaaagcagggtcgcactacactgctaggttgctttgactggtgactaactatccaatgaatccaggtttgctttgggtttctttttttttttttctctctctgatatttacatatttaaaggtactagtttgtaattgcagatctctactgatagtgccctgtgggaacatgctggaacacctttgcaaatgtgattttttttttctttttaagtgttgcttgaagcctgtgtcatgtcagtggctgctgcctcctttctttttatgtggttcccaatgtttcttccagaaaataactttatttatgcaagtcaggtgactcttaggccacaggaccatgggatgataaacagattgtcattaggtgcatatcatggatactttgtgaactgcctgtgttgcagaagttagttctttctagaattgctgtcttcggtgtacagcgtgggttttaactgaatgttactgtttaatattttcttcttatagaagagaccatgcccttttgtatgacacgttttaataaatgttacctgtccaattttgt

SEQ ID NO: 1128 - DNA, 2412 bp, Cricetulus griseus
tgctacggacgctcgctgcggggcgagtttgtgcacgacgacgtgtgggcgatcgtgaacaaccccgacgtgcggcccgggaccccgctgcgctgggccgtttcgcgaacgacttctggggcaagggcctggcggacagcaccagccacaagtcctatcggccgctgtgcgtgctgtccttcaggctaaacatatttctggctggcatgaatcctttctacttccatgcggtgaatgtcattctacactgcctggtgaccctcgtgctgatgtatacctgtgataaaacagtcttcaagaatcgcggactggcttttgtcacagccctgctctttgcggtgcacccggttcacaccgaggcggtggctggcatcgtgggcagagctgatgtgttagcatgtctgctgttcctgctggccttcctttcctaccataggagtctggatcagggctgtgccgggcagtgctttccccccgacagcttctcccttcttcctgctgctcagtctgtttctggggacctgtgccatgctggtgaaggagacgggtgtcacggtgtttggagtgtgcttggtttatgacctcttctccccctcccacaagcaggacaagttgagcaatggggtgatctgtcagcacagcttacagcagccagggaacccccagtcctcctctcagcatggccaccccaccgtgagagcagaaaacagcgcttcccacacagttatgtgactgtcattttgtatttccgcctgtggataatgggaggaacaatgcccctcttctccgagcaggacaatccagcttcgttttcgccttacatccttacaaggttcctgacctattcctacctccttgccttcaatgtgtggcttctgctggcacctatcaccctgtgctacgactggcaagtgggcagtatccctctggtggagaccatatgggatgtgaggaaccttgctaccatccttctggcggtggtgatggccttactgagtctacactgcatggcagccttcaagaggctggagcacaaggaagtgttggccggcttgctgttcctcgtgttcccgttcattccagccagcaacctcttcttcagggtgggctttgtggtggccgagagagtcctgtacatgcctagcatgggctactgcattctcttcgtgcatggactgaacaagctttgtgctgggctgagccggtgtggggccacctccctgatgggtctactgtgttgttgctacttgcttttttacctggaaaaccgtgaagcagaatgaaatttggttgtccagagagtccttattcaggtctggagttcagactctgccccacaatgcgaaggttcattacaactatgccaatttcctaaaagaccaaggtcggaacaaggaagccatctaccactacagaaccgccctcaagcagttttcttagttgactctggctctccagagaaggctgtggctcactaccagcaggctatccagctcagcccgagccatcatgtggctgtggtgaatctgggccgactctacagatccttgggagagaacagcatggcagaagagtggtacaaacgtgccctgcaggtggcccgcacagctgaggtcctgtcacctttgggagcactctattacaacactggccgacacaaggaggccttggaagtgtaccgggaagctgtctccctccagccttcccagaggggatctccgcctggcactggctcaggttttagcagtgatgggtcagaccaaagaagctgaaaagatgaccagtcgcatagtgtctgaggaaccccgatgcctggaatgctaccgccttctgtcagcaatctacagcaagcaggagcaccacgagaaggcactcgaggccatcgacaaggctcttcagctgaagcccagggacccaaaagtcgtatctgaactcttcttcacaaaaggaaaccagctgagagagcagaaccttctggacaaagcttttgagagctacgaagctgctgtgaccctggatcccgaccaggcacaagcatggatgaacatgggtggtatccgacacatccagggaagctatgtgtctgcaaggggctattatgagagagccctgaggctggttccagacagcaagctgctgaaggagaatctagccaagctggatcgcctggagagaaggttacaagaagtcagagaaagggatcaaacatagacccaaggacaaagtcagtgggactcagcaggctggatgagaacagaagagaatgctctgaaaactcttgggtaaaatctaaattcataattttttaaaatatatttatatttaaaaatgaggaaggcaaagctgaaatcataatttgacattattttagtgttatttattgtataacttataaaatatttaaataatata

SEQ ID NO: 1129 - DNA, 2412 bp, Cricetulus griseus
  modified_base (21)..(21): a, c, t, g, unknown or other
  modified_base (516)..(516): a, c, t, g, unknown or other
  modified_base (2404)..(2404): a, c, t, g, unknown or other
ccgtatcaagaccatcagacncttctggggaggatcaagagaacagtgaccagagtgttgccagaagtggagtctggatgctgggagaagccttctgagcaggcagcatctgtgatggcatctgtgacatcacttctctcatcttcagcaacagccgctgtcctttcctctccccccacgggcacctctgcagacagccatggttaccagtgcagtgtcccctgcagagctgactcccaaacaggtcaccatcaagcccgtggcaactgctttccttcctgtgtctgctgtcaagacagcagggtctcaagtcatcaatctgaagcttgctaacaacacgacagtgaaagccacagtcatatctgctgcctctgttcagagtgccagcagtgccattatcaaagctgccaatgccatccagcagcaaaccgtgcactatgacaggcgtagtgtgcgcatcgaagtaacgtgcaaccattgtacaaagaacctgttttttactaacaaatgcagccncctttcccatgcccagggcgataaggagaaaggagtggtgatgcagtgctcccaccttaattctaaagccagtcccagcagaccagatgatagtttctccgtctagcaatactacttcttcttctctgcagagctctgtgggagctggtacacacactgtaacaaaaatccagtctggcataaacggggcggttagtttcagcgcctccaagcacacccatcagcccagctatgcccctagacgaagatccctccaagctgtgtagacacagtctcaaatgtttggagtgtaatgaagtcttccaggatgagacgtctctggctacacatttccagcatgctgcagatacaagtggacaacaaatgaagaagcacccttgccgtcagacaggaagtagcaaagtgtgcgccaagacttttgaaacggaagctgccttaaacacgcacatgcggacacatggcatggccttcaatcaaatccaaaagaatgagttcagctgagaaatagccacagatcttccacaagaaaagccctatccacataggaattgaaaacaagacttttttgttaccaaaagtttgcagtataacagagttaacagtactgtctaagctgtcgcaatatattatctgtcctctcccctcacctcctcagatgtgcccctccccataagtattaaggcagtatttgagttttaaagagttttgtatatatttaaataactttttatactctttgttacatgtttgtatcagtattggtggaaagtgttttgagttttgtttttttttgtactgtttccttaaaacagagttcttcgtaacagggacagttcctgaattcaaaccaaccattttgtatgttacaaatttgaataagttcaataattacaggctaacatgccttttttagtgtttttaatttttagaactcaccacataacttgtaggtgattgtgggtctcacaacactagcaactcttaagtgtcttagcaccacacttagtgtgcctgttcctagcaattgagggctccaaggacaacagcacccgggtggggacatggccggaaccctcccagacagctccttaatccatctggaagaatgaggaagaagggatccataaaggggagaaaacagctggtgatttttctgggtgaatttgcaaggctgtctgacagagcatgatgagacaggctaggaaaaggccagcctactgtcaaagttgaaaggtagtcagacctgtatgtagttctctagtcaagttttgtcatgcagctcaccaactattacagagacacatctttcaagaatatcgagtatttctctggctctttgataggaacatgaaggcatggttgacttaacactttgctgtctacacagttggcgtttcctgttctgggtgctactgccaaatgtcctggtacttagagttgggatgcacaactttaccaccgacctagcaatgcagcagcctgtactctgcaattggccatagaggaagcactaagccgccagtgtcgtctcagcactctctcagcaccctctcatggccgcactgcactgtagaggtgctctctggtcacttccctgtatagttctctgggaaagctctatattttggttattgtttgtgttttccgttgcattttatatcttgtatttatcttcagatatgttttgtacttgtttgttttgttttcctaagcaaagaaatccatttgtgtatatagacttgcatgctagactgtagtcagcgttcagttccttgaaaggtcttgctgctgttgggtgtgctcactacatccattgtgactgtattcaacccatttcacatgtaaataaacgaggaacatctggacccttaaagaaaaaaaaaaaaanaaaaaaaa

SEQ ID NO: 1130 - DNA, 2411 bp, Cricetulus griseus
  modified_base (2401)..(2401): a, c, t, g, unknown or other
aggcaagaagaataaagatggaaggtgtagagccgaattcgttgtggtccttaattcagtacgcatacacaggccggctggaactaaaagaagataacatcgagtgcctgctgtctacagcatgccttctccagctttcccaggttgtggaagcatgttgtaaatttctaatgaaacagctccacccatccaattgccttggaattcgttcttttgctgatgcccaaggctgcactgatttgcataaagtggcccacaattatactatggaacatttcatggaagtgatcagaaaccaggaatttgttttactcccagccaatgaaattgcaaagctcttggccagtgacgacatgaacattcctaatgaggagacaatactaaatgcccttcttacttgggtccggcacgatttggagcagaggcggaaagatctcagtaaacttttggcttatattaggctacctctccttgcgccacagttcctggcagacttggaaaacaatgcacttttccgggatgacatagaatgtcagaaactcattatggaagcaatgaagtatcatttattacctgagagacgacccatgttacagagtcctcggacaaaacctcggaagtcgactgttgggacattatttgcagttggaggaatggattcaacaaaaggagcaacaagcattgagaagtatgatctccgcacaaatatgtggactcctgtagcaaacatgaatgggaggaggctgcagttcggtgttgcagtgttagatgacaaactgtacgtggttggagggcgcgacggactgaagactttgaacactgtagaatgctacaaccccaaaactaaaacctggagtgtgatgccgcctatgtccacacataggcatggtcttggtgtggctgtattggaaggtcccatgtatgcagtaggagggcatgatggctggagctatctgaatacagtggagcgatgggaccctcaagctcgccagtggaattttgttgccactatgtccacccccaggagcacagtaggtgtggcagtactaagtggaaaactttatgcagttggtggtcgcgatgggagttcttgtctcaagtcagtagaatgctttgatcctcacactaataaatggacaccgtgtgcccagatgtcaaaaaggagaggtggcgtaggagtgacaacatggaacggactgctgtatgctattggaggacacgatgctcccacatccaacttgacttccagactttcagactgtgtggagagatatgatcccaaaacagacatgtggactgcagtggcatccatgagcattagcagagatgcagtgggggtctgtttacttggtgacaaactgtatgctgttgggggttacgatggacagacctacctgaacatagtggaggcttatgacccccaaacaaatgaatggacccaggttgctccactgtgcctaggaagagctggagcatgtgttgtgactgtgaagatataactctatgctttgttctcattcacattgtccagagttattacagtacaaacatataaacttccaaaatactactttataagtttgtcataatgagcttccatactttttattatttaatcaaaccactattttaatgacatactaaaagactatgctgtctggttttttcaggtacaatgatattaaatatgctctagttgtgaattttattactaaaattggtttaacccaagaataaagaaaaacacttaaagcattaaaaaaataagactgaccaaataaaaacttgataggatctctaggtcctacttaaatagccattccatcccatctagatccacggagaactgtgtgataggctatgactgaaattaaagcgggatgctttacattaagatatgcaagtttatgtagagaaaacaaatactatagactctataatgttcttccacctaactagtatttaattatgtggatttcttttatactacaaaagattgtttgagtttgtctttttgatactgatgcaattgtttggctgttcttacattctgtctgctgctgcctgttgtctcacattttgacccattgtgttaagaacctattgtgctcctttgtaatcaaaaaaatggggggtggggggatgctaattgaatatttgaaaaataagtataaagtgtttgttactcaaaattttatacatttgtaaattctaattacatatgtgaatgttaatagtctcagtgaattgtttattgtttgtaaatgccccgggcagtaatattgtatgaaactttctttaaggtagaagacattaccttaatataaaatagatgtaaactaaagtccgctctctcaaagtacagtgttatgcttaatatatttattattttatattaaanaaaaaaaaaa

SEQ ID NO: 1131 - DNA, 2410 bp, Cricetulus griseus
ctggggctgcacgactactgtgacatcattaaacatcccatggacatgagcacaattaagtctaaactagagtcccgtgagtacagagatgcccaggaatttggtgctgatgtccgattgatgttctccaactgctacaagtacaaccccctgaccatgaagtggttgccatggctcgaaaactccaggaggtatttgaaatgcgctttgccaagatgcctgatgagcctgaagagcctgtcgttacggtgtcctctcctgcggtgccacctcctacaaaggtggtggcccaaccctcatctagtgacagcagcagtgatagttcctctgacagtgacagttccactgacgactcagaggaagagcgagcccagcggctggctgagctccaggagcagctcaaagcggtacatgagcagcttgcagccctctcacagccccagcagaacaaaaccaaaagcaagaaggaaccagcacccatgaaaagcaagccccctcccacatacgaatcagaagaagaggacaagtgtaagcccatgtcctatgaggagaagaggcagctaagtctagacatcaacaaacttcctggtgagaagctgggccgtgtagtacacatcatccagtcaagggagccgtcactcaagaactccaatcctgatgagattgagattgactttgagactctgaaaccgtccacactgcgggagttggaacgctatgtcacctcttgtttgcggaagaaaaggaaacctcaagctgaaaaagttgatgtgattgctggttcttccaagatgaagggcttctcatcctctgagtcggagagcaccagcgaatccagctcctctgacagtgaagactctgaaacagccacagccacagccatcaccactactgcagccacagccaccaccggctcctgggccagtctggtacagaagtcatccaactactccatcctccacagccaagtcctcaagtgacagcttttgagcatttccgtcgagctgctcgggagaaggaggagcgcgaaaaggccctgaaggctcaggctgagcatgcagagaaggagaaggagcggctgaggcaggagcgcatgaggagccgagaggatgaggatgcgctggaacaggcacgtcgagcccatgaggaggcacgacgtcgccaggagcagcagcagcagcagcagaggcaggagcagcagcagcagcaacagcaagcagctgctgtggccgcagccgccgccccccaagcccagagctctcacgccccagtctatgctggaccagcagagggaattggcccgaaaacgagagcaggagcgaaggcgcagggaggcaatggcagctacgattgacatgaatttccagagtgatcttttgtcaatatttgaagaaaatcttttttgagagcacctaggtgacttttgcctttttcgggcaaaaatattgactctccatagtgttaggggcggcagtggaggcagtagcagcagccagggatgcctctgggcctggctctcctgcatgctatgcccggggcaggcctaacgggcagctgaggatcacagagcccatctgccttacagccagtcggacagacgtcctaccacatgcccctcagaggacgtcagttcagagcacgcctcagtatgagtcaagtgccggctggacccaaggcctgcggccccgcgtgcggggcagaggcccttctctgcgccaaatgtctacacagtatacacaggacattgttgctgccgccaccgtgactggttttctgtccctgagaacatgacgtttgtgacgtcctacccattgggagtccttcacaccccagccatcgctgcccactcccaggaggccagggcaagcctgtgtggactggaacggcaaggcactggcccatccccttgctggcactgactttgccttgaacagatcctctccctccccccacaagcctttaattgagcgccgctctctataagtgttcgcttgtgcaaaagggaatagtgccatggaagtgtgtgtccattcatggcaattcggatagaggtgactgttcacatacatggacaggcctcacctggggagtaaggccaccaaccaaagtcagttccttcccacctgtgtttctggttttgttttgttttggttttttcctatatatatatatatattttttttgttgaattctattttatttttaattctctcttctccttcagacacagtggcactgcttatctccgaaatggtgtgatcgtctcctcattgagtggcggctcccaccgcgctgtgggtagtgtgtgaccgtggctgtactgtatagtgaacatagttggcatatcttcgtttgaagtttgttggtgactccaccagactggtagttaaaaaaaagaaaaaagaaaaaa

SEQ ID NO: 1132 - DNA, 2410 bp, Cricetulus griseus
ggagctgggcatcaggcagaagctgctggtggcagtgctgacctcacaggccacgttgcctacactgggcgtggctgtgaaccgaactctgggacaccgattggagcgtgtagtgttcctgaccggtgcgcggggccgccggacaccctcaggcatggccgtggtgacactgggcgaagagcggcccatcggacacctgcacctggcgctgcgccacctgctggagcaacacggcgatgactttgactggtttttcctagtgcctgatgccacctacactgaggcgcatggactggaacgtctagctggccacctcagccttgcctcggcaacccatctctatcttggtcggccccaggacttcatcggtggagagaccaccccaggccgatactgccacgggggctttggagtgttactgtcacgcacactgctacagcaactgcgcccccacctggaaagctgccgcaatgacatcgtcagtgctcgcccagatgagtggttgggacggtgcatccttgatgccacaggcgtgggctgtactggtgaccatgagggtgtgcactacaactctctggagctgagccctggggaacctctgcaggagggggaccctcgtttccgcaatgccgtgacagcccaccctgtgtatgaccctgtgcacatgtaccagctgcacaaggcgtttgccagggctgagctggaccgcacgtaccaggagattcgagaattgcagttggagatccagaatactagcagactggctgctgatggagaacgggcttctacctggccagtgggcattccagcaccatctcgccctgcctcacgctttgaggttctgcgctgggattacttcacagaacagtacactttctcctgtgctgatggctcgccacgctgcccactgcgtggggctgaccaggctgatgtggctgatgtcctggggacagccttagaagagctcaaccgccgttaccaaccagcactgcggctccagaagcagcaactggtgaatggctatcggcgttttgatccagcccgaggcatggagtacacattggacttgcagctggaagcgctgacgccccagggtggccgctggcccctcacccgaagggtacagctcctccggcccctgagccgagtggagatcttgcctgtgccctatgtcactgaggcttctcggctcactgtgctattgccgatagccgcagctgagcgtgacctggcttctagcttcctagaagcctttgccacagcagcactggagcctggtgacgcagcctccttgaccctgctgctactgtatgagccacgccaggcccagcgggcagcccatgcagatgtcttcgcaccggtcaaggcccatgtggcagagctagagcggcgtttccctggtgcccgagtgccctggctcagcgtgcagacagctgcaccctctccactgcgtctcatggatctactctccaagaagcacccactagacactctgttcctgctggccgggccagacacagtgctcacacctgacttcttgaaccgctgccgcatgcatgccatctctggctggcaggccttctttcccatgcacttccaggccttccaccctgccgtggctccacctcaggggcctgggccaccagaactgggccgtgacactggccactttgatcgccaggctgccagtgaggcgtgcttctacaactctgactacgtgacggcccgtggacggctggtggcagcctctgagcaggaggaagagctgctagagagcctggatgtgtatgagttgtttctgcgtttctccagcttgcatgtgctgcgggcggtggaaccggccttgctacaacgctaccgggcccagccttgcagtgcacggctcagtgaggatctgtaccaccgctgtcgccagagcatgctcgagggccttggctcccgcacccagcttgccatgctactctttgagcaggaacagggtaacagcacctaggcccacacctgttccctaatcttccctgataacctggagccacatgccagcctcgctggacagggctggctgtagcctcagaccctagggcagcccactggtcccttgtcttttgctttgtgggcccatgggctcaggacaagccctgagagagatgccctagagccatcctttcttgtccagtctccctgcccccttgacgctgctgattcaggctgtggcctctatgtatttatgcccaacgccagccatggttcctgggatcttgtccgggggctgggctgtagataagttgttagagaaggaggaagcagagaaaggaggggtatggtattaccaccttctcccttctggatccatgatgaagccctggctttaataaactggctacgtgtagaaaaaaaaaaaaaaaaaaaa

SEQ ID NO: 1133 - DNA, 2410 bp, Cricetulus griseus
tgatgccttgatggcaaatggagatgagctaaataagcagcttaaagaacagcgtttaaagtgcctgcagccttgagaagcagctgcattctgcgaggttttcagaaagaagagtagaggagctgcaggatagaattaatgatttagaaaaggagcgagaacttttaaaggaaaactatgataaactttataacagtgcctcccagtgccaatgaatttggatttggatcgataccttaagtcagagtctctgggtttttatgtgtttgatgatagtgatacccaggagaatatttacataggaaaagtcaatgtgcctctgatatcactggcacatgacaggtgtatctcaggctcctcctcctaaagatacaaaggacaattccccaaaaatggaacacacaccagaaacagtaactagtatgccagctggtacatttacttccaaggaaagcagtgtggctgaggtcaaagaaaacataaaaaaaaatgcaacagggaaaagaagatgacatctctttcctatctgaaggtcagcttgcatcaccaaaagtgtggcttcctctgaagatgaaacagaaataacggaagaactagagccagatgaggacagatcaacttctgacagtgatgactgtatcgtcccaggctctgtctccgaggataccaaagaatcatcagaggaaattcggattgagatcatagctctgagccttaatgattctcgaataaccagggatgacactatccaacagctgttcattgaatgtcggttctacagtcttcccgctgagagagacatcctaaaagaccgtgctgcaaagacaagaactgactcacagaagtgtgcgcttcaccgtggtcagtgaccctcctgaggacgagcagcacctagagtgtgaggacattggcattgctcatgttgacctcatggatgatttcagaaagggagagacatcattgagcaggacattgatgtgtttgatgcccgagcagacggaggcagcatcggcaagctaaaggtgaccgtggaagcactccatgccctacagtctgtctatgagcaatatggagaagactcagaggcttgaaagaaacttatagaggcatcctacttctgagaagatacccacatgaaagcttgatatttttaatggagctgtgaatcagtgctgcaaaggaattgtctctgggggtctgagatataatgcatttcattttttaattaacttttttttttgtcaatttcttcaaaggatttttataggctgtgggttttcactgttttgcaaacaggctattccttcttaagcatatgtaaagtattcagggagataagtaatttattaaaatctacctaatttgccgtgctatattaaatctctgcttcagtgatcacagaccatttcatttagagaattaggcattccctctttgtgtgattaaaagccctggaaaatgagttctttgctcctatttgtgaacattcaaagcctgctaatggcaggaagatggaatagattatgagacaattcattacagttcaacagggggaaaagcagctataatgcaaaaatgcaagtatgaatatcagtgtatagttgaaccatctgtgctctaacggcttcagtgatgactcctccttgggaggctttgaaatgacatccatacgatattaatttgttggcacactttgtgggaccaatagagtatgatgtgaccacagaattgtataaattgtgtctgtaccatggggcaccccgtcctcaggcctgccatctccaagaagaatcttgctctcatcagactctgcagatcttcataatatctcattcctctggaaccttccagtgaccacaaacatcctgcagacagaacctctccaatcctagtaaacaaccacatgtttgttgtcactttagctggctctgagctcatctttttggcctccctttctagctttctttggctttgtgcagctacagtgtcattaaggccatactattccctgcagtaatttaaaacagccagattataccctgggattagctgagcggttttcgagacatttattgtggtattctcccagggggcatgcattattgttttaaaatgttatatcccaagctaaataacattttctgccaggaggaaaatgggatggtgctgacttcttagtgtcgtctttaagtagagacagggaagttttaatcagaaaatgtctacaagtgagtcagctatatagattttatacctcaagcacaattaggggtttagccagacttctcttccatttgtatttactagctttaaaattctcaacttcagaccctgctgctgtgctgtcctctgtatttaaacttaaattagtttttaagaataaatagagactatgtttaatcaaataaag

SEQ ID NO: 1134 - DNA, 2409 bp, Cricetulus griseus
agcgagctcgctgaggcagaaaatatggacacgcccccagatgatgagagcaaagaaggggctggggaacagaaggcggaacacatgactaggaccctgaggggcgtgatgcgggtcggcctggtagccaagggtcttctgctcaaaggtgacttggatctggagctggttctgctctgtaaggagaagcccacaaccacccttctggacaaagtggctgacaacctggccatccagctcactaggccagagccaatgggctgaagtcttgtgtcattgtcatccgtgtcctaagggacttgtgtacccgagtgccctcttggggtcccctcagaggatggcctctggagctgctatgtgagaagtccatcggtactgccaataggccaatgggtgctggcgaagcccttcgaagagtgctggagtgcctggcatccggcatcgtaatgccagatggttctggcatttatgacccttgtgaaaaagaagccactgatgctattgggcatctagacagacagcaacgggaagatatcacacagagtgcgcagcatgctctgcggcttgctgcgtttggtcaactccataaagtcctaggaatggaccccctgccttccaaaatgcccaagaaaccaaagaacgagaacccagtggactacactgttcaaatccccccaccaccacctacgccatcacacccatgaaacgccccatggaagaagatggggaggagaagtctcccagcaaaaagaaaaaagtcggatgggaagccagcagtagtggcccgccccctgtggttagaagctgtctccaaccctagttctgtctcccttcagatgccactactgagcaggggccaatattgactaagcatggcaagaacccagttatggagcttaatgagaagaggcgtggccttaaatatgagctcatttctgagactgggggcagccacgacaaacggtttgtcatggaggttgaagtggatggacagaagtttcaaggtgctggttcaaataaaaaggtggcaaaggcttatgctgctcttgctgcattagaaaagctttttcctgatgccccccttgcccttgaagccaacaaaaagaaaagagcccctgtacctgtccgaggtggacccaaatttgctgccaagccacacaatcctgggtttggcatgggaggtcccatgcataacgaggtgcccccacctcccaaccttcgaggccggggtcgaggagggaacatccgtgggcgaggacgagggcgaggatttggtggcaccaaccatggaggaggctacatgaatgctggtgccggatatggaagctatggttacggcagtaattccgccacggcaggctacagtcagttctacagcaatggagggcattctgggaatgccggtggtggaggcagcgggggcggtggtggctcatccaactacagctcctactaccaaggagacagctacaactcaccagtgcccccgaaacatgctgggaagaagccgctgcatgggggccagcagaaatcttcctacagctcgggctaccagtcccaccagggccagcagcaaccgtacaaccagagccagtacagcagctacagcacgccgcagggcaagcagaaaggctacagccacgggcagggcagctactcctcctactccaactcctacaactcccctggtcggtgggtgggggcctcgtgactacagctacgacagcaaattcaactacagtggtagtggaggccgcagtggcgggaacagctatggctccagtgggtcatcctacaacacaggctcacatgggggttacggcggaggttctgggggcagctcttcataccaaggcaaacaaggaggctactcatcacagtcgaactacagctcccctgggtccagccagagctacagcggcccttccagctcctaccagtcctcacaaggtggctacagtcggaacacagagcacagcatgaactaccagtacagataaaggcccaggctgctcctcaccctctgcacctctgcctccaactcgtcttgggagattgagtctgcacatcaccagttgccatgtccactggcgcagtgcccacccgtccatgttgccgacgttgccacgctgtgaggtgtggttgtccctgggacccgtgccgtgacccctatttagctgtgtttgggactccgtgtcttcagtggtttgttagttgccattacaccttgtctgagtagtgttcgagttcttgccgtgtggtatccctctgtctgtttatacccggtgtgagttccatcgggtgtccttaaatagttgcagaagggatacgtcatctgttaatgctttttgtgaagtgagttaaatgagctttctttattttaatgctttagtgtttcagttttataag

SEQ ID NO: 1135 - DNA, 2409 bp, Cricetulus griseus
gctatggagcaggctcctccggaccccgagaggcagttgaagcctgcacccctggagccgctggggggccctggcgccgtgctggaagccgcggccggcgaggagaccgagggcacccgggaagacagctcaggggtcgacacgatgacgggaaatgatttttggttgaagaaaatagagatcagtgtttccgaagcagaaaagagaactggaagaaatgccgtgaacatgcaagaaacgtacactgcttacctcattgagacacggtcagttgaacatgctgacggtcagagtgtcctcacagactcactttggaggcggtacagtgagttcgagttgttgagaaactaccttttagtttactacccccatgttgttgtaccacctcttccagaaaagcgggcagagttcgtgtggcataaactctctgctgacaacatggatccagactttgtggagagacgacggataggcttagaaaactttctcttgagggttgcctcacatcctgtcctttgtagagacaaaatcttctatttgtttttaacacaggaaggcaactggaaggagactgtgaatgagactggattccagctgaaggcagactccaggttaaaagcgcttaatgcaacattcagagtgaaaaacccagacaagagatttactgagctgaagcactacagtgatgagttgcagtctgtcatctcacatctccttcgagtcagagctagagtagctgatcgactctatggcgtatataaagtacatgggaattatgggagagtttttagtgaatggagcgctatcgaaaaagaaatgggcgatggactgcagagcgccgggcaccacatggatgtgtacgcatcctctattgatgatattttggaagatgaagagcactatgcagatcagctaaaggagtatctcttttatgcagaagcactgcgggctgtgtgcaggaagcatgagcttatgcagtatgacttggagacagctgctcaggacctggcttccaagaagcagcagtgcgaggaactggccactgggactgtgagaacattctcgttgaaaggaatgaccaccaaactctttggtcaagaaactccagagcagagagaagccagaataaaggtgctagaagagcagataaatgaaggggaacagcagctgaagtctaaaaacctggaaggcagagaatttgtgaagaatgcatgggctgatattgagcgcttcaaagagcagaagaaccgggacctgaaggaagctctcatcagctatgccatcatgcagattagcatgtgcaaaaagggaattcaagtgtggaccaatgctaaggaatgctttagcaagatgtgatcctgggaagtgactttctctccaatcaaagtgccccaaaacgaagcacaagtaaaaagaaattcatttgctacctaatatatataaagcatacagtaaattgaacaaatcagctttctttaagtatagttgtgttcatatagcacaaaaggacacattttaatgaagaataatttgaggttttggggactggtgctgattccaaaagttaatttaataagataaaccaacagattattcatcaggcttctgaaccaatggctgaatgttagggtgttagttaatttccatgtactccccaatgccaactgtttcagatcctttcatgtagggagttcttcccaagatgaattcctgtatttacttggtaggacccacttctgctgtagggttgttttatcttgccttatagttgagctgttctgtttgacaaagctcagcagaaacttattgtgaaatctgaggttttcttccctgttcgtagacccctataccatgtgcgtacactagaaaatgccttcagtttgtgtttcaccaaaattttgatactggtaagaaattttatactgccaacaaagaagtctcagcttctcagatacgcagtggagtaaatacattattatgatgtaggaatcactatatagaaagttttaattggacattgttgtcctcagataattgttaacctcagcagtgagcctcaatttctgctgcttggctctgtgcacatggcatttcagggtacgagatgtagcatttccatgtgtaagacacttgtagtgaacacttgtgggctggtaccttcatcattcatgtgcttttctattgcctggctgtgatttttgtaaaggtaaattatgttgttgttttaatgtgtctcatggtacatgttcagaagccaagctctcactctgctagcttccagactctttaactgtgcactcattatttctaatgtttaaaactatactcagtactgtttaacatttgacttttttacatgtttaaaatgttgctggatttttgtgctgtttgccaaacttatacattaaa

SEQ ID NO: 1136 - DNA, 2408 bp, Cricetulus griseus
gcatcacaagcatgtagaggccgagttgaggagtcgtctggctgctctggaaactgaagctgctcagcaccaagctgtgattgatggtctgacccggaagtacatggagaccattgagaaactacagaacgacaaggctaagctcgaagtaaaatctcagactctagaaaaggaggccaaggagtgtcgacttcgaacagaagaatgtcaattacagttaaagaatcttcatgaagatttgtcaggtagattagaggaatccttatcaatcatcaacgaaaaagtaccttttaatgacacaaagtaccatctatacaatgctctcaacgttccactgcacaacaggagacatcagctgaagatgcgggatatagctgggcaggccctggcttttgttcaggatctcgtaccggctcttctgaactttcacacctatacagagcagaggatatttttcctgttgattctgccatagatgctatatcacctttgaatcagaagttctcccagtaccttcatgaaaatgcgtcctacgtccgccccctagaggaagggatgctgcatttattcgagagtattaccgaggatactgtcactgtcctggagacaactgtgaaattgaaaatgttttcagatcacttaacttcctacatctgcttccttaggaagatcctcccttaccagttaaaaagcttagaagaagaatgtgaatcttcccttttgcacacctgcactgagagccagaaacctggagctgtcccaggacatgaagcggatgacagccgtgttcgagaagctgcagacatacgtcactcttctcgccctgccaagtaccgagccagatgggctccttcgggcaaactacacttccgtcttaacaaacgttggcgctgctctgcatgggtttcatgacgtcatgaaagacatttccaaacactacagtcagaaggctgccatagagcatgagcttccaaacagccaacccagaagctggtgacgacgaatgactgtgtcctgtcctcagcagtggcactaacaaatggagcagggaagattgcatctttcttcagcaacaacgtggactacttcattgcctcactgagctatgggcccaagacagccagtggattcaatagtcccctttcagctgagtgcatgctccagtacaagaagaaagctgctgcctacatgagggctttgagaaagcccctcgcagagtccgtgccttatgaggaagcagtggccaaccgtcgtgtgcttctcagctccactgagagtcgggaaggccttgcacagcaggttcagcagagtttggaaaagatttcgaaactggagcaggaaaaagaacattggatgctagaagcacagttagccaaaatcaagctggagaaagaaaaccagcggatggcagacaggctgaggagtacaagcagtgcacagctgcttgggctggcccaggaaaacgccactgtgtccacggctccctgccaggaggaagctgcagccaaggtcccgtcagagcctatgcagagtgccagtctgattgggattttgaccaggacgccagacagtgaggtcccagatgtggagtcccgtgaagacctaattaagaatcattacatggccaggatagcggagctcacgtctcagctgcagctggctgacagtaagtcagtgcacttctacgccgagtgccgagcgctgtccaagagactagccatggcggagaagtgtaaggagacgctggcagaagagatgaagctagccagtcagaacagcagcaggcttcaggatgagctgatgaccaccaagaggagctacgaggaccagttaagcatgatgagtgatcacctgtgcagcatgaacgagaccctgtccaaacagagggaagagattgacacactaaagatgtccagtaagggaaattctaagaagaacaggaatcgatagttggtgacagactccatgaccagcgctggcctctgggaagctgaagtatcgttggacctagtaaactagctagtgttgtccgtgaccttgagacatttgaagtacatttgtaaacagcaaggcaaatacagaatttgatgttgacagtctaatggaaaacaatagacataaccatggatattgtaggtttccttatgctgtttttactgtgcactttttgaaattaggatttaatttcagtatgtaagaacaaatattttgtatattttcaaactcaattatatggtaatggatttggtatctatggaatagatatatgtttctggataaaatgcttaaattgtcagatgtccttatttcctgtattgccatctcttcttataattgaaaactgaaagatgtctcagattctttttaaacgattctctccctctccagctccccttcctttccttccc

SEQ ID NO: 1137 - DNA, 2407 bp, Cricetulus griseus
ccgggagtagctgctgctgaaaggaaggactatggagcgtcaggtgctgctgagtgagccccaggaggcggcagcgctgtaccggggccttagccgccagcctacgctgagcgccgcctgcctgggcccggaggtcaccacgcagtatgggggcctctatcggaccgtgcacactgagtggactcagagggacttggagcgaatggagaacatccggttttgccgtcagtacctagtgttccatgatggagactcggtggtgtttgccgggcctgcaggcaacagtgtggagacccgggggggagctactgagcagagagtctccttcaggctccatgaaagctgtgctgcgtaaggctgggggcacagtcccaggggaggaaaaacagttcctggaggtctgggagaagaatcgaaagctcaagagcttcaacctgtcagccctggagaaacatgggcctgtttatgaggatgactgctttggctgcctttcctggtcatactcagagacacacttgttgtatgtggcggagaagaagcgccccaaggctgagtccttctttcaaaccaaagccttggacatcaatgccagcgatgatgagatggccaggccgaagaagccagaccaggccatcaagggggatcagtttgtgttttatgaagactggggagaaaccatggtttccaaaagcgtccctgtgctgtgtgtgctggacatcgagagtggcaacatctcagtgcttgaaggcgtccctgaaaatgtgtcccctggacaggctttctgggcccctggagacacaggtgtggtgtttgtgggctggtggcatgaacccttccggttaggtatccgcttctgcaccaaccgcagatcagccctgtactatgtggacctgagtgggggaaagtgtgagctactctcggatgactccctgagtgtttgttctcctcggctgagcccagaccagtgccgcatcgtctacctgcagtacccatcgctagtgcctcatcatcagtgtagccagctctgcctgtatgactggtacaccaaggtcacttcagtggtggtggacattgtacctcggcagctgggagagaacttctctgggatctactgcagtcttctgcctttgggatgctggtcagctgacagccggagagtggtctttgactcagcgcagcgcagccagcaggacctgtttgctgtggacacccagactggaagtgtcacctccctgacagcggggggttcaggtggaagctggaagttgcttacaattgatcaagaccttatggtggcccagttctccacacccaacctgcccccgagcctgaaagttgggttcctgcctcctgctgggaaggaacagtccgtgtcgtgggtgtccctggaggaggctgaacccattcctgacatcctctggggcgtccgtgtgctgcatccacctccagaccaagagaatgtgcaatatgctgaccttgactttgaagcaatccttctacagcccagcaaccctccagataagacccaggtgcccatggtagtcatgccccacgggggaccccattcatcctttgtcactgcctggatgctgttcccagccatgctttgcaagatgggctttgcagtgttgctagtgaactatcgtggctccactggctttggccaagacaacatcctttctctcccaggcaatgtgggccagcaggatgtgaaggatgtccagtttgcagtggagcaggtactccaggaggaaggctttgatgcacaccgtgtggccctgatgggtggttcccatggagggttcctctcctgccacctgattggtcagtacccagagacatacagtgcctgtatagctcggaaccctgtaatcaatattgcttccatgatgggctccactgacatccctgattggtgtgtggtggaggctggcttccgttatagcaatgactgcctgccagacctgaatttgtgggaggagatgctagataaatcacccatcaagtatatccctcaggtgaagacacctgtgttactgatgctgggccaggaggaccggcgtgtaccattcaggcagggtatggagtattaccgtgccctcaaggcccggaatgtgcctgttcggctcctgctctatcccaaaagcacccacgcactatcagaggtggaggtggagtcagacagcttcatgaatactgtgctttggctgcgcacacacttgggcagctgaagccctaacattctgcgtgaactggtcagtctgtcttgcactttgctcttggtaagcgccaggatctggcagaatagcctagagacttcctgggctctggactctggatgagtgggcagagggacatggactatgcactcataataaatgaggacacagaaaaaaaaaaaaaaaaa

SEQ ID NO: 1138 - DNA, 2407 bp, Cricetulus griseus
gaacagaggcgaaccgtacggatttatttccttgggccttcagctgtcctcccagaggtcgagagttccttggataatgacagctttgacatgactgacagccaggccctcatcagcaggcttcagtgggacggctcttctgatctctcaccttccgattcatgggggtttgggcttgggaagcttggtggcccaggcaggcagaggatccagttatgtgcccctggggggtgtcagggtcctctgcaaggaagcatgacccctcggcgtgcaggactcagacctggacattattatgccttggacataagttttggtggggaggtggttttcctatttattctgttgagttactggatgtccagctaggctgggggcctgacctgggcactgtgccagggcactgcctgctccccacccccacggaactggactaagccctgccgaggggcattgtggctacccaggcggctttggtttggaagctgagcccagaggaggcctctcctggctgccctcagcaatgtgaatgggtccggtgcttggagctgaggggcagggctggtgtgtcctgtctgtgtgcagagtcctatcagatgttcccagtccccggggtcagcaggcagagtgctgtctgctgaggtgggcgtccagaactgcctcacaggggcagccctttcccctcagtccccatgggcctccttggcagcaggagctgtccttttgttgttgggtgccaggaaagggcctccagcctctacagcttcaaggaatgggaaggggagggtaggaagagggagcctgtatcagagtggccccctgccctccctgccccagggctgtgaggacagcccaggtgagagggacggtgctgctttatttgaaatgtttcttacctcattccctgccccaggaaggggcccagcctcaccctcctggggtggccctgtgttcaccctcccaccctgccccatgccctgccctgctggggcagcctgagttcccagctgctgcttgccacccttcaccttgaccagctttggttcctctcagtgctcccgcctctaaagcgtgccctgttcccctcccttgccgcttttaagttatttattctgtactcgtggtttggggctctgaggaaaaaccctaaccttgtgcctctctccctttgctaggagtagggtgggatgagaaggtagtctctgccctgggttgtcagcggaggttggatgggtgctgctgaccctctgtgggactgtcatgccagggcacccacctacttggcctgctgactgacagggatggggttgaccctgagccatgttttctggcacttgctatacatgtcccctctcttcccaggaggagccactcccacattgggtagctagtacccaggactggttggacttatttgggttagggaccctagagggttaagggaacaacagagctagggttgtagaaccctgtctggaaccccagtcttcccctggggttgttctgattgtggctgatgcctggttacaaattggtttttaacccaagcattgtgattattttttaaaaagtcaaaccaattttggcaggagttagaataaatcctggagcctgggctcctctgtccttgaccctctacagccttctcccttgagggggaaactagagggggagagaaggttctcagcagcttccaagcgctggcttgggagcctgctgaaggtcaggggaagccggcccaggctgctatcccttcagagaagtagctgcagctcaggccaactcattctgctctcccacctctccctttctcctctggttagagggagtagtttgggaactggtttatccacaaaaacttccctattgttccttggctcaccctcagggcagagccccctgcccaggctgggtaagagatgggcttggtccagcagggaccctgagggaacaaacccttccttctggggagttatgccccctctaccgtgtagttgaacaggggctaggaactccccccttcctccctctaacagcaggctgtgtgggtttcaattcccatcctccccaccctggctaggtgtcgtccaccctgtatcctatcatgtgtctgagtgtgtgtgtgggggggttctgtactaatttccatggccggtggcttttccttccatgcatcactcccccccgcatgcccaggggccacccgcctggcattaccgcatgctggggtcattgggggaggggggtggggctcacgctgtcctgtggtcttgagatttttatttttgcatatgtaatccatcctgtacaggtagctaactttgtaaacgctgtgtattccctctgcccccatggctgctggtgtaaataaactgcatctcccgttaggtaaaaaaaaaaaaaaaaa

SEQ ID NO: 1139 - DNA, 2407 bp, Cricetulus griseus
gagcggctgacatggcgcacttggggcgtctcctggttcccctggcagccctggtcctgttgctctgggcggtccccggggcccacgggcggcggagcaacgtgcgcgtcctcaccgatgagaactggacctcgttgctggaaggagagtggatgatagaattttacgctccctggtgcccagcttgtcagaaccttcagccagaatgggagaagttttgctgaatggggagaagatcttgaggttaaagttgcaaaagtggatgtcacagagcagacaggactgagtggacggtttatcataactgcgcttccttccatttatcattgtaaagatggtgagtttaggcgttacctgggcccaaggactaagaaggacttcataaacttcgtaagtgagaaggaatggaagaatgttgaacctgtctcgtcatggtttggcccaagttctgttctgatgactactatgtcagcgctttttcagctctctgtatacatcaggactagccacagctatttcgttcacgaccttggcttaccagcgtggggctcatacttggtttttgcgttcgcaactgtgctttcaggactgatgttgggactttttatgatatttgtggcagattgcttttgtccttcaaaaaggcgcaaaccacagcaacagcctccaaaaaaaccctcaccagaattttcgcaacctctgaaaaaagtggaggaggaacaagaggctgatgaagaagatgtttcagaagaggatacagaaaataaagagggagcaagcaaagacactcctctgagtggcataagacagcgctgtgtgggcccgtcattggctacagataattcctaatttttacagatgtcttaatattatgattttgacaaaacagaagattgctatcattttctgttttaaagtgaactgtgatttgcttgtacatacagtctagattgtcgttaggttggacagttcattcagaaaataaagcagttaggtgtaacagtttgaaatatgattaaagaatattatgatgttttaaagttgtttaactttagaagatcctggtgccaagcagtaagatttgtgtttatatttaatgatctgtttcatgtgagattcaaaactgcctttcccaagatttgcattactggggtatttaagaaaattactttagagagaaagatttctcatttcacatcatttttctcagtttcactgtgtgaaaaaaggaacatatttcccataactgggaacgttgcccattgtttcaagatgtgtacttcattgataaggctgtgcttaggtagagtccacaacttcctcataggttttggactatacagctaccagaactaccttctttatagctttcatttctacatattacatctaggatatgctgctcacttcagaagtttttataagtttgtggcattgtcttaattcctaaggttggtggcctgctttggtctcttgttcactatatgtattttttttatttgccatgggttgtatttttaagttgaatgaaattaacagtatcactgttgtgtttactgtgggtagacagtacttttctattgttttatgttgacatttactgagggaatcatcaaaatgaaatgtttacttgaaaatggacaaatttggctatacattccagattttaaattattattttttctctttttaatgtgaaggtgaaatttgctgatttttaaaatttgatgtggaaaagctttagtattttatattttggaaattcaaagcttaatttgatgtaaaatgaagtctgtattctatttgagaaatatctcctactatgtgtttttaccatatctgtcctttacaggttcttgatggattttatagtcagtatattgctttgtgtttgaaaattgtaacattgttatgttttaaagacaaattttgtattgtattgttcttgtctgctagtactgtgcatctcacaaatggaaatcagcaaaatggactccatcaacttcatcttacagcaagggaagggtattatggggggggcggtcttgatgtccagaaggggaaagcagaccacatgactctcagaatgagtcacccagcctttatggaatagtggtttgtttctatggcgctccctctccttacgtgctctgtgaattccttagacttgccatgttgtgatgtgcaacagcttccttttaggcctctcctttataaaattaagtgttctgctgtcatttggatatgtagtttgtggtggcttagaaaaacattctaagcaacaaaataaatgtttctaagcacttacaaaaaaaaaaaaaaaaaaaaaaaaaaaaaaaaaaaaaaaaaaaaaaaaaaaaaaaaaaaaaaaaaaaaaaaaaaaaaaaaaaaaaaaaaaaaaaaaaaa

SEQ ID NO: 1140 - DNA, 2407 bp, Cricetulus griseus
  modified_base (2009)..(2009): a, c, t, g, unknown or other
tggacgacttaaggctgaaattgcaagatcaaatgcatccttgactaacaaccaaaatttaatccagagtctaaaagaagatttaagcaaagtacgaaatgaaaaggaaaacattcagaaagatttagatgccaaaataattgacatacaagaaaaagtcaaaacgatcactcaagtcaagaaaattggacgcaggtacaagactcagtatgaagaacttaaagcccagcaggataaggccatggagagttccattcagtcttctggagaccatcaggagcagcacatctctgtccaggaaatgcaggagctcaaagataccctcagccaatctgaaacaaagacaaagtcactcgagagtcaagtggagaacctgcagaagacattatctgaaaaagagacagaagcaagaaatctccaggagcagacggcccagcttcagtctgaactgtcacgccttcgtcaggaccttcaggatagaaccacacaggaggaacagctcaggcagcaaataaatgagaagacaaggaaggcaattgtagcagcaaaatcaaaaattgcacacctagctggtgtaaaagaccagttaactaaagaaaatgaagagcttaaacaaaggaatggagctttagatcaacagaaagatgaactggatgtccgaatgactgctcttaagtcccagtatgaaggtcggattagtcgcttagagagagagctcagagagcatcaggagagacaccttgagcagagagatgagcctcaggagcccactaataaggctccggaacagcagagacagatcacactgaaaaccactccagcttctggtgaaagaggaattgccagcacatcagacccaccaacagccaatatcaagccaactcctgttgtttctactccaagtaaagtgacagcagcagctatggctggaaataagtcaacacccagggcaagtatccgcccaatggttacacctgcaactgtcacaaacccaaccactaccccgacagcaaccgtgatgcccaccacacaggtggagtcacaggaagctctgcagtcagaagggccagtggaacatgttacagtatttggaagtgcaagtggatctgttcgttctactagtcctaatgttcagccctccatttctcagcccatcctaactgtacagcagcaaacacaggctacagcttttgtgcaacccactcaacagagtcaccctcagattgagccagcaaaccaagagttgtccccaaacatagttgaggtggtacaaagttcaccagttgagcggccatctacttccacagcagtatttggcactgtttcagccaccccaagttcctctttgccaaagcgcactcgggaggaggaggaggacagcaccgcagaagcagcagaccaggttcctgatgacactgtggaaatgcctctcccaaagaagctgaagacagtcacacccgtggcaactgaggaagaagttatggcagaagaaagtactgatggagaggtagaaactcaagtttataatcaggattctcaagattccattggagaaggagttacccagggagattatacacctatggaagacagtgaagagacttcacaatctctacaaatcgatcttggaccacttcagtcagatcagcaaaccacttcttcccaggatggtcaaggcaaaggagatgatgtaattgtaattgacagtgatgatgaagatgacgatgaagaaaatgatggagaacatgaagattatgaagaagatgaagatgatgatgatgatgatgaagatgacacggggatgggagatgagggtgaagatagtaatgaaggaactggtagtgcagatggtaatgatggatatgaagctgatgatgctgagggtggtgatgggactgatccaggtacagaaacagaagaaagtatgggcggagctgaaagtaatcagagagctgctgattctcaaaacaatggcgaaggaagtacaagtgcagcagaatcatctttcnctcgaaattgatagccagcaggaagaggagcctgtgcaagcatctgatgaatctgatctcccctcaacccagccaggaccctccttccagttcttctgtggatactagcagtagtcagccaaagcctttcagacgagtaagacttcagacaacattgagacaaggtgttcgtggtcgccagtttaacagacagagaggtgtaagccatgcaatgggaggaagaggaggaataaatagagggaatattaattaagtgatctgtaaactataataacacctgtgaataagattggcaaatctgttttaatataatgattgtcaagttgagaagtgttttgtatttaaataggtatgctcatttcaacattctttattaataaaatgtatttcaatgtcaa

SEQ ID NO: 1141 - DNA, 2406 bp, Cricetulus griseus
cgatcagcagcagcttgctaacttctgccggattctggctgtcaccatttcagagatggacacagggaatgacgacaaacacacacttcttgccaaaaatgctcagcagaagaagagcttgagcttggggccttctgcagctgaaatcaaccaagctgctcttctcagcatccctggctttgtggaacggctttgcaaactggcgactagaaaagtgtcagagtcaacaggcacagccagcttcctgcaggaattggaggagtggtatacatggctagacaacgcgctggtgttagatgccctgatgcgagtggccagtgaggagtctgagcacagtcaaggcacttcaggggacaatgcgctgccgcatacctcagccaggacccagctgccccagtcaatgaagattatgcatgaaatcatgtacaaactggaagtgctctacgtcctgtgtgtgctgctgatggggcgtcaacgaaaccaggtccacaggatgattgctgagttcaagttgatcccaggactcaataatttgtttgacaaactgatttggaggaagcattcagcatctgcccttgtcctccatggtcacaaccagaactgtgactgtagcccggacattaccttgaagatccagtttttgaggcttctccagagtttcagtgaccaccatgagaacaagtacctgctgctcaacaatcaggagctaaatgaactcagtgccatctctctgaaagccaacatccctgaggtggaagctgtcctcaacactgacaggagtttggtgtgtgatggcaagaggggcttactaactcggctgctgcaggtcatgaagaaggagccagcagagtcttccttcaggttttggcaggcccgggctgtggaaagtttcctccgagggaccacctcctatgcagaccagatgttcctgctgaagcgaggccttctggagcacatcttatactgcattgtggacagcgagtgcaagtcgagggatgtactccagagctactttgacctcctgggagagctgatgaagttcaatgtcgatgcattcaagagattcaataaatatatcaacactgatgcaaagttccaggtgttcctgaagcagatcaacagctccctggtggactccaacatgctggtgcgctgtgttactctgtcattggaccgatttgaaaaccaggtggacatgaaagtggctgaggtcctgtccgaatgccgcctgcttgcctacatatcccaggtgcccacacagatgtccttcctcttccgcctcatcaatatcatccatgtgcagacactaacccaggagaatgtcagctgcctcaacaccagcctagtgatcctgatgctggcccgacggaaagagaggctgcccctctatctgcgtcttctacagcgaatggagcacagcaagaaataccctggcttcctgctcaacaacttccacaacctgctgcgcttttggcagcagcattacctgcacaaggacaaggacagcacctgcctggagaatagttcctgcatcagcttctcatactggaaagagacagtgtccatcctgttgaacccagaccgccagtcgccctctgccctggtcagctacattgaggagccctacatggacatagacagagacttcactgaggagtgagctggagccaggcttcgggaagctgctgggcctgggcaagtgtgggtgagcgtgagtgcacacgccgcacactctgcccgtccccgtccctctctgcctccccacggctctgtctacccagttttcaggtataggctcagtggaaggaacagcctagaagctcttgtctcctgggtcagagggcctgggtcattggggagcctgttttcctcactgtccccagggtaaggacaatggcaccgtgcccacccttccctcacaatcctggagctctggcctgccagagaaagggaacatgggaaactatctctgtctgagcttctcccatcagtcccctgatggagaggaagagtcagacccctgtgagccaagcctccctggcctcggggcctggacagaggctcctgagccctaggcaggggtgggtatcggagaatgctgccttcccccaggtctgcccatctctccctcctcctcacctcccttgtcttcctttagctcctctgggtcttcgctcattggccactgtgttcatcccgaaggttccccagaagtggggggggccttttctctccatcccttggggtgtggagtgcctgtgcctgcctgagcccagacacaggagcctggctgagagcttacccttggctcctcctgtgttgccaattaacagcaaataaaccaattaaatggagactattaaagaactttattttaaaaaaaaaaaaaaaaaaaaaaaaaaaaaa

SEQ ID NO: 1142 - DNA, 2406 bp, Cricetulus griseus
ttcatctgcacccagagagctgccaggaatatgtcgtaccaaggcttcactaagcacaatggagtggtgcctgttgtgaaggaattaatgggcgaggaaatccttggggctgcactttctgcacccctgacatgctataaggtggtctacgttctccctatgctcaccattaaggaggataaaggcactggtgtggtcacgagtgttccttctgattcccggatgatcttgcagcactcagagacttggatggatttaaaggacagaagatccaaaacgtaaagaagactattcagaaaaacatggttgatgctggagatgcacttatctacatggaaccagaaaaacaagtgatatcgaggtctgcagatgaatgtgtcgtggccctgtgtgaccagtggtacctggattatggagaagagagctggaagaaggagacatttcagtgtttgaagaacatggaaacattctgcgaggagagcaggaagaactttgaagcttccttagactggctacaagaacatgcttgttcaagaacctatggtttaggcactcgtctgccttgggatgagcaatggttgatcgaatcactttcagattccactatttacatggcattttacacagttgcacacctgttgcaggggaatgacctgcatgggcaggcagagtctccactgggcatcagaccccagcagatgaccaaggacgtttgggattatgtgttcttcaaggatgctccatttcctaagactcagattccaaaagaaaagctggatcagctgaagcaggagtttgagttctggtatccagtggaccttcgagcctctggcaaagatctgattccaaatcatctttcgtattacatttacaaccatgtagccatgtggccggaacaaagtgacaagtggcctgtggctgttcgagcaaatggacacctgctgctcaactcagagaagatgtcaaaatctacgggcaacttcctcactttgagccaagctgttgacaaattttcagctgatggaatgcgcctggctctggctgatgctggcgacactgttgaagatgccaattttgtggaagccatggcagacgcaggtatcctccgtttgtacacatgggtagaatgggtcaaagaaatgctcgccaactgcagcagcctcagaagtggacctgccagctcattcaatgatcgtgtatttgccagtgaaatgaatgcaggaattataaaaacagatcaaaactatgaaaagatgatgtttaaagaagctttgaaaacaggtttttttgagtttcaggctgcgaaagataaataccgtgaactggctacagaagggatgcacagagagcttgtgttccggtttattgaagttcagaccatccttctggctccattctgtccacatttgtgtgagcacatctggacactactgggaaagcctgattcaattatgaatgcctcatggcccgtggcaggtcctgtggatgaatccttaatccgttcctcacagtatctcatggaagtagcacatgaccttagattacggctcaagaattatatgatgccagctaaagggaagaagactgacaaacaaccaccacagaggccctcacactgcaccatctatgtggcaaagaattaccctctctggcagcatatcaccctgtcggtcctgagaaaccactttgaggccaatggtggaaaattgcctgataacaaagccattgcttctgaactaggcaatttgccagaattgaagaaatacatgaagaaagttatgccatttgtggccatgattaaggaaaacatggagaagaaagggcctcgagtcttggatttacagttggaatttgatgagcaggcagtacttatggagaatatagtctatctaaccaattctcttgagttagaacatatagaagtcaagtttgcctctgaagcagaagataaagtcagggacgactgttgtcctgggaagccgcttaatgttttcagaacagaagctggtgtgtcaattttcctagtaaatccccagccatccaatggccacttctcaaccaaaattgatgtcaggcaaggagacagctgtgattccataatcagacgcttaatgaaaatggaccgaggaatcaaagatctttccaaagtgaaactgatgaggtttgatgatcctctgctggggcctcgaagagttccggtcctagggagagagcacagtgagaagacgctcatttctgagaatgctgttttccatgtggacctagggagcaagaaagttcacctcaccgagaacgggctacgcactgatattggcgacacaatagtctatctggttcactgagctcatgcaaattggactaataaactaggcatctttttcttaaaaaaaaaaaaaaaaaaaaaaa

SEQ ID NO: 1143 - DNA, 2405 bp, Cricetulus griseus
gaagatggcgacggccttgagcgaggaggagctggacaatgaagactattactcattgctgaacgtgcgcgagggaggcctcttctgaagaactgaaggctgcctaccggaggctgtgtatgctgtaccacccagacaagcaccgggacccggatctcaaatcccaagcagagcggctgtttaaccttgttcaccaggcttatgaagtgcttagtgatccgcagacgagggccatctatgacatatatgggaagagtggcctggagatggaaggctgggaggtggtggagagaaagagaactccagctgagatcagagaggagtttgagaggctccagagagagcgtgaagagcgcaggctgcagcagcgaaccaacccaaagggaaccatcagcgttggagtggatgccactgacctttttgatcgctatgatgaagactatgaagacgtgtccggcggtggctttccacagattgagattaataaaatgcacatatcccagtccattgaggcacctctgacagctacagacacagccatcctgtctggaagtctctccacccagaatggcaatggcggcggttccattaactttgcactccgacgagtcacgtctgcaaagggatggggagagttggagtttggggccggagacctccaggggcctttatttggtctcaagctgttccgtaatctcacaccaagatgctttgtgacgacaaactgtgctctgcagttttcatcccgtggaatccggcctggccttaccactgtcctagctcggaacctggacaagaacaccgtgggctacctgcagtggcggtggggcatccagtcagccatgaacaccagcatcgtccgcgacaccaagacttgtcacttcactgtggccttgcagctgggaatccctcactccttcgcactgatcagctatcagcacaagtttcaggatgatgaccagacgcgcgtgaaagggtccctcaaggcaggcttctttgggacaatagtggagtatggagctgagagaaagatctcccgacacagtgtcttgggtgctgctgtgagcattggtgtcccgcagggtgtgtctctcaaagtcaagctgaacagggccagccagacctacttcttcccaattcacctaacggatcagctgcttcccagtgctgtgttctatgccaccgtggggccgctggtcatctatttggcaatgcaccgtttgatcatcaaaccatacctcagggctcagaaagagaaggaactggaaaagcaaagggagaacacagccagcgacatcctgcagaagaagcaagaggcagaggctgctgtgcggctgatgcaggaatctgtccggagaataatcgaggcagaggagtccagaatggggctcatcgtcgtgaacgcctggtacgggaaatttgtcaaggacaagagcaggaagaacgagagggtaaaggtgatagacgtgaccgtgccgctgcagtgcctggtgaaggactccaagctcatcctcaccgaggcctccaaggctgggctgccagggttctatgacccgtgtgttggggaggagaagagcctgcgagttctgtaccagttccgaggcgtgctgcaccaggtgatggtacctgacagtgaggccctgaggataccaaagcagtctcacaggatcgatacagatggataaactacttgagaacctgagtaaaaagaggctacaaaaatattctcctgggagtctacaaatttggaagcagggaaacccagacatgagatgttttttagtttattcctcaagaaggtggcactgtaccaattatgtgaagggacatgcagacagcctagcttcgtgggtgctttgggtaaggactgaggcgccccaccctggccaggccacatggccatctctccccaaggatcatgttcctggagggcagggcccctggtcctcatcatgagtgaccacacatagcagctctctggagttatttggaacattctaccctcacacatggaactgctcttcctgaagtccaggctgcccgtgggaaacatggaaaggagggaaggtgtcatgtgccgcccagaagacgtcccacaagccacctttctcttctgaaacattacagagtggactgaagaggactgtgggtttataaaactgctttttatctgagaacaacaagtttggaaactagtctctttcttcctacttttccagagcttctcaaatcattcctccacgccctgacttgggacagaggatgttctttgccccagattgatgtgcagtttgcactgttgcatgagcccaactcagtggcctgtggctccctgggccttgctgccccttctatgtgaagctgactggcagcactgcccaacaataaacctgacctgaaagctg

SEQ ID NO: 1144 - DNA, 2405 bp, Cricetulus griseus
agcatcccctaggagtccaaccctcacattcgaccgtcggctctgttccttcagcgcctcagagctgcactttggtctcgaacccctcagcacttcagccactggcggcgatgcatgtgattaagcgagatggccgccaagagcgagttatgtttgataaaattacatcacgaatccagaaactctgttatggactcaatatggactttgttgatcctgctcaaatcaccatgaaagtaatccaaggcctgtatagtggggtcaccacagtggaactggatactctggctgctgagacagctgcaaccttgactacgaagcaccctgactatgccatcttagcagcaaggattgctgtgtctaacttgcacaaagaaacaaagaaagtgttcagtgatgtgataggaagatcttcacaactacaataaatcccctactctgttcaatgctgggaccaaccgcccacaactgtccagctgtttccttttgagtatgaaagatgacagcattgaaggaatttatgatactctgaagcagtgtgccttgatttctaagtctgctgggggaattggtgttgctgtaagttgtattcgggctactggcagctacattgctgggactaatggcaattcaaatggccttgtaccaatgctgagagtatataataacactgctcgatatgtggatcaaggtggaaacaagcgccctggggcatttgctatttacctggagccttggcacttagacatctttgagttccttgacttgaagaaaaacacaggaaaggaagaacagcgagcccgggatctcttctttgcactttggattccagatctcttcatgaagcgagtggaaactaaccaggactggtcattgatgtgtccaaatgagtgtcctggtctggatgaggtttggggagaggaatttgagaagttatacgaaagttatgagaagcagggtcgtgtccgcaaagtcgtgaaagctcaacagctttggtatgccatcatcgagtctcagacagagacgggcaccccatacatgctctacaaagattcctgtaatcggaagagcaaccagcagaacttgggaactatcaaatgcagcaacctgtgtacagaaatagtagagtatactagcaaagatgaggttgcagtttgtaacttggcttctctggctctgaatatgtatgtcacaccagaacatacgtatgactttcagaaactggctgaagtcactaaagtcattgtccgaaatttgaataagataattgatataaactactaccccattccagaggcacacttatcaaataaacgccatcggcccattggaattggggtacaaggtctagcagatgctttcatcctgatgagatatccatttgagagcccagaagcccagttattgaataagcaaatctttgaaactatttattatggagctttggaagccagctgtgacctagccaaggagtatggcccctatgagacatatgagggctccccggtcagcaaaggaattcttcagtatgatatgtggaatgttgttcctacagacctgtgggactggaagcttctcaaggagaagattgcaaagtatggtgtaagaaacagtttacttattgccccaatgcctactgcttcaactgctcagattctggggaataatgagtccattgaaccttataccagtaacatctacactcgcagagtcttgtcaggagaattccagattgtgaatcctcacttactgaaagatcttactgagcgaggtttgtggaatgaagagatgaagaaccagattattgcatgcaatggctctatccagagcatatcagaaatccctgatgacctgaagcaactctataagactgtgtgggaaatctctcaaaagactgtcctcaagatggcagctgagagaggtgctttcatcgatcaaagccagtcattaaacatccatattgctgagcctaactatggcaaactcactagtatgcacttctacggctggaagcagggcttaaagactgggatgtattatttaaggacgagacctgcagctaatccaatccagttcacgctgaacaaggaaaagctgaaagacagggagaaggccctgaaggaggaagaagagaaggagaggaacacagcagccatggtgtgctccttagagaacagagaggagtgcctaatgtgtggatcctgagcaaaaacaagacaaaaaaccaaacccagctttgatattaagaatcaaagtagaggctttgggaatgcagaagaaccttcttggagatagatggagacttaggaagtctcgtcgtcctccagcattccctgtctggccatttcagtttggacaaagagacttagttctgctttgactgatttattagaactaaaatcaag

SEQ ID NO: 1145 - DNA, 2405 bp, Cricetulus griseus
  modified_base (594)..(594): a, c, t, g, unknown or other
  modified_base (2283)..(2283): a, c, t, g, unknown or other
tgggtactcggccacgattggactccatgagctctgtggaagaggatgactatgacacatttgacttgatattgattcagacaaaaatgtcattcgcaccaagcaatatctctgtgtggctgatctggcacgaaaggacaaacgtgttttgcggaaaaagtaccagatttacttctggaacatagcaaccattgcggtcttctacgcccttcctgtggtgcagctggtcatcacctatcagacggtggtgaatgtcacagggaaccaggacatctgctactacaacttcctctgtgcccacccactgggtaacctcagcgccttcaacaacatcctcagcaacctgggctacatcctgctggggctgctcttcctgctcatcattctgcagcgagagatcaatcacaaccgggccctgatgcgaaatgacctctatgctctggagtgtgggatcccacctccattcatgtacatgattgctggcctctgcatgctgaagctctaccacgaaagcgggcacccagatatcaacgccagtgcctacagtgcatatgcctgcttggccatcgtcatcttcttctccgttctgggcgnggtttttggcaaagggaacacggccttctggatcgtcttctcggtcatccatatcatttccaccctgctcctcagcacacagctctactacatgggccgctggaagctggactctggcatcttccgccgcatcctccacgtgctgtacacagactgcatccggcagtgcagtgggcctctttatatggaccgcatggtactcctggtcatgggcaacattatcaactggtctctggctgcatatggactcatcatgcgccccaatgactttgcgggaacacaaccgtgactgcatcctgcttgacttctttgatgaccatgacatctggcacttcctgtcctccattgccatgtttgggtccttcctggttttgctgacattggatgatgacttggacacagtacagcgggacaagatctatgtcttctagcagcatactaggacccaggcttcacctcatggggctctgagcgcctctgcatcacctgccaggtgccaccatagcaccaagggtgtgagtcccaactctgctgcccagtgttggatggtgtggcaggacttggagattccagcccaggcctgactcaggacagttgctggtggcaccgagccttgcagttgcctctgctgtggaagaggcctgctccccatcccccaaacactggccaaattgctgctttcttctcagtgttgggtcctccccaggacccttgtctgtccatccgttttgtctatccactggctctccgtttgtccctttggagaaggaaggtgggaaggcaatgccctatcccatttcatgccttcattctccctcctctcagtgcaggaccccttcccccccagcccgcccttgctctcatgctctgctctagaaccctggtctggtgcctgattctctgtccagcaccaggaccccagttctctctgggtctacagctggctgctatcactgcccactctggcccaccaggatggatgcaggtaggagactttgggggccggccagctggtgccaggtttatggtgctaaggcctgcaagggcctaggtacaaccctcctccctctaccctgtgcttagagctggctcttgagcagtgagtcagtccagtttgagtctgatctgggggctgaactcagaggtcacttctcatccgaccagctgccggaatgatgccagcaccagggttggtgagaagtggcaactcagtgtccccttgcacacccacagtcctgccaagccccagatggggacctctcagtgccattgacactgcccaagaatgtccagaggccatggaggaatggtgccaagcacacagccccttttgcctctttcacgggagcaggaaccccagtgcctgttttagaaagggagggacatgccaggtccctgtttgttcctggccctgcctcactataggactcagggctggcttctgagtttccgtccagtatttagccaagttctgtgttagtcatatgggcctaagagccttggtgtttacatggagtcacccagctctgggccctggccactctggtccttggcgtttacatggagtcacccagctctgggccctggccactctggtccttggctccatttcactccaccaagtccattccagatgccaagggggttggggtcctggaatgtatttcattctgtccaccatgtttttanagctctcgggctgggagaagaggcaggtctgggtctttgtttcatagctctgttctgtgtctcatgctatggttgcaattctgtttctatgaatgagtacattcaataagacaaccagacct

SEQ ID NO: 1146 - DNA, 2405 bp, Cricetulus griseus
ctgaagatgagttaacaatgccttgtctgggattattggcaaatctttgtcggcacaatctttctgttacaaacaacaaataaaaactttgagtaatgttaaatccttttatcgaactcttataagcttcctagcacacagcagcttgactgtggttgtgtttgcactttcaatattattcagtttgacactaaatgaagaagtaggggaaaagctttttcattctcgaaacattcatcagactttccagctaatatttaatattctcataaatggtgatggtaccctaacaagaaagtactcagtcgacctgctaatggatctccttaagaatccaaaaattgctgattatcttaccaggtatgaacacttctcttcgtgtcttaatcaagtactagggcttctaaatgcgaaagaccccgcttcttcttcaaaggttttagaattacttcttgcattctgtgcagtggctcagctgcgccatgtgctcagtcagatgatgtttgaacagtcaccatcgagcaacagcattctgggaagccgtcctaagagcttagaacctactgtggctctgcttcgttggttaaaccagcctttggatgcatctgaaaactgttctgttttagcactggagttgttcaaggaaatctttgaggatgtcattgatactggtaactgttcctcgactgatcgttttgtgaaccttctgctgcctacaatccttgatcagcttcagttcacggaacaaaatctggatgaggtcttaacaagaaaaaaatgtgaaaggatggtcaaagccattgaaatcttattgactctgtgtggagatgacactctgaaaatgcatattgtaaaagtattgactactataaagtgcaccacattgatagaacaacagtttatgtatggcaagattgacctgggatttggaacaaaggtagcagattctgaattgtgcaagcttgctgctgatgtaattttgaagactcttaatttgatgaacaaactaaaacaattggttcctggtatggaagtaagcttctacaaaatccttcaggatccacgtttgattactcctttggcttttgctttaacatcagataatagagaacaagtacagtctggattgggaatattgctggaagctgctccactgccagatttccctgccttagtacttggagaaagtatagcagcaaacaatatatataggcagcaagaaaccgagcatctgcccaggaaaatgcctttgcagcccttaaatcacttttttccagcaacagcaaagtgcttaacacctcctctttcaaaagataatgctccttcattgaatattgaggaactaatagaaaaacttcaggctggagtaatggtaaaggatcagattaatgatataagaatatctgacataatggatgtttatgagatgaaactttccacattagcctctaaagagagcaggttacaagatctcctggaagcaaaagccctggctcttgcacaggctgacagactgatcgctcagtatcgttgtcaacgaactcaagcagagacagaggcacgaacacttgcaggtatgttaagagaagctgagagaaaaaacgaagagcttggtatattgttgaagtcacaacagctggagtcggaaagagcccagaatgatattgagcatctctttcaacacagtaagaagttagagtctgtggctaaagaacatgaaatacttacaaagtcctacatggaacttgttcaaagaaatgagactactgaaaagaagaataccgacttacagatcacttgtgagtccctgaacaaacagattgagacagtaaaaaagttgaatgagtcactcaagcagcaaaatgaaaaaactattgctcagttaatggagaaagaagaacagagaaaagaagtccagagccagttagtagacagagaatgtaaattatcaaatttgcataaaaaagcaatgtcccaagaagaaaagattaatgttttactaaaggaaaaggatgataagcaggaaaccattgatgtccttaggaaagaactaagcagaacagaacagataagaaaagaattgagtattaaggcttcttccctagaagtgcagaaggctcaattagaaggtcgtttggaagagaaagaatctttggtgaaacttcagcaagaagagttgaacaaacattctcacatgatagcaatgatccacagtttaagtggtggaaaaataagcccagaaactgtgaatctcagtatataaacattgtggctttagggaaattaaaatgaatacgtttgatgtattcatatattggaggtggcagtcaatgaaggaaattgtgacttctaaacagttatcatctgcttactcctattaacttagtaaaaattctaattgaatt

SEQ ID NO: 1147 - DNA, 2404 bp, Cricetulus griseus
ggagggaaattttgcaagttaaattgactccgcttgtattgaagccatttggaaacagcatcaatgtatacaacggggagcctgaacacacagagaagaatgacatatctcgtaaaaacaagcaggaaaaagtcattttgtcaccagaaggcagtttcatagctacacagtacagccttcgtccaagaagagaagaggtcacggttaaagaaatagagtccaaggaacaaaagcgtcttcccaaagtacctgcacctttggaaacctttcaagtgaccactccgcagaggaagagcttggagtttggaggagtacctggtgcatcgctcatcatgctcggcctgcctgcctgcctcttcctgctgctgttgcagtgcaggcagaaggaccccagcctgctgagtttccctcctcctctgccagctttgggtgaactgtgggaagccagagtgtgtggcatctacctcctctggttttcattcaagctctcttttaccttctgccaattgggaaggttgtagaaggaacacctcttgttgatggaagaagactcaagtacagactaaatggattcaacgcttttgtcctgacatctgccatcgtgggaacatctctcttctggggcatagagctgtgttatgtgtatactcacttccttcagttcgcacttgcagccactgtgttttcagtggtcttgagtgtttatctctatgctcgatctttgaaggcccctagggatgagctgtcacctgccagttctggaaatgctgtctacgatttcttcattggccgtgagttaaaccctcgaattggtgtttttgacctcaaatacttttgtgaattgcgtcctggattgattggatgggtggttgttaacttggtgatgcttttggctgaaatgaaagtacaggaacgtggtaccccatctttggcaatggtcttggttaacagtttccagctcttgtatgtggtggatgccctctggaatgaggaagcgctgctgaccaccatggacatcatccacgatggctttggcttcatgctggcctttggggacttggtgtgggtcccattcacctacagccttcaggccttctacctggtcagccatccccatgacttgtcctggcccttggcttctgtcatcattgctctgaaactttgtggctatgtaatctttcgttgtgcaaactcacagaaaaatgcattccggaagaatcccactgatccaaagcttgcacatttaaagaccattcatacgtccacgggtaagagtctgcttgtctctggatggtggggctttgttcgccatcccaattacttgggtgacctcatcatggcgctggcatggtccctcccatgtggctttaaccacctcctgccttacttctatgtcatctacttcactgcgttgcttgtccaccgcgaagcccgtgatgagcaccagtgcaagaggaaatacggcctggcctgggagaagtactgccaacgagtgccctaccgcatactcccctatgtttactgacccaggaccatagagccaaatagtgaaccttttaatgtaagtttttttgccatttggtttttcataagtgaaaacccttaaagcacatctatgcttcatagtacttaaagagacataatgaaaattctgtctctaaatatatgtccacaaaccccagcccagtattggtggtatatgtgaagagtaagcagatccttaagcagggcctgcttaagggtgaccatttagagcagtggcttgacctcagcctttaaaagtgcatttggaaatgtaaatacatagcttacttttatgtaatatatggtgacttgtgatttttctgtacagtttgtcaatgtgagataattgtcaggaactaagtagttttttgacaaaaacattttcagtgttttaaattaagtgtgtgtaaagcaattagaattcatttaaagttaaaacataggaaagttatttttctttatccaaagtttgtgaatttggctttgctacctcaatttgcaggtgtgtttgcctttataaactgttgcaaatagaaaaaaaaagtatatttttggagtaacagcactatttaaacatttttacatacattggtattagaaaaattgccatttcaggctactatttttatatattttttgacttaaaattcaacagtgtttttgctactgttaaggtcatacagtttatactattttgtatcatttatgtcttcagaactccctaaaaaggagttctacctgaaacaactttaagctgtcctggagcaggacaggtggcaaattctctagacttttatattcaaagctatacatggtcctcagcatcttaaacacaaagatgtaattatagtgtgtacattttgggtttcgattacacata

SEQ ID NO: 1148 - DNA, 2404 bp, Cricetulus griseus
  modified_base (101)..(101): a, c, t, g, unknown or other
gcagcttgagctgagactcagagattttcttttggatattgaagacaggatctatcaagggacattaggagcaatcaaggttacagatagacagatctggngatcggccttagagaatggacgatatgagctgttaagtgaggagaacaaggaaaatggagtaattaaaactataaatgaagatgcagaggagatggaagttgaacaagcaagggtcatagtgagagacagacaaaaccagaaaactcctagtgccgtctcaactaacagcagtacaccacagtcagtgagcagtgtggttcactatctggccatggccctgtttcagatagagcagggcattgaacggcggttcctcaaagctccacttgatggcagtgacagcggacgttcttataaaaccgtcctggaccgttggagagaatctctcctttcctctgctagtctgtcccaagtctttctgcatttatcaactttggatcgcagtgtgatgtggtctaaatctatactgaacgcacgctgcaagatctgccggaaaaagggagatgctgaaaacatggtactctgtgatggctgtgatcgagggcatcacacctactgcgtccgaccaaagctcaagactgttcctgaaggagattggttttgtccagaatgtcgaccaaagcaacgttccaggagactttcctcgaggcagagaccgtccttggaaagtgatgaagaggtggaagagaatatggaaggtgacaatgaagtcgatgatgatgatgaagagggtcaaagtgaggaggaagaatatgaggtagaacaagatgaagaggactctgaggaagaggaactcagcccacccaaacgaggaagaccacaagttagattgccaattaaaacaagagggagacttagctcttctttctcaagtcgcaaccaacgacaagaccatggaagatacccttcaaggagtcagcacagcacacccaaaaccactgcttctcctaagacatctggcaggagcctaaggaagatcagatctgctccttctacagaaactcgctctttaagaattgctagtcgttccactcgccacagtcctggcacactgcaagatgtgtttgtggaactgcttagtcctccgggaaaacgaaaagtacggaagagcgctgataatacccaagaacacagtcccagcttcactaacttcaaagtcagcacctcaagatcaagtggacagttgacacctttaaacactgccacaggactttctctccaagacagtgaatctaagagaagaggcaggaagagacaatctacagagtcatctcctgtaccactgaatcgaagaagttccggccgacaaggaggcgttcatgaattgtctgcctttgaacagcttgttgtggaattggtacggcatgatgatagctggccctttttaaaacttgtttctaaaatccaggtcccagactactatgacatcattaagaagcccattgccttaaatataattcgagaaaaagtaaataaatgtgaatataaattagcatctgagtttattgatgatattgagttaatgttttcgaactgctttgagtacaaccctcggaacacaagtgaagcaaaagctggaactaggcttcaagcattttttcattatcaagctcaaaagcttggactccatgtctcatccagtagtgtggaccaggttagcgtgccagtcgctgcaaaaaagtcacgggtctagttttgtccttctaaaggctgtctgtgaagaaaaacatgaagcgttcataaaaatggaacattaaatcatgctctaaagcagatgtatgtataaagcaataacagctcgtctaccacatccaagtgtggcctgcactgtagtctcaattttaatattaagcactcaggagaatgtaggaaaggggtttcctttgctacagtttttgttcagtatctactaagtttaatagatgcattggataaagtcctggtttacagaggttttgtacattttgagaatcattcatgtgttcaggtatcttggaaaatatttttgatctatgatttattttgttattgaccttgtaggagttatgatattaaagaggacttatctacacagatgagtcttctggatcacagtttggagaacgtgtgtcttcagacttctttaacaggcacattgtttcaacactacacatgaatgaatccagttttctaccctgacttgctgtagccagtgctgactgaatttatcaactagatatttatttagcattcaaagtcatttgtgaatttgttttgtatttataaaatttatacttggaaaatgttctttaattttttaaaacattttactatggttttgttttattttcttccaaacattcttaatgatttaaaaataaaa

SEQ ID NO: 1149 - DNA, 2404 bp, Cricetulus griseus
ctgtgctgctgagctctgatttgcaggctgaggaatggaattgccttcgcctggtctaccagataaccgcacccctgggctctgtatcacatcccagccagctgaacctctacttgagatttgaggatgaaagttttgatcgattgctttggtctactaaggagccatcagacagctggctcatagccagtctggatcttcagaacagctccaagaaattcaagattttgatagaaggtgtcctgggacaaggagacatggccagcattgccctctttgaaatcaagatgacagccggctactgtattgaatgtgactttgaagaaaatcatctctgtggctttgtgaaccgatggaatcccaacgtgaactggtttgttggaggaggaactatgaagaacacccactccatcctcccacaggatcacacgttcaggagtgagcagggccactatatgtacgtggactctgtctatgtgaagcacttccaggaggtggcccagctcatttccccacgtgaccacagcccccatgtctggctgcctctcgttctattatcagcttcagcaggggaatgacaatgtcttctccctttacactcgggatatgactggcctatacgaggagatctggaaagtggacagtccaggcagtgctgcctggaaacttgcagaggtggagttcagtgctccttaccccatggaggttatttttgaagttgctttcaatggtcccaaaggaggctatgtggccctggatgatatttctttctctcctgttcattgccaaaatcagacagggcttcctttcagtgctgtggaaaccagctgtgactttgaggaagacctctgcaacttttatcaagataaagacggtcccggttggaccagagtgagagtgaaacccaacatgtatcggattggggatcacacaacaggagcagggcattacctgttggccaacactaaatttacgtctcaacctggctacattggaaggctttacggtccctccttaccaggaaacatgcagtactgtgtgcgttttcattatgccatctttgggtttttgaaaatgagtgacaccctagcggtttatatctttgaagaaaaccatgtggttcaagagaagatctggtctgtgctcgagtccccgagggctgtttggatgcaagctgaaatcagctttaagaagcccatgcccacaaaggtggtttttatgagcctatgcaaaagcttttgggattgtggacttgtagccttggatgacattaccatacaactgggaaactgccggtctccagagagacttccacctccacctggagagtgcactttcgatcaagatgaatgtgcctttacacaggagaaaagaaaccggagcagctggcacagggggagaggagaaacacccacctcttacacaggacccaagggagatcacactactggggtaggctactacatgtatatcgaggcctctcacatggtggtcggacaaaaagcacacctcttgtcctggccactgagaggtgtccctgggaaacactgcctgacttttttctaccacatgtatggagcaagaactggcctgctgagcgtttttttgaaaatagaagaagagagtaaagagtccctgttgtggagaagacgaggagagcagagcatctcctggctacgggcacgggttgaatacagctgcaggacgcaacaccagataatttttgaagccattcgaggagggtcaataagaagtgatattgccattgatgatgttaaatttcaggcaggaccatgtacagaaatggaagagacaactcaacaatcatcaggatattctgaagacttaaatgaaattgagtattaagaaattatatacattggattaagtagacaaaatttgtacctctcttcaatcaaagtgaaaacagaagaaatggatactggatgttcttaactattgaataagttgaaatgactttggaacacccccttttgttacttttgaaaatatatatgtatattgactcagggcttaccttttttattccccagcacatttgacaactgttactagaagtacaggctactggttttacatagaccatttcatcttaattttggtgccagttaaaaatgcaaccgtgctatgttaaagtcatttcaaagtgcacatataaagggcataatcaagatgaatgtgcttatttaagtctgcattcagtgaatgtattggaagactaggtattgatggttttccttttgagtttcaagtacaaaaatttttcttaaataatgcaaggtgtcggtaatatctgcaaaatgaatgcagtttttttatggtgacacattactctggaaataagattgtatatatgtgtgcagtttagtggccaagtagctgt

SEQ ID NO: 1150 - DNA, 2403 bp, Cricetulus griseus
  modified_base (2385)..(2385): a, c, t, g, unknown or other
  modified_base (2389)..(2389): a, c, t, g, unknown or other
cggccgctgaggaaggttgcgatgctggggtcgaagcggaccgggaactggaggagcttctggaaagtgctcttgatgatttcgataaagccaaaccctccccagcaccccctcctaccacctcggcccccgatgcttcaggaccccagaagaaatcgccaggagacactgccaaagatgccctcttcgcctcccaagagaagtttttccaggaactgttcgatagtgagttggcttcccaagccactgcagagtttgagaaggcaatgaaggagctggctgaagaagagccccacctggtggaacagttccagaagctctcagaggcagctgggagagtgggcagtgatgcaaactctcaacaagaatttacttcttgcctaaaggagacattaagtgggctagccaaaaatgccactgaccttcagaactcaggcatgtctgaagaggaactgaccaaagccatggaagggctgggcatggatgacggggacggggatgggaacatcctccccatcatgcagagcatcatgcagaacctcctgtctaaggatgtactgtacccgtccctgaaggagatcacggaaaagtatccagagtggctgcagagtcaccaggagtctatccctccagaacagtttgagaagtaccaggagcagcacagcgtcatgggcaaaatatgtgagcagtttgaggcagagacgcccacagacagcgaggctactcacagggctcgttttgaggcggtgctagatctcatgcagcagttacaggacttggggcatcctccaaaagagctggccggggagatgcctcctggcctcaactttgacctggataccctcaatctatcgggcccaccaggtgccaatggcgagcagtgtctgatcatgtgaaacacaacacgttttcctccctgagtcccagacctggggaacatctggagtcagcagaactattgggaactgaggcaggaatgtcgtctctgggagctggctgccccacactctccatcccattcaagactgtgccctgccagctgtcacttcttcccactcccaaaaataatggtctatatggctgtactcatgttcccctttattcccagggacttcgtgccttgtttctactccctctcttggatctggggagcaggagctgagtcctaagactttgtgtttgtttctattaggcagggcttctgggaatgaggagaaaatgtagcttaccctggggctgtaggtttgtcaccacatctccttgccttcatttcgagctctctgaagggaaaggaattttgcacttaacctgtggtcaggttggaagagaagccctgggcttttcctgtccctaggtgctgcccacttaattcccctttcttcctgagaactcaagttgctacctaccttggttctttcaacagctctggtttgggtgaacccagctcttgaccttccttggccccttgactgtcctcttacctcctctcgttttagattcttattttactccagcccctctgaaccactgtgactgatgaaggccaatcttgttccctttcatctactcctgtgtcattctccctagacccttcccttccctggccaacacgtaattgtagtgtcagagctggtaaatgagtggccatgctacccagatacattctggcttacttgagacatcagattccctagaatccttggttcaggaagatgcttgggaatggggtgcagcctgagtcttttttcctgcaagccccaggggacagtatctaataaatactctgagcgcatgtgtgggttatttttcatccaggtctgtttctgatcttcctgagcttctataagctgcagagtaggaagtgttaggagatagttctgtgtaatgttatgctagtttctaccatgaccctgccctccagcttagctgatattttgttaacatgttttctaaattacctaggtttaaattgaccttctcagtaggtctaaggaccatgattgccatatattttatggatattcattttagtccacctagctgtctagttcacttggaaaaataacttaaaatatataacattaatttattctttgggaattttatacatgtatacaatgtattttgatcataatcacccagactcggggtctgaatttgagactcctccatgctctgagaaaggaaaaaagtacaagctgatttgtgatgatgactggggcctgaactgccaataatttattgacattcctacaaaagcttgacaaggctaggtgaggagataggaacaagaatgacctgctcttttaattgtgctcaataccatgctgtcctttattctcacttctggtggtgctggcatggaccaccatgtttttttttttntttntttaattttaattt

SEQ ID NO: 1151 - DNA, 2402 bp, Cricetulus griseus
  modified_base (570)..(570): a, c, t, g, unknown or other
tctgaggaccagcctaccccctccctccagctgcctgcctcttctaagccaatgagtatacccggtgctgccaatccctgttctccaggacaattctcttctacccacctgcctggagggggcactaagagaccatcaggagactctgaagaaatgccacagagtcccaacagggctgggacaaccaaaacggagaggaagacctcctagcaagttcttcaagcaggtggaacagcattacttaatccagctgacagcccagcctatcccccctgagatgtgctctggctggtggtggatccgagatcctgagacactggatgtcatgctcaaggcactacatccccgaggcatcagggagaaggcacttcacaaacaccttagcaagcacaaggactttttgcgggaagtttgcttacagcccttaactgatcccatctttgagccccataagccgcctgccatggaggaaggatttatgagcagcaggtagaggaagaattctctcagaggcctaggtttccaaacgaaggccagaagcggaaaagcagtttccactgaacttcccanagggtgacagccgccgacggcgggtgctgtcaaggaaccgagaaagtccagcagtgtctcagtgctcagaagacggcctgtctccctccaagagacggcgattttcaatgagaagccaccacagtgatctcacattttgcgagatcatcctaatggagatggagtcccatgacgcagcctggccttttttggagcctgtgaaccctcgcctggtgagtgggtaccggcgagtcatcaagaaccctatggatttttccaccatgcgagaacggctactccggggagggtatactagctcagaggagtttgcagctgatgcccttctggtttttgacaactgccagaccttcaatgaggatcctcttactcctcaaataagagatgcagagatgatgtttttattcccacctttcccattgttttggtaccatcactttttgttctttgggaaaacacaggaactgtttctctggggacaaggctgtctctcctcatggtcatttctgttccagcctcttcaaattgtgcaatcttttcagcaggaactctctctcctcacagtagcttcaagtctcaagacatgagaatctgcgaggaagggtagaactggatctttcttaaaccatgagtatctgggtttagttgtgttttccttccttgcatctactttatatccccaacagcaagcttccccaacagcaagctcctggagcacaggatgggtagagcgatgagagggtctggtctaccactgccctgtgtgactaagcccaggttaagcccccaacacatgagaggaaagctgctaactccaagctatagccatgggcctctggccccctgctttcctgctcagcagagcccctcccatcagaaattacgggtacttgcactggggaggtggctgctagctggcctaagcagagagctgaggcatccaagcaatgttccattggtgggggtggagggtgccaggtggggtggagagttccttgtactccagcagtactgaggggtgaggcagtgcaggttcctggggagccctacactcactccctatcgcactccctatcgactaaaactaaagtcgcctttctctgccaataaacctacaaaactttaatttttatttgagttaattttttttttgcttttaaataagaggtggattgaagaatatttgaattgactttatattatgcataaatatttatattttatctaaataactgtgccgtaacaaactttgtgttagtcagatgtttggaactgtttcccttggcataaaatgtactggagtcattcactgttggaggtgggagggggatgaggcctccttgtctgctttgtgctccttctcagctccagctctttcctagggaccaggcactcttaaggtgggggtggaggtcctagacttgatttgaagaagtgggggctgaaggggtcgtggggtagggcatgatcaaaggggccatttctcactttcctcattttcactgcccctcaagctaggtggattttctcttattgacagagtatttggtagggaaagcaggttaaaaataaagacacccacccctgccctttgtgtcccctccccggtaacagcaagaaaccatcaacaccaacaagtttccatgttcctttacaacaaaagggactgactttttatataaccaaatgtggtgttttagtgactttttgataatgtacagttttttgtgaatttaaatttatttctttctatatttttaggaccaatctcatttttaataaggtttaaaaaaaggaaaaaaagtactaagagaaaaaaaaaaacctacgttttt

SEQ ID NO: 1152 - DNA, 2402 bp, Cricetulus griseus
tggatacagagaggagatggtgcggtacctgcggtcagtgcagctccctgatggtggatggggcctgcatgttgaggacaagtccactgtgtttgggacagcgctgaactatgtggctctcagaatcctgggtattgggcctgatgatcctgaccttgttcgtgctcggaacattcttcacaaaaaaggtggtgcggtggccatcccctcctggggaaagttctggctggccgtcctgaatgtttatagctgggaaggactcaataccctattccctgagatgtggttgttccctgaatggttccctgcccacccctccaccctctggtgtcactgccggcaggtctatctgcccatgagctactgctacgccacccgactaagtgccccagaggacccactggttcagagcctccgccaggagctctatgtggaggactatgccagcatcaattggccagcacagaagaacaacgtgtcccctgatgagctatacactccacacagctggctgctgcatgtggtgtatggactcctcaacctgtatgaacgtttccatagtaccagcctgaggcagcgggctatcaaaatgctgtatgaacatattgtcgccgatgaccggttcactaagagcatcagcattggcccgatctcaaaaaccatcaacatgcttgttcgttggtcagtggatgggccatcttcctctgccttccaggagcacgtctctaggatcccagattacatttggctgggtcttgatggcatgaaaatgcagggcaccaatggatcacaggtctgggatactgcatttgctatccaagcactgttggaggcaggtgcacaccacagacctgagtttttaccctgcctgcagaaggctcacgaattcctgcgtctttcacaggtcccagacaactttcctgactatcagaagtattaccgccagatgcacaagggtggtttccccttcagcacactggactgtggctggatcgttgcggattgcacagctgagggtttgaagtctgtgctactcctgcagaagcaatgtccctcaatcagggagcatgtcccccgagagcgactgtgtgatgctgtggacgtactgttgagcatgaggaattctgatggagggtttgctacctatgagaccaagcgtggggggcatttgctggagttgctgaacccctcagaggtcttcggagacatcatgattgactacacatatgtggagtgtacctcagcggtgatgcaggctctgaagcatttccatgaacactacccagaccatagggcagcagagatcagggagaccctcaagcaaggcctggagttctgccgaaagcagcaaagagctgatggctcctgggagggctcctggggggtttgtttcacctatggcacctggtttggcctggaagcttttgcttgcatgggacatacctaccaagatgggtctgctcgtgcagaagtgtcccaggcctgcaacttcctcctgtcccagcagatggcagatggaggctggggggaggactttgagtcttgtgagcagcggcgttatgtgcagagtgccaagtcccaggtccataatacgtgctgggccctgatgggcttgatggctgtcaggcatcccgacatcactgctcaggagagaggaatcagatgtctgttggagaagcagctctccaatggagactggcctcaggagaacatctctggggtcttcaacaagtcctgcgccatcagctacacaagttacaggaacatcttccccatctgggccctgggtcgcttctccaacctgtaccctgacaattccctcgctggccacctttgaatttctgtaaacatgaggctggggatagggtcagggttggtgtctttaggcacttggcagtgtaggtttagttccgagactagcttcaggagggagtgaggctgtagagttttcatgaccagtgacttcctctggaggggagcagctggcttcttcaccgcctcctttgtctactgtgtaatgggcctctgtctggactcctgtttgctgggctgggggagttatggcaaccctatggtgctggtatgctcagagaaaggctcaatggggagtgaggcaagacccttgttcacagtgtactgagcagtggctattgtccctaggaactcccagtcatgaccagatcactgtatgaaataccagttttccagaaaggaaagacaaactcgctttatactaaaagtgtcactcaaagtggtttaaatgatcactgactcccttaataaacatcctgaaaataaaatattaaaaacaaaaaaaaaaaaaaaaaaaaaaaaaaaaaaaaaaaaaaaaaaaaaaaaaaaaaaaaaaaaaaaaaaaaaaaaaaaaaaaaaaaaaaaaaaaa

SEQ ID NO: 1153 - DNA, 2401 bp, Cricetulus griseus
ggtttgcagcgacggtcgcgcactcgctcccgggcggcggccgagtccacgggcggcagatgggagcccagggcgccgaagatgcgggcggtccgggccgagacgccgccggcgcggggcctcttccaggacgccgcattccccgcctcggactcctcgctctttttcaacttgtccacgcctctggcccagtttcgggaggacatcacttggagacggccccaggaaatctgtgccacacctcagctgtttccagataacccacgggagggacaggtgaagcaagggctgctgggggattgctggttcctgtgtgcctgtgctgccctgcagaagaatcaacacctcctggaccaggtcttccctccaggacagccaagctggtctgaccagaagtaccgaggtttcttcacctgtcgaatttggcagtttggacactgggagaggtgaccatagatgatcgtctgccttgccttgctgggagactgtgcttctcccggtgccagagagaggatgtgttctggcttcccttactggaaaaggcctatgctaagatccatggatcctatgagcacctgtgggcagggcaggtggcagatgccctggtggatctcactggaagcctggcggaaaggtggagcctgaaagacatagtgggagccagtgaccagcaggacagacccagcggcggggagcaaaggacttgtcggcaactactccgcctgaaggatcaatgtctgatcagctgctctgtgctcagccccagagcaggtgagttccatgcctttatcatctcagatctgcgggagctgtggagtcgcactggccagggtatcctcctgtttcggattcataacccttggggccgacgttgttggcagggtcctctggaggagaggggggtggaagggtggaaccaggtagatccagccgaggcgtctgagttgctggcacaactccaggaaggagagttctgggtggaggaagaggagttcctcagggaatttgacgaggtcaccattggctacccagtcacaaaggcaggccacctacagagtctctacacagagaaggtgctgtgtcacactcgggcactacctggcgcctgggtcatagggcagtcagctggaggctgccggaacaacagttgctttccctgcaaccccaagttctggttacggctcttggaacccagtgaggtgtgtgcggctgtccttcagagaccccggaggtgcttagtgggtcagacccgggcactggtgggtgccagccatgcaccagtgaatctcccaggcaaggactaccaggctgtgggcctgcacatctggaaggtagaaaagcggaaggtcagcctgcccagagtcctgtctgcaccccctgaggctggcactgcctgccatgcatatgaccgtgaggtccacttgcgctgtgagctctccccaggctactacctggtcgtccccagcaccttcttgaaggatgtgccagggcagttcctgctccgggtcttctccactgggaaaatctccctcagtgctgtcaggccggccaccaagggtgcgtcacctggaacagccctgcctgcaggcgaatgggagaccgtgcagctgcggggctgctggagagctggccagacagctgggggcagcaggaactttgcctcttacccctgcaatccctgcctccccttctccgttcctgagggtgctggtcctcgctacatccgtatcaccctgcaccaacactgccgactcagtgacagccagctccacccaattggtttccatatctttcaggtcccggtggatggtgagactcagaatgcatgttccctgctgctccaggagccgctgctaagctgtgtaccacatcgctatgcccaggaagtgagccgcctctgcctcctgtcagtggggacctacagggttgtgccctccacctatctgccagatacagagggtaccttcacagtgaccatagcaaccagaatagacagacagtccattcacagccaagagatgctgggccagctactccaggaggtctccttcatggcagtgatgaaagcctgactaagtacctgtgtgcttgctgtgacctggagcagccgccactgcctgcatctcagcatccaggcacatctccggccagttgtgagcctaggcttctcatcagctctgaggaccgactggatcctgaagtgaaaatagggtgctttgtcctgaatagaagacatcttggggtccagtgggtgctgcagggtggggctaggactcccaagtggcatcttcattcctcagtgaagaccaggagattcctggggcccaagacctgctgtggaagtctctgaagaatcctcttacccttcttgacttcagaagctttacaccaagcaggcaga

SEQ ID NO: 1154 - DNA, 2401 bp, Cricetulus griseus
gaacatgtctaacagtaacactactctaggagactctggaaataatgaaagaatacagaaaaaaaaactaggtggaagaatctgtaaacaaaagcaaatttataactaaaactccaagtaaggaagaagttgaaaaagagggtgaagatgctggtttgcgccaggagacacagagacggacatccagccatggtcatgccaggaaaagagccaagtccaattccaagctcaagttggtacgcagtctggcggtgtgtgaggaatcctccactccatttgctgatgggccactagacacccaggatataattcagttgcacatcagctgcccctctgacaaggaggaagaaaagtccacaaaggatgtctctgaaaaggaagacaaggacaaaagcaaagaaaaggtccccaggaagatgctgtccagagactccagccaagaatatactgactccactggaatagacctacatgaatttcttgtaaatacactgaaaaagaacccaagggacagaatgatgctgctaaaattggaacaggagattctggagtttatcagtgacaacaataaccagttcaagaagttccctcagatgacctcatatcaccggatgctattacaccgggtagctgcctattttgggatggaccacaatgttgatcaaactgggaaagccgtcatcatcaacaaaaccagcaacacgagaatccctgaacagaggttctcagaacacataaaagatgagaagaacacagaatttcaacagaggttcattctcaagagagatgatgccagtatggaccgagaggacaaccagactggccagaatggatatctaagtgacgtcagactctccaaagaagccttttcttctagctctcacaagagaaggcagatttttaggtgggaggccagatgcaaggcctcgtggttcagtacactccactgccttcataccaagtcccagtgggcagtgactcacagagtgtggtccagccgcctttccagcagcccatgctggtccctgccagccagtctgtgcaagggggcctcccagcaggaggtgtacccgtgtactacagcatgatcacaccagctcagcagaatggcacgagcccttctgtggggtttctgcagcctcctggctctgagcagtaccagatgcctcagtctccgtctccctgcagccccaccacaggtaccacagcagtactcaggagtgtccaccttctggaccagggtgtggtggtcatgcaactgaatgtccctaatgggccccaggcccctcagaatccatccatggtccagtggagtcactgcaaatactacaatgtggaccaacgaggtcagaagcctggagacctgtacaatcctgatggtggcccccaggccaatgcacaaatgggcagcagccccgtcacatctcctacccagtctccagcaccctctcctgtcaccagcctcagcaacgtctgcactggactcgggcccctgcctgtcctcacgccattcccccggcctgggggtcctgcacagggtgatgggcgatactccctgttgggtcagccattacagtacaatctgtccatctgccctcccttgctccatggccagtcgacttacacggtgcaccagggacagagtggattgaagcacggaaaccgagccaagagacaggcactcaaatctgcctccactgacctggggacagcagatgtcgtgctggggagggtgctggaggtgacagacctccctgaaggaatcactcgcacagaggcagacaaactcttcacccagctcgccatgtctggtgccaagatccagtggctcaaggatgctcaggggctgcctggtgcaggtggcggggacaacagtgggactgctgagaatggccgacactcggacctcgctgccttgtacactatagtggccgtgttccccagccccttggctgcccagaatgcctcccttcgcctcaacaactctgtgagtcgcttcaaacttcgagtggccaaaaagaactacgacctgaggatcctggagcgagccagctacccaataaatgggggaggggggctggcacagtaggagactcccttgccatgggtcccctttttccctgttggtccccctctgtttccctccttcccaccctcttctgccattttttatcttctcccaccatggaattaatttctgtcatattttttggtcaagtagaattgaaagggtcccacactctcctcttctcccatttcctcaccatccagtctccctcctctctggtcttcatgaatatatttatatggacagaattaagaaaagtaaattgatttccccattctctcacttccccatcttgtctccccaagccccacagagttaaaacttgggaccccc

SEQ ID NO: 1155 - DNA, 2401 bp, Cricetulus griseus
attcccgggaaaaactttgggcttgcaatttctgttttcaaagaaatcagttccctccagcatatacaggcatatctgaggtgaatcagcctgctgaattgatgcctcagttttcaacaattgagtacatgatccagcgaggtgctcgatctcctctgatctttctctattgtggttgacacatgtttggaggaagatgaccttcaagcactcaaagagtccctgcagatgtccttgagtctccttcctccggatgctctagttggtcttatcacttttgggaggatggtgcaggttcacgagctaagctgtgaaggaatctctaagagttatgtcttccgagggaccaaggatttaactgcaaagcaaatacaggatatgttgggcctgaccaagtctgctatgcccatgcagcaagcaaggcctgctcaacctcaggagcagccttttgtttccagcagatttctgcagcctgttcacaagattgacatgaacctcacagatcttcttggggagctacagagggacccatggccagtaactcaagggaagagacctttgcgatccactggtgttgctttgtccattgctgttggcttgttggagggtacttttccaaatactggagccaggatcatgctgttcactggaggccctcccacccaaggacctggcatggtggttggagatgaattgaagactcctattcgttcctggcacgatattgaaaaagataatgcacggttcatgaaaaaggcaaccaagcattatgagatgcttgctaatcgaactgctacaaatggtcactgcattgatatttatgcttgtgctcttgatcaaactggacttctggagatgaaatgctgcccaaatcttacaggaggccacatggtgatgggagattctttcaacacttctcttttcaagcagacattccaaagaatttttagtaaagacttcaatggagatttcagaatggcgtttggtgctacattggaagtaaagacctctcgggaattgaagattgcaggagccattggtccgtgtgtatctctgaatgtgaaaggaccatgtgtgtcagaaaatgaacttggtgttggtggcacaagtcagtggaaaatctgtggcctggatcccacatctactcttggcatctactttgaagttgtcaatcagcacaatgctccaattccccagggaggcagaggtgctatccagttcgttacgcagtaccagcattccagcactcagaagcgcatccgagtgaccaccattgcccgaaattgggcagatgcacagagccagctgaggcacatagaagcagcatttgaccaggaggctgcagcagtcttgatggcacggcttggagtgttccgggcagagtcagaggagggacctgatgtgctccggtggctggatcgacaactcatccgactgtgtcagaagtttgggcagtataacaaagaagaccccacatctttcagattgtcagactccttttctctgtatcctcagttcatgtttcatctgagaagatctccatttcttcaagtgtttaacaacagtcctgacgaatcatcctattatagacaccattttgccaggcaggatctgacccagtccctcatcatgatccagcccattctctattcttactccttccatggaccaccagagcctgtactcctggacagcagcagcattctagctgaccgaattctgctgatggatactttcttccaaattgtcatttatctgggtgagaccatagcccagtggcggaaagctggataccaggacatgcctgagtatgaaaacttcaagcaccttctgcaggcgccactggatgatgcacaagaaattctgcaagctcgcttcccaatgccacgttatatcaacacggagcatggtggcagtcaggctcgattcctgctgtctaaagttaatccatctcagacacacaataacttgtatgcttggggacaggaaactggagctcccatcctgacggatgatgtcagcctgcaggtgttcatggatcacttgaagaagctggctgtgtccagtgcctcttaaactgacactgcagcccggaaggtcaagacagcactgtcagactatggccacacttgatattaccttagcaacattcctttcacctttctggaagattctaataaataactcaaggaattttttatatgtatgccttcaggtcataatatgtcttcaggttataatttatttgtagtctttctctgcctgttttcctacacatgaaattatataaggtcataaatgttctgctaattgtagatgtttacttactttttgtaccttattgttttagagtcgatcataaaggaaataaatctggataagtagagcattggccaaaata

SEQ ID NO: 1156 - DNA, 2401 bp, Cricetulus griseus
  modified_base (53)..(53): a, c, t, g, unknown or other
gccgagagctgctctgagaagtcttcatttctgtgtaaagaagtcagacatgngttgatattaaagacaatgtggtggatgaagggttctacttcactcccaagggagatgacccatgcttgagctgtacctgccatcgaggagagcctgagatgtgtgttgctgccctgtgtgagcggccccagggatgtcagcagtaccgtcaaggaccctaaggaatgctgcaagttcatgtgtctggacacagatggtagcaccctgtatgtactccatggctagtgggatgcgcctggtcgtcagctgcatctcctccttcctcatcctctcgctgctgcttttcatggtccaccggctgcgccagaggcgccgggagcgcatcgagtccctgattggagcaaacttgcaccattttcaaccttggccgaaggatccctggttttgactatggcccagatggatttggcacaggcctcaccccactacatctttctgatgacggggaaggtgggactttccatttccacgaccctccgcctccttatacggcgtacaagtacccagacatggaccagccagatgatccaccaccaccctatgaggcttctatcaacccggacagtatgttctacgaccctgcagtgcagagacctccttggcagatctggaagactccacagacagcagcagtgccctgctggtgcctcctgaccctgcccagaatgggaataccccagctacagaggcaccaccaggtggagggcgccacccctgcagctccctcagtactgtggtttaggtggctcagctcatggccccagtgggctggagtatctacttcctgttcagaagacacctatctcagtgggaggcttgaagggtcctgtcatagcctggacctactccactgccacatcccaccagcagggggtgtgtacatagaaactgaagctaggcaccccaagagaggaacaagtgcctgtgtcatctttatctgagggctagcactctccatggcgtagctctgcatggctccccaggagtagactctagacccctgtgcagggttgggcatgctggcttttctctggatccctgtgctctgcttgctggcgaatgaccgttgggtttagccacccccctccccaccttgtctgtgccataaagggttgtttgtttgggaagagaattgactcaagtagacatcctgtgttgtgttatctgagtccacctcaccccatgaccactgctggagcccagcatctgctggccacatacatgcctcccagcccctccacagcactgggtacctgggctttttgccaagaggcccctgttgctaactccatgtggtggtcttgtctcccagcacaggcctttagtgtttctaagggttggagactaagcaagttctgtgcaatttttagcacatctgtatcttttctatgttggatgtctggatctttctgtatctatgtgtttcctcacatggccaaatgtttgcaggtgatgatggttcatgggagttgaagacaggccccactgccccacatgagccatttgcccttgggctgctcttagaccacttggtctgagctgcttcctagtctgtggtcagtgggactgtgactcctgtccagctaagaacatgagtgggtgcttgatcagacctgcacagttctaggcacattcttacactgcttggaaacctgtctccccttctcataatggagcatcttcagactggatccccagggctaactggaggtatgagatttgtccctggatagtctgtctcaaggctgaacccacaggctagctgctgcggacatcctctgccaaagagctcttgcctcctccgcccatgactgagaagaacgggaagttcagcgtacctccagcaagtattgagtgctgggcactgggcagccacgctccagagcagcagtgggcaactgtcttggtgccaggccacccagaagaatcataaggaccacacagcagtgcctctgaaggccatatgtacagactgaaattctctggggaccaaatgactgttggggttgccagatcttactggtgaataattccaggtccaggatttgctaaggtttgtctccttgcccatcccacaaggccccaagggacaggctcctgggaggcccctttcccaggactgccttgccactcttctgagaggctgggtgccctctgacctgccttgaagtggaatttgatactgtacattcattgtctcaatgcctgtttttacatactcctttcactaaaggttttagtttgggtgtatttttgatcgggttggcattaatcctttcttaagatgctgtgagaaccatttcatccaatgccaaataaacttgtgttatagaaaaaaaaaaaaaaa

SEQ ID NO: 1157 - DNA, 2400 bp, Cricetulus griseus
gctgccgcctcagataaagtacagaaaaacaagtccgcacggacatcagggctcagccagggaagccgcatggagaaactttggggtttgaatggacagacttatctagctggcggagattcgtgaccctacttaaccgaccaacagaccccgcaaacctggcggtctttcgttttctctttgcgttcttgatgctactggacattccccaggaacggggccttagctccctggaccgaaaatacttggacgggctggatgtgtgccgcttccccttgctggatgccttgcgcccactgccacttgactggatgtatcttgtctacaccatcatgtttctgggggcactgggcatgatgctgggcctgtgctaccggctgagctgtgtgttattcctgctaccgtactggtacgtttttctcctggacaagacgtcgtggaacaaccactcctatctctatggtttgttggccttttcagttgacattcatggatgcaaaccactactggtctgtggatggcctgctgaatgcccaaaagaaaaatgcccacgtgcccctttggaattacacagtcctgagaggccagatcttcattgtgtatttcattgcgggtgtgaaaaagctggatgctgactgggttgagggctactccatggaacacttgtcccggcattggctctttagtcccttcaagctggtgttgtctgaggagctcacaagcctgctggtggtacactggtgtggtcttctgcttgacctctcagctggcttcctgctgtttttgatgcctcaagacccattggcctcgtctttgtgtcttacttccactgcatgaattcgcagctcttcagcataggtatgtttccctacgtcatgttggccagcagccccctcttctgctcaactgaatggcctcggaagctggtagcccggtgccccaaaaggctgcaagagctgctgcccaccaaagatgctcctcggcccagtgcttcctgtgtatataagagggcccgggccaaagctggtcaaaagctggggctgcgccaccagctgggagctgtcttcaccctgctctaccttctggagcagctcttcctgccgtattcccatttcctcactcaggttacaacaactggacaacgggctgtatggctattctattcacacagagccggcgatggaaggatcacgcagacatgctgaagcaatatgccacttgcctgagcctcctgcttcccaagtacaatgtcactgagccccagatctactttgatatttgggtctccatcaatgaccgcttccagcagaggtctttttgaccctcgtgtggacatcgtgcaggctgtctggtcccccttccagcgcacaccttgggtacaaccactcttgatggacttatctccctggaggaccaagttacaggacattaagagcagtctggacaaccacactgaggtggtcttcattgcagatttccctgggcttcacctggagaattttgtgagtgaagacctgggcaacactagcatccagctgctgcagggagaggtcactgtggaattggtggcagaacagaaaaatcagactcttcaggagggagaaaaaatgcagttgcctgctggagagtaccataaagtctacactatatcatctagtccttcctgctatatgtacgtctatgtcaacactacagaggtcgcattggagcaagacttggcatatctgcaagaattaaaggaaaaggtggagaacggaagtgaaacagggcccctgcctccagaacttcagcctcttttggaaggggaagtaaaagggggccctgagccaacacctctggtccagacctttctaagacggcagcggaaactccaagagattgaacgccggcgaaatagcccttttcatgagcgattcctccgcttcttgatgcgaaagctgtatgtctttcgacgcagcttcctgatgactcgaatttcactccgaaatctgctattaggccgtccttccctagagcagctagcccaagaggtgacatatgcaaacttgcgaccattcgaaccagttgatgagtcaagtgcttcaaacaccgattcttcaaaccctaatcctccagagccagattctgagcatgttcactctgagttctgagggaagtccagatgttctgcgcagatgtggggacagcctgttacaagtttactgtctatgcaaaggatattggagaaaaactattttgagacaggctttcacagtacagcccaggctggcctcaaactcatggtagtccctctatttcaagcctgattttttcttatttcttttttttgtttttgtttttgtcttttcccagacagtttctctatgtgtaacagccctggctgtcctggcactcactctg

SEQ ID NO: 1158 - DNA, 2399 bp, Cricetulus griseus
caccaaccctaagtcctcggcagagcagtgatatccacgcagaaccagtatagcacactgtccaaaccagcagcactaaccggtactttggaagtccgtcttatggggtgccaagatatcctagagaatgtccctggacggtcaaaagcaacgtcagttgcactgcccggatggagtccaagcgaaaacagatcatcttttatgagcagaactagtaaaagcaaaagtggaagtagccgcaatctcctgaaaaccgatgacttgtccaatgatgtctgtgctgttttgaagctagataatactgtggttggtcaaactagctggaagcctatttccaatcagtcgtgggaccagaagtttacactggaactagacaggtcacgtgaactggaaatttcagtttattggcgtgattggcgatctctgtgtgctgtaaaatttctgaggttagaagaatttttagactaaccagcggcatggcatgtgtctctatttggaaccacagggtactttgtttgcagaggttaccctttttaatccagttattgaaagaagaccaaaactccaaagacaaaagaaaattttttcaaaacagcaaggcaaaacatttctcagagctcctcaaatgaatattaatattgccacgtggggaaggctagtgagacgagctattcccacagtaaatcattctggcacattcagccctcagactcctgtgcctgctacagtacccgtggttgatgcacgcatctctgaactagcacctccagccagtgattctacagtaaccaaattggactttgatcttgaacctgaacctcctccagccccaccacgtgcgtcttcccttggagagatagatgagtcttccgaagtgagagttttggatatacctggacagagttcaaaaactgtttttgatattgagaatgacagaagtaacatgcgtccaaaatccaaatctgaatatgagcttgacattcctgactcaggtcaaagttgttggagtgtccgagaggaacaaagatctcaaccaaggtttcagttcaatctgcaagacttcaggtgctgtgctgtgctgggaagaggacattttggaaaggtgctgttggctgaatataagcacacaaatgaaatgtttgctataaaagccttaaagaagggagacattgtggctcgagacgaagtagacagcctgatgtgtgaaaaaagaatttttgagactgtgaatagcgtcaggcacccctttctggtgaacctttttgcgtgtttccaaacaaaagagcatgtgtgctttgtgatggagtatgcggcaggtggggacctgatgatgcacattcacaccgacgtcttctctgaacctagagctgtattttatgcagcatgtgtagttcttgggttacaatatttacatgagcacaaaattgtttatagagatttgaagctggataatttgttgctagatacagaaggctttgtgaaaattgctgactttggtctttgcaaagaaggaatggggtatggagataggacaagcacattttgtggtactcctgaatttcttgccccagaagtattgacagaaacatcatacacaagggctgtagattggtggggccttggcgtacttatatatgaaatgctggttggagagtctcccttccctggtgatgatgaagaagaggtttttgacagtattgtaaatgacgaagtaaggtatccaaggttcttatctacagaagccatttccataatgagaaggctgttgagaagaaaccctgagcggcgactgggagctggtgagaaagacgcagaagatgtcaagaagcacccatttttccggctaactgactggagtgctctgatggacaaaaaagtgaaaccaccatttgtaccaaccatcagaggacgggaagatgttagtaattttgatgatgaatttacctcagaagcacctattctgactccacctcgagaaccaaggatactttcagaagaggagcaggaaatgttccgagattttgactacattgctgattggtgttaagttactggacactgtgaaaccaagcaaactgactgacaagaagacctcttgaaaacagcgcccttcatttgccttctgtgccactaggagcttccgaggtttttaaagaacgtgaagatgtggctaaagtactgttaaataccttctcaatgtttttaacataaatctcaacactggaagctgtttcatggagtttaggctgagtgaacattggccgtggaaatccattgcaaataaatacttttacatcaatactctatttttaaaaaagaagaaccactctttaatagtccccatctgtgccctaggcctgccttaagtggaaggaagattaatcacttaactgtgtttt

SEQ ID NO: 1159 - DNA, 2399 bp, Cricetulus griseus
ccagccatcaagcaatgaacaccaccccaggcacagtgggcagtgaccctgtcatcttggcaactgcaggctacgaccacactgtgcgcttttggcaggcacacagtggcatctgcacccgaacagtgcagcatcaggactctcaggtgaatgcattggagatcacaccagaccgaagcatgattgctgctgcaggttaccaacatatccgcatgtatgatctcaactccaataaccccaaccccatcatcagttacgacggagtcaataagaacattgcttctgtgggctttcatgaggatggccgctggatgtacaccggcggggaagactgtacggctcgcatatgggacctcagatcccggaatctgcagtgtcagcgtatcttccaggtgaatgcacccattaattgtgtgtgtctgcatcccaaccaggcagaactcattgtgggtgaccagagtggtgctatccacatctgggacctgaagacagaccataatgagcagctgattcctgagcctgagttttccatcacatctgcccacattgaccctgatgccagctacatggcagcagtcaatagtgctgggaactgctatgtctggaacctgacaagtggcattggtgacgaggtgactcagctcattcccaagaccaagatcccggcccacacgcgctatgccttgcaatgccgcttcagccctgattccacgctccttgccacctgttcagctgaccagacatgtaaaatttggaggacatccaacttctccctgatgacagagctcagcatcaagagtagtaatcctggagagtcatcccgtggttggatgtggggctgtgccttctcaggggactcccagtacatagtcacagcctcctctgacaacctggcccggctttggtgtgtagagactggagagatcaagagagagtatggtggccatcagaaagctgtcatctgcttggccttcaatgacagcgtgctgggttagcctctaccccttgaggctgcattggacagtcaggattgcctggtatagtggctctaagtggatgtacctcaacgatatcctggcctaagtgactctcaggtcagcctctgcatgtcaggccagctggacctgaccagactaccatggcccctccagaaattaccactatggccaggtaatctgggtttatttgtccctactgtcagctgtcctttgttggtgctggtgacctaaccagcttgctgacctgtggggacaggactggcctgtgggaccaaaggcaggtcagtaggggacttagtctggaaggtaataaaagcagacagacacacatctgctcgttgggccagtagatgggagtgttcaagcaaaggtgttgcaccgaagctcctgctcgggcagggtccacagtatgtcccccaaaactgccagcagctcctgggcatagtgggtgtcttggccaggtatatgggactcttgggcctgcagaaagactcagttgggccaccatatagtactttcttgatcctgactgggtagggcattcatgtcccaccccagcctgatggcccttccacctgctcttgtcaacggttttagtcaggagaagatagagctttctgttcccctgaaaccagagccttggctggcccagttgggctgcacagaggaccttttgtttgtcccctggccttgggggggggggggatgattggcaagccaagtagtactgctcaccctggaagtgttcaccagcagccgtaaggtctcccgatcttgggcttccatcagacggaggaagcaggcctggtgctctgcagggcggtaacagatgtagccctggggaggcagataggtaagtcaaggccaccctgatagttctcctctgccccacgcccaagctcactcacactttgtccgtcaaacagtatggcccagctgtggttgccagcagcagcgcggctgctctccagtccctacagcagggtttgatcttcacctgggggcatattactgtcagtggggcttctgggttaagagagctggcttgctcagggaaggggctgataggtcctgactcttgtatccctgtgttcttgggcagggggggggtagagacacttacctcaacaggcccggtccttaggctcccagtgtggatgtgcccttgctccatgctgcagcccctgctgacaatgcactgattgtctacagccccttggcggagtcagccagggaaacctcaggatccctttgatgagtcaaactgtatcctcccctcccaatcccactgcttccttccctgccagtatctgatatccagggtcagagccaggacagccctctcccccactgtgattgctggtcaccaggcatgtctctggacagttgacctgtgcagaa

SEQ ID NO: 1160 - DNA, 2399 bp, Cricetulus griseus
cggcctcgatgtccttacctcggtgtgtcctgctgtgggctcggctcccggcggggctcggggctgggtcccgggcggccacctgctctgcccttcgcgcctcggtggggtcttttcccggggctccaggacgcgttccctgcctggccgcctcctcctctgcctctggcggctccaaagccccgaacacgtccttgttcgtgccgctgacagtgaagcctcagggtcccagcgccgacggcgacgtgggcgccgagctcactcggcctctggacaagaatgaagtaaagaaaatcttagacaagttttataaaaggcaagaaattcaaaaactgagtgctgactatggacttgatgcccgtctcttccaccaagctttcatcagctttagaaattacatcatgcagtctcattctctggatgtggacattcacattgtcttgaatgacatctgctttttcttgagacatgccaacaatattcctgtattggaatgcaaggaagatctccgtaaatcagtgacttgaggataccacccaactggtacccagaagccagagccatacgacggaagatagtattccactcaggccccaccaacagtgggaagacttaccatgcaatccagagatacctgtcagccaaatctggagtgtactgtggccctttgaaactgctggcacacgagatctttgagaagagtaatgctgctggtgtaccctgtgacttggtgacaggtgaagagcggcaaacagttgaggctgaggggaaacaagccacccatgtctcttgtactgtggagatgtgcagtgttacaactccttatgaagtggctgtgatcgatgaaattcagatgattagagacttgggcagaggatgggcctggaccagagcgctgctaggactctgtgctgaagaagtccatttgtgtggagaatctgctgctattgacctggtcactgagcttctgtacacaactggtgaggaagtagaggttcacaaatacgaaaggcttacccccatttccgtgctggatcatgcactagagtctttagataatcttcggcctggggactgcatcgtctgctttagcaagaatgatatttattctgtgagccgacagattgagattcggggactggaatctgctgttatatatggcagcctcccacctgggaccaaacttgctcaagcaagaaagtttaatgaccccagtgatccgtgcaaaatcctggtagctacagatgcaattggcatgggacttaatttgagcataaggagaattattttttactcccttataaagcccagcatcaatgaaaagggagagaaggaactagagccaatcaccacctcccaagctctgcagattgccggcagagccggcaggttcagctcacacttcaaagagggagaggtcacaacaatgtaccgagaggacttggctttactgaaggagattttgaatagagctgtggatcctatacaggcagccggtcttcacccaaccgctgagcagattgaaatgtttgcttaccatctccctgagacaacgctgtccaatctcatcgatatttttgtagactttgcacaagttgatgggcagtattttgtctgcaacatggatgattttaagttctctgcagagttgatccagcatattccactaagtctacgggtgaggtatgtgttctgcactgcccccatcaacaagaaacagccttttgtctgctcatcactgttacagtttgccaggcagtacagcaggaatgagcccctgacctttgcatggttacgccggtacatcaagtggccattgcttccacctaagaatattaaagacctcatggatcttgaagctgtccatgatgtctttgatctctacctgtggctgagctaccggttcatagatatgttcccagactccaaccttgttcgaggtcttcagaaagaactggatgccattatccaagatggtgtgcacaacatcaccaaactgattaaaatttctgagtcacgcaagcttttgaatctggagagtttaccattaggcaaccagtcacatttgtcaggaaccttaaagagtggagcaaaaaggacacgtggcaccaaaagtgcagggggtaaagctgcagagccactcagccccagtgccaaggaactgccccttgcttccaggctggtgcagcaaggactcctcactgcagacatgctgaagcagctccagaaagagtggctgacacagcagccagagcttggcagagaaaaagcagggacaagaagaaagaagaaggaccccagctctgacctaggttttttaattctgcaaataaaaattgattttaaatccttaaaaaaaaaaaaaaaaaaaaaaaaaaaaaaaaaaaaaaaaaaaaaaa

SEQ ID NO: 1161 - DNA, 2399 bp, Cricetulus griseus
ctcagggagagaagattcgagatttggagttttgtcttgaagagcacagagagaaactgagcgccactgaggaaatgctgcagcaggagctcctgagtaggacctccttagaaacacagaagctggagctccgtggctgaggtctctaacctgaagttaaaactgacggctgttgagaaggacagactggattatgaagacaggttcagagacacaggaggggctaatacaagagatcagtgatttgaggttaaaagtcagtgaaatggacagcgaaagacttcagtatgagaaaaaacttaagtcaactaaagacgaactgacgtctttaaaagagcaactggaggagaaggaatgtgaagtaaaaaggctgcaggaaagagtgctgtgcagaacgaaaggagacgggatggaaatccttgatcgagaggcatcaagcattcacttcatcgcaagaagctccagctggccctgcaggccctgggatctgaagaggagaccaactatgggaagctggatttcaactgggtcaccaggtggctggatgatattggcctcccccagtacaagacgcagtttgatgaaggccgggtggacggtcgaatgctgcactacatgactgtggacgacctactgtctctgaaggtcgtgagtgtgctgcaccacctcagtatcaaaagggccatccaagtcctgaggatcaataacttcgagccaaactgccttcggaggcggccatctgatgagaacggcgtcaccgcgtctgaggttcagcagtggaccaatcaccgagtgatggagtggctgcgctctgtggacttggcagagtatgcccccaacctcagaggcagcggtgtccatggagggctcatggttcttgagccccgttttaatgtggaaactatggctcagttattgaacattccacccaataaaaccttgctacgcagacatttggccacccatttcaaccttctgattggtgctgaggcccagcaccagaagcgagatgccatggagttaccagactacgtactgctaacagctactgccaaagtgaagccaaagaaactgacctttagcaactttgggaatctgcggaagaagaagcatgaagacggagaggaatatgtttgtccaatggacctggggcaggtgtcggggagtagctcccagaaggggtttagacctggcttggacatgcgtctgtatgaagaggatgacttggatcggttagagcagatggaagattctgaagggacagtgagacagataggcgcgttttccgaaggcatcaacaatctcacacacatgttaaaggaagacgacatgtttaaagattttgctgcccgctcccccagtgccagcatcacagatgaagactccaacgtttgaccagagcatctgggcaagcaccaggagcacaggtgtcattttccaactttgtttttcaagtagttcatgtgacaggtgacaggttatgcattgctggttgttccaacgtctgctccctcggaagatgccagccgcacctccacttgcctctgactgtcttattttcatatatttttctaaatatgtatatatatacagtatagagaaaacagaacttttattttgtgacacaaggatcttaagtttctcattttcttctttgctaaatgcaccattacatggaactaaggagtccacctagccatgtccactgtcccttacactcatactgtcaactgagggggcttcgtgttatttcagtcagggatccaaatactctgaggctgcaggccgttttctaatggtcttcctgtccagtagcatattgctcatgttttctgtaacacaaggcccaaaagctctttgcaaagaggctagaaagccaagcacagctgttcctgtggcatgtgtatatgtgtgttttcagtggtgttggagacaatctggttttcatttggggttacacgtaacaagaccaactgtgtacagacaggagctcacccgctggggtgcaggtaggcagctcagtttatggtaatagatttggtgataaccgtttctaaatgtcagcagtattcctgttatgtgctcagcagatgctcccgttcatggtttgattgctatattggcttcttcctcgattggggttttagtttaaacgttgattaaatgtcaccatttgaaaagctcaatttgttatttgagcctggttgaaaaataccagcaagactgttactgatgccaaatattctttataaggacaatgtaacaactgatgatatgtgataaagttaaaaaaaacttttgattatatattttatttacaaaagtatttgtatgcactgttggcattaccgtatgaaagcaaataaagtcaattgataactgaaaaaaaaaaaaaaaaa

SEQ ID NO: 1162 - DNA, 2399 bp, Cricetulus griseus
  modified_base (298)..(298): a, c, t, g, unknown or other
atgcctactaccgccacaaggtcagcgagtttaaggaggggaaggctcaggaaaccctcagctgccatccccaaggtcatgcagcagcagcagcaagccactcaacaacagctgccccagaaggtccaagcccaggtgatccaagagaccatagtaccaaaggacgccccctcctgagtttgagttcattgctgactcccccctccatctcagccttcgacctggatgtagtgaagctgacagctcagtttgtggccaggaatggacgccagtttctgacccagctgatgcaaaaagngcagcgaaactaccagtttgactttctccgcccacagcacagcctcttcaattacttcacaaagctggtggagcagtataccaagatcttgattccacccaaaggcttatttgcgaagctcaagaaagaggctgaaatccccgagaagtttggaccaggtgtgctatcgagtagaatgggccaaattccaggagcgttttggggaaagtgaggaagtggagatggaggttgagtctgacgaggaagatgagaagcaagaaaaggctgaggaggctccttcccaactggaccaggatactcaagtacaggacatggatgagggctcagatgatgatgaagaaggacagaaagtgcctccacccccggagacacccatgcctccacctctgcccccaactccagaccaagtcattgtgcgaaaggctatgatcccaaagcttctaagcccccttcctccagctcctgctcctgatgaatatcttgtatcccccatcactggggagaagattcctgccagcaaaatgcaagagcacatgcgtattgggcttcttcgacccccgctggctggagcagcgggatcgctccatccgagagaaacagagtgatgatgaggttttatgcaccaggtctggatattgagagtagcttaaagcagttggctgagcgccgtactgacatcttttggggtagaagaaacagccattggtaagaagattggtgaagaagagatccagaagccagaagaaaaggtgacttgggatggccattacaggcagcatggcccggacccagcaggctgcccaggccaacatccaccctccaggagcagattgaggccatccataaggcaaagggcctagtgccagaagatgacactaaggagaaaattggccctagcaagcccaatgaaattccccagcagccgccaccaccatcttcagccaccaatattcccagctcagcaccccccatcacatcagtgccccggccacctgcgatgccgcctccagttcgtaccactgttgtatctgcggtacctgtcatgccccggccacccatggcctctgtagtccgactgcctccaggctcagtgattgcccccatgccacccatcatccatgcacctaggatcaacgtggtacccatgcctcccgctgcacctcctattatggcacctcgcccacctcccatgattgtgccaacagcctttgtgcctgccccacctgtggctccagtcccagccccagcaccaatgcctcctgtacaccccccacctcctatggaagatgagcctccatctaagaaactcaagactgaggacagcctcatgcctgaggaagagttcctgcgcaggaacaagggtccagtgtccatcaaagtgcaggtacccaacatgcaggataagacagaatggaagctgaatgggcaagggctggtcttcactctgccactcacagaccaggtctctgtcatcaaagtgaagattcatgaagccacaggcatgcctgcagggaaacagaaactacagtatgaaggcattttcatcaaggattccaactccctggcttactacaacatggccagtggtgctgtcatccacttggccctcaaggagagaggcggcaggaagaagtagtgaagagatacctacagttgggctcctgcattggacctcttcttttaccaccacttccaggagcttttctgggacctcaggcacagcccgtgtatttgtttccctcaggacatcagaaagccttggtgaatcccatgtccaaatactcccttttggtattaaggacatggcatggtgtcagggcatatgcctctgtagactggcagacccccacagtgcctctgtagctgaggctgtgacaagaggccaagaatggggctgggtggaatgcaagtgaatgggccctttgatccacactccttggagttaacagttcccagaaagaactcctgaatgaatgcctgtcctgactcacattcactggaggctcattgaccacagagccttgtgacctttggtggccatagatgaaccgttgtttcctggcactgcacatcctacaaccttgcaagtttaaagtgctta

SEQ ID NO: 1163 - DNA, 2399 bp, Cricetulus griseus
tgagaagtgggacatctattcactcgcaagggcggggagcgcacctacacccagctggtgcggctcgtcgtcctggatgagatccatcttctacatgatgacagaggtcctgtcttagaagctttggtggccagggccatccgaaacattgagatgacccaagaagatgtccgactcattggtctcagtgctaccctccccaactatgaagatgtggccacctttctgcgtgttgaccctgccaagggcctcttctactttgacaacagtggatgaggtccacctgattgggggcgagaatgggcctgtgttggaagtgatctgttcccggatgcgatacatctcctcccagatcgagcggcccattcgcattgtggcacttagctcatcactctccaacgccaaggatgtggctcactggctaggctgcagtgccacctccaccttcaacttccaccctaatgtgcgccccgtaccgttggaactgcatatccagggcttcaacatcagccatacacagactcgcctgctgtctatggccaagcccgtgtaccatgctatcaccaaacactcaccagaagcctgtcatcgtttttgtcccatctcggaagcagacccgcctcactgcaatagacattctcactacctgtgcagcagacatccaacggcagaggttcttgcactgtactgaaaaagatctgatcccttacttggagaagctaagtgacagcacgctcaaggaaacactgttaaatggggtgggctacttacatgaaggactgagccccatggagaggcgcctggtagagcagctcttcagctcaggggctatccaggtggtggtggcttctcgaagtctctgctggggtatgaatgttgctgctcatctagtgatcatcatggatactcagtactacaatggcaagatccatgcctatgtggactaccctatctatgacgtgcttcagatggtgggtcatgccaaccgtcccctgcaggatgatgaggggcgctgtgtcatcatgtgtcaaggctctaaaaaggattttttcaaaaagtttttatatgagccattgccggtagagtctcatttggaccactgtatgcatgaccacttcaatgctgagattgtcaccaagaccattgagaacaagcaggatgctgtggactacctcacctggacctttctgtatcgccggatgacacagaaccccaattactacaaccttcagggcatatcccatcgtcatttgtctgaccacttgtcagagctggtggaacagacccttagtgacctggagcagtccaagtgcatcagcattgaggatgagatggatgtggcgcctctgaatctgggcatgattgctgcctactattacataaactacaccaccattgagctcttcagcatgtctctgaatgctaaaaccaaggttcgaggacttattgagattatttccaacgcggcagagtatgagaacattccaatcaggcatcatgaagacaacctactgcgccagttggctcagaaggtcccccacaagctgaataatcccaagttcaatgatccacatgtgaagaccaacctgctgctgcaggctcacctgtcccgtatgcagctgagtgctgaactacagtcagacacagaggagatccttagtaaggcaatccgactcattcaggcctgtgtggatgtactctctagcaatggttggctcagccctgctctggcagccatggaactggctcagatggtcacccaagccatgtggtctaaggactcttatctgaagcagttgccacacttcacctcagagcatatcaaacgttgcacagataagggagtggagagtgtttttgacatcatggagatggaggatgaagaacggaacgcactgcttcagttgactgacagccagattgcagatgtagcccgcttctgtaaccgctacccgaatatcgaactgtcttatgaagtagtggataaagacagcatccgcagtggcgggccagttgtggtgctagtgcagctggagcgagaagaggaagtcacaggccctgttattgcaccactcttcccacagaaacgtgaagagggctggtgggttgtgattggggatgccaagtccaacagcctcatctccatcaaaaggctgaccctgcagcagaaagccaaggtgaagctagactttgtggccccagccacaggtggccacaactatactttgtacttcatgagtgatgcttacatgggatgtgaccaggagtataaattcagtgtggatgtgaaagaagctgagacagacagtgattcagattgaatctgaggcatgtacagtagctggaaggcattctttttgtagttcctgagtcagacattctaataaataatttggaaa

SEQ ID NO: 1164 - DNA, 2398 bp, Cricetulus griseus
tcaccgaggcggtccgggccacggagacggcgggagccggcggcgctgcgggtcagcggacgcggcggagccggcgggctcggcagcctggggcgcccggtgtcgtgcagcccggggctccagtgcgagcagctggccgagccgcacggcggacaaatgaagagaaaacaatgtccgccaacctaaaatatctttccttgggaatttttggtgtttcagactaccagtttggttctaacgatgcgttattctaggactttaaaagaggagggtcctcgttacctatcttctacagcagtagttgtggctgaattttttaagataatggcctgcatctttttagtctacaaagacagtaagtgtagtgtgagaacactgaaccgagtactgcatgatgaaattcttaataagcccatggaaacacttaagcttgctattccatcagggatatatacactaataatttactctatgtggcactgtccaacctagatgcagctacttatcaggttacatatcagttgaaaatacttaccacagcgttattttctgtgtctatgcttggtaaaaaattaggtgtgtaccagtggctctccctagtaattctgatggcaggagttgcttttgtgcagtggaagattttgtgcctaaccagcgtacttttttccttggagccatccttgtaatagcagctacttttcttatatggttatgatcccaaacctgcaggttttggttgctgcagaacagtccagtgcagcctttgtgagagcacacaaatgcaaataccaatgtttgcaaggcagatctacttactcttatcacatgttcttaatcttactctttctgtacagatatatcaaattatgtggactatttgaagttggaagattataattgcctataaagctgtgaacaaacaaatataatataaaaccattttcatgtatctgggatttttatattcatacagaaaattgctaagcaaaagattgctaaatgttatttgttcagttacataaaacttgatgaagtagtctgggtttgattcatatttaaatttagtgtactgggaaggagcagccatttgctttaaaatagtagattttgtttcttataacactgacgttgagaatacaaactataagttatttaataaactgattcaaaagagagaatatattagaaaaatgggaggcaaaaatgcacctatatttggaatataatttatttaattattgactatatgcagaattacctattgaatataagatgtattttactttattttttcatttatattgtatatattttaaaagtttgttgtaatagatacaaacctataaaaagatgactattttttaggtagttctaatagattttgttaaatggagttgactcaaaagtactactgttaagaactgcaaggtaggtacccttggctaacttggactgttatgatcttgttagtgcgcatgtactctcaatagtgtacatgcctaaccaagtccattcaatttcaaaagttacttaaaatttacagagtgttttaaagctattgcaccatcgatgacagagtgataccaggttttctgaatgccatttggagcatggtattaggccaccacagcattcaaactatggcctaggacctacaactaagtgcaacctagatcttgcaaatatacaaaattcatgaatacagattgatatttggctcacaaaagtattgtgtgtgtaactgtgctaataccatgtggattcacagttaatggttacttagatctaccgacccctgtcttaaccccacagaaatatatacaaataagttattgggtattaaggttgttaaattaatagcacatttcaggtgtctgaaaatcttttattaggtgtcatttatatttttcttttctagtcagttaaaaatgttactgggctgaatgtatagtttagaaatttataaggaaaaaaatcacatttgggggaaaaatgggcttgtagcctagattgtgtcatatgtattgatactgaaattttgtgtaatgtgctttgtgttttgatgatgttcaatgttgtgattttgtcatgcttttataataacgcttggattatttaaatttgatgcttttaaaagtgtgcttgttatgtctcagctattttaactaatatggaatgtgtcaattcatggagaaagaataccagcgagagctgcattaaagttaggcacagaacattggcaaagagcttgacgcaccagcaagccctggtgcagcatagcagctttggactgaatgcttttcaagccggaagttacctttaataatataatagtagtttaaaatgaataacttaaatgtttacatcagtttctacagaatgtcacagaatttcatat

SEQ ID NO: 1165 - DNA, 2398 bp, Cricetulus griseus
cactgtgtaaagtgattagattcaacatagactacacaattcattttattgaagagatgatgcctgagaatttttgtgtaaaaggacttgaactgttttcactgttcctattcagagatattttggaattatatgactggaatcttaaaggtcctttgtttgaagacagtcctccctgctgtccacggtttcacttcatgccacgttttgtacggtttcttccagatggtggcaaggaagtgttgtcaatgcaccagatcctcctctacctgctgcggtgcagcaaagctttggtacctgaggaggaaatcgctaatatgctccagtgggaggagcttgagtggcagaaatacgcagaagagtgcaaaggcatgattgttaccaaccctggcacgaaaccaagctctgtccgcattgatcaactggatcgtgagcaattcaaccctgatgtcattacttttccaattatcgttcactttgggatacgccctgcacagttgagttatgcaggagacccacagtaccaaaaattatggaaaagttatgtgaaacttcgccacctcctagcaaatagtcccaaagtcaaacaaactgacaaacagaagctggctcagagggaggaagcgctccagaaaatacggcagaagaatacgatgcgacgagaagtaactgtggagctaagtagccagggattctggaaaactggcattcgttctgatgtctgtcagcatgcaatgatgctgcctgttctgacccatcatatccgataccatcaatgcttaatgcacttggacaagttgataggatatactttccaagaccgttgtctgctacagctggccatgactcatccaagtcaccatttaaactttgggatgaatcccgatcacgccaggaattctctgtctaactgtggaattcgacagcccaaatacggagacaggaaagttcatcacatgcacatgcggaaaaaaggaattaacaccctaataaatattatgtcacgcctcggccaagatgatccaactccttcaaggattaatcataatgaaaggttggagttcctgggagatgctgttgttgagtttctgaccagtgtccacctatactacttgtttcctagtctggaagaaggaggcttggcaacctaccggactgccatcgttcagaatcagcacctcgccatgcttgccaagaaacttgaactggatcgatttatgctttatgcccatggacctgacctgtgtcgagaatcagacctccggcatgcaatggccaattgttttgaagcattgataggagctgtttacttggagggcagcctggaggaagccagacagttatttggacgcttactctttaatgacccggaccttcgagaagtctggctccattatcctctccacccactccaactacaagagccaaatacagaccgacaacttattgaaacttctccagttctacagaaacttacagagtttgaagaggccattggagtaatttttactcacgttcgacttctagcaagagcattcacattgagaactgttggatttaaccacctgaccctaggccacaatcagagaatggaatttctaggcgactccataatgcagctggtagccactgagtacttgttcattcatttccctgaccatcatgaaggacacttaacgttgttacgaagttctttagtgaataacagaactcaagccaaggtagcagaggagctgggcatgcaagagtatgccatcacaaatgacaaaaccaagagacctgtggccctgagaaccaagacactggcagaccttttggaatcatttattgcagcattgtacattgacaaggacttggaatatgttcacactttcatgaatgtctgcttcttcccccgactgaaggagttcattttgaaccaggattggaacgaccccaaatcccagctgcagcagtgctgcctgacacttaggacagaagggaaagaaccagatattcccttgtacaagactctgcagacagtggggccatcccatgctagaacctatactgtggctgtctacttcaaaggagaaaggataggctgtgggaaaggaccaagtattcaacaggcagaaatgggagcagcgatggatgcacttgagaaatataactttccccagatggctcatcagaagcggttcattgaacggaaatacagacaagagttaaaagaaatgagatgggaaagggagcatcaagagagagaaccagatgaggctgaagacgtaaagaagtaaaggagggcacggaagtgctggtgcatttacttgcctaataactgtgactgctgcccatcgagacttagcctagtttccttcagacaatgaatgaagtgtgcccattgaaataaaactca

SEQ ID NO: 1166 - DNA, 2397 bp, Cricetulus griseus
  modified_base (2387)..(2387): a, c, t, g, unknown or other
tgcaggcaagccctcgaagcctccttcctgggctgctctcaggcccagctgacaaattgactcccaagggacctgggcaggtatctactgctgcctctgcactatccttggatttgcaagaagtggaacctctggggctaccccaggcctctcccagtcgcacccgttcccctgatgtgatctcttcagcttccactgccctgtcccaggacatccctgaaattgcatctgaggccttgtcccgtggctttggctcctctgttcctgagggcctcattgagccagacagtatggcctcagctgcttcagcactacacttactgtctcctcggcccaggcaaggccctgagcttggctctcagcttggcctagatggaggccctggggatggggatcgggcagtaactaccccctcctactggaagcagccttgacccaggacggttgccaaccctgacagtcaagtccactagtgctgagcaaagtgaccacgatgatgaggttgctagccttgcttctgcctcagggggttttggcagcaaaattcctactccacggctgcctgctaaggattggaagaccaagggatctcctcggacttcacccaaactcaagaggaaaagcaagaaggatgatggggattcagctgtgggatcccgtctcacagagcaccaggtagcagagccccctgaggactggccagcattaatctggcagcagcaaagagagctggcagagctatggcacaaccaagaagagctgctacagcgtctctgtgcccaacttgaaggcctacagaacactgtcactgaccatgtagaacgtgccctggagactcggcatgaacaggagcagcggcgactggaacgggcactggctgaggggcagcaacggggcgggcagctgcaggagcaactgacacagcagctgtcccaggcattgtcttcagctgtggctgggcggctagagcgcagtataagggatgaaatcaagaagacggttcctccatgtgtctccagaagtctggagcctgtggcgggtcaattaagcaactccatggctaccaaacttacagctgtagaaggcagcatgaaagagaatatctctaagctactcaaatccaagaacttgacagatgccattgctcgagcagctgcagacacattacagggaccaatgcaggctgcctaccgggaagccttccagagtgtggtattgccagcttttgaaaagagttgccaggctatgttccagcaaatcaatgacagctttaggctgggcacacaggaatatttgcagcagctagagagtcacatgaagagcaggaaggcacgtgaacaggaagctagggagcctgtgctggcccagcttcggggcttggtcagcacacttcagagtgccactgagcagatggcagccactgtgtctagcagtgttcgggctgaggtgcaacaccagctgcatgtggctgtgggcagcttgcaggagtcaattttagcacaagtacaacgcattgttaagggtgaagtaagtgtggctcttaaggagcaacaggccactgtcacttccagcatcatgcaggccatgcgttcagctgctggcacacctgttccttctgcccaccttgactgccaggcccaacaagcccatatcttgcagttactgcagcagggccacctcaatcaggccttccagcaggcactgacagccgctgatctcaacctggtgctgtatgtgtgtgagaccgtggacccagcccaggtttttgggcagccgccctgtccactatcccagcctgtactcctttccctaatccagcagctggcatctgaccttggaactagaagtgacctcaagctcagctatttggaagaggctgtgatgcacctggaccacagtgatcccatcactcgagaccacatgggctctgtcatggcccaggtgcgccagaagctcttccagttcctgcaagctgatccgcacaactctcttggcaaagctgcccgtcgtctcagcctaatgttacatggccttgcgacccctagcctcccttagctgattaacagagatggcatgacactgaaggccagtccatgtctgctgtttacctgcccaggcctcccatctctagtgttttggagggaggtagggggaggatacactagcggtggtctactgattgtggtaaccagcagggttaggctgggcccagggcaggtattgtgccttcttgggtcctgccatgcctgaagcatgaccccaagatcgtgataccacttgagttgaattttccatgttcctttttacctctaatttggatctttttgtttttgaaaaacattgagaaattcaattaaagacttttggaataaaaaaaaaaaaaaaanaaaaaaaaaa

SEQ ID NO: 1167 - DNA, 2397 bp, Cricetulus griseus
aattccatcctggctttgcacctgcgagccaccccggcgcccaagccttccagtgcccacattgtggccatcgtgcagcgcagcgggctctgctgcgctcacatctccgaacacaccagcccgagcgtccacgaagccctgctgcacgcctgttgctggagttggaggaacgcgccctgctacgtgaagcccaactgggaagagccagaagctcagggggcatgcaggccaccccagccacagagggcctggcgcgccctcaggttccttcctcgtctgccttcccttgccctttctgcaaaggcaagtttcgcacctcagcggagagggaacgccacctgcatatcctgcacaggccctggaagtgcagcttgtgcagttttggctccagccaggaggaggagctgctgcaccacagtctgacggcccacggggcctccgagcgccctctggcggctacttcaacgccgcccttgagcctgagccagaacctgaacctaggcctgagcctgaacatgaggcgaaccctgccccgactcctgcacccccggaggaaccccctgcgccacctgagttccgttgccaggtgtgtggccagagctttacacagtcctggtttctcaagggtcacatgcgcaagcacaaggcttcttttgatcatgcatgccccgtgtgtggtcgctgcttcaaggagccctggttccttaagaaccacatgaaggtgcacaccagcaagctgggtcctttgcgtgccccggggcctcggctctacccctgcccagggcccctcagcctcctgacatgagcctgctggcttatgagccactgggccctgcactcctactggccccagccacccaccccagctgagcgccgagagcccccgagcctcttaggctacctgagtgtaagagctggggaagtacgacccaatggtgagggtgccgaccctggagctggacgaagctatggaggaggattccgcccgctgccttcagctcttcccaatcgggccaggcgacaccgtacagaggaaccagaggaggaagaagaggtggtggaggcggaagaggagagctgggcccggggcaggtcgctgggcactctgacttccctgcacccccaccccggtgaggggtcaggacaatctgcacctgccgtaggggcccaggcaagacctacaggcacccaagaagaaaatgggctgctggttggaggggcccgatccgaagcgggccgtggggccactggcaaggactgccccttctgtggaaaatcgttccgctcggcacatcacctgaaagtgcatcttcgagtacatacaggtgagcgtccctacaaatgtccacactgcgactatgcaggtacccagtctggctcactcaagtatcaccttcagcgtcaccaccgagagcagaggagcagtgcaggtcctgggcctcctccagaacccccgccccttccccgcgggcgcagcctcactgcagccgcagtcaggagctaagccaactcaggcctctgccacctgggtggagggcactgcaagtacccggccttcttcgagcggcaccggagcagggtcccgtaggaagcctgccagccctgggaggaccctgcgcaacgggagaggtggtgaggccgaacccctggacctgtccctacgggcaggcccgggaggtggaagccgggtcagggggtggcccttcaccgctgcctcttctgcccctttgccaccggagctcctgagctcatggccttgcatctgcaagtacaccacagccgtcgggctcggggccgccggcagccccgggctgatacatctccaccctatgtccgagcaccatcaggagaaacgcctcccagccctccactagaagaggagggcagccccgggctgtctagatctggagaggccggtcttggggggcaagaacggtagggagcccccttaggagtgattagcttagtaagcttaccccgcaggagcggggaagtgctagaggtagttgggtagagcagccagcagggagcagtgtgggacccgtatcccagcccaaggtggaccaagaggtaaagtggacagtgggtgaaggagggtggggcaagcagtacccacccagcccaggggagtcacagtgccttagaagtggcagaggtgagggtcaaagaacggggtcctagggctggtagaggatgtgttcccgttgaggagccactctgccagtttctgctggtccataggcatgagagtttatttttgtataaggggtgggggtggggggcactgtacccttctagccctatcaggggccctgtagacgttgctatttttggtacgattcctgtcatccctgttgaagagtcatgtccccaataaacaggtgtcttgaggcacaa

SEQ ID NO: 1168 - DNA, 2396 bp, Cricetulus griseus
gacctgaacatggcggcggtggtagctgctacggcgctgaagggccggggggccagaaatgcccgcgtcctccgggggattctctctggagccacagctaacaaggcttcccagaacaggaccagagcactgcagagccacagctcaccggagtgcaaggaggagcctgagcccctctctcctgagctggaatacatccccagaaagaggggcaagaaccccatgaaagctgtgggactagcctggtatagcctgtatacccgaacctggcttgggtacctcttctaccgacagcagcttcggagggctcggaatcgctatcccaaaggccattccaaaactcagccccgcctcttcaatggagtgaaggtgcttcccatccctgtcctctcagacaactacagctacctcatcattgacacccaggccgggctggctgtggctgtggacccctcagacccaagggctgtgcaggctaccattgaaaaggaaagagttaacttggttgccattctctgcacccacaagcactgggaccacagtggaggaaaccgtgatctcagccggcggcacagggactgtcgagtgtatgggagccctcaggatggtatcccctacctcacccaccctctgtgtcatcaggatgtggtcagtgtaggacggcttcagatccgggccctggccacccctggccatactcaaggccatctggtctacctgctggatggggagccctacaaaggtccttcctgcctcttctcaggggacctgctcttcctctctggctgtggaaggaccttcgaaggcacagcaagagaccatgctgagctcactggacaccgtattagacctgggggatgacaccctgctgtggcctggacacgaatatgcagaagagaacctgggctttgcaggcgtggtggagcccgagaatctggctcgggagaggaagatgcagtgggtacagagacaacggatggagcgcaagagcacatgcccatccaccctgggagaggagcgcacctacaacccattcctgagaacccattgcctggcactacaggaagctctggggccagggccaggctccaccagtgacgatggctactcccgggcccagctcctggaggagctgcgccggctgaaggacatgcacaagagcaagtgaatacccccagcccaccccagtccaggctgtccccacagaggggaagccacccaccactcacacctcgccatcctctcatcactagcaccaccgccgccaaggcagcacctgggacgtctctagactctgctgccttggagactctgcctcccaccccgctcgaggtggagtacccagatgatgaaggctgctctgggctcccttccagaggccacactcccacttggagccctggaaccccgggaaaatagagcactgaccaggctagtctgttctccacctttcccatccagggttgttggagcagctcaccctgaagacatgatacaaggtgtggtgcctggttaagtggtcgccaataggggcagccagacattgggtgactgatactctaagccccaccttacccaccctgctaagacattgccagacagagccattcctaagaacacccaagggctggaagcctggctctggccaatccctgtctcaacaaatcctctgatggatagagggcaaggtccccgattgccaaggaatcttctgcctcaggccaaagacacacaagatgctgggatacagagccactcgccatgcacatctgtcccgggtctgccactctggtctcaggtggagggctctctggggccacagtgagaacgcctctggttgttgagcaggcactctgggttagcaggagccacgcttcgtatgtcagagccttcccttgggctgtgcagcgccctctaatgatcctccaagacgcccctgccctcagtttctcttctcatctggcctcggctgccctctccagccccagcctttggaacccactctagcaataccaccagactagttagccttccccgcccccgacacacgcagttgccttcgtgccttcgctcatgctgtttcttcagctggaatgccttcccgctccttctgcctcctttgcctgtctaacgcctatattagcctctcccaggcccctcccccaggaagtcccccccctcaccccctatcttccaggctacctctgcacctcgtaaatgcttctctcgtggcacccatcacactgtattttacttgtttacatgtttgccttacccttctagactgtgaatccttaagggcatggactgtatcttatgcatctctgtatttccgcgcctagcacggtgcctggcacacagtaggcgctcaataaatgttgaatgaatgaatttaa

SEQ ID NO: 1169 - DNA, 2394 bp, Cricetulus griseus
tcaaggagcggagacggcaaaatggcggacttcgatacctacgacgatcgggcctacagcagcttcggcggcggcagagggtcccgaggcagtgctggtggccatgggtcccgaagccagaaggagctgcccacagacccccccctacacagcttacgtaggaaatcttccttttaacacagttcagggtgacatagatgctatctttaaggatctcagcatacggagtgtgcggctagtcagagacaaagacacagacaaatttaaagggttctgctatgtcgaatttgatgaggtagactccctgaaggaggctctgacgtacgacggtgcactcttgggtgaccggtcacttcgtgtggacattgcagaaggcagaaaacaagataaaggtggctttggattcaggaaaggcggacccgatgacagaggaatgggtggctctcgagaatctagaggtggatgggattcccgagatgacttcaactctggctacagggatgacttcttaggggtagggggggcagtcgccctggggaccggcgagcaggacctccaatggggagtcgctttcgagatggccctcccctacgcggctccaacatggacttcagagaacccacagaagaggaacgagcacagagaccacggctgcagcttaaacctcggacagtggcaacgcccctcaaccaagtagccaaccccaactcagccatcttcgggggagccaggcccagagaggaagtggttcagaaggagcaagaatgagcttaggttgggagggaatggggcatgggggagctggagcaagaccacagcccagcctagtggcagccagtcgccctgcaggccccattcccgcctggcactgtcctccttacagcggaaacacagagcttgtgagtgcatgtcagctgttaacaagtggtttctagtacattcttggctttgctatatctatctagtgcctgttttgtgctttctttctgttttctttctcttccctttcacttctgccctctccctgctccttcccacatagtgtggccaggcgtggaaggtgggctgaggtgctgctccatctttctttgctttctctctttacatgccctggccatgccccaggcgtgctgtcctctgcttattctcggagcttctctccaacctgcatgtcgagttctgtgttgctgtggcttctgggaaagagctggagccactgctatgtggctggtggtgacttggtatccagctgagatgggcatgcagaattggaggcaccttgctttcaaaacaaggaaacctggctgctggtcctgacaggtgctgtgtttggggacctatcacctgcccagcagcctgttcaggcacagtaggctcctgtcaaacagtgaggccagaagggtgcaggggaatctggacattctgcactggtggtgacctgcgtgccagtggccatgtggctttgctcctgctcgctcttaagaccaagtgcaagctcattccctgctcttcctgggccgtggagccccttgggggtgcagcccactgcagctcaatccgcttcctacagctgaggcctgtgggaagcaggggtggtgctggagctgcactgggcagctgtgcttgcactgcgtctgtgcgctctttcccttgtgtctgtctgctccggggtgcttagcacaggctgctccccaccgcagctcaaggcctagggtctggcactttatctgatcagatgcacagctgttgagaccctcagtacctgggtgtctggaaacctctagacttgctgcctcctgtggggcagacccctgctcccacagacagtgttgagcactcacttgggagcaaggggatcaggctttgcttttagcttgaacagctgtgagtgaacaagtggaaaatgatttggcaccaagtccccatctgttccagttggagcggttagggggtcagccagccactagagccttaggaaaaaggggctgagaggtgtgcagcttgcttattagctagcagcttcctgccagcctaccccttggcttgtgattgtctttgttgcaaggtctcggcaatttacagaactctcactccttccctcgcctgccatcttctctgcttctgagataagaaccatttgtgtaacaccaatacctaacttaagacagacatgcattgcgtggttgtaatcaaagctgatgctttcagatgatctaatccatctccaatgcggaaaagacagaacaggcacgtccatcacactgctgggcgcccagctgactgtaagaatggaattccaaacacttaacacattcagttctatgacagaaagtgagtctatggatatggtattttgtgaatgatcttttaaataaaagagaaccttacgtaaca

SEQ ID NO: 1170 - DNA, 2394 bp, Cricetulus griseus
acagtcagtggacagctggccttccagcacacctgtccccaagtccctgaactgcattgccttccacccacaggggcaggtggtagccacaggcaactgggctggcagcctacctttttcctaggcagatggactcaaagtcatcaaggaactaggagccccgggagcctctgtccgtactctggcattcagtgcacctgggaagtctgtggctgtaggcaggatagacggggcagtggagctgtgggcctggcaagaggctacacggctggcctctttcctctgtcgcctgcactctctgtggctctcaacccagatggtggccaggtggctgttgggtaccgagaggatggcattaagatctacaacatttcttcaggctcccaggagactcaacgtcaagtgctaaatgtggcagtgtccgcactagtctggctcagtcccagcgttttggtgagtggtgcagaagatggatccttgcgtggctggatgatcaaaggacgctctctctattccctgtggctgttgtcccgacaccagaagcctgtgcttggactggctacttccccaaggaactcttggcttctgcctccgaggatttcacagtgcgactatggtccaggcagctgctgacacagccacatgaggcagaagactttccctgttgtgctgaactccggggacatgagggcccggtgtgttgctgtaacttcagccctgatggaagcattttggccactgcgggcagggatcggaatctcctctgctgggatgtgaagaccagcccaagcccctcttctgattcactccctcacttcctgtcaccgtgactggatcactggctgtgcgtggaccaaagataacctactggtctcctgctctaatgatggctctgtgggactctgggatccagagtcaggacagcaacttggtcagttcctgggccaccagagtgctgtgagctctgtggttgctgtggaggagcatatagtatctgtgagccgggacgggactttgaaagtgtgggaccagcagggagtggagctgaccagcatccctgctcacacaggacccatcagccagtgtgcagctgtcctggagtcccgcccagctggacagcctggatcagagcttctggcagtgacggttggactggatggagccacaaagttgtggcatcccctcttggtgtgccaaatacgcaccctccagggacacagtggtccagtcactgctgctgctgcatccgaggcctcaggccacctgctgacctcagataacagctctgtacagctctggcaaatacctaaggaagcagatgatgcaaacaaacctagaagtgctgtggtcatcactgctgtggcatgggcaccagatggttctctggcagtgtctgcaaatgaagcttggggagctaatactatggcaggaagccaaagctgtggctacagcacaggctccaggccgtgtcagtgacgtgatctggtactcggcacattcgttctttgttcttagtgccaatgaaaatgtcagcgagtggcaagtggaactgttggaagggtcaacgtccagaaatcccagtcttcacatgaagcgagttctgccagaagacttgggagtcttgacaggtctggatctggcccctgatggccagtctctcatcataatgaaagagaacgtggaattactacagatgaagcctgggtgtactccatctgtgatctgccggaggttcggatcacattcttccatactgtgcaccagcaaggagcacggcatattctacctgcagcagggggtctctgcatttctttctttcttggagcagaaggagtcaggagagtttgatgagaacctggacttcattctggacataaagaatcctaatgggtccccagtagcaatcactcaggccaaacctgagtctgagtcagcatttctgtgtgccacctctgacggaatgctgtggagcttggctgagtgtacccaggaaggagaatggattgtagacaacatttggcagaaaaaagcaaagccacctaaaactcagtctccagagacagatccatctgtgcactctgattcagattcctgcatggagagctggtcagggcctagacatttaaaggcacagcagggaaaaagattcacttgggctcagtcacagccctccatgtgcttcctggattgctggtgactgcttcgaaggatagagatgttaagctgtgggagagacccagtatgcagctgttgggtttgttccgatgtgatggaccagtgagctgcgtggaaccttggctggggcccgactctaccttgaagcttgccgtgggagacacccaaggaaacttgtattttctatcttgggaatgaaaatgcagtactcaggacaaa

SEQ ID NO: 1171 - DNA, 2394 bp, Cricetulus griseus
gcttgttgggatcatggcggagaatcactgcgagctgctaccgccggctccgagcggcctcggggcggggctggggggcggcctgtgccgccgctgtagtgctgggctcggcgccctgccacaccgccccagtggcgtgtccaagtgggtccggctcaacgtcggcggcacctacttcctcaccacccggcagacgctgtgccgggacccgaagtctttcctgtaccgcttgtgccaggcggaccccgacctagactcagacaaggatgaaacgggtgcctatttaattgacagagatcccacctactttggacctgtactgaactacttgagacatggaaagctggttattaacaaagacctcgcagaggaaggagtgttggaggaagcagaattttacaatatcacctcactaataaaacttgtaaaggataaaatcagagaacgagacagcaaaacatcacagatgccagtgaagcatgtgtaccgtgtactgcagtgccaggaggaggagcttacacagatggtatccaccatgtcagacggctggaagtttgagcagctggtcagcattggctcctcctacaactatggaaatgaagaccaggctgagttcctctgtgtggtttccaaggagctgcacaacaccccgtatggcacaaccagtgagccgagtgagaaagccaagattctgcaagagcggggctcaaggatgtgaggagtactgacagctgaagaaatgatattcttttccccaagataaagtgaaccgccatgtgaagaaagcatggctgtgagaagaaacctgcttttgatcatttctctagagatctgggtgtggatccttttttgcctcagatgtgggtggagagacagcccagctgtcaagccagtcgtctccacagggaggcagctagagctggtttggcagtctctgtggcctcactgttctttccgagtgctccgtgggactgaggcaggatgctgctgaccagcccacacattcctgaagatgatttgaaggacaaggtccttggtgctacacacagtctgcaacaagcagcctgggccttgccaggaggggggcagctgccgtaactcctgtccaatgcactgtggcttagggcatgggtacctgctcatcactggttgagcaccaggccctcgtccttgggtcagggaggccgctgtgcctccaggcatgattggttgatttctcttgacctcggctgaggcttctgacaaaggcagcctccacattatcactacttctgggcacctcccctggactataccccttcagagccaggctcttataatggcctgtcagcttggcccagaatcatcaaggcttctcaatttgtattttccaggcaagaggactttgtatcccttttttaaagtgtggatagaccacccggtgtttatactctttagaaatgcctaaaagtgttgctacattttggattgatctgttaatcatttaaggaaggtagatgttttgcctcatatgccccacctgcgggctcatgggggagctggcgcctaccagtgcctttgttgtgcctgggatggaggctggggcaggaggcctgtccacctggcttctggagctgacactccaggtcatgttgaacattcaggatgtttacagcgcaaacatgtctccttctcactggctctcatttccttgtataactatgcagttcttctcttgtatttctggagtgtttgagactgcacaacctgcatgggctctgttcacttgacatgacattggagctgctaaggttcctgcagaggctgcgcctgctggctttggaacagacctttctcagctggttaggggatgtagcgggccacaaacttggcccaagcaagcaagctctgtgtgcttcttgacccctggcttcccaagggagctgtgcaaactgaccgccgtgactgcctgtgtgcaggtcagagcctctaacactgtttcaaatgcttccggaaacttcttgcctaggccctcttccttctcctctgccaataactgattaatcaagttctccagcgtctaggactgacctcgtcctttcctaaggtctgttgtatgttgttaaatgtttggcttaatcagtggctctgctgttggccatgggaaatactctggggagtggctggacacttagcgttgtttgatttatgaccttgacagtagataggcttgtgggggtttttgttttgtttttaatttaatgatattaaaacttaattcactaaaattctaaggggatatttatacttttatacttttttaggtatccgtattttatcagcttactgtttaatgcctaagtttcccctgaaaatagtaaataaaattgtgtatttatgaatgcgttcagacaa

SEQ ID NO: 1172 - DNA, 2394 bp, Cricetulus griseus
gacgccaactccagtgtctacaaaggcaagaagtgccgcatggagtcttgcttcgatttcgcccttgcaagaaaaacggacttcaaagtctacgtgtacccgcagcagaaaggggagaaaatcgccgaaagttaccaaaacattctagcggccatcgagggctccaggttctacacctcggaccccagccaggcgtgcctctttgtcctgagtctggatactttagacagagaccagttatcacctcagtatgtgcacaatttgagatccaaagtgcagagtctccacttatggaacaatggtaggaatcatttaatttttaatttatattccggcacttggcctgactacaccgaggacgtggggtttgacatcggccaggcgatgctggccaaagccagcatcagtactgaaaacttccgacccaactttgatgtttctattcccctcttttctaaggatcatcccaggacaggaggggagaggggctttttgaaatttaacaccatccctcctctcaggaagtacatgctggtattcaaggggaagaggtacctgacagggatagggtcagacaccaggaatgccttatatcatgtccataacggggaggacgtccttctcctcaccacctgcaaacacggcaaagactggcaaaagcacaaggactctcgctgtgacagagacaacacggagtatgagaagtatgattatcgggaaatgctgcacaatgccactttctgtctggttcctcgtggtcgcaggcttgggtccttcagattcctggaggctttgcaggctgcctgtgtccctgtaatgctcagcaatggatgggagttgccattctccgaagtgattaattggaaccaagctgccgtcatcggcgatgagagattgttattacagattccttctacaatcaggtctattcatcaggataaaatcctagcacttagacagcagacacagttcttgtgggaggcttatttttcttcagttgagaagattgtattaactacactagagattattcaggacagaatattcaagcacatatcacgaaacagtttaatatggaacaagcatcctggaggattgttcgtgctcccccagtattcctcttacctgggagacttcccttactactacgctaatttaggtttaaagcccccctccaaattcactgcggtcatccatgctgtgacccccctggtctcccagtcccagccagtgttgaagcttctcgtggctgcagccaagtcccagtactgtgcccagatcatagttctgtggaattgtgacaagcccctaccagccaaacaccgctggcctgccactgctgtgcctgtcatcgtcattgaaggagaaagcaaggttatgagcagccggtttctgccctatgacaatatcatcacggatgctgtgctcagtcttgatgaggacactgtcctttcaaccactgaggtggattttgccttcaccgtgtggcaaagcttccccgagaggattgtggggtaccctgcacgcagccatttctgggataactctaaggagcggtggggatacacctccaagtggacaaacgactactccatggtgttgacaggagctgctatctaccacaaatattatcactacctgtacacccattacctgccagccagcctgaagaacatggtagaccaactggccaattgtgaggacattctcatgaatttcctggtgtctgctgtgacaaaattgcctccaatcaaagtgacccagaagaaacagtataaggagacaatgatgggacagacttcccgtgcttcccgctgggctgaccctgaccactttgcccagcgacagagctgtatgaacacgtttgccagctggtttggctacatgccgctgatccactctcagatgaggctagatcccgtcctctttaaggaccaggtctccattctgaggaagaaatacagagacattgaacggctttgagggatcccactgagtgggggagggaagaagataggactggagtccagctgctctctcttcccggtgcagagccactcagctcatcgatggagccagactgtgccaagtatcaaaaaattaaaaaaaaaaaacaaacaaaaaaaacaaaaaaaacaaaaaaagaaaaacaaaaaaataaaaaaaaaaacgaccaaaatgaagaactcggctggaatcctggctcctgggactgcaccagactgctccattcacctctggcctctgtgtctcatgactaggttgtgtacagtttaattatggaacattaaataattatttttgaaatgattgctatgcaggtttaaacttttttaatgatcaaaactattaaaaaccagagttctttctttaatcaaaaaaaaaaaaaaaaaa

SEQ ID NO: 1173 - DNA, 2393 bp, Cricetulus griseus
  modified_base (333)..(333): a, c, t, g, unknown or other
  modified_base (415)..(415): a, c, t, g, unknown or other
tgcagcaagtcctgtgcccgagtgtgctatggtcttggcatggagcacctgcgaggggcaagggccatcaccagtgccaacatccaggagtttgctggctgcaagaagatctttgggagcctggcatttttgccagagagctttgatgggaaccctgcctccggcattgctcccctgaagcctgagcagctccaagtgtttgaaaccctggaggagatcacaggttatctatacatttcagcatggccagacagcctccatgaccttagcgtcttccagaaccttcgagtcattcggggacgaattctccatgatggcgcctactcattgacnctgcaaggcctgggaatccactggttggggctgcgttcactgcgggagctgggcagcggactggtactcattcaccgcaacncccgtctctgctttgacatactgtaccttgcccactacaaggactcctcctcctgtgtggctcgctgccccagtggtgtgaagccagacctctcctacatgcccatctggaagtacccggatgcggagggcatatgccagccgtgtcccatcaactgcacccactcctgtgtggacctggatgaacgaggctgcccagcggagcagagagccagcccagcgacgtccatcatcgcaaccgtggtgggtatcctgttgttcctggtcataggggtggttgttggaatcctaatcaagagaagacggcagaagatccgaaagtatacaatgcgtaggctgctgcaggaaactgagctagtggagccgctgacgcccagcggagccatgcccaaccaggctcagatgcggatcctaaaagagactgagctaaggaaggtgaaggtgcttgggtccggagctttcggcactgtctacaagggcatctggatcccagatggggagaatgtgaaaatccccgtggccatcaaggtgttgagggaaaacacatcccctaaagctaacaaagaaatcctagatgaagcatatgtgatggctggtgtgggttctccgtatgtgtcccgcctcctgggcatctgcctgacatccacagtgcagctggtaacacagctcatgccctatggctgccttctggaccatgtccgagaacatcgaggtcgcctgggctcccaggacctgctcaactggtgtgttcagattgccaaggggatgagctacctggaggatgtacggctcgtgcacagggacctagctgcccggaatgtgctggtcaagagtcccaacccattggaatccattcttcgacggcggttcacccatcagagtgacgtgtggagctatggtgtgactgtgtgggagctgatgacttttggggccaaaccttatgatgggatcccagcccgggagatacctgacttgctggagaagggagaacgcttgcctcagcctccaatctgcactatcgatgtctacatgattatggtcaaatgttggatgatagattctgaatgtcgcccgagattccgggagttggtgtcagaattctcccgcatggcgagggacccccagcgctttgtggtcatccagaatgaggacttgggcccgtccagccccttggacagtaccttttaccgttcactgctggaggatgaggacatgggggacctggtggatgcggaagagtatctggtcccccagcaggggttcttctgcccagaccctgccccaggcaccgggagcacagcccaccggaggcaccgcagctcatccaccaggagtggaggaggcgagctgacactgggcctggagccctcagaagaagagccccccaggtctccactggctccctcggaaggggctggctccgatgtgtttgatggtgaactgggaatgggggttagcaaagggccgcagagcatctctccacatgacctcagccctctacagcggtacagcgaggatcccacgttacccctgcccaccgagactgacggctacgttgctcccctggcctgcagcccccagcccgaatatgtgaaccagccagaggtgcggcctcagcctcccttggcccccgagggccctctgcctcctgtgcggccttctggtgctactctagaaagacccaagactctctctcctgggaagaatggggttgtcaaagacgcttttgcctttgggggtgctgtggaaaaccccgagtacttagcacccagaggaggcactgcctctcagccccacccttctcccgccttctgcccagcctttgacaacctctattactgggaccaggacccattggagcgggggtctccaccaagtacctttgaagggacccctacggcagagaaccctgagtacttgggcttggatgtacccgtgtgaggccacatttgcagagaccctgttctgccttcagagtg

SEQ ID NO: 1174 - DNA, 2393 bp, Cricetulus griseus
tggctctgactgagagtgcactatcccagcatggcttatcaaaagttgtgtacagtgggccccatcctcagagggagatgctgacagcacagtaacaggtttgtaagtgttgtacattccttttgttgtgttacaatgctgccttaacctatatgcccagtgtttctcttcaatcactgtgtcagatttgctcaagaatctgtgtctgtggatatcctcgacaacacatcagaaaatacaaaggtgtaagtagcagggtaccgatttcatccggattcatggtgcagatgctaacaggagtctattttgccttatacaatggagaatgggatctagctcagaaagcattggatgatattatatacagagcccagctagaattatatccagagccactgctggttgctaatgcaataaaggcttcattgcctcatggtgccatgaaatctagtaaggaaggtacaaggtgtaagcatgtcaataagaggtcacaggtggaaaagacatggagatacagaattaacaggtcaagaagaactgatggagataactgaagttgacgagggattttattccagggctgcgtctagcaccagccagtcgggtctatcaaacagtagtcacaattgtagtaacaagacaagtgtagggaagaaccagagacggtcgggaggaagcaaagctggagcaaaagagagagaaactgcaggggagtcttgcagagatcactttgctcgaaaacaaacccagagagcccagagcgagaaccttgagcttctctctctgaagagactgaccctgacctccagccagtccctgcccaagcccagcagccaaggtttggctaagactgcagccactgtgtttagtaagtcctttgaacaggtcagtggcgtcccagtcccacgcagtccctctcctgccgtcagctgtgttgctggggcagatgcccataggttttctgcttgtagtctccaagaagaaaagctcacttacgtgtcagaaaggactgagcttgccatgaagtatcaagcaggtcctcaaggaccccccagtattagcatcactttgtccgcagattaacttgtaacttattttctcctatgagtagtgaggctggaaagatggctttgctcctttatgaaagtaccgagtcctcatgcctggtcctggcaggaagcctgtgtctcgagttctgaaggctcctttgactatgaagggaaaatgtctagtttgcgttgtagagtgcaacgtatttacaattgagatatggttttaaatgcttacctaccaatttaagcctaattatcaaagacctgaggggttttttgtttttagcataaatgagtttaacattttagtttcagtaacagaatgaactgttggcttaaatgttctctaaagttataaggtaactagacagtaaaattgatattggaatgatttaatagtaatcttatgtacagttaaaaatgtttgtaaaatgtcactgtgaatttcctgttgtctacttataactctttaagaatttttcttacacatagttatgagcagtattgataatattaagaagaaattgaaaagattgtcattaggcaagttgaggtgcttgtttaagcatagaataagtttaaagaaacattatctggcataaatgagagattgggataatgttcaggttctataatgaaacctcattttgatattgttcaagacctttgatactcatgtggttcaaagatcattggtgttacctgttatcttaataaaacttcacaattttaggggcagacctattaaatcaaaactggcattttaacaaggtcccaagggatgcttgtgtgcatttgtctttgtgaagacagtttcagagtgctaattacttatctaatcaaatgatttactctgattttattctctgaagtatggagttatgttaacaataaattattttatactacttttgatactatttcaagttaaggattgtgcacatagcttttaccaagaggattccacacaaaactgggcccggcaccctatagttcactctgctgttaaaaaaaaaaaaaaaaaaaaagttaattaaagcgaaatctttaaaggaatttttgcccattttgggaagtcataactaaaatgttgaatggtaaattatggaggaaagtgtttactcctgaaacctgattttaagcaaagagttcattgtactcctagagtttacattcctaagaataaacatgactttgggtattttttatgtgctctctatgtttttaaggtatgaaataaactggagttttttgaagtttcatacatttgtataaacattctccatatgcagtactttatacatcgtgtttcctcttgttttgttgaaataaaaactaaaa

SEQ ID NO: 1175 - DNA, 2393 bp, Cricetulus griseus
gaattgccatctcacctcaggaaatgagaagactacccggcggaaccagaaccgcttagacatggatatccaggagatcctgaactacattagtaggagagagtttgagcccctactcagggtggaccagctcaacctggaacgagagaagcacaaggttttccttcgattcagtgaggaggagatatctttcccacccacctaccgctatgagcggggctccagggacacatatgcttggcacaagcagaagccaactggggttcggaccaatgtgccttcctggtgtgaccggattctatggaaatcctatcctgaaacccacatcatctgcaattcctatggttgcactgatgacatcgtcaccagcgaccattctcctgtgtttgggacattttgaggttggagttacttcccagttcatctccaagaaagggctctctaagacctcagaccaggcctacattgagtttgagagcattgaggccattgtgaagacagccagccgcaccaagttcttcattgagttctattctacctgcttggaagagtacaagaagagcttcgagaatgatgctcagagcagtgacaacatcaatttcctcaaagtacagtggtcctcccgccaactgcccacgcttaagcccattctggctgatatcgagtacctacaggatcagcatctcctgctcacagtcaagtccatggatggctatgaatcctatggggagtgtgtggttgcactcaaatccatgattggcagcacggcccagcagttcttgaccttcttgtcccaccgtggagaggagacaggcaacatccgtggttccatgaaggtgcgggtgcccacagagcgcctgggcacccgtgagcggctctatgaatggatcagcattgataaggatgagacaggagccaaaagcaaggctccttcagtgtcccgtggtagccaggaacacagatctgggagccgcaagccaacttccacagaggctccgtgtccactgtccaagttgtttgaagagcctgaaaagccaccaccaactggcaggccaccagccccaccccgagcggcccctagggaggagcctttgaaccccaggctgaagtcagaggggacagctgagctggaaggagtggcagcccctgcacccaagaacagcttcaataaccctgcctactatgtcctggaaggggttccacatcagctgctgcccctggagccacccccatttgccagggcccctgtcccacctgccaccaagaacaaagtggccatcacagtgcctgctccccagcttgggcgccaccggactcctcgtgcaggagagggaagctcatcggatgaggactctgggggcacactgcctcctccagatttcccacctccaccactgccggactcagccatcttcctgccccctagcctggatcctttatcaatgccagtggtcaggggccgaagcgggggtgaggcccgtggtccaccacctcccaaggcccatcccaggccaccactacccccaggcacctcacctgccagtacttttttgggggaggttgcaagtggggatgaccgatcttgctcagtactgcagatggccaaaacactcagcgaggtagattacgctcctgggcctggacgctcggcactcctccccagccccttggaattgcagcctccccgagggccttccgactatggccgacccctcagcttcccaccaccccgcatcagagaaagcatccaagaagacttggcagaggaggctccgtgcccgcagggcgggcgggccagcgggctgggagaggcgggcatgggtgcctggctgcgggccatcggcttggaacgctatgaggagggcctggtgcacaatggctgggacgacctggagtttctcagtgacatcactgaggaagacctggaggaagctggggtgcaggatcctgctcacaagcgccttcttctggacaccctgcagcttagcaagtgataagagatggctgccgagctacaaaagcgggtacatcctggtccccactaacaccaatgtttccacttccctccctcggacctgaaacacacgagttcctccttgcaactcctactctggggacgtcctccggaaatgaaggaagagcccagaactgggctgggtttatttaagttttgctgtgtgggttttggagagggagggcacattaattttattggggtggggcaggacctcggccataaaatgccagtttatcccatcttgggcactcggaaaggttgctggcttgatgtcttcaataaattaagttttatttggattgagcaaaatcaccttaataaattacaagtttttacaaagaaaaaaaaaaaaaaggaaaactaaaaaaaaaaaaaa

SEQ ID NO: 1176 - DNA, 2393 bp, Cricetulus griseus
gcggagatcagggagcgcgaccctcaaaagtatcctgtgcaagatcgagcacaatttgatctgcgatgctgacctgattcaggaaaggttgcttttctccatttgctcgaatggttcaatttcccatccgtcccaatgagagaggaggttctgaccttgttaagcagattggttaagtatcccccagcggtccagcacttgattgaccttggtgcagtagagttcttatctaagctccgtccacatgtggaaccagcaatgcaggctgagattgatggcattcttgatggactttttgttcttccttcagaagttcctattcagtgtactgccgattatcaaactgatcaaattgaattgtcacaacaacatgaagttttaacagggtatttctcccaagacaaaaggaatttccagcagatggaagtgccaccagtgccagttggaaaccagattcacttccctgggattgggatcagcactgaccactattgaagctggctgtgcggccttggcaaacagttgtcagaatatttctggtgggctctggggaaccgtggtgaacattcttctggatcaatcagaatgcagtatggtgcgccgggaggctgcatttattcttcagaatctccttgtaattccgatgccttcagaagctataaagaattatacttggcagggcccctgtgtccatgatgaggattctggcctgtcactcgtaggaaaacctgccctccaggcccttttgtatcattgccgtttctatgtgagccaacctctctttccacctcagaaacaatggtggcgacctccgtgggcagtgctgagccccagccgctgctgccgtcaacacttcctccccgaaaccatgcgtgaccagtttgtgactcgaggtcagtgtgaagcgagaccagtgcgacctcatgactcgtcgctgtctgctcccctgcacaagcagtatatgtttgttactccatctcttttgtcagccatctgcagccttttagacaacctcttggctgttactccaagagatgctgcaaatgcattgcaacaaagccccaatctcatagagcttctgtgtagtactgtggatgctctgtcatagagatgtgtatccaggaactctcagtcaggtgtcctgccctgagtattgccagcctccagttcctgtctgtccttttggcggaggaagaaaagaggcgtctccaggacaaggacagagcaaatgcatgccaggtcccaacattggcttcacttcttgatggagctcaggaaagtcataaatcttcagagcgacttaatgaaacaattcttcagtgctatgaaggaaaatcccccaaagatgtcctgaaaagagttgctgcaaatgcattgatgtcacttctggctgtcagcagaagagcgcagacgcatgctttgagagctgacctcatagagaactgcatggagcggatgaagcatatcaccgcacaactgaacctggatgtgctgaggcctgggaaggcaacactaaaaaaaaaggaggatggctttattaaagagctaagcattatcatgcagcttctaaggaattgtctttatcaaaatgaagaatgtaaagtggcagctcttgaagcacgtcttgtgcccattctgcactctctttggccttggcttttgatggaggattcactgatgcaaattgctttgcagttgctttgtgtctatactgctaattttccaactggctgcagttctctttgttggtcaaattatggacaatctgttcaaactgcccacaggggcactcccagcagctccctgatactgtgtatcctgaagcttgcttctcagatgcctgcagagaacaccaccattcagcagatggttttatgtttctttcaaacctggccttatctcatgactgcaagggagtaattcagaagagcaacttcctacagcacttcctgtcccctgacattgcctcaaatgatcctgaggctggatggctgcttagacttactcacagagatgagcaaatacaagcataagagcagcccttacatacctctgctgattgttcataacatttgcttcagtcctgctaataagcccaaaatcctggctaatgaaaaaattgttacccttctggctacctgtttagaaagtgagaatcaaaatgcccagaggattggagctgcttcactttgggctcttatttacaattatcaaaaggcaaaagcaactttgaaaaatccatcaataaaaagaagagtagatgaagcatattccatagcaaagagaatgttctccgattcagaagaaaatcctctaaatgtgtattatttgaatgccttgagaatcttgtacagctgcttaaccattcctgagccatgaggtactctactcca

SEQ ID NO: 1177 - DNA, 2393 bp, Cricetulus griseus
cctgctgctgcccttgcggccacgcaatggagcgccttgataaagcggcgctgaacgcgatgcagcctccagagttcagaaatgaaaattctttagcttcaaccctcaagacactcctgttcttcacagctttaatgatcacagttcctattgggttatattttacaaccaaatcttatgtatttgaaggtgccctcggaatgtccaatagagacagctacttttattgctgcaattgttgctgttgttgctgttcatgtcgttctggccctgtttgtgtatgtcgcttggaatgaaggttcaagacagtggcgcgaaggcaaacaggattaaagtgaacatcaccttttgataacatgaaattattttttgaatatgttaagtacttctgggatattgataatgaatacattttgcttgaataaagttgaaaggacatggtaaaatcaatcttaaggagtcagtcgcatttggctaaattttgaccctcccaataatgtggtcacttagaactttgaatctccattttcaaatgaacatttggaaaagtccgataggtacaaatgtatatgttaagagagttatatcgcatgctaggaaaaatttaattaccttataataacaaaaatgtatagcaatttgccttatacttgcttttcagtttttattaatttggctagattaagaaacactcagtgaagcaaaatctaaacttcccttttcaccggtggacttcctggaaaataccaggcacttgggtctgctgttattttatgctgtggagctagaatagagaaataggtgattagacataaagatatgtgtttgtgttatattattgttgacaaaaataagattaatgtgattattgaaggattgttcttaattctttaaatttaactattatatgtaatttgtatttaaaagtgagtatcctaaatataagggtctttattttgtaaagactgcaatgtttagtattatgatatttgagtctcagacattgtatgctagatttctagatggttaccttagtaggtggcctattgtatttagaactgtccactctattttcttcttatataatgctgaggtttctttagggatcttgtactatttgtaaaatacactgttgggttattttgtttgatttcaaacattgctaactacataatggtacaggtgtttttaaaagtattttaaccagggatacatgtaaacacatgtagtcccatttcccttgggattaaagtacaatgtgtttgaacattaaaatacatttttttcaaggtttctaactagtttcctcttgcacaaagtacatatttcatgatgtgttagaagaaaagctagagatgaactgttaagtgttttccggcaggaatatgttcactgatgttcaaaatctgattgaaacagtattctcaattagggagtatagcttgaaatgtaagtgcaagctattgattttaccccatttattgtaacaataccttctttatcttctgatgtttctcctaaataatgtttatcccaactactgaagaaatggaagtctgctgtaagatgcatctagtatcattcattcttcaaatggctgccaattcacgttacagtagcattctggtttgtaatgatagtaaagaattttaaacctgctattcagaataattgggtgtttcatgggaatctagtagtaattataataacttgaaagtttacattagaaaagtcatagtagcttgacaaaacttcttttcagggggatggaattatcttaaaaatgaattactctaaaagacattgggaagctacccatcaatacttaccctatgaatagtttaacccttcattccttagaaaactccagaatctctccatatcgctgccggccatgcttacacttgtgttaattgctatgtgtgcttgtagtagctgttctttttaagatgttccgtaagtcatattgtcagatatgcaatctagtcttccttccacgtttggtgaaatctcactgaacaggaataatagcaatagctaacaacatctgcacagcaccttacagtttgcaaagaacgttcacaatcttgtctgagtttgcatagtgaacatgttacagagatgtcccttgatgtcaatgctgagtgttagaagttttagtcaccagtgtcacttgctatgctgtggcacgactgggggtggggtgggggggggtggtagtgccaatgtgttgtctgtaaagcttgtatcatcacaatggggcctgcatttcttagccacttgcatcagactgacttgttaagtgatgcttttctagtcttttcctgaatggtttttgtattcagtatcgtagcctgtgatttgtattaatttaccacttgttgtcattaaaa

SEQ ID NO: 1178 - DNA, 2391 bp, Cricetulus griseus
gggagcttaggctccggtgccaggtcgggcgacggcgggagcctcggctccggtgtcaggtcgggcgacagcggaagtctgggctccggggccaggtctggcgacggcgggacctcgaggccgggcgacggcgggagctcgggccccgccggcaaggccgtaacgaaggatgaagatgagtggaaagaatttgagcaaaaagaggttgattacagcggtctaagagttcaggcaatgcaaataagtgaaaaggaagatgatgataatgacaagagagaagatccaggagacaactgggaagaaggtggaggtggtagtggagtagaaaagtcttcaggtccctggaataaaacagctccagtacaagcacctcctgctccagtattagttacagaaactccggagccagcaatgcctagtggtgtatataggcctcctggggccaggctaaccacaacaaggaaaacgccacaaggaccaccagaaatatacagtgacacacagttcccatccctgcagtccactgccaagcacgtagagagccgaaacaggtacttaaaatgaatgctgcctgaagttaaatgaccacatatggcacatctacatcttatttagggacatgaattttcaaaagtaaatcttttttttttttttttttttttttttttctttttaaattagagtttcccttagggataaagaaatggagaagagctttgaagtagtaagacacaaaaatagaggtagggaggaggtttcaaaaaaccaggcccttaaacttcagctagacaaccagtatgctgtgcttgaaaatcagaagtacagccacacacagtacagttaaacaatggtctttgctaagccttccaagataattagaccacagctaaccaccaagaacagccattcagcgtcttgattcctggatcaacagtgctgactgatgagaggaagacttcgagtccagtaactgtccctgttgcactatggaagttcaagagtcacaactgatctctatatgtgttggatttaggggtgttttcattgtcttaaatacttgtgaattagattcagcagtgtttccatagttgctctgcatataaaaccaaacctgcagccagtggtcatttcaaacatctttatgttcagatactgagccttcgcaaggttgactacctcagatttgctgcacttaattgtggatttcatgtggatcacaacttctgcataagattacagctattagtgtcggcgtgaaccttgaaaccaactcgactggattcctgtcaaagccttcagaagtcagccatctgggttctgatctgctgtaaaagatgaagagttaagtgaccttaattaacctgtcctgtgccccaccctaaggaatactctgtaagctgtggctatattagacttcctggaacaagccgctgtcagaactgatgtgtttggatcatctatgtggggctatgatttataatttaagtttttagtgttagtatgaggtgactgtagattcaattcaaccaaacttggatccaccaaatggggaatgggtgggggatagtcttgtttctttgaatacctttttataaagatagtgcttgttctgttccacattaaggccttgctttgacttggagtaagttctttgacagcatattgtgtggtgaaatagcctgaataaggcattggaattgtgaaatgccctgtgaatttgccaatccgtaggtggaaccagatagatcgcctttgataaaaagggcagcagatgccagtcttcactccaggtgctgctcaagcctcctctaatcaggtgtaacggaactgctgtggatggagtggtgtctgctcagtggatgagtgcagcagtgtaggaagccagggaggtgtagggcagtgttttcctgaccagactgcatgccattctgggcaataaagttggcatgatctgatccatccaggggaggttggatgattaggagtttgagattcttggttaaactgaagacttatttgggcaccaaaaaccttaacaaataatctcacaccttgagccacatacttcccttaacgtatgcttttacccctcacctccgaattctgtttggggttagggtttaagaagtgaacgaagacagatgtgaagaggtttgtttaacggcatactgtactggaacactgaagacctgcagcagatgtaaattccaagtcttgttctaattttttaagattgtgaaattatcaaaatgcacatgaatcaagttttaatacactgtctgggtggatgaggctgtccattgcaccatttctttctttgggttctcaggcatggttcggcagtgtaagaactctgtaacattaacattgaataaaaagtaaaccaatgga

SEQ ID NO: 1179 - DNA, 2391 bp, Cricetulus griseus
  modified_base (372)..(372): a, c, t, g, unknown or other
atggaactgggcatctctcctattgtcacctctggccttatcatgcagctcttagctggtgccaagataattgaagttggggacaccccaaaagaccgagctctcttcaacggagcccaaaagttgtttggcatgatcattactatcggtcagtccattgtgtatgtgatgaccggcatgtacggggacccttcggagatgggtgctgggatctgcctgctgatcaccattcagctctttgttgctggcttaattgtcctacttttggatgagctcctgcagaaaggatacggcttgggttctggcatctcccttttcattgctaccaatatctgtgagaccattgtgtggaaggctttcagccccaccacngtcaacactggccgagggatggaattcgaaggtgccatcattgctttgtccacctgctggccacccgcacagacaaggtccgagcccttcgagaggcattctaccgccagaatctccctaacctcatgaacctgattgccaccatcttcgtctttgctgttgtcatctatttccagggcttccgagtggaccttccaatcaagtcggctcgttaccgaggccagtacaacacctatcccatcaagctcttctacacctccaacattcccatcatcctgcagtctgctctggtgtccaacctctatgtcatctcacagatgctgtcagcacgcttcagtggcaacctgctggttagcctgctgggcacctggtcggacacatcatctgggggcccagcccgtgcttatccagttggtggcctgtgttactacctatctcctccggaatcatttggctcagtgctggaggaccctgtccatgctgtcgtgtacattgtattcatgctgggatcctgtgcattcttttctaaaacatggattgaagtttccggttcttctgccaaagacgttgcaaagcagctgaaggagcagcagatggtgatgaggggccacagagagacctccatggtacatgagctcaaccggtacatccccacagccgcagcctttggtgggctgtgcattggggccctctccgtcctggcagatttcctgggtgctattggatctggaaccgggatcctgctggcagtcaccatcatctaccagtacttcgagatctttgtcaaggagcagagcgaggtgggcagcatgggagcccttctcttctgagccttatgtgcccatggaccagggtgagggcacaggctccagaactgcccagaaaggatgctcttaccattggagtatgctaccgtggcatagggactttttaaattttttaattttttttaaaatttcatatcttttcattccactgtgtaaagtgctaggaaatttccaattgaatttttgctttttattctggcattggacaaaaaaaaacaatagaagtgaattgttagctgacagccagagggtgtggtaaccgattgttcccaagtatccaatgtaatttttatttaaacccttgcacttctcggtgcctggcagctgcaagggtcccaactgcccccaggcagtctgtggccctggttgaaggaagcacaaactagatgtctgcatggttctcatgcttgcctttcccaggttcccactagaaagggagctcctgtggtagccacctctgtcttcctcctgagaacttcctgttccagttttttagatttttcagcaaggatacaaggctgtggtttcagtcagagcaagtagaaattgtcagctcaccttaagacacaccagggtccaagttgttcacacaaggaggcaagagccctgggggatgtgcagccatttggtcacagcctgccagctatacctgggtccttctcacctcaatggaagtagcaaatgcctccctgactcagggctcctagggacccttgctgctgtacttgccagcaaatggcagtcaagggacagttaatcacttgcccctatacaggtcagcagcaggaccagatcccttgcccacggcccagaactcacaccatatcacatgtggccttgtctagacccagtcctgagcagaggagcctggtgccctcccagtccacagggtcttctcactgcccctcctctgccactgccacagagcagcagggcttcccacctatcttagggactccacagcttctggcaggcaggtgcagagtccccagctctgggttgtgctggggagcggagcccacagcctcatctgctgctgttgccatcaactgggcctagtagcctgtggttgatggtcagtgttagtgggtgagtggggatgacctggcttccaagaggactgtcactgtggacaccaaaatggcttaactgagatacagtgaaaaagtgacaaaataaaacctaacttttt

SEQ ID NO: 1180 - DNA, 2390 bp, Cricetulus griseus
  modified_base (2376)..(2376): a, c, t, g, unknown or other
agcagggcaagagcctgagcagccccacagacaacctcgagctgtctgcacagagccaaagtgacctggacgaccaacacgactacgatagtgtggcttctgacgaagacacagaccaggagcccttgcccagcacaggcgccactcggaacaaccgtgctaggagcatggactcctcagacctgtcggatggggctgtgacactgcaggagtacctggagctgaagaaagctctggccacctccgaggccagagtggagcagctcatgcaggtcaacagcagcctgagtgatgagctccggaggctgcagagggagatccacaaactgcaggcagagaacctgcagcttcggcagccgtcagggccaacacctacacccccacttcccaatgaacgggcagaacacgtacccatggggcccgctggaagcacccatcgcagggaccgccaggccttctccatgtatgagccgggctctgccctgaagccctttggaggtgcacctggggaccgagcctcaccacacggctccagcctttccacagcactgagctggaagatgatgccatttattcggtacatgtccctactggcctttatcggatccggaagggggtgtctgcctcttctgtgcccttcactccctcctctccactgctgtcgtgctctccagaaggaagtcgccatacgagcaagctctcacgccatggcagtggtgcagacagtgactatgagaacacacagagtggggaccctccacttggacttgaagggaagcgattcctagagctgggcaaggaggatgagctccaccctgagctggagagcctggaaggagacctagaccctcgggcgtccccacgcacagaggatgtcattctgaagacagagcaggtcaccaagaacattcaggaactattgcgggcagcccaggagttcaaacatgacagctttgtgccctgttcggaaaagatccatttggctgtgactgagatggcctctctcttcccaaagaggccggccctggagcctgtgcgcaattcattgcggctgcttaatgccagcgcctaccggctgcagagtgaatgccggaagacagtgcctccagagcctggcgcccctgtggacttccagctgctgactcagcaggtgatccaatgcgcctatgacatcgccaaggcagccaagcagctggtcaccatcaccacccgagagaagaagcagtgaccactttccctgcccttacccacaccctgggacctcactggccatgggagctgggccactccagacactaacccaccccccaacagagccactggcacaagtgcccttagtgccgccattctcctctggtatccaggtgccctggtgcccaccctctcaagaatgggaatgtgaggtgacaggagcttctgcccccccacattccatgcccatcaccctgtacatagcatccctacccttttgatgtacaggagtctcaaggaaccctcccagcccctcaccttccagggcaccctcagcaaagagtgggacagggacactccaaatggggcagctccgcctactgcaccctatccccatgagccagtttagccctaggggggctgagcaggggcatccccctcctttgtacattatctctggatgtctctgccctgtagccaccagccccctcttgctgctctttcatgccaaatggcccctgcctagagcacaggccccaacgtgtgtgccagggtccccagcagcaaacactggaaagtctttcttctcccaactttgtggtaactaagtgtccctgcgtgcctgcaactgcaatgtgagcggcagtgccgttccagagacctggcccacctggagctctgaggggcaaggaccagagtcgtggaatcagcattgggggtcagtgtccctctcccctacctggacagggggactgtcagggttaccagctgtggtccagttgctgctcctacttgtgcccctcactacaaacacaagaaaaaccacttccctccatctcttcccccatcccctatgggaagtgtgctggccaggcagagtgcagagctcctgagcctggggctggctccccagggcccccaactcagctggtggcggtagaactgagcccctctccctaacctctgcaaggccagcacccacatcactacctgcacctacagtgacccaccccctggaggcctggggatctggctgcagctgggaaggtggcaaggcattgacagcacccaccagctattctccccaaccaccttccctacctgtggtggtgggtagctgtcaagacgtgtgtcatgtacatttgtatcaaaaataaataagtgaccatgagaaaaaaaaaaaanaaaaaaaaaaaaaa

SEQ ID NO: 1181 - DNA, 2390 bp, Cricetulus griseus
  modified_base (775)..(775): a, c, t, g, unknown or other
  modified_base (849)..(849): a, c, t, g, unknown or other
  modified_base (1372)..(1372): a, c, t, g, unknown or other
  modified_base (1490)..(1490): a, c, t, g, unknown or other
ctgtaaaaccacctccttcccctgtgaatatcagatcgggaccaagtggccagtctttggctcctcccccaccgccttaccgccagccgcctggggtacccaatgggccctcaagccccactaatgagtcagctcctgagctgccacaaagacacaattctttgcataggaagacacctgggcccgtcagaggccttgcacctcctccacccacctcagcctccccctttttgttgagtaacaggccacctcccccagcccgagaccctcctagtaggggagcagctcctccacctccaccacccatggtccgaaatggtgccagggatgctccccctcccccaccaccttaccgaatgcatgggtcagaaccaccgagcagaggaaagcctccacctccaccctcaaggacgccagctgggccaccccctcctccacccaccccccttccgacggaagtggccatagagactccatcaccactgttcgttccccaaccctagactctaagcattcctcccggcccagctccatctatgcatctcatctctggacttggtgattggattctttctgttggcaacagggtctcaaaccctgtatccagacctcttccagcaagccctgctagccagaagaggagaaagctccatgtctcctgctttcttccagggaaaggtgccttgttatggtgaatggactcatgttgggcagggtggagaatgggacccctgtctgccattactcaccaaggggggatgtgttgtgtgtttanattccatagtttaggaggttggtgtggccaggactgctgaggaagggtacttttgtgaagcagggaggggtttncagagaagtgattaagacagggtttctctatgtagtcccggctgtcctggaacttgctctgtagaccagactggtctcaaactcagagatccacctgcctctgcctcccaggtactgggattaatgtcgtacactaccacacccggttcatagggacctttctaatctagtggaacataggctaaggatctgtgcatgatgccaggtgaaacccaaatcttccagtgctggtgaaggtgggcttaacttggtttatttatttattgggtgttaccctctgccatttatctcctggaccactttgactcttgggacaggcagtgattagatgtcactagacttctaattgttcacttgtttatcattcttctaaatgggagttgatgccttttgtacaatgttatcaaagtgtatagagatttccccttactgaatcaaagaacatcagaatatattgttggtgatacagcacctaatttaaatgtctttgccttatacatcaattggtcctgctttaaaaacngatttattaccgtgtatatttgctactgaagatgggactgtgatcctccaaactgttggtctattttgatgttgtacaaagcttgtaatacaggttttaaggtgggcgggctgcaagngcactgaaaatttcccttggactgcttttttatctgcttatggaatgtggtctcttcagtggaagattgggtggtctcacgttgaggctttttgtgggattttcccctaataggaaacactagtagctgtttcttactgtcctacctgaagctgggcaatggcctctgattttgcaatgagctagatgcccctctttccctttctctagtcaccaaacctggaccaaagtacttcgatattccaggtgtggctttttcctgtggatttaccgcagctacagagccctaccattttcacagcctaggccaattgtgtgagcagctagggctatcccagctgatggatgtgaggctgtcatcgccaggaattcactgtaaatagatgtgctacagagcaactcagggttggggtatgttttaattctcctgatcacttgaaacaatctgtaggctgagtgcttatgggagtgtggcagaaatgtgactctagggcccttctttctgtcgggctctggggtgggtggagtgtagggcgtcagaggcccctgatagcactatactgtgtggtcggtctgtgcttctggaaacccaaacctacagtcagctgcaaatcaggttcttcacattccagctgtcattcttctctccctgtgacttcagtcccctagttctgtggtaagggtgactctgttaagccacccaaatttagggaatgagagggaagagagggaggccactataattctgcttttaagactcatttcttaaacaagaacaaaaaacccaacaacaaccatttaactgaaggaagggttcggttccactcaactccacgttcattgtgcctttacttgtgttagatttctgtgctttcttcccccccctctatgaagtaattaa

SEQ ID NO: 1182 - DNA, 2389 bp, Cricetulus griseus
gagcggagcatcgagccagagggagatgagtttgcctgtcctcggctaagggctccggcccggcctgggttactgggagcttgggttggagcgacacccgtggaagtgggaggaggcggctctgggactttaaccccttgtgggctctgcggcaggggatttaaccctttgtggattcggcccctcggaggcagcgtcatcgggtagttttaacccttaggggctgggtttaacccattggacttaaacctcatctccttgcccaccaactcctccttcgtgggagcgctcggcggggaggcgtgaagcccacccctctgaacattacgtacggtgcctgccgctgcaccccttggacctgctagttggccacgcgtgtgagcacttaaccctttattgacttaactccaagttgcgattgaagtttgctgacaagacggacaaaaagcgtcactacagaaattcccggccgaagaggactttgttggacattttctgaaaagaaaaaaacctttttctccttaaggcaaaatttctcaaactttcagaagaggactctactaagccatggctgagccactcttgtcagagcatcaacaccagcctcaaactagcaactatacaggtgctgctgttgtccatgaggagcagaactctgaccgccccccgggcgcagaggaacgggtgcccaaggaggacagtaggtggcaatcgagagcgtccccgcagtcgggctgccgtcccgggcaggagggagaaggaggcctaaagctccagccgctccccttgcagaccaatgactgtccagaatcgagctgcctggaaacgggcgacaagggccagaacggggagaacctatccactggcggtacctccccgtcggtggaggggcaaccgatgtcagagtcccttgtcctgccgggtcatgacccggaggccaccaagttgggggctcctgcccctggaggcgaggaaccatggggacagcagcagagacagctgggcaagaagaaacatcggagacgcccatccaagaagaagcggcattggaagccctactacaagctgacttgggaggagaagaaaaagttcgacgagaagcagagcctgcgagcttcgcgggttcgagctgagatgttcgccaagggccagccggtcgcaccctataacaccacacagttcctcatggatgaccacgatcaggaggagcctgacctcaaaaccggcctctaccccaagcgggcagccgccaaatccgacgacaccagcgatgaggactttgtggaagaagctggtgaggaggatgggggcagcgatggcatgggaggggacggcagcgagtttctgcagcgggacttctcggagacgtacgaacggtaccacgctgagagcttgcagaacatgagcaagcaggagctcatcaaagagtacctggagctggagaagtgcctctcgcgcaaggaggacgaaaataaccggctgcggctggaaagcaagcggctgggtggcgtcgacgcgcgagtgcgggagctggagctggagctggaccgactgcgcgccgagaacctccagctgctgaccgagaacgaactgcaccggcagcaggagcgagcgccgctttccaagttcggcgactagacagaaaacttttggggggaggggcaaaaggggactttttacagtgctggaatgtaacattatatacatgtgtatataagacagcggacctttttatgacacataatcagaagagaaaatccccctggctttggtttggtaaatttagctatgatgttgcttgtgtgctttctcctgttctttaattatgtgaaactgaagggttgcttttcttgttttcctccttagatgtcgtttcttaatgtgcaagtaatttgaccaaattataatgcatttttctgttttaaaaaaaaaatcccctccttaagcggagctatgaggtggccaaatctgagacccattacattcattctagttataataaatttaatgtttgtaaatagtaactggtgaacttgctttcttagtacaagcaagagatacacttgtagtgcaactctttatgttaacatgttagaatattggacttgaaatggctaagtgatccaaggacttagcagctttgttgtccaatacttaagtgcttttctctattaagaaaagaaaagctggcctttctattagaatcaaactgaaatttgaaatgctcctttctgcaagtaaagctagttcaggagagagagggctgcagtccttaagtgatgactagaaacgctgtgtgctcctagtgcagcagctattctcaacctcctgggctgttggacagctgcacaggttaggatatatatatatataatatatatatatatat

SEQ ID NO: 1183 - DNA, 2389 bp, Cricetulus griseus
  modified_base (61)..(61): a, c, t, g, unknown or other
acaggaatcacttaccatggaagccagggaacttggagtcccacacccacctaccatcttntccccaaggccaagcagcatgctgtaaaagaagatgttagctcaccatctccagggcctgcagagactgtgcagctgaagaaggagatctccttgctgaatggggtcagcctggtggtggggaacatgattggctcagggatcttcgtctcacccaagggtgtgctgagatacactgcctcctatgggttgtcactgattgtttgggccactggcggactcttctctgttgtgggtgccctttgttatgcagaactgggaaccaccatcaccaagtcaggggccagctacgcttaacattttagaggcctttgggggcttcattggtgggtctcacttctaatcgttgagcccaccagtcaggccatcatcgccatcactttcgccaactacatcatcaagccctccttccccacttgtgatcctccatatgtggcctgccgtctccttgctgctgcctgcatatgtctgctgacatttgtgaactgtgcctatgtcaagtggggcacacgagtacaagacacattcacgtatgccaaggtcgtggcactcattgccatcattgtcatgggatttgttaaactgtgccagggacacactgagcactttcaggatgcctttgagggttcctcgtgggatatgggaaacctctctcttgccctctactctgccctcttctcttactcaggttgggacacccttaattttgtaacagaagaaatcaaaaacccagaaagaaatttgcccttggccattgggatttctatgccaattgtgacacttatctacatcctgacaaacgtggcctattacacagtgctgaacattcaagatgtccaggagagtgatgcagtggctgtgacatttgctgaccagacatttggcatgttcagctggactatccccattgccgttgctctgtcctgctttggggcctaaacgcatccatctttgcttcatcaaggttgtttttcgtgggctctcgtgagggccacctcccgaaccttctgtccatgatccacattgagcgctttacacctgtgcctgctttattgttcaattgcaccatggcacttatctacctcgtcgtgaaagatgttttcctgctcatcaactacttcagcttcagctactggttttttgtgggcttgtctgtggttggacagctctaccttcgctggaaagagcctgacaggcctcgacctctcaagctgagcctcttttttcccatcgtgtactgcatatgttccttgttttggtggctgtacctctcttcagtgacaccatcaattctctcattggcattgggattgccctctctggggtccctgtctacgtcatgggtatttacctgccagagtcacggaggccactctttattaggaatgttctggctactgtcaccagattaacccagaagctttgtttttgcgtcttgactgagcttgatgtagctgaagagaaaaatgttgagaggaaagaaaactgactaggagccagaggtgacattctctgaagcccagaggctgtgaccacagccatcaaagaccagttacctaacccttctgaatgaaaggagcctcttggcccacattctgtaaggggactcagggccagtgctctctcattggtaagctgtggaagatactgatcagaccagcctgaagatgagacttcagtgggaggggaggttgggacaagggattgatttcgtttttcttcttaaaccaggaatctttacagtggggctctttcatgggaaatcttcatctgaccaagtacagctacttgattttagaagcctgaaatgctgccatgtctttctgtggctcaaaattcttccttagggaaaatattgtgtccccccccctttttgtttgttgggtagcatgaacagcaaggctttatttaactgacatgggatcaatgtgcgccctcattcctgaattccacaagaggaatatcactccctgccctggaacttcatgttcaagcaaagaatatagcttgatgagaggaagatcgactcttcagggtcagggcatgaaagccctcgtgggtctgaatgttgggaatccttgggatctcgttgtgtacagtgtgcctatctccttgaggaggtgctgcctgtctgactgactttgctcagatcattttagcactatggccaaaatccttaagcaaggaggtgagcttctggctcataaagaaattgttttggatactagattgcctccttcctagctgaagccatggtgctgtggagctcttgaaacaagggctgaaagaaaacctcactactacagctgagtgggagtatctctgctac

SEQ ID NO: 1184 - DNA, 2389 bp, Cricetulus griseus
aaggcaattggttacagagaactggaaacaggaagaagccttcaccttggcacaggaggtggctgcccttgagcccacagatgacaactctctgcaggccctgaccatcctctaccggggagatgcatcggccggagttagtcacgaagctttatgaggcggctgtgaagaaagttcccaatagcgaggagtatcactctcacctcttcattggcctacgccagagtgggcgagtacaagaagatgcaacaggctggcatggctctgtataagattgtccccaaaaacccttactacttttggtccgtgatgagcttaatcatgcaatctatatccgcacgagatgaaaaacctctcaaaaaaccatgtttctgcccttggcagagaggatggtagaaaaaaatggtgaaagaagacaagatagaagccgaagctgaagttgaacttttattatatgatcctggaacgcttggggaagtaccaggaagctctggatgtcattagagggaaattaggagagaagttgacaagtgagattcagagtcgggaaaaacaaatgcatggctatgtacaagaaactgagcaggtggccagagtgcaacgccctttccagaccgtctcctgttaaaaaactcagatgactggcagttctatctgacttattcgattctgtctttcgactgatacagaggacaaactggccctgccagctgacatccgagccctgcagcagcatctgtgtgttgtgcagctgacaaggctgctcggcttgtaccacatcatggacaagaaccagaagctgggtgtggtcagagagttgatgttaaggtaccagcatggactggagtttgggcgctcttgtttgaagacagagttgcagttctccgactattactgtctccttgctgtccatgtgctcactgatatatggagagaagcaggtgaggagactgctgtgtggcaggccctgactctgctggaagaaggattaacccacagcccatcgaatgctcagttcaaattgctgcttgttcgaatctactgcatgctgggtgcatttgagccagtggtggatctttactccagccttgacgccaagcatatccagcacgacaccattggctatcttctgacccgatatgctgcatccttgggtcagtatgctgctgcctcccagtcctgtaacttcgcactcaggttttccactccaaccagaaagatacctcagaatacattattcaagcttacaaatacggtgcatttgagaagatcccagagtttatcgcttttaggaataggctgaataattctctccactttgcacaagtgcgcactgaacggatgctgttagaccttctacttgaagcaaacatatcaactagcttggcagaaagtatcaaatcaatgaatctgagaccagaggaagatgatgttccatgggaagatttgagagacaacagagacttggatgttttctttagctgggatccaaaggacaggaatgtttctgaagagcataagaaactctccttggaggaggagaccatgtggttaagaattcgcaccttaacgctgaggctcatcagtggacttccgagtcttacccaccctgtggagccaaagaactcagagaagacctccgagaatggtgtgtcctcccggattgacattcttcgtttgctcctccaacagctagaagtggccgtggagacggggaagcgatttattgagaaggaaattcagtatcccttccttgggcctgtccccaccaggatgggcaggttcttcagctctggttgctgtcagtgccaggtccgctcctttcatcttgtcagtgatgtgtatgagcttgataccagtggcttagagggtacagtcgatatacaggaacggatagaaaatagtcttacatctttactagaactattaaaaggtgtcttcagcacgtgtaaaggtgaactcttagaagttacagatggtaacgtgaagacacagcctgccatcctggagaatctggtcttctttgtggagactgtctctgtcatcctttgggtatccagttactgtgagagtgtcttgcgaccatacaaattaaatataacagaaaaaaaaaaagcaaagactgtgcaggggaaagtgcagagcagttacctgcactcacttctggaaattggggagctgctcagaaaaagacttgagaccacaaagaaactaaaaatttaagaaagtatgaaccagaggcactgaagatgctccagcagaagacgacacaccaccttctccagcaacagcaccgtctgctgctggccatcgttttcatccagaacttcctcacaaatgcatgaaggactttgatcgtgaattaatttttgaggtattaaatatatac

SEQ ID NO: 1185 - DNA, 2388 bp, Cricetulus griseus
gttttgctggcctaccaggcctgcagctcctggacttgtcacagaaccagatcactagcctgcctggtggcatctttcagccactggttaacctcagtaacctggacctgactgccaacaaactgcatgagatctccaatgagactttccgaggcctgcgacgccttgaacgcctctacctgggcaagaaccgtattcgccacatacagcctggtgcctttgatgcacttgaccacctcctggagctcaagttggaggacaatgagcttcggttgctgccccccttgcacttgccccgcctactgctgcttgacctcagctacaacaatatcccagccctggaatctggagtactacacactgccaatgtggaggcattgaggttggctggcctggggctgcggcagctggatgaggggcttttttggccgcttgcgaaacctccatgacctggatgtttctgacaaccagttggagcacatgccatctgtgatccaaggccttcgtggcctcacacgcctgcggctggctggtaacacccgcattgcccatatacggcctgaggacctggctggtctgactgccctgcaagaattggatgtgagcaacctgagcctgcaggccctgcccagtgacctctcaaatctctttccccgcctgcgactcctagcagctgcccgaaaccccttcaactgcttgtgccccttgagctggtttgggccttgggtgcgtgagagccatgttgtactggccagccctgaggagacacgctgtcacttcccacctaagaatgctggccgactgctcctggatctggattatgcagattttggctgcccagtcactactaccacagccacagtacctaccataaggcctactatcagggagtccacactttcaccttctaaccgagcttccacatggcccagcctcacagagccaactacccaggcctccacctcaccatccactgccccaccaaccatgaggcctgttcctcagccccaggactgcccagcgtccacctgcctgaatggtggtacctgccgtgtaggagcaagacaccaccgggagtgcctgtgtcctgagggcttcattggtctgtactgtgagagtcctgtgaggcaagggatgaagcccagctccataccagatactccaaggccccctcggcccctgcctctcagcattgagccagtgagccccacctccctgcgtgtggggctgcagcgttatttgcagggcaacacggtacagctccgcagcctccgcctcacctaccgcaacttgtctggccctgacaagcggctggtgaccttacggctgcctgcttcacttgcagagtacacagtcacccagctgcgacccaatgccacctattctatctgtgtcacacccttgggagctgggcggatacctgaaggtgaggaggcctgtggggaggccagcactccccaggctgtccgctccaatcacgccccgttacccaggctcgtgagggcaatctgccactccttatcgcacctgccctggctgctgtccttctagctgtgttagctgctgcaggagcagcctactgtgtgcggcggggtcggacaacagttacagctcaggacaaagggcaggtgggaccaggaactgggcccctggaactagagggggtgaaagcacccttggagccaagctctaaggcaacagagggagttggggaggccctgtcaggtggtcctgaatgtgaggtgccccttatgggctactcagggcccagccttcaggggcctctccctgctaagcactacatctaagccaggagagatacagcagccagggggccaggctttcggtcgccaccctcctgctgccacacaagcaagttctcattatgcaccccagggcacatacatgcatggtgctgtgggaccctctctgggctggatctcatttgtgagctgctacagcccagatgaactattatagccatcagtatgtccaatacaggcgcccactgtcttctgcagtgtgcaatcctggggtgtgagccctgccatgtgctggtaacatggataggcaagttgggcttcccaagccaccgagtctggtgaccagtaaaggaaggccccagaagtagtgggtggggaagacactatggctgtggccttggccccaaaagtgcaggaacacttgaaactggaaaggaaggtgctttgggcacatgtggatttgcttctattgttttgttttgtttttaaaaatgtatttataaaagatgtttcccgtttatgctgggaaagtgttttccaaaactcagtgacaaggactttggtttttgtaagactattgatgatatgaaggccttttgtaagaaaataaaaaaaaaagtaaatt

SEQ ID NO: 1186 - DNA, 2387 bp, Cricetulus griseus
gcccctggtggtatggtggagttccggcgcaccctcaccctcagcttcttcttcaagttctacctgacggtactccagaagctgggcagagtgaaccctgagaatgtgtgtggtaagctggaccccacctttgccagtgccactctgctctttcagaaggaccctccagctaacgtccagcttttccaagaggtgccaaaggatcagtctgaggaggacatggtgggccggcccctccctcacctggctgctgaaatgcaggcctcgggacaggctgtgtattgcgacgacattcccagatatgagaacgagctgtctctgaagctggtcaccagcacccgggcccatgctaagatcacgtccatagacacttcagaagccaagaaggtgccagggtttgttgcttcctcactaaagaagatattcctagtagtaatgaaactggcacctatgaagaccttccagccatcatcacaattgaggatgactgtaaagaacaactccttttatggccctgaagataaaaattgagaaaggcgatctcaagaaaggcttttctgaagctgacaatgtggtgtcaggagaattgtatattggtggccaggagcacttctatctggagaccaactgtaccatcgctgtcccaaaaggcgaggcaggcgagatggagctcttcgtgggcacacagaacaccatgaaaacccagagctttgttgcaaaaatgctgggcgttccagataaccggattgtagtccgagtgaagagaatgggaggaggctttggaggaaaagagacccggagcactgtggtgtccacagccgtggccttggctgcatacaagacaggccgccctgtacgctgcatgctagaccgtgatgaggacatgctgataactggtggcagacatcccttcctggctaaatacaaggttggcttcatgaagactgggaatatagtggctctggaggtggctcacttcagcaatggtgggaacactgaggatctctctcggagtataatggaacgagctcttttccacatggacaacgcctataagatccccaacattcggggcactgggaggatttgtaagaccaatctgccctccaacacagccttccgaggctttgggggtcctcaggggatgctaattgcagaacactggatgagcgaggtggctgtgacctgtggactgcctgcagaggaggtacggaggaagaacatgtacaaagaaggagacctgactcacttcaaccagaagctggaggtgttcaacttgcccaggtgctgggatgaatgcatagcaagctctcagtatttcgatcgaaagaaggaagtggagaagttcaacaaggagaattgttggaagaaaagaggactgtgtataatcccaaccaagtttggaataagcttcactcttccttttctgaaccagggaggtgccctggtccacgtgtacactgatggttcagtgctgctgacgcatgggggtactgagatgggtcaaggtcttcacacaaagatggttcaggtggccagtcgagctctgaaaatccccacctccaagattcacatcagtgagaccagcactaacactgtccccaacacttctcccacggctgcctctgccagtgctgatatcaatggccaggctgtttatgaagcttgccaggtcatattgaaaaggctggaaccattcaagaaaaagaaaccccaaggctcctgggaagactgggtcatggatgcctacacaagtgcagtgagtttgtctgctactggattttataagacacccaatcttggctacagctttgagacaaattccgggaatcccttccactatttcagttatggggtggcttgctccgaagtagaaattgattgcttgacaggggatcataagaatctccgcacagatatcgtaatggatgttggttccagcttgaaccctgctattgatattggacaggttgaaggggcatttgtccagggccttggtctcttcactatggaggagctgcactactcccctgaggggagcctgcatactcgtggccccagcacctacaagatacctgcatttggcagcatccccattgagttcagagtatccctgctccgtgactgtcccaacaagaaggccatctatgcctccaaggctgttggagagccccctcttttcctggcttcgtctatcttctttgccatcaaggatgctatccgggcagctcgagctcagcatggcggtgataatgcaaaacagcttttccagctaaacagccctgccactccggagaagatccggaatgcttgtgtggaccagttcaccactctgtgtgtcactggagcatcggaaaactgtaaaccctggtctgtgagggtctgaa

SEQ ID NO: 1187 - DNA, 2387 bp, Cricetulus griseus
ccttttcaccaaactggaagagttggtccagcggcaacaaggactcaagagatagaagactcatactgtggtattacgaacaccaactgaaacacttagtagcggaatttgtgcaggtcctagaaactttaagtcacgattccttggtaaccactaaaacccgagccctggtagctgctcatgagcttctctgtgataagcccgaggatggaaaaggctcttcttatgcaggtggtgaacaagctgggagaccctcagaacaaaatcgccacgaaagcttcccacctgttagaagtgttactgcggaagcatcccaatatgaaaggagttgtgtgtggagaaatagaaaggcttctctttcgctccaacatcagctccaaagctcagtattatgcaatttgctttttaaaccaaaatggtcctctcccatgaagaaagtgagttggctaacaaattaataactctttatttttgcttctttcggacttgtatcaagaaaaaagacattgaatcaaaaatgctcagtgccattttaacaggagtgaacagggcatatccttattctcagataggtgacgacaaagtgagggagcaggtggacactttattcaaagtgttgcatgttgtaaattttaatactagtgtgcaggctttaatgctacttttccaagtcatgaattctcaacagacaatatctgatcggtattatacagcactatacagaaagatgttggatccagggttgatggcatgttcgaagcaagcgatgtttcttaaccttgtctacaagtctctgaaaacggacgtcgtgttgcgccgggtgaaggcctttgtgaagaggttacttcaggttacttgcacacagatgccgccattcatctgtggagcgttgtatcttgtgtcggaaatccttaaagcaaaaccagatttaagaagccaactagatgatcatccggaatctgatgaagaaaactttgttgacgtgagagatgacagtgacatagaaaagttcactgatgcagacaaagaaacggcagtagaggagataaaggaagtcggggcagaagacacggtgactacaagcagcacaaaagctgagaaacccaagactgcttcctgggtgcactttgacaacctgaagggtggcaagcagttaaaaacatatgatccattcagtagaaatcctttgttctgtggagctgaaaatacaagcctttgggagctcagaaagttatctgagcatttccacccttctgtggccctttttgccaagactatccttgaggggaattttattcagtattcaggggacccgctacaggatttcacactaatgagattcttggatcgatttgtataccgaaatccaaagctacacaaaggcaaagaaaatacggacagcgttgtgatgcagccaaaaaggaaacattttatagaggatgtccgtagccttgctgtgaatagtaaagagttccttgcaaaagaagaaagccagatcccagtggatgaagtgtttttctacaggtattataagaaagttgctgttgttaaagagaaacagaaacgcaacgaagatgaagatagcatagaagatgttgatgataaagaatttgaaaaaatgattgacatatttgaagatgataactgcttcacacctgggaaggatgatattgattttgccagcaatatgaaaaaacaaaaggagccaaggagaacttggaagattcagggagtagtgatgatgagcttggtgaccttgatgatgacgaagtttctttaggaagtatgaatgatgaagactttgacattgatgaagatggaggaacattcatggatgtgtcagacgaagaaattgaagatggtccagaatttgatgaagtcagctccaaagctaatactaagaaaagcaagagaaagagtgaagataatattgattttgctgggtcgtttcaaggagcacagaagaaaaggaaaagctttgataactccagcctgtttgtctctgctgaggagtttggccatctgttggatgaaaacatgggatccaagtttgataatcttggcatgaacgccatggctaacaaagataatgcaagtttcaaacagctcaagtgggaagctgagcgtgatgattggctacacaacagagatgtgaaaagtatcatcaagaagaagaaaaatttcaaaaagaagatgaaaatccctcaaaaatccagaaagcaaaggaaatgagccctttggagttaataataaattaagattctactcacccttaatttttgctatccaaccatttttcttgatctttctctctaattccatacattccagacttttcagtggatttgtaataaactatagaaacaaaatgctgtcatttataaaat

SEQ ID NO: 1188 - DNA, 2387 bp, Cricetulus griseus
gtattgcttcattctcaggacggtgtcgtggcagaaagagagcatatttaatgattcatccgaagacatggaagccagtgattatgagttgaagatgaaacaagacctgctaaaagaattacaattaactgaaagcaatatgaagtcacggtatgaaactgaatttcatgagctggagaaaattggttctggagaatttggttctgtgtttaagtgtgtgaagaggctagatggatgcatttatgccattaagcgatcaaaaaagccattggctggctctgttgatgagcagaatgctttgagagaagtctatgctcatgctgtgcttggacagcattcccatgtggttcgctatttctctgcatgggcagaagatgaccatatgcttatacagaatgaatattgtaatggtgggagtttggctgatgctataagtgagaactacagaaccatgagctactttactgaagtagagctaaaggatctgcttttgcaagttggccggggcttgagatacatacactcaatgtgtttggttcatatggatataaaacctagtaatattttcatatctcgaacctcaatcccgaatgctgtctctgaagaaggagatgaagatgactggatatccaacaaagttatgtttaaaataggtgatcttggacatgtgacaagaatctctagtccacaagttgaagaaggtgatagtcgatttctagcaaatgaagttttacaagagaactatagccatctcccgaaagcagatatttttgctcttgctctcacagtcatatgtgctgctggtgctgaacctcttcccagaaatggagaccaatggcatgaaatcaggcagggtcgattacctcggattccacaagtactttcccaggagttgacagagttgctaaaagttatgattcatcctgatccagaaagaaggccttcagcaatggtgctggtgaagcattcagtgttgctgtctgcatctagaaagagtgcagagcagttacgaatagaattgaatgctgaaaaattcaaaaattctcttttgcagaaagaactcaagaaagcccagatggcagctaaagttgcagctgaagaacgggcactcttcacggatcggatggccactaggtccaccacccagagtaatagaacttctcgacttattggaaagaaaatgaaccgctctgtcagccttactatatactgaactgctcacatcccccactgccccaccccccccaaaaaaaaaactgtgacaagaggaagctaggttgaaatcactgctagaatccgctttgcaattactttgtccattggtatcagtagttttcctgaaatgccttttaggacttatgtgaattacagttgagaggtatattctgacttggttatgtcaggtttttgtctcatcttcccgtctgtttcatgtaggatgtcagtcactgttggatgttccaccagcctttgcagggttaaccaccgtggtggtgtgctgcttatcattcactgttgcagtgtgatgaaaggtatcttgttacgacccatagaaaggactcaagggctttactgcaaacatcctctcccttcaaaaagggaaatgctcagagactcagtactactcagcctccacagtacctgtgtcagtcttatgtttctttttttctattgtgaattatacttgtatatccaactgggagcactttaggctcgtgtgcaccatgggatggtcattctgtggaagccttgccttgtgaatttgctgctattttagtttcctcttgctgtaaaactagcattaaacaatcattgttgttaataggctttctttcaaaacaattatgtgaaatatgtagctgctcttcatggaaagcagctttgcctttttttttttctttggactttgaagctagtgcattgaaaaagtgcacctgtccccttcctgtttgaatgctgtattaatgtagtataattattactggttttgtaaatttttcttataatgtccttctctgactttaaaacatgtttcctcctgtcaagtcctgtacttggttgtatggttagtctatttttaaatgtttcgcccagtttctcttcaatatttgtgtatataaattgatcttggtaatactgtacatagctgtttgaaatgccagaatgacttctgactattccaagttttacacaaaatacattttatctgtgattagccatttgactaacaaggtttggctaatagatgttgccctccgaaaagggggggaaaggctcatttgttttcctattaacgttggtctgaaaaacatttgcacttgtctgtttgacttgtgttttattaacattgactggtgtattaaaagtcactctgtgcttaaccttaa

SEQ ID NO: 1189 - DNA, 2386 bp, Cricetulus griseus
gccctattgcacagctcgcccgacctgacgacaaccctcaatgaagcagccagtgctgcaggggtcgttggtggcatggtggactctatcacccaggccatcaaccagctagatgaaggacctatgggtgagccagacggttcgtttgtagattaccaaacaaccatggtgaggacagccaaggctattgctgtcactgttcaggagatggtaaccaaatctaacaccagccctgaagagctgggccctctcgccaaccagctgaccagtgactatggccgactagcttcacaagccaagcctgcagctgtggctgctgaaaatgaagagataggtgctcatatcaagcaccgagtacaggagctgggccatggctgttctgtcttggttacgaggcaggtgctctgcagtcgtaacccgagtgatgtctacacgggagccaggagaaattggcacaagctgcccagtcctcggtggccaccattacccgtctcgctgatgtagtcaagcttggtgcagccagcctgggagctgaagacccagaaactcaggtggtgctgatcaatgcagtaaaggatgtagccaaggccctgggagacctcatcagtgcaacgaaggctgcagcaggcaaagttggggatgaccctgcggtgtggcagctcaagaactctgccaaggtgatggtgaccaatgtgacatcattgctcaagacagtgaaggctgtggaagatgaggccaccaaaggcacacgggccctagaggcaaccacagagcacatacgtcaggagctggcggtcttctgttccccagaaccaccagccaagacctctacccctgaagatttcatccgaatgaccaagggtattactatggcaacagccaaagctgttgctgctggcaattcttgtcgacaggaagatgtcattgccacagccaatctgagccgacgtgctattgcagatatgcttcgggcttgcaaggaagcagccttccacccagaagtggcaccagatgtgcggcttcgagctctgcactatggccgggaatgtgccaatggttacctggagctgctggaccacgtgctactgacccttcaaaagccaaacccagaactgaagcagcaattgacaggacactcaaagcgggtggctggctcagtgactgagctcatccaggctgctgaggccatgaaaggaacagagtgggtggacccagaggaccccactgttattgctgagaatgagctcctaggagccgcagctgccattgaggctgcagccaaaaagctagagcagctgaagccccgggccaaacccaaggaggcagatgagtccttgaactttgaggaacaaatcctagaagctgccaagtccatcgcagcagccaccagtgcactagtaaaggctgcatcagcagcccaaagggagctggtggctcaaggaaaggtgggcgccattccagccaatgcactggacgatggacagtggtcccagggcctcatttctgctgcccgcatggtggctgcagccaccaacaatctgtgtgaggcagccaatgcagctgttcagggccatgctagccaggagaaactcatttcctcagctaagcaggtagctgcctccacagcccagctcctggtagcttgcaaggtcaaagctgatcaagactctgaggcaatgaaacggcttcaggctgctggcaatgcagtgaagagggcctcagacaacttggtgaaggcagcccagaaggctgcagcctttgaagaccaggagaatgaaacagtggtggtgaaggagaaaatggttgggggcattgcccagattatcgcagcacaggaagagatgcttcggaaggaacgagagttggaagaggcacggaaaaagcttgcccagatccggcagcagcagtacaagtttttgccttcagaacttcgagatgagcactagggaagccatttctatttaatgcagacccagcccagagactgtgcctgccactaccaaagccttctgggctgtcagggcccaacctgcccaaccccagcactcccctaaagtgcctgccaaaccccgggcctggccctgcccagtcccactgcaagccctgtcctctccctgactccaagtgccttcgtaccctagggcccctaagtgcctgtcccttcccagagtattaacgctccaagagtattattaacgctgctgtacctcaatttgaacctgccagggcctccggctgctccaccctgccagccgcttccagccagtccccacagctgcatcagctcaactcatcctattttgatactatatggcctaccccagctacctatggagcttgggggttgtaaacccaaaaggtcatgctccaataaaggtgattacta

SEQ ID NO: 1190 - DNA, 2385 bp, Cricetulus griseus
gttccatactttgtcctgcacctgtcctgaacagagctggagaaactcttgaagtttcaatcagctttaatgatgggaagtctgctgtctcaagatctttaacagtcacagctacagaatgttctaacgggatcgcagcaatcatagctattttggtgttgttgctgctcttgggcatcgctttgatgtggtggttttggcccctttgctgtaaagtggttatcaaggatcctcctccaccaccttctgcaccaaaagaggaggaggaagaagagcctttgcccaacaagaaatggccgactgtggatgcgtcctattatggtggtcgaggagttggaggaattaaaagaatggaggtccggctggggagataaaggatctactgaggaaggtgcaaggctagagaaagcaaaaaatgctgtggtgatgatccccgaagaagagacacccgtcccaccgagaccacctcgacccaaacccacacaccagacccctcagacaaagtggtacacgccaattaagggtcgtctggatgcactctgggccttgatcttgaagcagtatgaccgggtgtccttgatgagaccccaggaaggagatgagggccgatgcataaacttctccagagttccccatcaataaaaggagagcacaaacagtgagaagagaagaaaacattttcatacacttcctctgccatctacatgagaggcgatgaaactcggccataactcgtgattcatgacactgaagatacagcggaatgctaatttgcatgctacggtttatgcagagctcatttgaatgtgtaagaggacaaagcagacagtgatgatgcaaagatgagaccaaagcaaagactgaaaacctaccagccttgcggctctgtaatggtgaatggtgcttttgacatggatgtagagtgtgtgtgcttttgtttggcaagatcttcagttacatgcagatcatgaaatttccttccaggctaaacaaataagggagtcaactgccttgaagctatgtcagatagctaaagccttcgaagtcctctattactttgtgccttacgggagatttctgactagaaaatcttgtcactgttacactgaaagtgcacacgcatgacaaaatgtagacgagatgcctcaaggtactggatgcaagcaggattttgccctttagttttccaagacacctttctttcattatgcactcgggacaagagaattaatagagcgttaattcaacaggaagaccgcctccaaccaaagacctggcgtgcagcataaggactcatgatttgagaccttgtccccagactggtagatttccttttctcagtgtttacgatttagcagtacgtaaagcgttaatatctgtaaacacacctaggtgtttgtttggctttttaatttaaggaagcagtagccaccaagcttccgctctagggttttttcctttcgttcaagtctccaagggctcttcagcgtcacaagccagcaactctctttgcatgaaaatttcaaagtttaattaatataattaaaggcaacagcaagcagcagcctgtgaagactttgctcatcttttttatgccttttgacattgaatgacctaccactgtatgcatgttacttgggtattgagaagcaccgcgccttggttgtgattcagccatagaaaaagacttcctttcttcagtttataaattaaaatcaggaggggcgccatcgggaagcatcgacaatatacgtactataaatttttagaaatatcaccatcgtgtcacatcaacgatgccaaattatgttagcgtgagcagaaacacggtgggggaggaaggcggcagcagctgaaggaaatagctcagatgatctagtcactttcgatactgtacttcagatgcgaaatggatattcgactggaaacctgacaaagcgcgcctgctttgatgggaactggtatagacaatgaccagtggccgggtcagtgggatgtctctctgtgagcacaaaggcttatcaaatgacactaaaaataagttcaacaaccatcactttggaagggagaaggcgaacattttatgtttggcgggcatgtgagtgcacaagacggaaaaagcgatttggagcatcccggtataattacccacattgtgctctttatggaaatttcaaagggctgcagtgatacttttggtcagtgtccaggtttgtggcattgctccaagaagccttacgcacacacacaaatatacaaatgcacacacatattctctagcttgaattttttttgctcaagcttatttatatcactgactggctggatccaaagtcacactttcacatattaaagaataaatttttttacccaaaaaaaaaaaaa

SEQ ID NO: 1191 - DNA, 2385 bp, Cricetulus griseus
gcccctggccatggatgtaggggatgacctgaaggatgagatcatccgcccatccccctccctgctgaccatgtccagctcccccatggtagccctgatgacccgccatccatctcccccatcaacggccttggcctgctgcgtagtacgtacctttccactcaggatgatgtggacctgtatacggactcggaacccagggccacctaccggaggcaggatgctctgcgaccagatgtatggctggttaaaaatgatgcccaccccatttaccacaagcgttcaccccccaccaaagagtctgccctctccaagtgccaaaactgtggcctgtcctgcagcctcctccctctgccagcgctgtgacagtctacttggctgtccttcggcctccaagcccagcgcctttcccagtaaggcctctgctcatgacagcctggtccatggggcgcctatgcgggagaagtatgtgggccagactcagggcctcgatcggctgccacctgtacactcaaagcccaagcccctctaccacagccacctcccgctgtggcttctgtaaccgggtgggtgccaccaacacctgcacccagtgttcaaaagtatcctgcgacgcctgccttggcgcctaccactacgacccctgctgcagaaaaagcgagctgcacaagttcatgcccaacaaccagctcaactacaagtccacgcagttctcccatcttgtgtacagataaggccccacccccatcttccgctacaagggctacaccactgacctggcttggtcctgtcaagagggtctctgtctctgggactctccatacctacccctcccactgaaaagccggcttggactgggatgggtccttggtcaccttcaaatgctcaccaggagtggcgagctggaggcctgctggcttgtgaaatgagccctcctgccataccagcctctctgatggctcgcctcttttcctgctctcctgatacaaggatccctaggcagatatcccctccccctgccgtcccccccgaccagtgtcaaaggggagccaagtccagtattagctgaatgccatcttgccagctccactcaatcagcccagtgttggcgagctctgctcagcaattggaaagtggactccacaacaagactgatgtccctcctcgtttgcacaccccccttactgtactgtatatacagttggaggtttattttcaagtgagtattcaacttgctttgtgtttcaatttggtgaaagaaataatgatatcgtatttataaaggtgccctgggtcctttagtcttccaagcgggggtgctcataccctttcctgggtagtctccacttgctagggtggagctgagagcctcgctcagggtaggggattgacaaagcccatgttccttctcatgtgagagctgctgcccttccctatggtaaatattatacacctacctccagtgtgcacgaggggctagcggggtgctgaggtctgcagtgaccccagtgacaaggtggagacctcagccctcacatctgcagctctgtctcggtctcggtgcctgctgggcatgaacctcgcaccccaaacctcgagtttcatttcagaaggaaattcaggtggggttccctcctcatctaagccttcctcactgtttcccagggctctcagaagtggttctcagcctctgggttttcctttctggggagcagagccaggagtagggcaggaatttgaaactgtcacttccttgtgaactggcaacacactttagccatagggagttgtaatgcccactgtttgggatctccgtgctagtgggatttccctaagaaaggcattcagctatggcgcaggcttgactggccgaaccctgagccactgtgaatttgctggtgtccttcctacttactggaacgattttaaggttttcagatcttacacggctcttttgtatctctagctgatagatcacatgtagataggtgtatatacagctaaatttgagcaattttattactgagactagcttccctgggcagcagcctttgatgttccttccacacttcagaactgttgatgcctggcccacccctgagagctctagttttccattccagtttgctccagaattgcagggactcaagatagaggccaggttgcctgagttagtccagtatgctttccaccaggaaatactgtgtgtacagactggcatggcctcacccctcccaggtgtgtctcactgggagattgctgtgatctggatagttgagtaaatgctaatttaaaaatgcacatattttgcatttgatttctacagagttgaaatgttcagaaaagattttaaaaaactaaataaagtgtcttccattagttaaa

SEQ ID NO: 1192 - DNA, 2384 bp, Cricetulus griseus
gcagcaactgctgtggacgctgaagcgtgctccagtctattcacagcagtgcctcgtgctgtcccgaagtctcagttctatgggatatgaccctcaagagaaaacttttgataaaattctcattgctaacagaggagaaattgcctgtagggtcattagaacttgcaagaagatgggcatcaagacagttgccattcacagtgatgttgacgccagttcccgttcacgtgaaaatggcggatgaggctgtctgtgttggcccagctcccaccagtcaaagctacctcaacatggatgccatcatggaagccaattaagacaaccagggcccaagctgtacacccagggtatggattcctgtcagaaaacaaagagtttgcaaggtgcttggcagcagcagatgtcactttcattggacctgatactcatgcaattcaagccatgggtgacaagatagaaagcaaactattagccaagagggcaaaggtcaacacaatccctggttttgatggggtagtgaaggatgcagacgaagctgtcagaattgcaagggaaattggctaccctgtgatgatcaaggcctcagcaggtggcggtgggaaaggcatgcgcatcgcttgggatgacgaagagaccagggatggttttagattttcatcccaggaagctgcttctagttttggtgatgatagactactgatagaaaatttattgataaccctcgtcatatagaaatccaggttttagctgataaacatggcaatgctctgtggcttaatgaaagggaatgctcgatccagaggagaaaccagaaggtggtagaagaagctccaagcatttttctggatcacgagactcgccgagcaatgggagagcaggctgtggctttggctaaagctgtgcagtattcctctgctggaactgtggaatttctcgtagactcccagaagaatttttacttcttggaaatgaatacaagactccaggttgagcaccctgtcacagaatgcattaccggcctggacttagtccaagaaatgattcgtgttgctaagggttaccctctcaggcacaagcaagtggatattcccctcagtggctgggcagttgaatgtcgggtttatgctgaggacccctacaagtcttttggcttaccatctattgggagactgtctcagtaccaagaaccgacacatctacctggtgtccgagttgacagtggcatccagccgggaagtgatatcagcatctattatgaccccatgatatcaaaactaatcacatatgggtctgacagagcagaagcactggagaggatggaagctgcactggataattacgtgatccgaggtgttacacacaacatcccattgctacgtgaggtgataatcaacacacgctttgtgaaaggggatatcaacaccaaatttctctctgatgtgtatcctgatggcttcaaaggacacacgttaacacagagtgagagaaaccagttattggccatagcatcatcattgtttgtggcatcccagttacgagcacagcactttcaagagcattcaagagtgccagttgttagaacagatgcggctaagtgggagctctcaataaagttacatgacgaagatcacactgtcgtggcatccagcagtgggtccacattcactgtggaagttgatgggtcgaaactaaatgtgaccagtacgtggaacctggcctcacccttattgtctgtcaacgttgatggcacgcagaggactgtacagtgtctgtctcgagaagcaggtggaagcctgagccttcagtttctcggcacagtgtacaaagtgcacattttaaccaaacttgccgcagaactgaacaaattcatgcttgagaaggtggcagaggacacaagcagtgttctgcgctccccaatgcctggagtagtggtggccatttctgtcaaccccggagacatggtagcagaaggccaggaaatctgtgtgattgaagctatgaaaatgcagaacagtatgacagtcgggaagatgggcaaggtgaaatcggtgcattgcaaagctggagacacagttggtgaaggagatctgctggtggagctggagtgaagtattccgagcctttcagtcattctctgctttaattagcatttctattattctccagccctcagtttgttcaagcgcatacaggagcactcctgtgtggcaggttctacagcatcgtatttattcctcacaagaggcaacactgacgttctgccaaaaaatcaccaatggaaaattttattgatataaatacttgtacatatgatttgtacttctgctgggatttcctagtgtcaaaattaaatcaataaaaccaagcacttgtctaaataatta

SEQ ID NO: 1193 - DNA, 2384 bp, Cricetulus griseus
tacgtggaaccattgatgtgtcttctgataagcgtctttgtgatcagcgtttctcacctctcctgcacagctcccgtcatgttcgacagctcaccatctgcaatatgctgcagggagcaactgagctagtggctgagccaaaccgcagggttctcgagaccctggcaagttctctgcacaccctcaagttccgccacctgctgttctctgacgtggctgctcagcagtcactgcgacagctgttgcatcagctcattcaccatggcgctgttagccaagtgtcgctgtactcctggcctgtgcctgagtcagcccttttcatccttatcctcaccatgagcgctggcttttggcagccaggccctggtagcttgccttgccgcctttgtggttgaagccttcccgaggtcgggccccatcccagagatgaagggtccttattgctaggctcacgccggcctcggcgggatgcagcagagcgatgtgctgcagcactaatgggccacccggaggaagagtgaagtcaagcagatgcccagggctgtacctaccactcgtgtaacacgtccgccctcttcctcctcttccacatcatccaaacgggctccagctagctcagcctcacagcctaagcccttaaagcgtttcaaacgagcagcagggaagaaaggtgcccgcacccgtcaggggtctggtgcagagtctgaagacctgtatgactttgttttattgtggctggtgagaaagaggatggtgaagagatggagattggggaagtagcttgtggagctctggatggatcggatcccagctgtttgggctcccagcactggaggcatcccagcgattccgaagcatttccaccttggagctgttcactgttccactctccacagaagcagctgtgacactgtgccacctgctgagctcctgggtatcactggagagccttacactttcctacaatggcctgggttctaatatcttccgcctgctggacagcctgcggggccctctcaggccaggctggatgccgcctccgtgccctgcatctcagtgacctgttttcaccactgcccatcctggagttgactcgtgccattgttcgagcctccccctgctgcgggtcctgtctattcgtgttgaccacccaagccagagggataaccctgccgtaccagagaatgctgggccccctagccacataattggggatgaggaaataccagaaaactgcctagagcaactggaaatgggatttccacgaggagctcagccagccccactgctctgctctgttttgaaggcctcgggttctctgcagcagctgtcactggacagtgccacctttgcctctccccaggactttgggcttgtgttgcaaacactcaaagaatataacctatctctgaaaaggctgagcttccacgatatgaatcttgcagattgtcagagtgaggtgctctttttgctacagaatttgacccttcaagagattaccttttccttctgtcgtctgtttgagaagcgcccagcccaatttcttcctgagatggttgctgctatgaagggcaactctacactgaagggccttcgactaccagggaaccgcctggggaacgctggcctgttggccctggcagatgttttctcagaggattcatcctcttctctctgtcagctggatatcagctccaactgcatcaagccagatgggcttttggagtttgccaagcgactggagcgctggggccgtggagcctttggtcacctacgcctcttccagaactggctggaccaggatgcagtcacagcaagggaagcaatccggcggctccgggctacctgccatgtggttagcgactcatgggactcatcccaggcctttgcagattatgtcagcaccatgtgatggggcccatacctcacagtcccatcctcagtaccatcagcttgcaggggctgaggcatgggctgcccagaatccccgtttctttttcccatcttcccttgcactgaggtcctggaggccctgatgaggcccagcaaaggcattcccacagctgagtttagaggctttgggccacttactcagtaccctgggaaccccaggccaggaggttataggtcattatcttcactatggaaagcctcctacccctgccctggggctacctgcctccttcctcaagcaggctcccaggctttagagaaacataggaacgtccaccaccaggcctcttccctcctgggcttaccaatctgttcccaggcctcagtccctttcatgcctttattcctttctttttcttttttttttttaaaaccaaaaaaaagttttttcttataaaataaattttgggcaaacatcaaaaaaaaaaaaa

SEQ ID NO: 1194 - DNA, 2384 bp, Cricetulus griseus
gatgaccgccagaggaagtgcagtgaggagccctgtcctgccaggtggtgggcaggggagtggcagatgtgttcccgatcctgcggacctggaggtttttctcgccggactgtgctctgcatacgcagcgtagggctggatgagcacccgtgtacatgacgggcacagatggctctggcagtggctcctccagccctgagctcttcaatgaggttgattttatcccacaccggctgaccccacgcccttcaccagcatcctcacccaagccagtcagcatcagcaacgctattgatgaggaggacctggagccgggtccacccgggcctgtgtttgtggatgacttctattatgactacaatttcattaactttcagactcactgaaccccctcggatactccagtgcctactgcagggactcctggagttaaggaagacggggttcagggaggttggtcccctagcccttcacttagccaggatagccattccccacctgtattcttagagcagacccctgtgaaccccctttggccaatttcttgtctgaggaagatatgctcatggggacccctgaagttgggctccccagcttgccctggccccctgcttcagctgatgacatggtgacacctgttgaccctggaaaccctgatgagttactagtgagagaagacaggcagggccagccacccactccatggtctgacaggaacaaggcttccaaagatgaggacaccttgggtcatacattaccagcccccgcccaaatccctatccccacacagcccccttcaccctccatcagcaccactcaagtttctcatggtcccgacatggtggaggtgtggacaggagggcctgtggcctgggactcagtgttagagggtgacctgaagcatagtgagcagtggcccaccatagaggcggcacctcctctccttcctcccatggccactgtaccaggcatctgggacagggacagccccttggagccagggactcctaccttttcaacaccaggactgggttcacagaacccgaaaactgtggcattgccaggaaccttgtttttgacagcaccgactgatctaagtagcctgggaccagtgggccagccacagcccactaaccctgaagggaccctgagccctgtgttgttgcctagaccagctcaggagactcataataacagtagcaagttccctgaggcccagcctttgcagcccagcctagtggaggatggctctcctacagatccactgcctgccaagaatgccagctggcaagtgggcaactggagccagtgttccaccacttgtggtctgggcgccacctggaggctggtgcgctgcagctctggccgggatgaggactgcattccttctagccgcccccagccagcccgacattgtcacctgaggccctgtgctgcctggcgcatgggcaactggagtaagtgctctcgcaattgtggtggaggttccgccacaagggatgtacagtgtgtagacacacgggacctccggccattgcggcctttccactgccagcctgggcctaccaagccacccacccggcagctttgtgggacccagccttgtctcagctggtatacctcttcctggagagagtgttctgaggcctgtggtggtggtgaacagcagcgtctggtgacatgcccagagccaggcctctgtgaggagtcgctgagacccaacagcacccagccctgcaacacccacccctgcacacagtgggtggtggggccttggggtcagtgctcagccccctgcggtggtggtgttcagcggcgtctggtcaaatgcgtgaacactcagacaggtttggcggaagaagacagtgaactgtgtggccatgaggcctggcctgagagctcacggccgtgtgccactgaggactgtgagctcgttgagccaccacgctgtgagcgggatcgcctgtccttcagcttctgcgagacactgcgtctactgggccgctgccagctacccactattcgtgctcagtgctgtcgctcatgtcccccactcagcctcggtgtcccttcccgaggctataagcgggtggcgagacgctgaacagaggacaaactgacccatgacacacagacctcagcgccccaccacaggctgcggtggagccctgctcctcgtaccctaatggtgctaaccccatccctgtgcaatggcaggctggggaccccccttcctctcagaaaaggtattttttattctaacagtttacacatttgttattgttttacataaatgagtatctaccctttcaaaaaaaaaaaaaaaaaaaaaaaaaaaaaaaaaaaaaaaaaaaaaaaaaaaaaaaaaaaaaaaaaaaaaaaaa

SEQ ID NO: 1195 - DNA, 2383 bp, Cricetulus griseus
tgacctgctgctaagatcgcgacgggaactggaacccgaggtccccgcgcggtccggccctcgcgccctgaggggaagagtggcccggcccagcgtgctggggtggagaccttgactccagtaccttccctagccatgacggacgggatcctagggaaggcagccacaatggagatcccaatccatggaaaatggtgaagctgggcagcttcctgaagacgatgggctggagcaggacctccagcaggtgatggtgtcaggacccaacctcaatgaaactagcattgtgtctggtggctatgggggctctggtgatggactcatccccacagggtctggccgccatccatctcacagcacctcaccttctggccctggtgatgaggtggcccggggcatcgccggagagaagtttgacatcgtcaagaaatggggcatcaacacatataagtgcacaaagcagctgttatcagagagatttggccgaggctcccggactgtggatctggagctagagctgcagattgagttgctgcgtgagacgaagcgcaagtatgaaagtgtccttcagctgggccgggcactgacagcccacctctacagcctgttgcagacccagcatgcactaggggatgcctttgctgacctcagccagaagtccccagagcttcaggaggaatttggctataatgcagagacgcagaagctgctgtgcaagaatggggagacgctactaggggctgtgaacttctttgtctctagcatcaacacactggtcaccaagaccatggaagacacactcatgactgtcaaacagtatgaggctgccaggctggagtatgatgcctaccggacagacttagaggagctgagcctaggtccccgggatgcagggacacgtggtcgacttgagagtgcccaggccactttccagacccatcgagacaaatatgagaagctgcggggagatgtggctatcaagctcaagttcctggaagaaaacaagatcaaggtgatgcacaaacagctgctgctcttccacaacgcggtgtccgcctactttgctgggaaccagaagcagctggagcagaccctgcagcagttcaacatcaagctgcggcctccaggagccgagaagccttcctggctagaggagcagtgagcggctcctggcccaacttggctaacaagaaggacactgggcggggcagccccagggtggaggagattggacacatgatgtcctttgccacttactttcgggcttgggctccccttttctggctggggtctgacaccagttttgcccatactactgtggtctgaaaagggcctgtaggcccagaagctgctgccctgtcctttatcttcctggccactgggcatcattcccagatcgtcttctttcactccacagccaaaggctatgacaaaaacactccctggccaatggcatcactcctcaggcctatccccagctcttgggatgtgccccccgaccaaagacaggacctccaaaggctctgtcagccaatggcagctcttcttgggctcccctgggccaatagtgttgcctccaattccctttgtccctcctcgatgtgtgtccactgcagagaaggggactgggaccaaaggggtggggaaaatggggagccccatttatggccctgcatctgagtgggccccccctcactccacccacccagctgaattgtgcttagagcccaggaagactgggttcgagcactaggaataaacctttcataaaagcagctaacagtcatgcattcaatcaaaaagctgatgtttactgcgtgcttttatttgccagccactgccttaggccctggggaaatatcagtgaataaaacctggtccctgctcacagtgcttaaggccaagtgggggatagagacaagtaaccaggcaactacaatacaatgagaaatgctaggatacaggatgcaatgggagcacctaatgaggggcatctagcttagactgggatagggatagtgatgccagtttaaaaattgagatctaaaaagtaagaagctaataaacccggtagaaaaggccaatgtacatgaagtctgagtaagaattcagtcaggaatgaaaaattaagtgggtgtggcaagaggtaggacttttaatctttggacaaagggaactaacaaacctctgggtagcttagtggcccttgcttggctctaagcatgaaccctgcctgagctccttcacaaagcggagaggtagctacttgcagataaaggcagtttcaccactcctgccgtaacctgcactgctcctgttgaagtcaaacctgaactttatgtgagaagtcacaagaaaactccagcaacactttagtcaaggc

SEQ ID NO: 1196 - DNA, 2383 bp, Cricetulus griseus
gggctagtgaagccggcgcccccgacacgtgatctggaaccggctgtgtcgcttggtgtctcggtctgtccgtccgtccgcgggtgccatcatggcggacgcggccagtcaggtgctccttggctccggtctcaccatcctgtcccagccgctcatgtacgtgaaagtgctcatccaggtgggatatgagcctcttcctccaacaataggacgaaatatttttggacgacaagtatatcagcttcctggtctcttttgttatgctcagcacattgcaagcatcgatgggaagcgtgggttgttcacaggcttaactccaagactgtgttcgggagtccttggaactgtggtccatgggaaagttttacagcattaccaggagtgcgacaaacctgaggagttagtatctggaaatgtacaaaaggaaaactcatcctccttcgaccgagttatcaaagagacaactcgagagatgattgctcgttctgctgctaccctcattacacatcccttccacgtgatcactctgagatctatggtacagttcattggcagagagtctaagtattgtgggctgtgtgactccataatgaccatctaccgggaagaaggcatcgtaggattttttgcgggtctaattcctcgcctcctaggtgacatcatttccttgtggctctgtaactcactggcttatctcgtcaatacctatgcactggacagtggggtctctaccatgaatgaaatgaaaagttattcccaagctgtcacaggattctttgccagtatgttgacatatccctttgtgcttgtatctaatcttatggcagtcaacaactgtgggcttgctggtggattgcctccttactccccaatatatacttcttggatagattgctggtgcatactacaaaaagcgggaaatatgagccgaggaaacagcttgtttttccggaaggtcccctgtggaaagacttattgttgtgacctgagtatgttaatttgaagttgtggagcagggacagtgacatttccatagtcccaatgcacagaattatgggagagaatgttgatttctatacagtgtggcgcgcttttttaataatcatttaatcttgggaaaatggaggtgattggtgtctgccttttttgttctttttcctagcacaatatcatttaccactggtattccccattagttatttgaaatgggactgttttttttcctccaaattcttgttttaaacagaaaatagaagtattttcctaaaggaacaagcaggttgtcatgttgatcgagtctcaggttagggctttgtcaaataaagaatagaatctcaataagaattaatcattctataaaagttaagaaaatgaagaaggcataccatgtgggagtttctgagttcccttggatagatagatgctagaaagtcagcagcaaccaccagtctacctcccaccatgcttccaagcacttgacccatcttgtctctcagtgctgctgagttactgtagatttctgcagaggtgttcatgccttctgctacactagaagagaaaatcaccaccaacaaacaaaaagaaaaaggacagttagacagaaacaagaaaagagaagaaaaggaaatatgatggcctttcactccaaagaagctcttgatttcctgtaacatgagaagcaaatactgcagcataacagtagccctaagtgctcagtacccaccagcccctgaggtccgtcttcactacggtcccattgcctatacgcttctgctcctaagtgtttgtttccctttcgttactgcagaaggtgggtagtttggttttcatttctgatgacacccttgaaaagtgtatttgtaactcattatctggtaatgtggatcaaagtccacacggttcctaggatattgcccagctcgcatgtcataccttcagttaggcatgttaaaaacacttattgggggaaaattgcttttgaaggaaaattttcaactcaagcataaagctcctatttactcaggccttttaacagcaggtgaaatgctcctaagttgagaaagccttgtttaagtaattcactggtactttgccaaatgagtaagcactgaatttgctgcttttagacttctatcaatgcggcagaggccatgatgttaggtagtgtgagcatgcagggtcttctcccgctcagggttagtgatacaacctgaagctcgtgagtagcttagcttgaaatgtctttgtcaaaagtactttgtctcaaaagtaatgtacattttatattctattcaatattatctgcatctgttttaatataaaaagtgtttttgcattaccaactcttttctcccaaaaaaacatcaagtaaagatgatctagg

SEQ ID NO: 1197 - DNA, 2383 bp, Cricetulus griseus
agggttcctgctgagccacctctgtgcctagggcttgctgccctggggcaaggattgtaaagcatgcctggtcctgcccatggatatttgctgcttggcaagagctgctggtggccttcctgggaaaagaggtggcctctgaggggccgagatagaaggccagaccctccagagggagggcaccaggacaaggggctggaccagtttgcagttcctggcgtctccagctgctcccagcaggcagagtctgagggagaggtgagatacccagggctgggcaaaatgagccacagcctggggctgtcccaccagcctctactccagtaccccgtgcttcaccaccctcagattcaccgcgtgctctgcgcggccaaggctggagtgccacatccttctgctggggagaggccctacctcccctcctatggagggctgcagacctcacttgcgagtgacagacaacagctaggcaaacccctctctgtcctcagggctgtgcctctgggagcctccgggcctggggctccagtcagagtgcatgttcccattatttattccccgcctcctgctcctggctcagcccaccgtggagctccggaggatagcagaccatcccaccaacccactatcctccctgcccctgtcactccccagtggcttccagtctggcatctcagcagtgtcctgatcccccacagtgggacatctgggtactgcttttcaagggaacaagaaatcctgctgcattctgccctggggcctaggggcagggcacttctgccaccctgctggctgtggacagtgacccaagggactggaggtcgagctgtgtccacctttccccacaacaagcaacagaacacatttctaatggaccctgtacatatatacatacatatgtatgtgtatatatgtgtatatgtggccctggccccagtggggtgctgtacagttacttgagggaggagacacaggaaggcaattcaggaggaacccaggtggaagagagcaaagccaaagggtcctggagctgccatctgatgtggcctctgcttcccacagaccgaagaaaaccgctgcccaagctaccggtgccccaacttcggtacagaggctgtggacctgcatgactgtgctagcgtttagtctgagttgtatcttttcgaacttgcaagtgttgtaaagattataatggattttaagggacagctaactgtgggcaggcccagcctcagtgctggggacagcacaccccacgtccatgggctgctagccttgtggtccctcacattccaagctgggcagccaggtgggacagggtggaggtcagattagagttgcgcctttaggttgctatggggcaggtgcaaggactcagggagctcctcccccatggttatcaagggacctgggcaccccaggccttgagctctggtcaggtgtctgtggctcattctttgggctgatacgggggtcagagccaagtctagccagcctggatatagccgtttctcaatagcccctgttgcctggggttttacctatgaatataaccctctcttcctttttgatgcctccgggctgtgcctgggtgggagcctcagtttcccctaaagtcttccctggatgtgggcttcagatagaagcccccagttcttccagctctgcctggaccacgcacagactgggctctgacatctgcttgtccttggtgttcaagagccatccatctctgtggcaccctgcaaagggctccacttcagcttagatatagcttgagtttggagcccacagtgcactgggtggtagatgctcagggccaccctctgtaatcctaggcccaaggaggtggccaaacactactccagccagtctggccctaacactcctggtactgccatcctgccgtgggccagcagggatgagggctttgatgtgttcccaagagacacagcattgaatcccaggcacaggccagcaacctctgttgatacagaggggcccgaccaccaccccctactccaattcccccagtttggatctggtggctcacatcggtgctacacaagctagagtagatatatttagagagagaaagatatttttaaggtgaagcccatgattagctgtcctttaatgccgcagaacactccctttactcccccacctcaccccacccaccccaaaaaaaacggtcatttggatggtctgagtagaccaggcctcggccattgcttctctggaagcggcagagccgataatactcagccatcagatgtgtaaatatatggctatttcctattttacggttcttgagatttagtacttgtaaataaacacacattaaggagagattaaactatttttgctaaaaaaaaaaaaa

SEQ ID NO: 1198 - DNA, 2382 bp, Cricetulus griseus
tgctgctggcgtccacgatgtccaccaagaatttccgcgtcagtgacggcgactggatctgccctgacaagaagtgtggaaatgtaaactttgctaggagaacaagctgtaatcgatgtggtagagaaaaaacaactgaagccaagatgatgaaagctgggggcacagaaataggaaagacgctggcagagaagagccggggcttatttagtgcgaatgactggcagtgcaaaacttgcagtaatgtgaattgggccagaagatcggagtgtaacatgtgtaacactccaaagtatgctaagctagaagagagaacaggatatggaggtggttttaatgaaagagaaaatgttgagtatatagaaagagaagaatctgatggagagtatgatgagtttggacgtaaaaagaagaaatacaggggaaaggcagttggtcctgcatcgatattaaaggaagtcgaagacaaagaatcagagggagaagacgaggatgaggatgaagatctgtctaagtataagctggatgaggacgaggatgaagatgatgctgatctctcaaaatataatcttgatgccagtgaagaagaagatagtaataaaaagaaagccaatagacggagtcgctcaaagtctcgatcgtctcactcgagatcttcatcacgctcatcctccctctcaagttcaaggtccaggtccaggtcccgttcacgaagctcttccagttcgcagtcaaggtctcactccggttcgagagaacattccagatcccgtggttcgaaatcaagatccagctccaggtcccacaggggctcttcctccccaagaaaaagatcttactcgagttcttcatcatctcctgaaagagacaggaagaggagtcgatctagaccttcttcacctgctgttcgcaaaaaaagacgaacaagatcacggtcacccgaaaggcaccacaggtcgtcttccggatcaacccattctggttcccgttcaagttcaaaaaagaaataatgtattaaaatttacatctttaaaaaacattaaatacagtgcatgaagcatattttttaggaagttgatgtctcatttggtcagaagtgctacatctgctagtagaggtgcatgcctttgttgcttttcaaaacagtacaactgtgtttatttgtgaaattgaaagtaaattgcgttttaagccatactgttccccagataaatgctctgttcattatttacaaccatttgctaccagttcatgttcatatgggagaagtagtcaacctggttatgtctgagggtgccttagaatcattatctctcttatcggctttacaccgattttaatgcaagaggatattagcaattgcagaaggaacaggttatccatcttacttcaaaatgtctatctaaatatgtttaagaaatatggatatcctttaaatctatttaccaaatattgtacttgattgacaaaggttttaaaaaagactaaatcatagttcacaggcaaattgaagaaagcttttgaagcctatttctcagtgacaggctgacagagatatgaatttaagtgaacatttgccttgagatgtctgattttttagcactgtagatgtctaagtgacagaagaattcttatgtctgcatgatgtcgacttatttctttcctcacctgaaaaaaaaaacaaacatatggcttaaaatgctttcagagttttatttctaaaattaaaatctggttacttgacatccattttgttctctggtttaaaagttaaaaggtttctctttaacagtctctccagcagcaaagcaaggtaagtatacaattgacctgcagttgtgctggggcttcttgttacaggaattgtttttcctgtttctcccctcttttagtatttgctgcggtttaaataagtaaagcattctaagatgtttagtagatagatcaaacaaaatgtttttattttaaagtgtttttcacctcaactgatctaaagatgaaaacaaaatatcgtatgtagaaatattttcgtaatatttttacaagctttcctgtgttttttgtctttattttccttgctgcatttactgtaggttgcacacgaactcttactctcttgtaattgtgcctcagacttctcgaaagtcgacttttctgagttgcccagatcttctagatccgacgtgttagccttcgtttgttcttgtgctttctgtatttaaaacttgggctgtactaggcaaatacaagattataaatttagctaatagagtttacaaaacagttgagatgattatgattggatttggtttaattgagctgtactagttcatttcataaggaaatgatactgtagacaaatgtaaataaaatctgagtcaa

SEQ ID NO: 1199 - DNA, 2382 bp, Cricetulus griseus
gattcggttgaagcaggagagaagcttgtgaagacagccctggatgctttcggcagaatagatgttgtggtcaataatgctggaatcctgagggaccgttccttctccaggataagtgatgaagactgggatattattcagagagttcatttgcggggctctttccaagtgacccgggcagcatgggatcatatgaagaaacagaattatggaaggatccttatgacttcctcagcttctgggatatatggcaactttggtcaggcaaattacagtgctgcgaagatgggtgttctgggcctctgcaatactctggcaattgaaggcaggaagaacaacattcactgcaacaccatcgcccccaatgctgggtcacggatgacaaagactgtgctgccagaagatattgttgaagccctgaagccagattatgtggctcctctggtactttggctttgccatgagagctgtgaggaaaatggtggtttatttgaggttggaggaggctggattggaaaattgcgctgggagcagacccttggagctgttgtcagacagaggaatcagcccgtgactcccgaggcagtgagggacaaatgggagaagatctgtgacttcagcaatgctagcaagccacagaccattcaagaatcaacgggtcgtgtaattgaaattttacataagatagattcagaaggagtctcacaaaatcacaccagtcattcgacatctacagccacatcaggatttgctcgtgctgttggctataagcttccttcattttcttcttcatatacggaattggagagtattatgtatgcccttggagtaggtgcttcagtcaagaatccaaaggatttgaagtttgtgtatgaaggaagtgctgacttctcctgtttgcccacctttggagttatcattgctcagaaggccatgatgaatggagggctagcagagattcctgggctgtcaatcaactttgcaaaggttcttcatggggagcaatacttggagttgtataaaccacttcctcgatcaggagaactaaaatgtgaagcagttgttgctgacatcctggataaaggatctggcatagtgattgttatggacgtccattcttattctgggaaggaacttatatgctataatcagttctctgtttttgttgttggctctgggggctttggtggaaaacggacgtcagaaaaactcaaagcagctgtagctgtaccaaaacgaccccctgatgctgtactgagggacagcacttcactaaatcaggctgctttgtaccgcctcagcggggactggaatcccttacacatcgaccctagcttcgctagcattgctggttttgagaagcccatattacatggattgtgcacctttggattttctgcaaggcatgttttacagcagtttgcagataatgatgtgtcaagattcaaggcgattaaggttcgttttgccaaaccagtgtatccaggacaaactctacaaactgagatgtggaaggaaggaaacagaattcattttcaaaccaaggtccaagagactggagacatcgtcatttcaaatgcatatgtagatcttgtgcctacatctggggtttcagctcaaataccttctaaggatgaggagcttcagagtgctcttgtatttggggaaataggtcgccgccttaaggacattggacatgaggtggtaaagaaagtaaatgctgtatttgaatggcatatcacaaaaggtggaaatattgcagccaagtggaccattgacatgaagaatggctctggagaagtgtatcaaggacctgcaaaaggctctgctgatacaaccatcataatttcggatgaggatttcatggaagtggtcctgggcaagcttgacccgcagaaggccttcttcagcggcagactgatggcccgagggaacatcatgctgagccagaagcttcagatgattcttaaagactatgccaagctctgaagggcccactgtgtgctcttaacaaaaatagaaccattaaatattctccgcccaattatgcgccaatattctgtgaagtgatcaacagtaacatgcagcagaaatgacttaacattttcagatttcagataagtttcggattttcattttctactaatttttcacatatttttacaaggaactgtaatctagctagcaagtaattattctgttcatagatctgtatcttaataaaaaaaatttcagccaagtctggttacattagaatttgtaataatgttagtatgttaaaaggaaaattgaatgaataaaagccactttaacgcttgtcaaaaaaaaaaaaaaaaaaaaaaaaaaaaaaaaaaaaaaaaaaaaaaaaaaaagaaaaaaaaa

SEQ ID NO: 1200 - DNA, 2382 bp, Cricetulus griseus
ggcggcggaggcggcggaggcggaggacgcagtgccggaggagaggagaataaagagaacgaacgcccttccgccggatcgaaggccagcagagagttcggggacagcctgagtttggagattcttcagattattaaggagtcccagcagcagcatggcttacggcacggagacttccagcggtacaggggctactgttccagaagacaaagacgtctccggaaaacactcaactttaaaatggggaacagacacaaattcactgggaagaaagtaaccgaggagctcctgactgataacaggtacttgttgctggttctgatggatgcagagagagcctggagctacgccatgcagctcaaacaggaagccaatactgagccccgaaagcgctttcacctgctgtcccgcctgcgcaaagccgtgaagcatgccgaggaactggagcgcttgtgtgagagcaaccgcgtggatgccaagaccaagctagaggctcaggcctacactgcttacctctcaggaatgttgcgctttgaacatcaagaatggaaagctgccattgaggcttttaacaagtgcaaaacgatctacgagaagcttgccagtgcgttcacagaggagcaggcagtgctgtacaagcagcgtgtggacgagatcgcccccaacatccgctactgtgcctataacattggggaccagtcagctatcaatgagctcatgcagatgagactgaggtctggaggcacagaggggctcctcgctgagaaactggaggccttgatcactcagactcgggccaagcaagcagctaccatgagtgaggtagagtggagggggaggacggttcccgtgaagatcgacagggtgaggatcttcttactaggactggccgacaatgaagccgctatcgtccaggctgaaagtgaagaaacaaaggagcggctgttcgagtccatgctcagcgagtgtcgagacgccctacaagctgtgcgggaagagctcaagcccgatcagaagcagagagattatacccttgatggcgagtcggggaaggtatctaatctccagtacctgcacagctacctgacctacatcaagctgtcaacagccatcaggcggaatgagagcatggctaaaggcctgcacagggccctgctgcagcaacaaccagaagatgacagcaaacgttctcccaggcctcaggacctgatccggctctatgatatcattctgcagaatctggcggaactgctgcagcttcctggcttagaagaggacagagccttccagaaagagataggcctcaagaccctggtgttcaaagcttacaggtgttttttcattgctcagtcctatgtgctggtgaagaagtggagcgaagccctcgtgctgtacgacagggttctgaaatatgccgacgaggtcagtgctgatggcggagccttcaagaacagcctgaaggacctgcctgatgtgcaagagctcatcactcaagtgaggtcagagaagtgctcgctgcaggccgcagccatcctggatgcaaatgactcccatcaagcagagccctcctctcaagtcaaagacaataagcctctggttgaacggtttgagaccttttgcttggacccttccctcgtcaccaagcaagccagcctcgtgcactttccaccaggcttccagcccatcccttgcaagcctttgttttttgacctggccctcaaccatgtggccttcccaccccttgaggacaagttggagcagaagaccaagagtggcctcacaggatacatcaagggcatctttggattcaggagctaaccaggctcttcctcaggggcagggaggtcctgacttactctgtattgtgagacagacagcaagttccaaggcattaaatctaggtctgcaatggcaagggcagagctcagcaccctcagccctgcgtccctacatcttgtgtgtttgtgacttaactttcatagctgtcatcttctgggctgagtcggggtctctctgtcccctgtgcctcctggggactgctgtgtcctggctcttgtaagccatggctgatcactttcggtcactaatgtgttctgggttccacaccaggctttcggggggggggcttgggagtgtttgtcatgtgtcctcaggcctgtggatttgaaacaaactcctccttgctgtgagcttccaaagcctcctgaagtttgtcagtggctgaaacatgggcagtgtcccccagagttacggtcagccttaccccctcctcctccaagaacaagcagagcgctctatttttaactatgttacactcatgaacgatgaaaccaaatctttattaaaaggcaaagatgatggaaaaaaaaaaaaaaaaaaaaa

SEQ ID NO: 1201 - DNA, 2382 bp, Cricetulus griseus
  modified_base (842)..(842): a, c, t, g, unknown or other
tggtgggatggcggctgaggcgcagccccttctgggcagggaccgaggcggtggccaggcccgttctggtgctgcatccagtcaggagctctgcatagaccaagctgtggtcttcattgaagatgccataaattaccgctccatctaccaccgcatggatgctggctcattgtggctttaccgctggtattactcaaacctgtaccaacgagtgctgagctttcaccattttcttgatcctggctctggcttttgtggagttcccatcatcattcacaagaactgcagatgtgcgctaccgctcccagcccctgggagccaccctgtgggttgacggagaccatcgaggcgttctgcttgctggtcttcctggttgacttctctgtgaagagctacctggtggggcagccccagttacaggagaacctgtggctcctgtcctactttgtggtgctggttgtgtccgtggtggactggattatttcagtgagtctcacttgtgaggagcccctgcgggtgcgccgatcactccgtcccttcttcctgatgcagaattcctccatgatgaagaagaccctgaagtgttacggtggtcactgccagaatggccagtgtcgggctgctgctgcaaccctgattgtgatgattcctgcatatagccagaaccgggcctatgccctcttcttcataatcttcaccttgataggaagtttgtttctgatgaaccttctgacagccatcatctacagtcagttccgcggctacctgatgaagtctctacagacctcgttgttccggcggcggctgggggcccgagcggcctatgaagtccttgcgtccanagcaggtctggctggagccacccctgaggcagttggggtaaatcctgagaacttcctgcgagtacttcagaaaacccaactggacaaaatccacaacaggccatcatgcagaaggtacattcctatggaggccgtccattgctggctgatgagttccagaaactcttcgatgaagttgacaagggtgtgatcaaagagtactttgactacctggggaacctcatcgctctgggaaacttcttgtctatctgtgtgttcctggtgctggactcaaaactgctgcctgaggaacgtgatgactttgtcctggagattcttgactacgtcttcgtcttgtactacctgctggaaatgctgctcaagttgtttgcactgggcctgcggggctacctgttctactgtggcaacgtgttcgatggcttcctcaccattgtcctcctggttttggagatttctactctggtgatataccgattgccaaactcagtatggaagcctaagcagtttggctcactgtcactgtgggacatgacacggctggtgaacacactgattgtctttcgattcctgcgtgtcatccccaatgtgaagccaatagctatggtaaccagcaccatcctgggcctggtccagaatttcaaatcatttggtgggatcttggtggtgacatactatgtgttcgccatcattgggatcaacctattccaaggcatcattgtgcctcctggaaacagcagcctggcacccgataacagctcagcagtgtgtggaagcttcgagcagctagattactggtccaacaactttgatgactttgctgctgctctgatcacactgtggaacgtgatggtggtgaacaattggcaggtattactggaagcctatcagcgctactcaggcccgtggtcaatggtgtattttgtgctatggtggttggtgtcctctgtcatctggatcaacctgtttctggctctgcttctggagaactttgtccaccgatgggatcccggaagttataagcagctccttgttggcagatgtctgtggagctcatgttcagggacatccttgaagagcccaaggaggaagaactgatagagaagctgcacaaacacccacacttgcagctgtgcaggtgacatcagagtgtcctcccagccggggtggcaggacagagatgctggcctggagcccgtgctgtggaggcagcaactgatagagaccaagcaagaaaagacggcgcttggaacagaccactcagggacagagagaggctgggacaaggactgtggctgcttagtagtagtcaccgagcacgtgccgtctgtggccttggcagatgggtagtcaacactgcagagcagcatccctctgtttgttgctcttccaagctgctttggcaagagttgctaaggagagaagggagtgattttgcagggaccttaaagcccaggatgtgagaagacctcagctcccttgttacccacagcttatctgtgtcttcaaccctggtggcctttgtgaacccaagcctgcacag

SEQ ID NO: 1202 - DNA, 2381 bp, Cricetulus griseus
gcagccgccgccgcctctgccgtcgcggggttcccggcaggtgaagcgggagccatgtcgaagcggctccggagcagcgacgtgtgcgccgactgcagcgggccggatccttcctgggcatcagtaaataggggaacttttatatgtgacgagtgttgcagtgtacatcggagtctaggacgccatatctccaagtaaggcatcttaaacacacaccatggcctccaacactgcttcagatggttgagaccttgtataacaatggtgctaattctatatgggagcattctttgctggaccccgcgtctattatgagtggaagacggaaagctaatccacaggataaagtacaccccaataaagcagaattcatcagagccaagtatcagattgttagcgtttgttcaccgtttgccctgccgtgacgacgacagtgtgactgccaaagatcttagtaagcaactgcattcaagtgtgagaacagggaacctggagacctgtctgagactgctatctctaggagcccaagccaacttctttcatcctgaaaaaggaagcactccactccatgtcgcctccaaagcaggacagattttacaggctgaattattggcagtatatggagctgacccaggcacgcaagactctagtgggaagactcctgttgattatgcaaggcaaggaggccaccatgagctggcggagcgcctcgtggagatacagtacgagctgactgacaggctggccttctacctctgcggcaggaaaccagatcacaaaaatggacagcactttataatccctacaaatagcagacagtgatgcagtctggcttgccacgcaaaccacagcaccctcggtaacagagacaaccgtcgtccccttcttccggtcaatcctcgagtactcctcaacacgaaaccagggcagacagaaattagctcggtttaatgcccacgagtttgctacgctggtcatcgacatcctcagtgacgccaagaggagacagcagcagggcagtcctctgtcccggtcacaagataatgttgaactcatactgagaacggtcagtaaccagcatagcactgaaagccaggacaacgaccagccagactatgacagtgtggcgtcagatgaagacacagacgtggaaaccagagcaagcaaggcacaccggcagaagcttcaaacactccagtgtgagaattcaagcctcaggaagcaggcgacaaccagtgcctgtcaggtacagactggccctgactacccagacacttcgagccactcgtcctttaaaagcgccggccatctgcccggggcagtaggcctatgtccatgtatgagactggatcaggtcagtaaaccgtacctccctatgggggaagctaaccgccctgaggaggccaggacgagacttcaacccttccctccaggctggagaagcagaacagcacaccagagagtgactatgacaacactccctatggcactgagccagatgacacagtgtcaaaccggaaggggcggcaaaggagtatggtgtggcaaggtgatggctcattgccagacacaacagagccccatttggtccccagccccacgctccccagcacagaagatgtcatccggaagactgaacagatcaccaaaaacatccaggagctcctaagagcagcccaggagaacaaacacgacagttatattccctgctcagagagaatacatgttgctgttaccgagatggcagccttattccccaaaaaacccaagtctgacacggtgaggacttccctccggttactgacgtccagtgcctaccggctccagtcagagtgcagaaaggccctcccaggagactcaagcttgcccacggatgtgcagttggtcacacagcaggtcatccagtgtgcctatgacatcgccaaggctgccaaacagctggtcacaatcaccaccaaagagaacaacaactgaacatgaactcttcagatttttacaaaaacatttaataatgatttgaaactttttaaaagaaaactcagtattatttttgcatgttttctaacagatttttgactgtgatttaaccattgccttatttgtgcctgtttgcaacttagcttctgttctgttgcgttgtcaccaagcgcttaggtcatgatcggatgtgtttaaaaggaattgtttggagtttgctaaaacttttccatcctttaaaactctctgcccatggctaaaactataattgatatttttagtaaaacattttcttaagagagagtaaagggttttaaaaaaaaaaaaaaaaatcactctgtagaccaggctgtcctggaactcacagagatccacctgcctctgcctcctgagtgctgggatta

SEQ ID NO: 1203 - DNA, 2380 bp, Cricetulus griseus
tcgcccagcggctggcctccagcgagaagggtgtccgcgaccgcgcagtgaggaagctgcggcagtatctcagcgcgaggacgcagagcgacacaggaggtttcagtcaggaagaactcctaaaaatatggaaaggactcttctactgcatgtgggtacaggacgagcccctgctacaggaagaactagcgaacatcatttcccaactcatccatgttgttaacagctcagaggctcaacacctattcattcagaccttctggcaaaccatgaatcgagagtggcaagggatagacaagttacggctggacaagtactacatgctgatccgcctggtcctgaggcagtcctttgaagttctcaagcggaatgcctgggaagacagccaagtcaagctttttctggacatcctgatgaaggagatcctgagtcccgagagccagtctcccgatggagtgaagtcccacttgatagatatttatttggatgagctttccgctgtgggaggcaagggagctcttggcggatcagaacctcaagttaattgatccattctgcagaattgctgccaagactaaggaccacacactggtacagactatagctaggggtgtttttgaagtcattgtagatcagtctgcttttgtgcctgaagagactgtggaagagcagaaaaccaaagtggcctgtgaaaagcagtcggtgagaagaagcctggactgggggaatgcctcaaagatggagttgttggcggcagagaaagagacggctgtgcagccttcaaggattcagggtcacctctccagttcgactataaggctgttgctgatcgactcttggaaatagccaacttgaagagcacccctcccttcaaccggaagcggctctgcagactgatcagaaaattccaggacctctctgaaggccatagtgctcaactcagttttggtgaggacagaggacgagcggggcgaacgtacacaagaagaaaaggaaaaagaagaagaggaaccacttccaggctgagactcaggacccagacgctgttaccatgccccaagcacaaggtgctgatggcaagcctgaagctgcccagaggcagaccccacagacaggcatgtgtgactgggcctgaaacagaggctgtgtctggcatcagggaaaatagctctgagccagcacccatcacacccacatgcaataaaaggaaacggctgagaaagaagaacctaaaggtccacagagagatctggaaatctacccctttacctcaggaggatatgtcagagaatgaccctacccatgggcatcctcagagcgctgatgcccaagtgtcttcctcagaaggtgtccgagcccagaaaaggaaacggaaactcggggctctgcctgtcaacagtggtggcttgactgtgcaaaaggcaggcacctcaaccagcccagaggaagagaaagatgaccagaccaccctgccccagtgcaagaggccacaaaagaagacagcgtccagcagtcttggcctctatgatctgtctagtcaaaaaacagcaatcttaaaaaagaggaaaaaaaaatgaagcagatgtcacaacggagttttggagtccagcaccaggcagatccaagctctgggaagcaacaggactttgaaaaaaccactgacaacagaggatgactttgtgaagtttgacacccacttcttaccaaagcccctgttcttcagaaaagcaaagagcagctctgccatcagtccccaaggttctgctgtccagatgaatataacaccctccagctccaagaaagtcacctttggattaaacaaaaacatgactgcagaatttaggaagacagacaagagtatcctggtcagccccacaggcctctccagagtggcctttaaccctgagcagaggccactccacggcgtgctgaagaccccaaccagcctcccccgccagcactcctgtatcagctatgaagctaccagccaccacgccaaagagaaggccaagggctgcagacttcttctgagagccagagtcccttttaaagactgcttttatactggatattctataaattataacttttaatgtgaaagcatgtcagctcaggcccattctgtgggcacgtggctgtttctcctagcgatgactcttgaaaccgaatgagcaatagtgtagcttttctacgtgtgaccagcagggggggtggacaggtgaggggtggagaaaagccactctgtccttgaggctttctctcctctgcctggcctgttcctgtccctgtctttctacctctatagcaagcccaaagtgtcttttcaggagggccagtgccccccggctgctgcccacattagcacagtttcccaggcctc

SEQ ID NO: 1204 - DNA, 2380 bp, Cricetulus griseus
  modified_base (699)..(699): a, c, t, g, unknown or other
ctggcatgaaaggaggtaacgcaggtaagaaagacccgaaggtgggaaaaccgtgaggtgtacgtagccctaactcggtacagcggaggccgaagagaagcagctgcaaagaatcggacgataggtggcagagagagaagttggctaccatggagtcaccagaggagcctggagcatccatggatgaaaactactttgtgaactatactttcaaagaccgatctcactcaggccgagtggctcaaggcattatgaaactgtgtttagaggaggagctatttgctgatgttaccatctcagtggaaggccgagagtttcagctccaccggctggtcctgtcagctcagagctgcttcttccggtccatgttcacttctaacctgaaggaggctcacaaccgggtgattgtgctgcaagatgtcagtgagtctgttttccagctcctggttgattatatttaccacgggactgtgaagcttcgagctgaagagctgcaggagatttatgaggtgtcagacatgtatcagctgacatcgctctttgaggaatgttctcggtttctcgcacgcacagtacaagtgggaaactgccttcaggtgatgtggcttgcagataggcacagtgatcctgagctctacactgctgccaaacactgtgccaagactcacctggcccagctgcagagcacagaggatttcnccacttgccccaccatctcctcactgacatcatctcagatggggttccatgttcccagaacccaacagaggcaatagaagcctggatcaatttcaataaagaagaaagagaggcttttgcagagtcactcaggactagcttgaaggaaattggggagaatgtgcacatttaccttatcggtaaagagtcatctcgtacccactcactggctgtgtccttgcactgtgcagaagatgactccatcagtgtaagtggccaaaacagcttgtgccaccaaattactgcagcctgcaagcatggtggagacttgtatgtagtgggagggtccatcccacggcgtatgtggaaatgcaacaatgccaccgttgactgggaatggtgtgcacctttgccccgggaccgcctccaacataccctggtatctgtgcctgggaaagatgccatatattccctgggtggcaaaacactgcaggataccctctccaatgcagtcatctactatcgggtaggtgataatgtgtggacagagacaactcagttagaggtggctgtatctggggctgctggtgccaacctcaatggaatcatctacttacttgggggcgaggagaatgatctagacttctttaccaaaccttcccgacttatccagtgctttgacacagagactgacaagtgccacgtgaagccctatgtactgccctttgcaggccgcatgcatgcagctgtacataaagatctggtgttcattgtagctgagggggactctctggtgtgctataatccccttctagacagcttcacccggctttgtcttcccgaggcctggagctctgccccatccctctggaagattgctagctgtaatggaagtatctacgttttcagggatcgatataagaagggagatgccaatacctataaacttgaccctgctacttcagctgtaactgtcacaagaggcattaaggtgctgcttaccaatttgcagtttgtgttggcctaagacagtgatgggaggaacagctgactcctttgccctccccttttctgtgcatccccagtcacctgaaattccctgattcagagtaatgtgttagtttgggtatacatgaggaaggtggtgcctcagcccatccccaggctcgtggggtactctggttagggcttttcacactactgctgcttagactctgccattatccccgtgaccccgtgcctcacttcagactgcttagagccagcctcttctcagactttggcacagcctccccttaccagatcagtgttaatagaagtatcttggttcccatgcagaaagaggcccattcatttttgtctatagccagcaaagtggctagttgtcacttttccacaaagaattaagtattaagagttttagaggggacagttaaactaagttaaaaatgtacttcaccagcaagaatcaactctagaattcaggatgctcctcctaatgttttcccatctatctgtcaggaaaagaaactttggtttgatttttggcttatatggatagataagccagaaagtagaaacaattatttctgattaataacagaaacttttccaaactcaaatatatacaatctctggtcctttaaaagctctaaactaaatcaagagttaggaactgttcataaaaataaaagtttttgaa

SEQ ID NO: 1205 - DNA, 2380 bp, Cricetulus griseus
gtgcctgtgctgagggatcaccatcccgtgcctctggacgcgcaaggctgggctacctcggagcgcccgtggggccatggatggcgaggcagcaggggagaaggggagtcttgtgccccgccaggtgcactcgatgggcccaccttgggcggtgctcaggccctaggtgtgcgacgagagcccaagaagtacgcggtgactgacgactaccagttatccaagcaggtgctgggcctgggtgtgaacggcaaggtgctggagtgctaccaccggcgcactgggcagaagtgtgccttgaagctcctgtatgacagccccaaggcccggcaggaggtggaccaccactggcaggcctcaggcggcccccacatcgtgcgcgtcctggatgtgtatgagaacatgcatcacggcaagcgctgcctcctcatcgtcatggaatgcatggaaggtggtgagctgttcagcaggatccaggaacgtggtgaccaggctttcactgagagagaggctgcagagatcatgagggacattggcacggccatccagttcttgcacagccagaacatcgcccaccgagacgtcaagcctgaaaacctactctacacatccaaggagaaagatgctgtgcttaagctcaccgattttggctttgccaaggaaaccacccaaaatgccctgcagacaccctgttacactccctattatgtggctcctgaggtcctaggtccagagaagtatgacaagtcatgtgatatgtggtccctgggtgtcatcatgtacatccttttgtgtggcttcccacccttctactccaacactggccaggccatctctccaggcatgaagagaaggattcgcttgggccaatatggcttccccaagcctgagtggtcagaggtctctgaggatgccaagcagctaatccgcctgctcctgaagacagaccccacagagaggctgaccatcatgcagttcatgaaccatccctggatcaatcaatcaatggtggtcccacagaccccactccatacagcccgagtgctacaggaagacaaagatcactgggatgaagtcaaggaggagatgaccagtgccctggccaccatgcgggtggactatgaccaggtgaagatcaaagacctgaagacctctaacaaccggctcctcaacaagcggaggaaaaagcaagcaggcagctcctcagcctcacaagggtgcaacaaccagtagctctggggcagccagaggggacagactgcaatgttcggaggctctggccaggaggtcaggccctagaaagctgctgggccccggaatggggagccctctgttacaacagaagcaactttggccagtgtggcttgagtgaggccacggctctgctctgctttaggacttggccttacttctagaccactgggagttgtggaggacctacccttttcctacagagacatatcctgctgtgtgggcagatgggtctggccttgagaaaggtatctggccattggttgctatggtgaccagaggccatgttgctgtctatgaatactgaacaaaggaaaaaggagggacaatcaagggcctaccttcttggggagatctgtctctctcacactggctgtccctccccagcatcgcttctatttggtctgccagaggctgtatagtccagcctgcttacttccctgggcggtgcagccctgacttacacagccagcacagcccacataccagtcctcaagagcccttgaggccaagcgccctgtcacaaccccctatccaaaaggtaacttctcatctcagttgcaggtgtgggtatgtgtgctggggtgggtatccttaacctttttccattttgaaaacatcactgtgacaaaagcccccacctcttcctgcctagcagatctcaggtagaaaagtccctctctgctaatagcaatctcaggtagaaaagtccctctctgctaatagcaagggctaccctggggatacttttgtgaaagggagtgcttggcaccatttcccaggacctctttttctactctagatcagacctgaggtggtgatgggctgccgagccatgcgtatgaggtctagtcctggctttagcatgagttggagcagagagggtccttcttcgctgaccccagatttagccagctctgccctgccatgtacggggtagcctccaggtgctgagtgtttgatagatgacctgacaagtgcctggcacccagccttgttcctagatcctggcctttctcactggctgggaaaccttagatcatatcagctaggacaatactgctggatttatatccagatattaataaacattctttttaacaattttcaaaaaaaaaaaaaaaaaaaaaaa

SEQ ID NO: 1206 - DNA, 2380 bp, Cricetulus griseus
tgccaagagggtcgcgatgggggcctcgggggctagggcagtaccttaggcccaatagagtcgcccctgctgtctttccgaagcaggtacagattcccttcaaggttttcggcatggcggagcctgagtcgctggtacctgatacaggtgctgtgtttacatttggaaaaactaaatttgctgaaaatatccctagtaaattctggtttaagaatgacatacctatatgtctttcatgtggtgatgaacatactgctattgttacaggaaataataaactttacatgtttggcagtaacaactggggtcagttaggattaggatcaaagtcagctatcagcaaaccaacatgcattaaagctcttaaacctgaaaaagtgaagctggctgcttgtggaaggaaccacaccctagtttcaacagataaaggcagtgtatatgcagctggaggaaataatgaaggacagttggggcttggtgacactgatgacagagacacttttcatcaaattggcttctttacacctaaagataacatcaaacagctctctgctggtgctaatacatcagctgcattaactgaggatggaaaactctttatgtggggtgacaattctgaagggcagattggtttgaaaaataaaagcaatgtgtgcatccctcatgaagtgaccgttgggaagccaatctcatggatctcttgtggatattaccattcagcttttgtaacagtggatggggaactgtacacatttggagaacccgagaatgggaagttgggccttcccaatcagctgctgatcaatcacagatcaccccagcgtgtgctggggattcccgagaaggtgattcaggtagcctgtggtggaggacacactgtggttctcacagataaagtcgtgtatgcctttgggctgggacagtttggccagctgggccttggcacttttctttttgaaacatcagagcccaaagtcattgagcgtattaaggaaaaataagttatatttcctgtggagaaatcatacagctttgatgacagatataggcctcatgtatacttttggagatggccgacatggaaaattaggacttggaatggagggtggatgtcacatgctggtttttgccaccccacgacttagtgcaatagaggaatctgaaattgaagaagtctttgagccttacctaagtgcgggttctatgcccatcagtgaaatttccccaggaactccaatgaacagatctttatcagcacgtctgcggcgaagagagcgggagagacccccatgttctgcttcaatggtgggaacactgcctccattagaggggacttcttcttccacttcagctaattatttttcccccagttcaattcctttccgtttgtctatggataactacccagagaaaagcccctctgagtctgtggagccactggactcagattattttgaagataaaatgaacaaagagacagagacagaaaattcttcagcagtggattcagaaaaccttggtgaaactactgatatcttaaatatgacacatgtgatagacctgagttccaatgagaagtcattaagcttttcaacaattgaagaaccacaggatcagcaaatttcaagaaactgtaggaacccgaacctgaaacagaaagctcagaaactattgatgccctcgatgacaacccagatgaaatcattaaagaggaagacagtgtcagcctactcaaacggactcttcgtgaatacaatgaaaatccaaaaggacacatgtacgatcgtataaagagcagttcttccgaaattctgggaagtgttgaaccaacaagtaaagacataaaaaagtctaaaaagatttccttctttaatcggatgtcattgacaggtcagaaaatgatgcagaatactaacgatccacttccagaaataaagccaataggagatcaaatagccttacaaaatgataagaaagatgccaaaccagaaccacatgggtcaaaatcttcaggatactgcaccaccaaatatggagggaaagtccaaatcctgtacaatactataaatgtatgtttatgtttccatggtcaccgagcacatttgttcttcatacttgaaaaatgttatgtcttctgaagaacagttttaatatttatttatgctcatattcttaataagcggaatacttgtacctccaatcttccttgacgtgtttggccttaactgttcagtgttgcataaaacaatatatttttatatttgaaagctgaatgaagatatttcatagttttgctaacacagttatcattatttgtaatttcctaagccaatgtttgtggtcttacaacactggaacagttttgagtatatttacaaca

SEQ ID NO: 1207 - DNA, 2379 bp, Cricetulus griseus
ctcgcgccggacacagggagcagcgagcacgcgttccccgccacccgacccggtcggacaggattcctcggccgcagccccgcggggagatctctggaaacatggctacagaacatgttaatggaaatggtactgaagagcccatggatactacttctgcagttatccattcagaaaattttcagacattgcttgatgctggtttaccacagaaagttgctgaaaaactagatgaaatttacgttgcagggctagttgcacatagtgatttagatgaaagagctatcgaagctttaaaagagttcaatgaagacggcgcattggcagttcttcaacaatttaaggatagtgatctctctcatgtgcagaacaaaagtgcctttttatgtggagtcatgaagacttacaggcagagagagaaacaagggaccaaagtagcggactccagtaaaggaccagatgagtcaaagattaaggcactcttggaaagaacaggctatacacttgatgtgactaccggacagaggaagtatgggggaccacctccagattccgtttattcaggtcagcagccttctgttggcaccgagatatttgtggggaagatccccagagatctatttgaggatgagcttgtaccattatttgagaaagctggacctatatgggatcttcgtttaatgatggatccacttactggtctcaacagaggttatgcgtttgtcactttttgtacaaaagaagcagcacaagaggctgttaaattgtataataatcatgaaattcgttccggaaagcacattggtgtctgcatctcagttgccaacaataggctttttgtgggctctattcctaagagtaaaaccaaggaacagattcttgaagaatttagtaaagtgacagagggtctcacagatgtcattttatatcaccaaccggatgacaagaaaaaaatagaggcttttgctttcttgaatatgaagatcacaaaacagctgcacaggcaaggcgtaggttaatgagtggtaaagtcaaagtctggggaaatgttggaactgttgaatgggctgatcccatagaagatcctgatcctgaagttatggcaaaggtaaaagtgctgtttgtacgcaaccttgccaatactgtaacagaagaaattttagaaaagtcatttagtcagtttgggaaactggaacgagtgaagaaactaaaagattatgctttcattcattttgatgagcgagatggtgcagtcaaggctatggaagaaatgaatggtaaagacttggagggagaaaatattgaaattgtttttgctaagcccccggatcagaagaggaaagaaagaaaagctcagaggcaagcagcaaagaatcaaatgtatgatgattactactattatggtccacctcatatgcctcccccaacaagaggtcgagggcgtggaggtagaggtggctatggatatcctccagattattatggatatgaagattattatgattattatggttatgattaccataactatcgtggtggatatgaagatccatactatggttatgaagattttcaagttggagctagaggaaggggtggtagaggagcaaggggtgctgctccatcaagaggtcgtggggctgctcctccccgtggtagagccggttattcacagagaggaggccctggatcagcaagaggcgttcgtggtgcgagaggaggcgcccaacaacaaagaggccgcggggattctggtaactatggttacaaaactgaaaacctaggtagtttttattcaggatacttttgggcaacagtggaagtagaaacaatagggaatctgtaaaattggagactgatagattggccagaaactggccctaaatctaaacaggtgcagttataatttgagacatctggcaagattttccctttatgtatatattttaacaatccaatccgcttggacatgaacaaagccacacttatgtttctggcgaactgattttatttttacttttatttttttccaataatggtattcttagttaagatgaaaaaggagaaaatgagcaggcattcctgattgagaatttggctcatttggctgtagtacatacaatgtttctgggtagtgtttagatttggtgtcttgaaaaggtagttgattaaaaaccaagtatgtctttaatatcttgtatcagaacaactatttgtatgttaccaacttaaattgctagaataaggtaaattggtacacaactgctatttttaatttagaactttgacctaattgggttttcaaaaccatttggctacttgtattctttatgctgttgttaatttcaataaaaattcacacctaaatgtatacttact

SEQ ID NO: 1208 - DNA, 2379 bp, Cricetulus griseus
  modified_base (479)..(479): a, c, t, g, unknown or other
ggatgagtatgaacattatgagcgagttgaaaatggagacttcaactggattgttccagggaaattctagcatttagtggaccacatcctaaaagcaaaattgaaaatggttaccctcttcatgcccctgaagcctactttcccgtaattcaaaaagaacaacgtgactgcaatcgtgaggctgaacaaaaagatctatgaggcaaagcgcttcacagatgctggcttcgagcactacgacctgttcttcatagatggcagcacccccagtgacaacatcgtgcgaaggttcctgaacatctgcgagaatacggaaggggcgattgcggtccactgcaaagctggtctgggaagaactgggactctgatagcctgttatgtcatgaaacactacaggtttacacatgctgaaataattgcttggatcagaatttgccgaccaggctccatcatcggaccccagcagcacttcctggaanaaaaacaagcatcattggaggttctttgtcttcgggcgcaaatataagaagcttctccataaactcccggctagccagttctctagggaacttgaatgctgtgccagatgaccctgagcagcagcagcagcagcagcggtcttgggggcaacctgaatagctccccaggccccctgagcgccaagcccgaggagcacaccgccatccttagaccctctttcccggggggctttcttcctcctcagcgagattcctcagccgttctatcccttcccttcagtctgaatatgtccattactaagaaggccttgccactccagtgaaggcggttccattcttagacatctggacatgcaatgtggaggggaccagctgctttcccggaggatgtctctatcttcttaccttagagagtgttaaacatagcaccgttgagagacttgaggccagagcactggctaatgactactataaatgcactgcaatgatctttatggagatgtccatacacagttttaatgttgaaatttggtattttaaaaggttatttttaatgtatttcggtaatacgtttgttactgcatttacatgtacagtgttacattatatatgtatcatgaactttataaaagactattttgataattttataaatatataaaattatgtaaaagctagactatattttgatttagactttcctgctgtttgctaccaaaaatttgtattttaaattgtttagctttagtatggttttgtctacaatgagtaaataattcttccttaataagtgaaagtgagggagtagatttttagaaagtgactttaatgctccccctatgaattcagtaaaccagaacattctctcttgaagtctgtctgaactggagttcattcaaacttatctctaccaagagtgccgttgtttggtggggtttgttaggaaaacacatttccccctttgtttttgttcgagatgggcatcgccttgtgagcatgcatgttctgatgtcagtttcaaagcaatgaagggataaaccgaagaaaatgctgctaagtagatgggtacactaaaggagagtctcagatactgattctcttccaggctgcttgcgaatgggcaagggctagttaaattggtttcatacaaagtgctttattccagccattgtgttatttataatgtatttcttaggaggggatatcttcagactagtatataggcttcagtaagatgccttgttcatgttttacacttttaaaaaaggcattggaatgaatgtttgactcaggtttgttaacataattttccgtaactgcagtaccaaataattacactcacctgatggaaagttgagttatatgtttttagaatcaaatacataaaaggaattaaattgtatatcttttctaaagatgaaaagtcaaatattttattgtgagttattattttaaaaagttagtttcttgtataggaagaaaatactatttctttcaaattatcattgaaaaataattgagtcaacatttgagatgtgggggaagagaaccatatcatcatttttagttgttctatgaacaccaatgagtgcagctactaaaatgattgtaaagttgactactgcaaattttccataattatgtgtgtatatatgtcatatgtatctacatgtgtatgtcttaagcttatttatacacatgaacatacataaggcacaccaagaaggggatgtatataatatagagtttatatagcagagagattctccacttataataaaaatagtttgccatgtattttgttatgaatagtttatctcccagaagattatttttgttctattttgtaagtgtagaagaatacactgctaataaaattaaaagttttaattgcaaatta

SEQ ID NO: 1209 - DNA, 2378 bp, Cricetulus griseus
tggacactacagctccccatacctcaggtggccctgcttctctgggaccacaaactgcaccagcaacaaaagcccgagaaaggcctctgcaggaacccagcttccaaaagcagagacgacaaatctggcagcctatgtgcctttgctgacccagggctgggctgagatcttggtccgcaggcccacagggaacaccagctggctgatgagcttggagaacccactcagccccttctcctcggacatcaacaaactatgcctttacaagtagctgtccaatgctcttatgctggcacagccaagccaccacctctcccacgctctaacacagactctgccgtggttcatgaggagggaagtccaggagaggcctatgtgccagtggagccccccgaattcggaggattttgagtcatcactaggtacagacaggcactgccagcgtcctgacacctacagcaggtcatcctcagcatcctagccaggaagaaaaatcccacttggaggagttggctgctgggggtatccctatcgagcgggccatctcctctgagggaactcggcctgcagtggacctctccttccaaccctcgcagaccttgagcaaatctagctcttctcctgagttgcagaccttgcaggacatccttggagacctaggggacaaggctgaccttggacgactgagtcctgagtccaaggtccggtcccagtcagggatcctggatggggaagcagctacctggtcagccccaggtgaagaaggccgtgtcacagtcccacctgaaggtcccctaccttccagttctccccgctcccctaatggcctccggccccgaggctataccatctctgattcagccccatcacgaaggggcaagagggtggagagggataccttcaagagcagagctgcggcctccagtgctgagaaagtgccaggcatcaaccctagctttgtgttcctacagctttaccattcacccttttttggtgatgagtccaataagcccatcctgctacccaatgagtccttcgagcggtcagtgcagctccttgaccagatcccatcctatgacacccacaaaattgccgtcctgtatgtgggagaaggccagagcagcagcgagctggccatcctatcaaatgagcacggttcctacaggtatacagagtttctgacaggccttggccggctcattgagctcaaggactgccagccagacaaggtgtacttgggtggattggatgtgtgtggtgaggatggccagttcacctactgctggcatgatgacatcatgcaagctgttttccacattgccaccctgatgcccactaaggatgtagacaagcaccgctgtgacaagaaacggcacctgggcaatgactttgtttctatcatctataatgattctggtgaggacttcaagctgggtaccatcaagggccaattcaactttgtccatgtgatcatcacaccgttggactacaaatgcaacctattgaccctgcagtgcaggaaagacatggaaggccttgtggacaccagtgtggccaagatcgtgtccgaccgaaacctgtccttcgtggctcgacagatggccctacatgcaaatatggcctctcaggtacaccacagccgctccaatcccactgacatctatccctccaagtggattgccaggctccgccatattaaacgtctccgccaccggatccgtgaggaggtgcactatccaaacccaagtttgcctctgatgcaccctccagcccacaccaaagccccagctcaggcccctgctgagtccacacccacctatgagacaggccagcggaaacgcctcatctcctcggtggatgacttcacagagtttgtatgagggccacagtcagacagcttctttatttgactttgtcttgtctgtgtggggctggggcaggatcaaggctagagctgcaactgagcccacagaagcaggcaggtgctgtcacacacattctcttaccccaccctggggaccagccccaatgggggtcttgtccaataacttcttggcatctttcaacccacagtagtcctggtcttgctcagacctgataccagcagatctgggtactgcctggccccagacaagggaggaaaattaggccacggtggtcccaataccatccagcacctgcccaaggccagactcggatccagtaaagtggctgcagcttcccctgcacccctaccatgggtaacttcagccactaggcccttcagcccaagtgaaaaatagtgacatacaaaaatatatacattttaaccccatataaattattgatggtggacatacaaagggatggcggctaaaggcaagtaagctgcacaaaca

SEQ ID NO: 1210 - DNA, 2377 bp, Cricetulus griseus
cggcgccaaccggagcctaatcggcggagcagctggggcgcctgctggagcggttgggggctgcagcccaccagggagcgctggagctgggacagctgcacttcaaccagtgtttgtccgcagaagacatcttttctcttcatggcttctcgaatgctacccagataaccagctcgaacttctcggctatctgccctgcgatcttacagcagctgaactttcatccctgcgaggatcagccgaagcacagtgcaaagccaagcatttccgaagtctggagctatggaatcctgtcggtgactaattattaacttggcatctctcagaaggcggttgctgtgtttggttggattttacatgcttttctttgtttgaaagaacacttaagatgctactgaaaacatatggacagaatgaccatacccacttcgggaataatgactttggttctaaagaaaaagcccaccaacccaaaacgttaccattacctgcaatcaacggtgtgacatgctatgccaaccctgctgtcacagagcctaatggacacatccactttgacactgtcagtgtagggtccctccaggatggaagaacagagtcaagttcatgcacctgtttgaaggggcccaaactgtcagagataggaacaattgcctggatgatcacgctttgtgatgctctccacaacttcatcgacggcttggcgatcggggcatcctgcactttgtctcttcttcagggacttagtacttccatagccatcctgtgtgaggagtttcctcatgagttaggggactttgtgatcttgctcaatgcagggatgagcactcgacaagccctgctattcaacttcctttctgcatgttcctgctatgttggactagcttttggtattttggtgggcaacaattttgctccaaacattatatttgcactcgctggaggcatgttcctctacatttctctggcagatatgtttccagagatgaacgacatgctgagagaaaaagtaactggaagaaaaacggatttcaccttcttcatgatccagaacgctgggatgttaaccgggttcaccgccatcctgctcatcaccttgtatgcaggggacatcgaattgcagtagccggaagtttttcaactagaggttaaagaatctagtgactggcttcagacaatgtaaaataggtgaaatttgttgttaaagaaattctttaaaaggttttcagtttcagtctgaagtgacaggtgtatgggggcctttggtaaatacctgtttttcagtgttttatgcatttgagaacattatcatgaggcaaaacacatacattcacaagcaaacacacggacccagagtcaagtgctttcagagtggttttccttcaattaatgtgttctgcttcttttgagggcaggtacatcaaatgtggaaggaaatcaaaacagctccggtgcacccacgaatggttccagagctttaatgatccccagaaagacagattgctcacagcgtttgtcagctttatgtctcaattaacgacttgtaggattcttttgaaagctattctaaagttaaagtaacatgaattaggaaccatgaaaggcttgctagccctgtgaaacttgggcttaggggtttgtctttgagtgtaaactggacagactctgacaaaaaggtcagattggcttcagaatgacttacgttgtggttccaaccctcagaaatggcagaggactattcaagactggtgagaactctgtctcaccacattctgggattgctttgtgatgatgaagaatatgttgggtgggagaaagaaattgaatgtaatttttgagcaatttactttttagagataagcataattatttagcagggaaaatttcaataaatgcaaaataacagctggtctgtgctgtgtcagagactgactgacaatggaagcatgtgttcattatgggtgattgacagccagttggaaacgtcttcttctatgttcagcatgtatttttccatatggtatacctttggagaaaactcagcatactgtgattatttttctaccttttgtaagtagacagagcttgttgggtttttgagcaggtagtagaccattagtctgaattgaacattataatctcaattcacactcccaagtaacttaaaaaaagatggtttgacagccatgaaaattattaatagatacaaagagttatctcaggaattatgttttcctataagccaaaacaagttttccttcagcaacaatgcaaataaataaccatttaatatgtttatgtatatttcactctaatgttttgacaaattgaaaaaatattatttgaccaaacagtaaaacacctttgaagccatgta

SEQ ID NO: 1211 - DNA, 2377 bp, Cricetulus griseus
ggaaggctgagtagctggggaaggtgcgggctgcggcgcggcagagtgtgctctatggaccatgtgctgctatggatgtctgaagcacttgaactgcagcttgggaagacacagacacctaaatgctgggctggattaagtgcctgatgaggatggtgattgagcgaattgtggtcagcatgcagtcggtactttggtctggaaaaccatatggttcatctcgaagtattgtaaggaaaattggtaccaacttgtctctgattcagtgtcccagagttcaatttcagcttaccagccatgcaacagaatggagtcccaccccaccaggggacgacgtggtggcatcttttgctgatgttggatgggtagctgccgaagaaggagagtgctccacaaagctcagggcagaggtcaggtccaagtctccccatgaggataaccttccttgctttgagaagcccccaagcaggcatgtttctttaccaaacttgtctcaagatgagcctcccccaaagacaacgctggccagtgaggaagccatgcaaaagatctctgcactcgagaatgagcttgccgcccttagagctcagattgccaagattgtgaccctgcaggagcaacagagtctcaacgcaggtcacttagattcttccactgtggcaccaccaccaccacctcctccccctccccctccccctcctccaccaaagtatgtctgctgttgacctgattaaagagcgaagagagcaaagactgctggaaagacttcagctaagagccaacccaaagccacccgacatgccaaatatgctagagataccttaaagacatgaacagtgtgaagctgcggtcagtcaagaggtcagagaaagatgtaaagcctaggccagtggatactactgaccctgctgccctcatagcagaggccctgaaaaagaagtttgcttaccgttatcgaaacagtaaccaaggggaagttgaaagagaaattccaaagccagagtcagaggccacctcagagccagtcctgtttggcccacatatattgaagtctacagggaaaatgaaggctttaattgagaatgttccagactcctaatggacaatgtgaaagactcctggttcactgttggcttgcaaagttgagtttggcagtagagatcaccagtatttagtaaatctctgactgtaatggtcattggtctccttcgaatggcatcaatgaggacactgttatcttcagcttgagtttgctggtcagggatggaatagctggtttgccctgttactagagtacagtattggatatggaaatgcctcaaataggacttacatatgttctcacattttcttttcctcctggagctgagtttacataagcagcagaagatgtttactgctgaatattcgtgttgctttctgttagagggacatgagggccaggaaggctgcttaaacctcactaccactcaattattgggaagcaaatgtacttctcaagtagtagcagatcgaattattgaattaaattactttttaaataaaagccagaatgtatcatctttcttttcagtttaatgaatagcctcataaagatggctgcttactggcttgcttcatcatggttgctcagcctgctttccatcaattgctaattaagaaaatgccttacagcaggatcttatggaggcattttctcagttgaggttccctcctttcagatgactctagcttgtgtcaagctcacataagactagccagcacaatacaaaatgtcagcgtaaccaaatttataaaacttaactagtggtcaaaatatcctttataataaaacattcctgactgggtgaataaattccctttaaactgtttatcattggccagctgatgaattgtattatacagataaacctggggtgtcattagaaagctgaagctgcctttattatctagggcttgaaaggacttgttataatttaaagtacttaataagttttcatgatttctgtgttaatgtcagaatctcttaccatgagtaaatatttggattatttaaatctatcgactagttgttcttcccaggataattgagatgggaagtgtagataggtattttaagttattgaaaatgtgttctaaatcttgaagattaagctgtttttcatagtttatttagtttaaattgtggtatgttgttgatgtatgttgtttctaaatgttttatatggtttgaaaactgtcttttatgagattcagaaaattcgcctgaccacatattttgacctaagaaatttatatttatatcagtattgaatttggctagtattccaatatatgaaagttactgttttaaaataaagcaagctgttgaattttc

SEQ ID NO: 1212 - DNA, 2376 bp, Cricetulus griseus
ttccctaagcatcctgtccctgggatcccagtctagtagcaagcagagagtgaggtttattgcgatggttcatctaaaggctagatttcatttggagagcataacagatgtggcccctcaggtctggggtaggaacttggagctatcaaggaggccacatctctgtcagattgtcattttgctaaagcaagattagttcaaatacaaagaaatatcttctgagaaccatcgcaacagaccaagaacaaaccacctggttatgtaggaatgttatcagcagcttcatgtccccaggctcagagcctgggaaagcagagaatctggggagaggtggagggaggtggggaactggggatgtagtatgaagaaagggcaagagggtactcagctctggtttgaaaggtctctggccatgttgctggccaggaccttgtgatttgcacagtgatgttaactgacctggcacttcctccagagatgctttgacctcagacctgccaaacagttgcatggtggtgggatcccagcatccagagggcataatcccactcagcccgagcctcgtggacccactctgaggagcttccttctcagaagtggaactagtggtatttctctcccttgcccttctgcccttcctagtgccggggcgcacatgtctgtctgtggggctggcaggcaggccaagctcttggttaccttgtgccatttcacggccaaagtgaatgaaccacattccaggtgggagctggcggttctgaaggtcaggatagtgaaggaaaaacaatagcaataatcatttcatactcatggaactgaagggaccttagcattcatcatctcatccattcccctatttgacagatgaggaaactgaggcccagggaagcagaaaggacttctctgaacctcatagtaaattagcattaaatgcagccttcctacctactggcattttgcctataaaaatttagcaagggatggattggcttggctctgtaaaaattttaagtcagcagtgccacatctggtgagctctggaatgacctctgggctgctttctgctgttttccctcatggactccacaggtgggggttgaagaccagccaccttcctgtgcccagctagcagagccaatagcctcactgggtggaaaaggaataccttactgtgtaaaattggatcactggtaacatttgagactctgaactattttcattttaaattcatgtgaacttgaacatcacattcctccaatttcctatgctcccctaaaggaataaaatgagctagagtgacctcagaaacagcctgactgttcccaggaggtcagagttcatcgtatctgtggcagagagccagaagttagggctcctaccttcctggccttctaggaacttcaggaccaggaagagagactcggctgctctggggtgctgacaagggtttcttttaaaacacagttttccagtgttggtctgctttttacaatgcctcctcctaccctctttggttttgtagaggtggatgaaggttgctgtagattatgtcttatatgtttgaaaaatgccaaaatataatggcggtaataattacatcagatacggccttggctgcagtgtgaccctttatccattccagcctgagggtcaattttctttcccaagggaacagataaaacagctttacagatagcagcccacaggaatcaaaagagtgaaacctgctttgggcttaaccctagcatcttctatccttgaccccagctcagccatcctcctcatgcatgaaagtcagactaaacagtaggattggcccagagacctcaggtcagccaaattgactggatctgtcttttgaaccatgctccttacaaggtgaggcaaggccaggcctcctgtaccttggagttgtctttgatctttgaaggcccagggcctgtccccttcctgtcttcaaggcatctgcatccctctttcatatcacatgacagagaagcttgttctcatggcatgtaacatccctgtgaagagagcgttgtgtatgattttgtattttttaattctattttaacctactaggttggaatctaattttaaattttattggaactcacattttaaaacaaataaaacattgaaaacaataataattataataataaacctttgaccagtgtcttccaagtagtttgatcaaataatttataggtgttttcaaaacacagcctggagtgtaaagattggaaagccctgtggccacacttgtgtgtatgaagtgtaaacttggctttgttgttttggatttccttttgggttttgttttgttttgtttgaagatcagatagtgatcattctggaaaggctgaagccaag

SEQ ID NO: 1213 - DNA, 2375 bp, Cricetulus griseus
  modified_base (2084)..(2084): a, c, t, g, unknown or other
gacctggcatccccttgctccccagagcccacaggcatggccactgaggttgcactgagcgagtcgtccaaggaccagaaaacggctaacccatatgtcacgcccaataaccgttatggctaccagaatggtgctagttacacatggcagtttgaggcccgcaaagcccagatactcaagtgcatggaatgtggcagctcccacgataccttgcagcagctcacggcccacatgatggtcactggccacttcttaaaggtgacaacctctgcctccaagaaggaaacagctggtgctggacccagtttgaacccactaccctctatcagtacctgcgggaggaagacctggacgagagccccaaggggggtgtagatatcctcaagtcacttgagaacactgtgtccacggccatcagtaaagcccagaacggtgcaccctcgtggggcgggtaccccagcatccacgcagcctaccagctgccgggcacagtgaagccgctgcagtcggctgtgcagagcgtgcagatacagccatcttatgccagcagtgtgaagtcactgtcctccacagagcacaatgccctcctacacctccccagggagacttaccgcccccaccccataagagcaatcgtgtctgccatggaggagttagtggagaaggtcacaggcaaggtcaatgtgaagaaagaggagaggcagcaacagcatgctggacaagcccatctaccctaccacccctcgccaagcagcggatgccatcgaccgctactactatgagaacagcgaccagcccattgacctgaccaaggccaagaacaagcccctggtttcaggtgtggctgatgctgtgtcctcacctcttcgggagagcgccctcatggatatctcagacatggtaaagaacctcacaggccggctgactcccaagtcctccacaccctccacggtgtcggagaagtcagatgcagacggcagcagctttgaggaggccctggatgagctgtcacctgtccacaagagaaaggggcgccagtctaactggaacccacagcacctgctcatcctccaggcccagtttgcctccagccttcgagagacggcagaaggcaaatacatcatgtcggacctgggtcctcaggagcgggtacacatctccaaattcacagggctctccatgaccaccatcagtcactggcttgccaatgtcaagtaaccagctacggaggacagggggaacgaaagttacctgaagaacctcgacacaggacatcctgtttttcttttgtagcgattgtgcctctcagttcagaactgcctccacgtacatcagccacctggagacgcacctgggcttcagcttgaaggacctctccaagctgccacttagtcagatccaagagcagcagaccgtctccaaagttctcgccaacaagactctgggcccgctggggtcagccgaggaagacctgggctccacattccaatgcaagctctgcaaccgaacttttgcgagcaagcatgcagtgaaactgcaccttagcaagacacacggcaagtcgcctgaggaccacctgatctatgtgaccgagctagagaagcaatagtgcccaggtgtgcaagtgactgcggaaattcactaccatcctcatcgtgctgcactaggcctggcctgagccgctgaaatcagtctctcctttgttgctgaactgcgtatcgtatctggacttggtttttcttacacatattttgtagttatatttatatgctctttgtctgacctgtgcatgttatttttcttttggaaatagtggggcacgctcggagacattgtttagcggtaaggaaagatgcaaacagcagcgataaagagacatcctaaaattacgaagttgccatgacaataaaggtcacaggacctggtagtgtcaagtttaaccctttgaggacttgtatctctgtgcctttcactcaaaaattaaaaaaaaaaaagttaattaaaaataaaaagatagagaaaaggggagaaggcgcttaaaggcatctcattcggatcaaaagctgtgtcagacacaaaacttntttaataattaaaaatgagcttttatatgcaggactggtttgtgaaaagacatgcatgcagcagttggagacagagagctgtctaggactcgacggggttaggaagccacaactttatatgttacaaaaaaaacaaaaaataggggcaaatgttggatccttgtaaattgccagcatcagcttacacacgcctgtacgttacatatcatatcattttaatctattcaactttctttgtaccttctggctgtatgctttctcttttaactttttatattgtcattttatatt

SEQ ID NO: 1214 - DNA, 2374 bp, Cricetulus griseus
tggcactgaatgttacatcacttcagatatgttctatgtggaggtgcagttagatcccacaggacagctgtgtgatgtgaaagtggctcaccatggagagaaccctgtgagctgtccagagcttgtacagcagttaagggaaaagaattttgatgagttttctaagcaccttaagggtcttgttaatctgtataaccttccaggagacaacaaactgaagactaaaatgtatttagctctgcaatccttagaacaagacctttctaaaatggcaattatgtactggaaggcaactaatgctactccgctggataagatccttcatggaagtgttggctatctcactccacggagtgggggtcgatttaatgaacaataaaatactaatgcatctccttctgacctgctggatgataagactgcatctcctatctattttgcatagaaaagaatgttcctcgattcgtttgggcttacgtgcccctttatgaactcatcactcaatttgagttgtcaaaggatccagaccccctaccattgaatcacaacatgcggttttatgctgctcttccaggtcagcagcactgctattttctcaataaggatgctcctcttccagatggccaaagcctgcagggaacactggttagcaaaatcacctttcagcaccctggcagagttcctcttatcttgaatatgatcagacaccaagtggcctataacaccctgattggaagctgtgtcaaaagaactgttttaaaagaagacactcctgggctcctccagtttgaagtgtgtcccctctcagagtctcgcttcagtgtgtcttttcagcaccctgtgaatgactcccttgtgtgtgtggtaatggatgtgcaggactcaacacgtgtgagctgtaaactctacaaggggctgtcagatgcactcatctgtacagatgacttcattgccaaagttgttcaaagatgtatgtccatccctgtgacgatgagggctattcggaggaaggctgaaaccatacaggctgacaccccagcactgtccctcattgcagagacagttgaagacatggtgaaaaagaacctgcccccggctagcagcccagggcagggaacggggggtctaccattggctcgagtccgacccctcctcatcacacgccgccacctgtctcttcgatggccggcaacaccaagaaccacccgatgctcatgaaccttcttaaagataaccctgcccaggatttctcaaccctttatggaagcagccctttagaaaggcagaactcctcttccggatcaccccggatggaaatgtgctcggggagcaacaagaccaagaagaagaagtcatcaagagtaccacctgacaaatccaagcaccagaccgaagacgattttcagagagagcttttttcaatggatgtcgactcacagaaccctatgtttgatgtcagcatgacagctgacgcgctggatacacctcatatcactccagctccaagccagtgtagtactcccccaacaacttacccacaaccagtatctcacccccaaaccagtattcaaaggatggtccgactatccagttcagacagcattggcccagatgtaactgatatcctttcagacattgcagaagaagcctcaaagcttcccagcactagtgatgattgcccacccattggcacccctgttcgagattcttcaagttctggtcattctcaaagtgccctctttgattctgatgtctttcaaactaataataatgaaaacccatacactgatccagctgatcttattgcagatgctgctggaagccctttctcttcatcacaagaaagaggagttcagacttcagtcactctactgtatgccccccgagagaaacagttttaaaaaatgcagccatagttcacttaaaacaatttcaagctcacttgaagtaataggggcctggaatgctaagtgagcatgaagataaaccttgctactgtgtagcacacagttggacctttttggagaaacaggtctgagtctggattctgagggacatcaaatgaagcccttctcataaatagagaaatccaggagaccattttgagtgcaacagaaattctcagtatttggagggtcctctcaaaaatccgcggccttactttgattttgccacctgcactgtgccattcctgatgattctgttcaggatctctatcagcgggatggggcataatccccagcacaactcttctggattacaaaaaaaaaaaaagaccaaggtgattcatgtttgtgtatgttataagtggagtgacttcatcagatgtggacgatttctatctatatccaactctgcaggttggagttagcat

SEQ ID NO: 1215 - DNA, 2374 bp, Cricetulus griseus
aaatcagtccggaaggaaaagctaaaattcaacttcagctagtcctgcatgcgggagacacaacaaactttcatttttccaacgaaagcacagccgtgaaagagcgggatgcagtgaaggacctccttcagcagttgctacccaagttcaagcggaaagccaataaagaactggaagagaagaacagaatgctccaagaagatcccgtcttattccagctctataaagatcttgttatgagccaagtgatcagtgctgaggaattctgggccaatcgtttaaatgtaaatgcaacagatagttctccatccagtcacaagcaggatgttggcatttctgcggcatttctggctgatgtccggcccaacagatggctgcaatggtttgagatataatttaacttctgatatcattgaatctatatttaggacctatccagcagtaaaaatgaaatatgcagaaactgtaccacacaacatgacagaaaaggagttctggacacgttttttccagtcccattattttcacagggaccgactaaatacaggatcaaaggatctctttgcagaatgtgccaaaatagacgaaaagggattaaaaacaatggtttccttaggagtgaaaaacccaatgctagatttgacagctttggaagataaaccattggatgagggctatggcatttcctccttgccatctacttccaattccaaatccataaaggaaaatagtaatgctgccatcatcaaaaggtttaaccaccacagtgccatggtcctggctgctggtctcaggaaacaacaagcacaaaatggacagaatggtgagcccagcagcacagatggaaattccggagatgcagactgctttcagccagcagtcaaaagggccaagttacaggagtccattgaatatgaagatttgggaaacaacaattccgtgaaaacgattgcactgaatctcaagaagtcagacaggtattatcatggtcctactccaattcagtcactacagtatgcaacaagtcaggacattattaattcttttcaaagtattagacacgaaatggaagcttatacacccaagttaactcaggttctctcaagcagtgctgctagtagcaccatcacagctctgtcacctggaggagcacttatgcagggaggaacacagcaagctgtaaaccagatggtgccaaacgatattcagtctgaattgaaacacttatatgtggctgttggagaacttctgcggcatttctggtcctgttttcctgttaatacaccgttcctagaagaaaaggtagtgaaaatgaagagtaatttggaacggttccaagttacaaagctctgcccattccaagaaaagattcggaggcagtatttaagcacaaatctggtaagtcacatagaagagatgttgcagacagcctacaacaagcttcactcgtggcaatcacggcgtctaatgaagaagacgtgaagcattcctggtgctcacaggttttatgggttgaaaaaaactgacctgcagtgactccagaaacctggctgaggacaagcagatgctcaccccagggaaacatctgctgcatgccgactcccagagctgatgctattgtacttgcacataaaaccgaaaccgaaagaagggacgggattcacctaactctggggaggtaaaaacaaaggcagaaccaaaatgagctaagttgcaaatatatgtgtatgtgtacatgtatatgtatttaaagactgtttacagcagttactcaggaactgcttttgattcacgttaagctgctttcaaaaattaaaagaaaaaataatttaaaaaaatacttaaagggtgcattgataaaatctgagggtttttttgtttttgttttctgagtaaatttttctcaagtttatgcacagggtagccctaagatccctcctccatcccccaccaggatcctcaaatattactgagttctacttgtcccttacatcagcacgttaaagagagtactttacataaggccaagggaagctatagctcagccatcaggaaacagttgtcagaagacaccattagtcctgtgtttcctacggaaataagtgttgcactgaagcctgtgctctcgcgtccccaagtaaaaggcacatctgctggagatcagtgggatagtgcaggatgttgtcaggtgacaatgatgctgcatgtatttcttgggtgcaaatgtatattgctgagaatttttttaaagatggcatgtgctttgaaaagaagaaattgcatttttaagagtttaaaaatcttacaagtgagaaatataagaattgcttattttcacctgtttagaagaaataaaggaagtttctcataaaaa

SEQ ID NO: 1216 - DNA, 2374 bp, Cricetulus griseus
gggcaagttctcaagtgtgactgctcttctagccgccggtgccagcccattgaatttgactcaacaggtaatcgagattatgccaaagatgacccactggagtttaagtcccaccagtggtttggagcctctgtgaggtcaaagcaggataaaatcttggcttgtgctccactgtaccactggaggactgagttgaagcaggagagagagcctgttggaacttgttttcttcaggatggaacaaagactgttgagtatgcgccatgcaggtcaaaaaatattgatgctgatggacaggggattttgtcaaggaggattcagcattgattttacaaagctgacagagtacttcttggtggtcctggtagcttttattggcaaggtcagctcatttcagatcaagtggcagaaatcatatctaaatatgaccccaatcgtctacagcatcaaatataataaccagttatcagtgtctttgcagagagcgttgggagacttccagactacaaagactgaacggatttgaggtttttgccagaattggaagcgccatagcgcctttgggagacttggaccaggatggtttcaatgatatcgcaatcgccgctccatacggaggtgaagatcaaaagggacttgtttacatcttcaatggaagatcgacaggcttgaattcagtgccgtctcagatccttgaggggcagtgggctgctcagagcatgcccccaagcttcggctattcaatgaaaggagctacagatgtagacagaaatggatatccagacttagttgtaggagcttttggtgtggatcgagctatcttatacagagccagacccgttgtcactgtaaatgctggccttgaagtgtaccctagcattttaaatcaagacaataaaatctgcccgctacctgggacatctctcaaagtttcctgttttaatgggtggtgtgtgaccttggaaacccaaatgaaggctggaactcaattgcttgctggccttcgttttagcgtgcatcagcaatcagaaatggatacttctgtgaaatttgacttgaaaatccaaagctctaattcttttgtacaatgtcagcccagttgtgtcttataaagttgaccttgctgttttggctgctgtggagataagaggagtctcaagtcctgatcacatctttcttccaattccaaattgggagtacaaggaaaacccagagactgaagaagatgttgggcctgttgttcagcacatctatgagctaagaaacaatggtccaagttcattcagcaaggcaatcctaaatctccagtggccttacaaatacaacaacaacactttgttgtacatccttcattacgacatcgatgggccaatgaactgtactgcagatacagagatcaaccctttgagaattaagatacccgaaaagaatgacacatcgactggacaaggagaccggcatcatctcatcaccaagcgtgatctcacccttagtgagggagatgttcacactttgggctgtggagttgctaagtgcttgcagatcatctgccaggttgggcgactgggaccgaggggaagagtgcaatcctgtatgtcaaatccctgttgtggaccgagacatttatgaacaaggagaaccagaaccattcttattccctgaagtcatcggcttcatttaatatcatagagtttccttacaagaatcttcccatcgaggacctcttcaactccacactcgttaccaccaacatcacctggggcattcaaccggcacccatgcctgtgcccgtgtgggtgatcatcatggcagttctcgcaggactcctgttactggctgttttggtatttgtaatgtacaggatgggcttttttaaacgtgtccgaccacctcaagaagagcaagaaagagaacagctccaacctcatgagaacggcgaaggaaactctgaaacctaactgtcgtccttaagctgtgccacttctggattctctaaatttaccactttgatgatggagttaaatgtctttcatgaagaacaaaatcccaagattgtattgctgagggtacccagtagtctcagtttacccacaaaactgaaatgagtatttgtcaacttctctttatgaataggttcagattacatttacttcacatacactaacctgtgttttttaggtcatcgaagtgatgaaatttcaagtgataatccttgttcagtgtacataagaatccagaggacatttgacacacatgagaaatattgacgctgatactgatttcttacagaagtatttattttagactggatactttaaaacatctgtgtcagggtcacttctccccttatgtttaattatcaccataattatga

SEQ ID NO: 1217 - DNA, 2373 bp, Cricetulus griseus
tcacaagcagtgatgacatgcttattaaactctgggactgggataaaaaatggtcttgttcacaagtgtttgaaggacacacgcattacgttatgcagattgtgataaaccccaaagataacaatcagtttgccagtgcatctctggacaggactatcaaggtatggcagctaggctcttcatcaccaaacttcactctggagggacatgaaaaaggtgtgaattgcattgattactacagtggtggagacaagccgtacctcatttcaggtgcagatgaccggctcgttaaaatatgggattatcagaataaaacctgtgtgcagaccctggaggggcatgcccagaatgtgtcatgtgcaagcttccatcctgagctgcccatcatcatcacagggtcagaagatggaacggtgagaatttggcattctagcacctaccggcttgagagcacactgaattatggaatggagcgggtgtggtgtgtggccagtctgagagggtccaacaatgtcgctctgggctatgatgaagggagcatcattgttaagcttggtcgggaggaacctgccatgtccatggatgccaatggaaagataatctgggccaagcattcagaagttcagcaggccaacctaaaagcaatgggtgatgctgaaattaaagatggagaaagattgcccctggctgtaaaggatatgggcagttgtgaaatatatccacagactattcagcacaatcctaatgggagatttgttgtggtatgtggtgatggggagtacatcatctacacagcaatggctttgagaaacaagagctttggttctgcccaggagtttgcatgggcccacgattcttcagagtatgcaataagagaaagcaacagtgttgtaaagatatttaagaactttaaggaaaaaaagtcatttaagcctgattttggagctgaaagtatctatgggggcttcttgctgggagtcaggtctgtgaatggcttagccttctatgactgggacaacacagaactcatccgaagaattgaaattcagcccaagcatattttctggtctgattctggagagctggtctgtattgccactgaggagtcattttttattcttaaatatctgtcggaaaaagtcttggctgcacaggaaacacatgagggggttactgaagatggcattgaagatgcatttgaggttcttggtgaaattcaggaaattgtgaaaactgggctgtgggtaggtgactgcttcatttacacaagttctgtgaacagattaaactattacgtgggaggagaaatagtcaccattgcccacttggacaggacaatgtaccttctgggctatattcctaaagacaataggctttatctgggggataaggaattgaacattgttagctactccctgctggtttcagtcctggaataccagactgctgtcatgcggagggatttcagcatggctgataaggtcctccctaccattcccaaagaacagaggaccagagttgcacactttttggaaaaacagggcttcaagcagcaagcacttacagtatccacagatcctgaacatcgttttgagcttgctcttcaacttggagagctgaaaattgcttaccagttagcagtggaagcagagtcggagcagaagtggaaacaacttgctgaactcgccattagtaaatgtcagttcagcctagcccaggagtgtctgcaccatgcccaggattatgggggtctgctgctcttggccactgcctctggaaatgctagtatggtgaacaagttagcggaaggcgcggagagagatggcaaaaataatgtggcattcatgagctactttttacagggcaagcttgatgcttgcctagagctcttgatcagaacaggaagactcccagaagctgccttcctggcccgcacttacttacccagccaggtctcaagggtagtgaagctgtggagggagaatctctcaaaagtcaaccagaaagcagcagagtcccttgctgaccccacagagtatgaaaaccttttccctggattaaaggaagcctttgttgttgaagaatgggtcaaggagacacatgtggatttgtggccagccaagcagtacccacttgtcacgccaaatgaggagagaaatgtcatggaagaggcaaaaggcttccagccctcaagaaccacagttcatcaggaacctgatgggaaacctgcttctagcccagttatcttggcctcccaacctatccagaaagaagaaaagaacttactagaactagaagtagatttggataatttggaattagacgatattgacacaacagacatcaatctggatgaagatattctggatgatt

SEQ ID NO: 1218 - DNA, 2373 bp, Cricetulus griseus
cgcaggggccgggaggcggcggcggtgctgccagccgctggcccgggccccgggcgggtgtacgggcgccgctggctggtgctgctgctcttctcgctgctggcgttcgcacagggcctggtctggaacacctggggccccatccagaactcggcgcgtcaggcctatggcttctccggttgggacatcgcgctcctggtactgtgggggcccatcggcttcctgccctgcttcgctttcatgtggctgatggacaagagaggtttgcgggtgaccgtgcttctgacgtcacttcttatggttatgggaactggtctaaggtgcatacctgtatcagacttaacccttacctctctacaacatggttctctgcagatgagcgagccactgccacagcaattgcatcaatgttgagttaccttggtggagcatgtgcgttcttgtcgggcccctcgtccgttccagctcccaatgggacatcgccccttctcgctgcagagagcagcagggctcatatcaaagaccgcatcgagactgtgttatatgcagagtttggagttgcctgtctaatatttactgcaaccctcgcttattttccaccccggcctccctcttcctcccagtgttgctgcagccagccagcggctgagttaccgacgcagcttttgtaggttactaagcaatttgcggtttttgatgattgccttagcgtatgccataccacttggtgtgtttgctggctggtctggagttctggacttaattttaacaccagtgcatgtcagccaagtagatgctggctggattggattttggtctatagttggaggatgtgttgttgggatagctatggcgaggtttgcagattttatccggggtatgctgaaactaattcttctcctcctgttttctggggctacactgtcctccacatggttcaccctgacctgtctaaacagcatcacccacttgcctttgacgacagtgacgctgtacgcctcctgcatcctcctgggagtgttcttgaacagcagcgttcctatattttttgagctttttgtggaaactgtctaccctgttccagaaggaattacttgtggagttgtcacttttttaagtaatatgtttatgggagtgcttctattttttctcacatttttatcatacagagttgtcttggttcaactggtgccttcccgggtcatgtctgctcagtcttctcctcattctgtgcttcagggaatcctatgacagactctaccttgatgtagtcgtctcggtttaatgccacagactctcgggacttcaaagggactgcacgtcagtgctgcttggaatttgcttggaattgcacatctaatgggaggaaaggagaagaaacttctttcacaggttttgttaggttacagaatctcacattaatttaatgactactgggtaacaatgatgcaggacttgagtgtcgtgggagtttgaagcctctgtggaccgcacaccgtgctggcagcacatctcacgccactaacttctaaagacgtttaaaccctgtatcaaattttaattaaaatagccgagctgtataccagtgataggacttagccacatgtacactacgtgtttttctaataaagccatttcttatatgactccttatttttaatcaggttggaagccttttgctgtctttgggcacaggcactgcctcatccccactagccctgtttctgtgattacagcatcagtcacagcagcaaggtgacgaaatgcctgatagggttgcattaactgttgtgtgaaaagtgtaattccgttatgatttggcactttgttaaggattaaatgagagtcacacgaagcatgagtgtctgcagcaccttgtagtagcacacgtgtaaagtccagccaccactgttatttaccagcttagattgtatttaaatgacccccatttgaaaagaacagtgtataacattgaaggtttcagatctgtgcgtgatttctgtattgagcccttgtgtttagattgtaatatactcaatgctaaatgaagtcattgtatttgattgggcatttttaaattagtatttgatgggggagggcccagcccactgtgggtggttccctcccttgggctggtggtcctgggttctataagaaagcaggctgagcaagccatgtggagcaagccagtaagcagcactcctccatggcctctgcatcagctcctgcctccaggttcctgccctgtttgagttcctgtccctgacttccttcaatgataaagagtattgtggaaatataagctaaataaaccctttcctccccaatttgccttttggtcatggtgtttcttcacagcaatggaaaccctaa

SEQ ID NO: 1219 - DNA, 2373 bp, Cricetulus griseus
aaagaattagaacctttctacaagggtgggaaagcacagctggaccggactggccaccacctcttttgtgtctgtggtaccaaagtcaacatcctagatgtggcctcaggggctttgcttcggagcctggagcaggaggatcaagaggacattactgcctttgacctcagtcctgataatgaagtactggtaacagccagccgagcactgctgctggctcaatgggcctggcgagaaggcactgtcactcgcctgtggaaggcgatacacacagcccctgtggcttccatggcttttgatgccacctctacactgttagctacaggtggctgtgatggggctatacgtgtctgggacattgtgcaacattatgggacacaccaccttcgaggctcacccggcgtcgttcacttggtggccttccatccagaccccactcgtctgctgctcttctcctccagccgtggacacctctatccgcatgtggtcactgcaggaccgctcatgtgtggctgtactgactgcacactacagtgctgtcacttctctgtcctttagtgaggatggccataccatgctcagttctggccgtgataagatctgcatagtctgggaccttcagagttaccaggccacaaggacagtgccagtgtttgagagcatagaagctgctgtgctattgcctgaggagccagcacctgcactgggtgtcaagaactcgggcctacacttcttaacagctggtgaccaagggatcctccgtgtgtgggaggcagcttccgggcagtgtgtatacacccagccacaaatgccaggcctagggcaggaactgacccactgtaccctggcccgcactgctggcctgcttctcactgtcaccactgatcacaacctgctactctatgaggcacattccttacagctgcagaaacagtttgctggctatagcgaggaggtgttggatgttcggttccttgggcccaatgactcccacattgttgtggcttctaacagcccttgcctgaaagtgtttgagctgcagactttggcctgtcaaatcctccacggtcacacagacattgtcctggccctggatgtgttccggaaggggtggctctttgtcagctgtgccaaggatcagagcatacgcatctggaggatgaacaaggctggccaggtgacctgtgtagctcagggctccggacacacacacagcgtgggcaccatctgctgttctaggctaaaagaatctttcctggtgacaggcagtcaggactgcactgtaaagctatggcccctccctgaagccctgctgtccaagaacatagctgtggacagtggccccatgcttctccaggcccagactacccagcgctgccatgacaaagacatcaacagtttggctgtctcccccaatgacaagctgttagccacgggctcacaggaccgcacagctaagctttgggccttgcctcagtgccaactgttgggtgttttttcaggccaccgacgtggcctctggaatgtccagttctcacccacagaccaggtgctggccacagcctctgctgatggcaccatcaagctctgggcactgcaggacttcagttgtctcaagacgtttgagggacatgatgcttctgtgctgaaggtggcctttgtgagccgtggctcacagctgctgtctagtggttctgatgggctcctgaagctgtggaccattaaaagcaatgagtgtgtgcggaccctggatgctcacgaggacaaggtctgggggctacactgtagccgactggatgaccatgccatcaccggtggcagtgactcccgaatcattctctggaaggatgtgacagaggccgagcaggcagaagagcaggccaaacgggaagagcaggtgatcaagcagcaagaactagacaacctgctccatgagaagcgctatctccgggcagtaggacttgccatctctctggatcgtccccacactgtgctgactgttatccaggccatccggagggaccctgaggcctgtgagaagctggaagatactgtgctccgactgagacgagaccagaaagaggccctgctgcgcttctgtgtcacatggaataccaactccagacattgccatgaagcccaggctgtgctcggtgtgctgctgcggcatgagacccctgaggaactgctggcctatgagggtgtgcggggtacactggaggccctgctgccctatactgagcggcactttcagcggcttagccggacactacaagcagccaccttcttggacttcctgtggcacaacatgaagctgtcgccactccctgctgcgctcccccagccctgtgagacacataaaagttgcacttt

SEQ ID NO: 1220 - DNA, 2372 bp, Cricetulus griseus
  modified_base (51)..(51): a, c, t, g, unknown or other
tgtccatggtcatctgtaccctcaaggattccaggacagcaaagcttgggngaacttccgcactctcacagacctgctgctgcgcttcgagcccaacctagacgtggaacaggctgaagtcaacttcggctggaaccacctggaaccctatgcccacttcttgctgtcagtcgtcttcgtcatcttctccttccccctggccagcaaggactgcatcccctgctcagagttggcagtcatctctaccttcttcacagtgaccagctacatgagcctgagcagctctgctgagccctataccaggcgggccctggtcaccgaggtggctgctggattgttgtcccttctgcccaccatgcctgtggactggcgcttcctgaaagtgcttggccagacgtactttaccgtgcccattggccactttatcatcctcaatgtcagcctcccctgcctgctctacgtctacctcttctacctcttctttcgaatggcccagctgaggaacttcaagggcacttactgctacctggtgccctacctggtgtgcttcatgtggtgtgagctgtctgtggtcatcctgctccagtcaaccagcctgggcctggtccgtgcctctattggctacttcctcttcctctttgccctccccgtcctagtggctggcctcgcccttatgggcatagtgcagtttgcccgatggttcctgtcactggacctcaccaagatcatagtcaccacagtaatctgtagcgtgcccctgcttgtccgttggtggaccaaggccaactttcggtgggtggggagtggtcaagtccctgactcggagttccatggtcaagctcattctggtgtggctcacagccatcctgctcttttgttggttctacgtgtatcggtcagaaggtatgaaggtctacaactccacactcacctggcagcagtatggcttcctgtgtgggccacgggcttggaaggagacaaacatggcacggacccagattttgtgcagccacctggagggccacagggtcacatggacaggccgcttcaagtatgtccgagtgacggagatcgacaacagtgctgagtctgccatcaacatgctcccattcttcttgggtgactggatgcgctgtctgtatggtgaggcctacccatcctgcagctccggcaacacatccacagctgaggaggaactctgccgtctcaagcagctagctaagcacccctgccacatcaagaagtttgaccgctacaagtttgagatcacagtgggcatgccatttgggaccaatggcaaccgcggccacgaagaagatgacatcaccaaggacattgttctacgggccagcagtgagttcaaggatgtgctgctgaacctgcgccagggcagcctcattgagttcagcaccatcctcgagggccgcctgggaagcaagtggcctgtcttcgagctcaaggccatcagctgcctcaactgcatggcacagctgtccccagctcggaggcacgtaaaaattgaacaggactggcggagcacagtgcacagtgccctcaagtttgccttcgacttcttcttcttcccattcctgtccgccgcctgaggaatgcccgccactggaggacgcttccgtgcatgctgctgtgaggccctccccatgtggccacccagccagctggagcagcgctgtgctgagcgtgtgtgtgtgtgtgtgtgtgtgtgtgtgtgttgtgtctgctcttgtgggtagatcccatgtgcagggaccttgtgctcacctgtagactgcagaccctgctggagggtggctctctttagcactgttcactttgaatgccaagtgtcaagaaattgcatgctatcttcactcacaatcctgcccttgccctacaaagatggagctctgggcctggccccaaagaccctccatctcgaagagcactttacagataggagtctccctgtcagcccttcatgccttcctgcccttcctttttgtgtgtgtgttggatttgttttccaaatacgtgtctatgtagacttcatggtagtatttcttatttatttggttgctgctaatccttgacagtggtaatccttgacagtggctgtccccagtggtcacatcctgcctggcttcctgcttgaggatagcatgtccaaactgggctctgaacactacagcctgccttagagctctccggtctctgggggtggagtggtagggagtttgtgagggcgcctcttctgcatctcctaggacctgggaaacagtgcaagagtgtccctttcaatacacaggcaagcttggccatgttcagtatggcagagccaaaaggtcctaaggcagccgaaataaagcgctttgaaa

SEQ ID NO: 1221 - DNA, 2372 bp, Cricetulus griseus
  modified_base (1624)..(1624): a, c, t, g, unknown or other
gatgggatgttgtgatttacggcagaaggagaatgcagaccctcgccctccagttcagttctcaagcttaccccggattgacttcagtagcatagctgtgcctggcacatcaaacccccaacagcgccagctgcccagagcacagtctcagcactcatctcctggggaaatagcagcatctcctcaaggcttagacaacccagccctgctccgagacatgctgctggccaacccgcatgagctgtccttgctgaaggagcggaacccacccttggcagaagctctgctcagtggagatctcgagagattctctcgggtcctggtagagcagcaacaggaccgagctcgaagagaacaagaaagaattcgtctattttctgctgacccctttgatctggaagctcaggcaaagatagaagaagatataaggcagcagaacatcgaggagaacatgacgatagctatggaggaggccccggagagcttcggccaggtcgccatgctctacatcaactgcagagtgaacgggcaccctgtgaaagccttcgttgactcaggtgcccagatgactattatgagccaggcttgtgcagaaaggtgtaacatcatgaggctggtagaccgtcggtgggctggcatagccaagggcgtgggcacccagaagatcattggaagagtgcatctagctcaggttcagattgaaggtgatttcctggcatgttccttctcaatactcgaagaacagcctatggacatgcttctaggactggacatgctcaaacggcatcagtgttcgattgacttgaagaagaatgtgctggtgattggcaccacaggctcccaaaccccttccttcctgagggggagctcccagagtgtgcccgcttggcatatggaactgggcgagaggacatacggccggaggagattgcagaccaagaattagcagaagccattcaaaaatcagcagaggatgcagagcgtcagaagccatgatgcatgtagtgtgtgtgctgcagctgcagtgggccccagaccagagaaaagcagtaaagaatctacctcactgggaatatcatcattgctgacttcagatggattcaatcatccagtcccttcttcagggcaaagtcctgaggttggtagccctacgagtcttgctcgctctgtctctgcttcagtctgcgccatcaagcccagtcgaccccaatagcattgaacctatagctatggaggctatgaaggcttcggctgaattgcagacgaactctaaggaacagagcctcctgctctgcaggttggaacattccatctccactcgggatttgcagcccccagaagataatgttgaaatgtctgcgatggatagcaaagataacatcagttcctcttcccctttaagtgatcatggtcagccctctgtggaggcacccgaagaattttgttcatctgtcacagtggccttgaaagaactgcatgatcttttggtcattagctgtaagccagcttcggaaaatgcatctgaagatgtttcctgccagtcagagatggaagctgagagccaaaacaggtaattttggaccatttaggaagaagggtccaaagtgagcatctgaccattagngaccagtacccacaagtctcctgtcaccaggccacctctgatcagaaagatagacaggaagagctgctctgtcgccataacctcagctaaaccagctgatcagtcgcattgcacctcagatgtagaaaatttcacccacatttgtagcaggtgaggagggtacccacagtcagccttctgagcacatgcagaatccaggcacagccagcctggagaccagtgatgtctgccctggagctgcgccaccctcccatggatcggatccgcctgccacacagtccttgtcttctccctctgctcttccacctttcgtctttcctgccgcagatgttaaccggatacttggtgctggcttcactctgcaggaagccctcggggctttgcatcgagttggtgggaatgcagaccttgcacttcttgttttgctagcaaagaacattgtagtccctacgtaattgtgggaaagtgggccagaccctatcctattccattccctttgtgaagtcctctccacacagatacactcaccacacacacacacacaatatgtagaaacctgcaagcaaaatgttgagccagattttttttttccagccaaagtaatttatgatcttttgtctgatgaatttgtctatttgttaaaatttgggccttttaaaatgtattggcagtatgtgcatacaaaagctttttattctcattaagatgatgtactctggaataaaatggatggttttgtgtactagca

SEQ ID NO: 1222 - DNA, 2372 bp, Cricetulus griseus
ggccccggcaggccctatactgtagcgtacgctttagctgacagcctcttccactgtgactcccccttcacggtgtcctgcccggtgggcatcagagccatggccacggaggagaagaagccagagacagaggctgcaagagcacagcctaccccttcctcatcagccacacagagcaagcccacacctgttaagccaaactatgctctgaagttcaccctggctggccacacgaaagctgtgtcctccgtgaagttcagccccaatggggagtggctggcaagttcatctgctgataaactcattaaaatatggggagcatatgatggaaagtttgagaaaaccatatctggtcacaagctgggaatatctgatgtagcctggtcatcagattccaacctccttgtgtctgcctctgatgacaaaactttgaagatatgggacgtgagttctggaaagtgtctgaagaccctgaagggccacagtaactatgtcttctgctgcaacttcaacccccagtccaaccctcatcgtctcagggttcttttgatgaaagtgtgaggatatgggacgtgaagacagggaagtgcctcaagactttgcctgcccattccggacccagtatgacaatcctccagtatcctttgtgaagttctctccaaatggcaaatacatcctggccgcaactttggacaacactctgaagctctgggactacagcaaggggaagtgcctgaagacatacactggccacaagaacgagaagtactgcatatttgccaatttctctgtgacaggtgggaagtggatcgtgtctggttctgaagataacctggtgtatatttggaatctgcagaccaaggagattgtgcagaagttgcagggtcacacagatgttgtgatttccacggcatgtcacccgacagagaacatcattgcctcagcagcactagagaatgacaaaacaatcaaactgtggaagagtgactgctaagtcctggctccacaagagacttcaggaaaccgcctggattggcaagaaacacacgaggggcagaggtgtggggccagactggggtaacaggtctggtgcacctactccctgaagatgtcaggtcaggggagtgcacactaccaagtttttatagccactgtgacatttcttgccaattctgtccctgcctggggagttcctggctggtctgtgctcagaggcagcaaatttttaattttttattacaagagtgagttcaactcatcatttttcccagtaattgttctgtatctttttggtattgtattgcccagtacacacactggagcaggacctgcagccccactcctgttccctgcctccagccttggcctgcttgttcatgttccctacctgtaatagtatccagtgtgtttccaggactttctggaaacagaaaggttgtaagttgtatccgtgtcaagtccctttgtatttttggagttcataggtcaacactgacctctcagtggttgcacagtgtccctttgtctcactggtgtcactcagtaagctatatacactgtaataaaaggtgggcttgacccctctgtggccctgagctctgataggagctcatccgcacctggattttagaaagttccccccagagcaggggctggaaacgtctctgggaagatgggtccttgctatgcctctttcccaatagctgctctgggcactgagtgttttgagaggaaaactcagttgaaaaagagtggaaatcttggacaagcatcatgttagggaggttctggtcctccccattcttcgtgaggctcggggtcacctgtgcaggagggaggggttcaatatggtgcttgtcccagcaggtacagcctcctgccttgacctctaaacccaccagcctctcttagtctctgcctcaaatggatcctctggcgtcctggcttctgcatgaccagaactgggaagagatgatggccagactcagagctgcacagcattttcacaattgctggccatacccagggtggcctgacatggaacagaatgcagagggttaaagagggtggcttgtcactgacatgtgggttctggggcccctggcatcttttggatagatgtgcctgggttctggtcagcgttgtgggcatgttgctgtggggtttctggaggggtgttgaggtccttccagctgtggcctggtatgtgggccccctcctcagggagggagcttgcttgccatgctaagcgcagtatccccaagtatagtttattttttctacagttgaactctgttgtagatttatgtaaaaatacattctctttttgaaaataaagattttcatgtcttagtaaaaaaaaaaaaaaaaaa

SEQ ID NO: 1223 - DNA, 2371 bp, Cricetulus griseus
tggaaagctggctacaattgatgctgaattgggacccacagcagagtaggggggccgtattgatcttactttgaagcagccaagatgttttgtattaatggatcatattctcaacttaaagatagtgcacatcctaaatatgacttctgcaaaaatcatttcttttctgttaccatgtgatgaaagttttcattcactacagtctcgtattgagcgtgaaacaggaataagtaccggttctcaagaacttctgtcagagacaggaatttctctggatcctcggaaaccagcctctcagtgtgttctagatggagttagaggctgtgatagctacatggtttatttgtttgataaaagtaagactgtgtatgaaggaccatttgcatccagaagtttgtctgattgtgtaaattatattgttcaagacagcaagatacagcttccaattgtacagctgcgtaaagtatgggctgaagcagtgcactatgtatctggactaaaagaagattacagcaggctctttcagggacaaagagcggcaatgttaagtcttcttagatataatgctaacttgacaaaaatgaagaatactttgatctcagcatcacagcaactcaaagctaaattggagttttttcacaaaagcattcagcttgacttggagagatatagtgagcagatgacttacgggatatcttcagaaaaaatgctgaaagcatggaaagaaatggaggaaagggctattcactatgctgaggttggtgtcattggataccttgaggatcaaattatgtctttgcacactgaaatcatggaacttcagaagagcccctatggaagacgccaaggagacttgatggagtctctggaacagcgtgccattgatctctataagcagttaaagcacagacctacagatcactcatacagtgacagcacggagatggtgaagatcattgtgcacactgtgcagagtcaggaccgagtgctcaaggagctgtttggtcatctgagcaagttgttgggctgtaagcagaagattattgatctactccccaaggtggaagtggccctcagtaacatcaaagaagctgacaataccatcatgtttatgcagggaaagaggcagaaagaaatatggcacctccttaaaattgcctgtacacagagttctgcccgctctcttgtaggatccagtctagaaggcacagtaacctctccagcttcagcatggctgccccctatgttagcagaccgtgaacatcctctgacacgtgtggtaactcctcaagatggagagacgttagcacaaatgatggaacaaaatctgaactgtcttggccacttaagtactattattcgtgaagcaaatgaggaacaaagccgtagtatgatgagtcttgattggagttggttaacagaatgacctgctgttcactgtcctcaagcctatgaacattgttcctgcacatattcaaaattcatctttgctccctgaagctactcttcacataccagtcagtggaagtattggctgtgatcagaaactatgaatgactttacaagcacagtatcttgatttttctttgtataatgattatgactctgaacagatagaattctattacaaattagtgaacttaatccagtgctcatttttagtaaaagttgtctacctgtgtttctgtggaagagattgctcacaagtaaaattgtgcttcctgaagcctaacctgcctccttgtgttgctctcagtgggtactctagctggcatcataaggaaggagttagatgaattccatgtttaaccatatatgtaagagcgtccttttcttacatgagggattaacatgtgagtctgtgttctcagctgaccgtaatgaattgtgctgtgtgctatatgtatatgtatttaaggtgtacatttaatatcaaagatgagctgcctgttaatttataatgtatttgaagattgtatgtttttgcatttgtaaaaatgggtgacttgtttaaacaatcttttgtgtcttgtcatacaagtttcaaaaggtctgcattcattcctttatttgtaattatagtctcaaaatccaagaagttctgaaaacaaggtattaatgtgtttgattgttggggggtgctgccacaaactcttttgagggtaatgtagtatggtatatgcactgaattacctttctaaaatctgaaaatttcataattctgaaacatctggacttaagggtttcagataaaagactggatttctgccttgtgttaaataatttagaaggtgttattttgtttttaaaaatgtgaaatgctttttatattctagtttttcactttgcatattaaatgattttaaaatta

SEQ ID NO: 1224 - DNA, 2371 bp, Cricetulus griseus
  modified_base (282)..(282): a, c, t, g, unknown or other
  modified_base (1799)..(1799): a, c, t, g, unknown or other
gacttctcacattgtgtttgttgtgcatggcattggacagaagatggaccaaggaagaattataaagaacacagccatgatgagagaggctgcaagaaaaatgaagaaaggcatttttccaaccatgcaacacatgttgagtttctgcctgttgaatggcgatcaaagcttactcttgatggagacactgttgattccattactcctgacaaagtgcgcggcttgagggacatgctgaacagtagtgcaatggacataatgtactatactagcccactttanagggatgagctagttggtaaagtctcaatagtgtcccattccttggggtgtgtaattacttatgacatcatgacgggctggaatccagttcgactctatgagcagctgctacagaaggaggaagagctgcccgatgaacgatggatgagctatgaagagcgacaccttcttgatgaactttatatcacgaaaagacggctgagggaaatagaagaacggctgcatggattgaaggcgtcatccataacacaaacacctgccttaaaatttaaggtggagaatttcttctgtatgggatccccgctagcagtttttttggcattgcgtggcatccgaccaggaaatactggaagtcaagaccacattttacctagagagatttgtaaccgcttactaaatatttttcatcctacagacccagtggcctacagattagaaccattgattctgaagcactacagcaacatttcaccagtccagatccactggtacaacacttcaaatcctctaccttacgagcatatgaagccaaactttctcaacccagcaaaagaacctacctcagtttcggagaatgaaagcattgccaatatcccgagccccgtgacctccccagtcttacaacggcgccactacggagagtccatattggggcgtgctagcagttggaaaggggccttggaggaatgttgttctcaagatttggacggtcttcaacatcacagtcatctgagccatctaaagacacagtggaagacgagaagaagcctgtcgcttctccttctaccaccactgtggcaacgcagaccctgccgcacagcagctccggcttccttgactctgcattggagctggagcacaggattgactttgaactcagagaaggcctcgtggagagccgctattggtcagccgtcacatcgcacactgcctactggtcatccttggatgtcgctctttttcttttaacattcatgtacaaacacgagcatgataatgatgcaaagcccagcctagatccaatctgaactctggaaggatatgactgacccaaaacttttctctgtaaaaatgtgtcaagatacggagatttcaagattccagttttgtttagggcaagaaatactttaatttataagcactttattttatttttaaaagagaacaaaaacacgttttcagttcaaaagaagttatttactgtttctgtaattttgattccagtacactctgtgtgatgactacaaggtggcatcatggtttttgattctgtgaagacttccatgtccacagttcctttgaaagaagaatataacaaatataaaatgttctaaattttacttgttttttaaaaaaactaatgctaaaaagcaatgtttgaactatacttataatttattatctctagttatttcagtgtatgaaacattacattttttaatgtttcttttgagccacagttattttgtatcatgttgaggcccatttccccaaatccatctttgtacttttttttnttttttgttgttttagttttgttttttgagtttggagattcctgtgaactcaggtcattttcatagcctatttatttagtgggtttcatttaattctcaggaatgttgaacccatgttgtatggctgtcgttaaaggtggctgagcatatgttgaatatcaactgaaaggagaagtttgcttccgtaagcaaaggagtatgtctgcttgcttttcctcaccctgcaaagcagttgaattttcattgcatgagtttatgtcaactcttggaaagaacagcattcaaaccactctttcagtgaaaagtagatgctgtgcacctctggacagctgttgccggttcttactttcgtcaatactgatgttgattttggttttatagctggtctctccatctctgcatgtaatcatgggatgtactgccatatactaaagtaatatacagagtatgtaattctgacgtgatttagaagccaagtcaagtaccaagtaacagtttgcaattttattccagcaagtactaaattggacccctgaagtcctaattttgatactaattaaaattctattctc

SEQ ID NO: 1225 - DNA, 2369 bp, Cricetulus griseus
ggctccgggaggtggaagcagctgccggacgtgtacctgtggcatgatatgtgcaaagattctgcctgccttttgaccatgaaggagacagatctggaggctgttgcaacagcagtccagagggttgctgggatgcttcagcgcccagaccagctggacaaagtggagcagtatcgcagaagggagactcggaagaaggcttctgtggaggccaggctaaaggccgcaatccagtcacagctagatggagtacgcacaggcctaagccagctccacaatgccctgaatgatgtcaaggatatccagcaatcactggctgatgtcagcaaggactggaggcagagcatcaacaccattgagagcctcaaagatgtaaaagatgcagtggtgcagcacagccagctggccgcagctgtggaaaacctcaagaacatattctctgtgcccgagattgtgagggaaacccaagatctcatcgagcaaggggctctcctgcaggcccaccggaagctaatggacttggagtgctctcgggatgagctcatgtgtgagcagtaccgcatggacagcgggaataaacgggacatgaccctcattcatggctactttggtagcacacagggcctctctgatgagctggctaagcagctgtggatggtgctgcaaagatcactggtcactgtccgccgcgatcctaccttgctggtctctgtggtcaggatcattgaaagggaagaaaaaattgacaggcggatactagatcgaaaaaagcaaactgggtttgttcctcctgggaggcccaaaaactggaaggagaaaatgtttgccattttggacagaactgtgacaactagaatcgaaggtacacaggcagacaccagagagtctgacaagatgtggcttgtgcgccacctggagatcatcaggaagtatgtcctggatgatctcatcattgccaagaacctgatggtccagtgcttccctccccactatgagatcttcaagaacctcctgagcatgtaccaccaggccttgagcactcggatgcaggacctggcatcagaggaccttgaggccaatgagattgtgagcctcttgacgtgggtcctaaatacctataccagtgcagagatgatggggaatgtggagctggccccagaagtggacgttagtgccctggagcctctactctcttcaaacgtggtctctgagttgcttgacacatacatgtcaacactcacatccaacatcatcgcctggcttcggaaggcactggaaacagacaagaaagattggagcaaagagacagagccagaagcagaccaggatggctactaccagactacacttcctgccattgtgttccagatgtttgaacagaatcttcaagttgctgctcaaataagtgaagatttgaaaacaaaggtactggttttgtgtcttcagcaaatgaattctttcctaagtagatacaaagaggaagcccagctttacaaagaagagcacctgagaaaccggcaacacccacactgttatgtgcagtacatgattgccatcatcaacaactgccagaccttcaaagaatccattgtcagtctgaaaaggaagtacctaaaaactgaagcagaggagggcccatgtctgagtcagccaagcatggatgggattctggatgccattgctaaagaaggctgcagtagtctgctagaggaagtcttcctggatctagagcaacatctgaatgagctgatgacaaagaagtggctgttagggtccaatgctgtggacatcatctgtgtcactgtagaggactacttcaacgacttcgccagaattaaaaagccgtataaaaagaggatgacggctgaagcacacaggcgtgtggtggtagaatacctgcgggctgtcatgcagaagcgtatctcctttcgaagtgctgaagagcgcaaggagggtgctgagaagatggtcagagaggctgaacagctccgcttcctattccggaagctggcatctggatttggcgaagatgcggatggacactgtgacacaattgttgcagtggcagaggttattaagctcacagacccttctctgctttacctagaagtctcaactctggtcagcaaatatccagatatcagagatgaccacattggtgccctgttggcagttcgaggagatgccagccgggacatgaaacagactatcatggagacactggagcagggccccatgcaagcaagccctaactatgtgcccatcttcaaggagattgttgtgccaagtctgaatgtggcaaaactccttaagtagccctgccctccctgctgcctcatgtctttactgtgtggcttcctgttgccacc

SEQ ID NO: 1226 - DNA, 2369 bp, Cricetulus griseus
cagcctggaccaacggatagttgcgagtcgcggactaagcaccgccggccacttggagagtttctgctgctatcccggagccacctaggccagcttcgccgcgctaccccgcggcaggaaaggaggctgctgcagagcaggggcggcgagcaggcgtggggccagcagccagcagcgttgctggggcacgcaccctcccgtggtccgggagccacgcgaactccgtgcccgcacgcgccagccccgtctcgcgcctttctcggcgtccggggtgcccggcctctctgcccacgctccggctcttcagggagattgaggacccagttgcaacatgaatctacgactctgggtgcaggcgctgctcctgctctggctctccttgactgcggtgtgtggagtgccactgatgctgccttcggatgggaaggggctagaagaaggcaacatgcgctacctggtgcagcccagagcttcgaggactggaccagggccctggcagggaggcaggaggaagttccgcagacagcgcccccgtctctcccataagggtcccatgcctttctgaatcaggattgaagagctctccaagtgtcagacgggtgccgttctctctactccacagataaccctcacatccatctgactctcatcttgcacctgttatggctgctgatcgatcctggctccctctccacccaccaagttcctctaatggcatggtcctgcccctcagttggaagattccatttctctcacaaggatccgtttggcccatcttcctggccactccttggactgccattggagacccagcttcttctcagcctgttccccattctagtccctatctcttgcttatcaattggacttctcacttagaagggagtacagatatgtgcaatgagagactttggatgagtgggattggatgttgggatccagaggaggtgcactggggacaaatgtggccatggtgaagggatgaggaggaattgctgccatggcttcttccttagctctcactggccctgtgaaggaagaggcaaaggagaggggcccaggaagtattttgtcactgtgtctcctaacatccttgtcctctctactctcctgcagccagttcagtgtccgggtcagaaggggagagtgctgagcctgacatggttctatactctacagaaagtcagagcccaaaggaccttgaagatcgcttgtttccttatgcaaaagcttgcacaaacagaggcctcggagagggaagtaacctgctcagagccactgcagagtctcaatggggaccaggtctcccaactcccactttatgatgtcctttttcctcttgatgatgtcctttcaaaacaaatgaagtgcctttttctgggtttagtgcagagggtacctgggaaggatgaggaaggagaggcaagccagctgtgaactgccctgtgtgagcatggcacgtcctcctcccaacctggcctagaagagtccataaatggtgagatgtacccccacacagatcactccaccaggaggcacagtctctttctaggagccttttgcagcccctccgtgaagggagacccttatcttttgcctgagcagttgttcttctcagaggcctcccaggagggagaaaagagaaaacagaagcttaatattcacttgtatatgtgtagggcagggggagtcaggacccccaagccccatagtaactccaggattgcctatccacccctcctcaaagcctttcctgcccatctgctgctgctaatgctgctgctgctgctgctaccgggggatctggaccaggcatagggtcctcaccccttgggcttgaagtggggcctggctggtgcctcttctactgctggtgcccctaccagggactgggccttctttctcttgtggttcctgcatctcctgccttatcagcctgccatggccagccccacagggaagagaggaggactacggctgagaaagaggacagatagcaaaggaagagagagataaatgggcctggtgggctgtcttatttaaagtgtgtatgattcttatactaatttaaataaagatattaaggccttttgagttattttttttctagaagcaattcatttaaggacatactgatcaaaggtgggatttgtattaaacgttattttgtatccctggtgggtgtctactgttttaactgcttttgaatactttcaggactttttagccagtttgcctttcttgaaaaatgttgttttcagccataaatacatctggtaatgactttgtatgtatcattttatgtttcacaaagtggagttgcttgatgaatgagatagcctgaaaaataaaatgcaaggagttcaata

SEQ ID NO: 1227 - DNA, 2369 bp, Cricetulus griseus
  modified_base (2346)..(2346): a, c, t, g, unknown or other
  modified_base (2350)..(2350): a, c, t, g, unknown or other
  modified_base (2354)..(2354): a, c, t, g, unknown or other
  modified_base (2358)..(2358): a, c, t, g, unknown or other
  modified_base (2362)..(2362): a, c, t, g, unknown or other
  modified_base (2366)..(2366): a, c, t, g, unknown or other
gcccacataagggatgtgcttctgagcacaaagaccagctctctcggctgaaggacagagaccccgagttctacaaattcctgcaggagaatgaccagagcctactggacttcagtgactcagacagctctgaggaggaagaagagcaattccactcccctgccagacacgctggaggaagcaagtgagactgaggaggatggaggagaagacagtgacatagtccagagaggattgcaaaggaagaagaatgagcctataccggtgacccttgccatgatggagagatggaagcagggggccatgcaccacctcactcccaagctgttccatgaagttgtgcaggcattccgagcagctgtaaccaccacccaaggagaccaggaagctgctgagaattgcaggttccaggtcacagatagtactgtgttcaatgctgtgattactttctgcattagagacctctttggttgccttcagaagctgctgttttggaaaggcaccaaaggatagcaacaggatgctgctgccatctagtagcccactctgggggaaacttcgtgtggatgtcaagacatacctgagtgcagttgtacagctggtagcctgtctggctgaagccacggtgtctgcagccgttctgcagcatgtcagcagcttggttccttactacctgactttccctaagcagtgccgaatgttactcaagaggatggtggttctgtggagcacgggtgaagaatctctgcgggtcctggccttcctggtactcattagagtctgccggcacaagaaggaatccttccttggtcccatcctaaagcaaatgtacatcatgtatgtgagaaattgcaagttcacctctcccagtaccctacccctcataagcttcatgcagcggacactgactgaactgcttgccttggaacccagtatctcctatcaacatgccttcctctacattcgccagcttgcagtccacctgcgtaatgccatgaccacaggcaagaaggagacataccagtctgtgtacaactggcagtatgtgcactgcctctacttatggtgccgagtcctgagtacccttggttccatcgaggttctacagcccctaatctaccctctctcacagatcatcattggctgtatcaagttgttgcccactgctcgcttttatccattgcgcatgcattgtgtgcgtgccctgacgctgctgtctcagaccgttggcaccttcatccctgttctgcccttcattcttgagattttccagcaggtggacttcaatagacgtccaggccgcatgagctccaggcccatcaacttctctgtgatcttgaaactgtccagtaccaatctgcaggagaaggcataccgggatggccttctggagcagctgtatgaccttatcctggaatacctgcacacccaggcccattgcattgccttcccagagttggtgctgcccactgtcctacagctgaaatcttttctccgggagtgcaaagtagctaactactgccggcaggtgcgccaactgctggagaaggtgcaagagaatgcagaacatatccgaatccttcgccagagagtgaccttcagtgtttctgatcagcaggcagtggatgcttgggagaagcagacacgtgaagaggggacccctcttaccaggtactacagccactggagaaagctgagggaccgtgagatccagctggagatcagtggcaaagaacggctagaagacctgaacttcccagagatcaaaaggcggaaagtcgaagacaggaaggatgaagacaggaaggaattaaaagacctgtttgagttggacagttctgagggagaggatagcacagacttctcccagagaggaatacctgagctcctggaagctcaccaagaagtgaaagaagatgaccaggatgaagatgatgaagaagaggatgctagtaattcagaggatgaagacccagacacaagggtggacccaagtgaactgtggcagctggctcagggaccacaggatgagctggaggatcttcagctctcagaagaggactgagggcctcctgacaggtctcagaggcttgaggccaacaactgtgcagcaagagggcagcagacagggctttattgttacagcacaacagaaccaactgtgctaagagttgttttgaccctgaaagggaactggttctgcatagccttctgttgcaggaggctgaccctgacctgcagcagagtagtcccagttcacagttgggagggtggctccatggcctctccactttatctgactttggtttgtctgcagacctctgcagttacccctaattacttttntttntttntttntttntttnttt

SEQ ID NO: 1228 - DNA, 2369 bp, Cricetulus griseus
cacaaacatcgcagcagcggcggcggcagcagcggcggcgaacgacggaagcggagccgcgagcgtgggggcgagcgcgggagcgggaggcgccgggccgaagccgaggcccgcggcggcgcgcacggtcgcgaacgaagtcaagcggagccctcggagcggcgcgtgaagcgagagaaacgcgatgacggctacgaggccgctgccagctccaaaactagctctggagatgcctcgtcacttagcatcgaggagaccaacaaactccgtgcaaagttggggctgaaacccttggaggtcaatgctgtcaagaaagaggcgggcaccaaggaggagcccgtggcagctgatgtcatcaaccccatggccttgcgacagcgtgaagaactacgggagaagctggcagctgccaaggaaaagcgtttgctgaatcaaaaattggggaaaataaagactctgggggaggatgacccctggctagatgacaccgcagcctggattgagaggagccggcagctgcagaaggagaaggacctggcagagaagcgggccaagctactagaggagatggaccaagaatttggtgtgagcactctagtggaggaggagtttgagcagcggcgacaggacctgtatagtgcacgggacttgcagggcctcactgtggaacatgccattgattcttttcgagaaggggagactgtggtccttaccctcaaggacaaaggagtgttgcaggagggggaggatgtgctggtgaatgtgaacatggtagacaaggagcgggcagacaagaatgtggagcttcggaagaagaagcccgactacctgccgtatgcagaagacgagagtgtggatgatttggcacagcaaaaaccccgctctatcctggccaaatatgatgaggagctggagggcgagcggccacattccttccgtttggagcagggtggcatggctgatggactgagagagcgtgagcttgaagagatccgggccaagttacggctacaggctcagtctctgagctctgtagggccccggcttgcctctgagtacctaagccctgaagagatggtgaccttcaaaaagaccaagcggagggtgaagaaaatccgaaagaaggagaaggaggtggtaatgcgggcagatgacttgctgcctcttggggaccagactcaggatggggactttggatccaggcttcggggccggggtcggcgccgagttcctgaggtggaggaggaggccctggaggatgaggagaaggaccctgtagcccagcccccaccatcagatgatactcgagtagagaacatggatatcagtgatgaagaggatgggggagctcttccatcagggtccccagaggtgctggaagaagatgaagcggaactagagctgcagaagcagctggagaaggggcgccgtctgcggcagctgcagcagctgcagcagctccgagacagcggtgagaaggtggtagagattgtgaagaagctggagtctcgccagcgtggctgggaggaggaagaggaccctgagcgtaagggggccattgtgttcaatgccacttctgagttttgccgcacgttgggggagatccctacctatggattggctggcaaccgggaagagcaagaggagcttatggactttgaaagagatgaagagcgctcggccaatggtggctctgaatcagatggggaagagaacattggctggagcaccgtcaacctggatgaagagaagcagcaacaggatttctctgcttcctctaccaccatcctggatgaggagcccatcgtgaacagagggctggctgctgccctgctcctgtgtcagaacaaagggctgctggagaccacagtgcaaaaggtggcccgggtgaaggctcccaataagtcactgccctcagctgtgtactgcatcgaggataagatggccatcgatgataagtacagccggcgggaggagtacagaggcttcacccaggacttcaaggagaaggatggttacaagcccgatgttaagattgagtatgtggacgagacaggcaggaaactgactcccaaggaggccttccggcagctgtcccaccgcttccacgggaagggttcaggcaagatgaagactgagcggcggatgaagaagctggatgaggaggcgctcctgaaaaagatgagctccagtgatacgcccctgggcactgtggcattgctccaggagaagcagaaggcccagaagacgccgtacattgtgctcagcggcagcggcaagagcatgaatgcgaacaccatcaccaaatgaagccaccttcctccctgtccctcccagatatattaaataaagtcccctccttatttttc

SEQ ID NO: 1229 - DNA, 2367 bp, Cricetulus griseus
atgtatgataagggcttggtttatcgatcttacaaaccagtattttggtcgccctcatcaaggaccgcgctggctgaagcagaactcgagtacaaccctgagcacgtcagccggtcgatatatgtaagattccctctcttgcaacctcctcctaagctggcatctctcacagatggctcatcccccgttagctttttaatctggaccacccagccttggacgatccctgccaatcaggctgtttgctatatgccagaagcaaagtatgctgttgtgaaatgttcctcttctggagatatctacattctggctgaagataaaatatcacctgttgcttctgccttggaaacaacatttgaagttatttcaacacattcaggtgtggatctagaaggtggtacttgtagtcacccattaattcccgataaagtgtctcctcttttacctgccactcatgtgaccatggccaaaggaacgggattggttcacacagccccagctcacggtatggaagattacagcgtagcgtctcagcacaacctccctatggactgtttagtggatgaagatggagtgttcaccgatgctgcaggccctgaacttgagaacaaggctgtacttgaagagggaacagatgtggttataaagatgctccagactgcaaagcatttgttgaaagaagagaaggtggtgcacagctatccctgtgactggagaactaagaaacctgtggtgattcgggccagcaagcagtggtttatcaacatcaaggacatcaaggctacagctaaggagttgttgaaaacagtgaagtttattcccggagcggcgctgaatggcatggttgacttgctggacaggcggccatactggtgtatatcaaggcagagagcttggggtgttccaatccccgtgtttcatcataagacaaaagatgaatatttgatcaacagccaaaccattgagcatatcactaaactggtggaggagcatggcagcgatgtttggtggaccctcccccctgagcggcttctcccggaggatgtcgtagctcaggctggtggtcctgatgctttggaatacgtgccagggcaggatattttggacatctggtttgacagtggaacttcatggttttgtgttcttccaggcactgagcagagggcagacttgtacctggaggggaaggaccaacttgggggctggttccagtcttccttactaacaagggtggccacaaagacaaaagcacctttcaagacagtgatggttcatggattcacacttggagagaaaggagaaaagatgtccaaatccctcgggaatgtcattaatcctgacactatcatcaatggaggaaaagatccaagcaaagagcctccctatggagctgacgccctgcgctggtggatagctgaatccaacgtcttcactgaagtagccattggcccctccgcactcagtgctgctagagatgacatcagcaagcttagaaacacactccgctttctcttgggaaatgtggctggttttaacccagagacagattcggttcctgtcaaagatatgtacgtcatagaccagtatatgctgcacttaattcaggatttctcgacaaaggttactgactcatacaagcagtatgattttggtaaagttatcaggctgttaaaagctttctataccagagaactctccagcttctacttcagcatagtcaaggacaggctctactgcgaaagtgagaaggatcccaaacggcgctcctgtcagaccgcattggcagaaattttggatgtgctggtgcgttcttttgctccaattcttcctcacttggcagaagaggtattccagcacatcccatatgtcaaagaacccaagagtgttttccgcactggctggattaatacaagttctatctggaagaagccaggcctggaggaggcagtggagagcacatgtgccatgcgagattcctttcttggcagcatccctggcaaaaatgccgccgagtacgaggttaccattgtgatcgagccggggctgctgtttgagatcatggagatgctgcaagctgaggagatttccagcacgtctcagctgaatgagctaatgatggcctcccagacaacactgctgactcaggagccacgggaaagagctgaagatggaatcgagctcacagggtcgttcctcatcaacctggagggtggtgacattcgtgaggagtcttcctataaagtcattgtcgtaccagctgccagagaaaagtgccctcgatgttggaagcacactgccgaaactgcagatactctctgtcctcggtgtgcagaagtcattggtgcaaaatagcattctgatgttaac

SEQ ID NO: 1230 - DNA, 2367 bp, Cricetulus griseus
  modified_base (17)..(17): a, c, t, g, unknown or other
  modified_base (1429)..(1429): a, c, t, g, unknown or other
tttgttcatgatgctanccttaagggttatgtgcttatcaatgaataacccagaggagtaagggaaaataacctgtaagccagttatattcaggaataactactgtaaatgatgaacgtgtcaagaaacctcctatttgctacttgccaatctcaatttagttacaacaattagtatgcaaccttacctaaattttggcaaatgccctgctatctaaatgacctaataactcaaagcatgtctttaaaatgctgagcacatcctgctaccttttggagctccccaccccaacccaacagaaactcaaatcaagaaacgtggtgtattctgaacattgtggcatgctcagcttttgatcatatacagtcaagaggatacttcatgaatatacatttcaatgcaaatcaacagatggttcccttgtactagctatgagcctgcttctgtatacactgagttaatcttctcaggctgtaggtcctggcattggtcaagagtctgcacttctcttttgtacagctcctggcctctggaccttcccggttcctattccttgaaggctcagtctgatgagcacctgtgtatggtgtttctggccatttgattctacctgtaacataatcctatttttactagctgtcaggaggttcccagtgtggacgttgagtagtttaagaatggtgctgctcctgacaagtgtgtgttaactgtttacattttatatctacagaatcttttctctgtaactgaatttttcctaagtaaaatgtcatcgaggtctcattatttctgaaatgatgtctgtaatgcccaggcacctttggtattgtctggaataagagggatttcatgtaatgaactgggaaatacatactttatgagctgcaaggttgtagggagaagccccttggagctcccaaccaacaggagtaagagaataggcacagctcagcaaatttctgaaagtttgcttagagtttaccatgatttctaatgtcccaccttttagtgattccttttctatacgtataacatggtgcattaattttattagggaagtatgaatttgagactattgcgcctcttgggctgtagaaatacaagattggagtcaggattttagcagaaattggagcgtgagtgtgttcttattttatattagtttcacagctaactggttttgttttccctaggatacaatgtgtcactattgcactttaacagctgacatgcttcattagttttctgtattttatgtttgattgctgagaagccattctttcttgatgcagtattttaggtaagtaaagaaataaacagttgttctgattgtacatttgttgtaattgccagctcccattgccagccatcatgtttcagttgaattaaaagaaaaagacagatggaagagataaagggcattgaagcngaaatgtgtagttgggtaagataggaaaacttgtgtcctaattaatttcaaaataactgctcttagtcaaagtgctattaaggggagtctagtaagagtaaccttctgggcatttctggtttagattctcttcattaacaaaacttctgagaaatagtacctgtggattagttttgcacaatatcctattctcacagtgacttaaaattaaactaggtttttattgaactacctcacactgattttctatgctttcccaagtaagctgttgcccttaatgttagatctttactgagtgtaaattattaatgtgtgttgcatactttgtagtcactgttgacaaaataccagtaagtatgtgaagtgcataccttgcctcagtaagggacagtcctgtgtagtcttccactgtgtctggggaattgtgctagctgtgcttattgacatcatcactgttttttgtaagaaacctgctcaagatatcagtccatgctttacattttacaaaaggagtaaatcttagtaaattttacgaagaaataaattacttttagtaggcccaatatttggtatatttttgagaagctcttaatcttatagccgaatgatgaagttaaactgaagtagctgtctgccaggactgtgacatctattttctcattacagtttatcctgttaataaggttttgaacaaacctaaggatgataattagaattttttcctctctccctgtacatgtcactccttccctctcctctcttagataaaacaaaatggggcactttgtagggaatgctgagatcattattgtggtttacttgttcatgccctagtcattaaacatgcaccactggatgtaaacagtgttatctagtatgtcaattggttataatattttaaataaaaaagaaaaagtaggtatgaaaaaaaaaaaaaa

SEQ ID NO: 1231 - DNA, 2366 bp, Cricetulus griseus
tgcagctctggctaggcatggcactgatctttggatagataatatgagcaatgctcctagtcactctccagagaagacagactctgatttctttacagagcatactcaggcccctgtctgggatacagcagatactgagccttcagggacccagcaaccagccctaccttcagagagcagtaccctggcacaacctgaacatggccctaacactgacctccttggaacctcaccccaagcttctctggaactgaaaagctccattattggcaagaagaagccaacagcagctaagaaagggctgggtgccaagaaaggcctgggagctcagaaggtgagtaaccagagctttactgagattgagcggcaggctcaggtggcagagaagctccgggagcagcaggcagctgatgccaagaaacaggcagaagagtccatggttgcctctatgcgtctggcctaccaggagctccagattgatcgtcaaagaaggaagaaaaaaattacagaaccttgaaggaaagaaacgagagctaggtctgaaaggctggggctattgggcttggtgtcccgaagctccatctcccactccgtgctgtctgagatgcaggtgattgagcaagaaaccccgttgagtgcaaaatcttcccgttcacagcttgacttgtttgatgatgttggaactttcgcctctggacccccaaagtacaaggacaaccccttttccttgggagaaacttttggttcccgctgggattcagatgcagcctggggtatggacagggtagaagagaaggaacccgaagtaaccatctccagcatccggcctatttcagaaagaaccaccagccggagggaagtggagagccggaactcaggtcttgagtccagtgaagctcgtcagaagtttgcaggagccaaagccatctcatctgacatgttctttggtcgagaggtggattctgagtatgaagccaggtctcggttacagcagctcgcgggcagcagtgccatcagctcttcagacctctttggggacatggatggagctcatggaggaggaactgtatctctggggaatgtacttcctacagctgacattgcccaatttaagcagggtgtcaagtctgtggccggcaagatggcagtgttggctaatggtgtgatgaattctttacaggatcgctacggttcctactgatccaggctccacggctcaggcctgtggtggcagcaagaaccctggttcccaggctgtggatctggggatttgttgacttctgtgtgtggtgtgtgagttgggtggctttggaggaccttggcaaggggaatggtcagcatcagcccttgtcctttgcctgcgcattgagtccttgtcctcaccccttcacactctcctctccatgctagtgttcttccttccagtcctgccccaaagctgctgctacttagcctgttgcactgggaatgaggggaggagttccatcaggatgactttatgggtctagttcttcccgaagtagggaaggcatgagtcttttgcaggctttaggatccatgtaggtggcttggaggtctgtctgggcctcctcgtcttctagagatacgggaggcctagcaagagtcgtgctgtatcagccctcagggagaagttctggacttgccactgcttttactgtcagtggcctcttatgggttccaggggaggatggcttaggagaaagaccctggtaattcactaagggctagaacttttgcttggcacctaaagggtttatttgggatcagcctgggggcctgagcaatcttctttgtcactactgtccctcggaggctgacttctgcctaggtgtctgagagcctttatctgccactattgtgggtcatagcaccctctgtctatgcttgagattcctctttgtgtcctgcttggcacccatggtgggtctcatcagtggtcctacctggatgctgtgaacctgctactggctgaggaaactgaggctctgaaagaaagaagcccctggagctcagctttcattctttgcatcattctgggtttaggggtcctggacagcaccccaccagtcagtgagagcttgaggacttgcagctgcaggccccatactctggcagctgggccacgcactgtgtcatccttggtgccatctccccctgccatgctggcagtctgagcccaaccctacctgtggattgcaggttgggctcccaaacaacacagaccactcttccctcatccctccccagagggacatgactttctttcagcactgtttgtattgaaacaaagtggtgtcgaaataaagcccccacggggccctgtgggtcaaaaaaaaaaaaaaaaa

SEQ ID NO: 1232 - DNA, 2366 bp, Cricetulus griseus
agcctcctgcagtggccacagccagcctgcaatctctgctgccagatacactccatcctttagctgagttgttcctggaaacgtgcagtcaccatggaacattgctgtggtctaatcactggtgacaaggtgccagtgccactgaagaacatatcagtagccttgtccattgaggaatttgtggctgatgtgtctgtggccttaaattatgagaatgaggaagaagtcccagtagaggcaagctttgtgttccccatggatgaagactctgctgtctacagctttgaagccttggtggatgacaagaaaattgtggcagaattgcaagagaagacacaggcccatagcagctataagaatgccatctacccagggccaccaagcttacttattggaagaggatgactactccagggatgtgttttcttgcaatattgggaacctcctgcctggggctaaggtgggagttacgctgaggtatgtacaggaactgcctctggaaacagatggtgctctgcgctatgtactcccagcaatcttgaatccaagataccaactctctgaacagtcagaaaacagttgtttgaacatacagactcccatggtaccttccggggacctaccctacacactcagcatggttgccaccatcacttcccagcatggcattgagagggtccaatccaactgctccttgagtcctattcagtaccttgctgatgacaagacttctgctcagatttccttggctgaaggacacaagtttgatcgggatctggaactcctgatttactacagtgaagtgcacagccccagtgtagctgtggagatggggatgcagggcatgaagccagatagtttgatgggagctccttctgcaatggtgagcttctatccagatatcccagaagtgaagtcctcaaaggcttgtggagaatttgtgttcctcatggatcgctctggaagtatggaatcccccatgaataaccagaagaattctcagctacgtatagaggctgccaaggaaactctgttgctgttgctgaagagtttgccaatgggttgttacttcaacatctatggatttggatctacctatgaaaaattctttccggagagtgtgaagtacactcaggaaacaatggacgaggcagtgggaagagtgaaagatctggaagcagacctagggggtactgaaatcttgaaaccactccggaagatttacaaggcacactccattcctggccatcctttgcaactctttgttttcacagatggagaagttagtgacacatttacagtcattaatgaagttcagttaaacagcaagaaacacagatgtttctcatttggtattggagaaggagcctccaccagtttaatcaaaggcattgctcgggtatctgggggcactgcagagtttatcacaggcaaggacaggatccagaccaaggctcttgggtctctgaagtttgctctaaactgttcaatggatgacttctctctgagctgggatttgcctcctggtctgttggttaccatgctttctccagagcagactgtcatctttaggggtcagagattaatcatgtatgcccaactcactgggactatgcctgaagtggagtgctcaggagaagtgtgcctcaagtataccctccaaggcaggagtctggaaaacagggtggcatttcccctacaacccaagacaaatgccagctttgccattcatcggttggctgcaaaatcgttgattcagaccaaggacttgggttcccatgagacttcaaaaagtgcaaaagaggatatattgaacatcagcattcaatctggagtcctcagctccttcacagctttcattgccataaacaaggagctcaaccagccagtgcaagggccattgactcatagggatattccaaggccagtgaagatgaaaaagtcaccttcttccaccaagaaacccaacctgaaaaatgaccacaaaggttttggagagaatgtttttgtgcagctggtttccctccaaaaggcaaatggctcctgggagctgcatgaggattttgccaagatcctgggcactaatttggaagacatcatggctgcaaaccctgccaaggatggggacccctcagcctgggccacagtgctggctgtgctctggctgcatgccaatggcaaagacttgaagtgtgagtgggaacttctggaaaggaaggctgtagcctggctccatgcccatgcaggctccttcatccccatgcttgttcaagctgccaataatatcctgaaattacctgtgactcctgctgtctttggcctctgaggatgccacccatgaaagcaaagaatgtttcctggctacc

SEQ ID NO: 1233 - DNA, 2365 bp, Cricetulus griseus
ggcgggggcgggggcgggcgacgcgggcgcggaatgaagccccgcggccctgggggctgaggtccccgccgccgcctggcgcgaccggcgcgtcctcatggaggccggagaggaaccgctgctgctggctgaactcaagcccgggcgtccccatcagtttgactggaagtcaagctgtgagacctggagtgtggccttctctccagatggttcctggttcgcctggtctcaaggacactgcgtggtcaagctggtcccctggccattagaagagcagttcatccctaaaggattcgaagccaaaagccggagcagcaaaaatgattcaaaaggacgaggcagcctgaaggagaagacactggactgtggtcagattgtgtgggggttggccttcagcccgtggccttccccacctagcaggaaactctgggcacgccaccacccccaggtgccagatgtctcttgcctgatcctggccacaggcctcaacgatggacagatcaagatttgggaggtgcaaacagggctcctgcttctgaatctttctggccaccaagatgtcgtgagagatctgagcttcacacccagtggaagtttgattttggtctctgcatcccgggataagacccttcgaatctgggacctaaataaacatggtaagcagatccaggtgttatccggccacctgcagtgggtttactgctgctccatctccccagactgcagcatgctgtgctctgcggctggtgagaagtcggtcttcctgtggagcatgcggtcctacacactaatccggaagctagaaggccaccagagcagtgttgtctcctgtgatttctctcctgattctgccttgctcgtcacggcttcttacgacaccagcgtgattatgtgggacccctacaccggcgagaggctgaggtcacttcatcacacccagctggaacctcccatggatgacagtgacgtccacatgagctccctgcgatctgtgtgcttctctcctgaaggcttgtacctggctacagtggcagatgacaggctcctcaggatctgggctctggaactgaaggctccagttgcctttgctcctatgaccaatggtctttgctgcacattcttcccacatggtggagttattgccacagggacgagagatggtcacgttcagttctggacagccccccgtgtcctgtcctcactgaagcatttatgcagaaaagcccttcgaagtttcctgaccacgtaccaagtcctagcactgccaatccccaagaagatgaaagagttcctcacgtacaggactttctagcagcccggcatcccgactcctatagcagaagcaatgcaagggactggctagggtggagccaccagatcacactggacctgctgtggacctttaccccactggcacatgcaagtaggtctgagtgatgccacttgtgcagtgccagccttacctcgtcgttgtccattgtgagcagcctttgttggtctagttgtcttgaagccaggtgcagttgtggatgttgtctgggtaataaaagcaagcaggctccagagcctgtgtggtggtggccaactccacactcccttcactgggaagtgcctgccatgcagcgtagtacctgctgcccgtttccagtcagtgactgcatggtttgaagttcctctgctctggtcagaggaacagctgcaggtggactgggctgtgctcctcaccaatacaccaatactggcttttatttttctttaaacagtggtgtgcatgtgtaggaaatgacaaacaagtacatcagatcatatgaggaggtgtcctcaactgcatgacggtcagatgtccatttatcagcatcatatttatttgtattttctcagcagatattaaggtacaactgtgttttctcagtggtctttaaaaaccaagagttcttaagtggcccagttgtgaagccatgtcttagttgtgtgaagtcagtattgtcactggctcatgctgtcatgtgcgtgtgtttgtctctactgcttgacctcatgggattcaccctccaattccaactgccctaaacagacagccccttccgagcaccgctcttcaccggcagcaacagctacctattcaagatgcctcactcacacaaaatctgccttaggaaagttaatatattttaaattattttaaaagaaacaacaccttactctttggcttttcttaattgatgctttaaggggcagtgttaacagtgtacagtgtgtgcaaagagtctcctctatcatttgaagaaaacattgcaaaaacgaggctttcattgaagggagaaaagagaaaaaataaaaaaaaaaaaaaaaaaaaaaaaaaaaa

SEQ ID NO: 1234 - DNA, 2365 bp, Cricetulus griseus
  modified_base (1815)..(1815): a, c, t, g, unknown or other
atctcctgactttggttacaggaaagcctctgaagattgctgtcaaatgacgtcaatggccagcttgttttctttcactagtccagccgtgaagcgattgctgggctggaaacaaggtgatgaggaagaaaaatgggcagaaaaggcagtcgatgccttagtgaaaaagctgaagaagaagaagggtgccatggaggagttggagaaagccttgagtagcccaggacagcccagcaagtgtgtcactatccccaggtccttggatggacgcctacaagtttctcacaggaaaggcttaccccatgttatatattgtcgtgtttggcgttggccagatttacagagtcatcatgagctaaagccattggatatttgcgaatttccttttggatctaagcaaaaggaagtttgtatcaatccgtaccactataagagagtggagagtccagtcttaccgccagtgttagtgcctcgtcacaacgagttcaacccacaacacagccttctggttcagtttaggaacctgagccacaacgaccctcacatgccacacaacgccacgtttccagattctttccaacagcccaacatgcccagcatatccagcagggatgtccagcctgtttgcctatgaagagcccaaacactggtgttcaattgtctactatgagctaaacaaccgagttggggaagcttttcatgcatcttctactagcgtgttagtagatggattcacagacccttcaaataacaaaagtagattctgctttgggattgttgtcaaatgttaatcgtaattcaactaattgaaaatactaggcgacatattggaaaaggtgtgcatctgtactacgttggtggggaggtgtacgccgagtgccttagtgacagcagcatctttgtgcagagtcggaactgcaacttccaccatggcttccaccctaccactgtctgtaagatccccagtagctgcagcctcaagattttcaacaatcaggagtttgcccagcttctggctcagtctgtcaaccatggatttgaggctgtgtatgagctcaccaagatgtgcaccattcgaatgagttttgtcaagggctggggcgcagagtaccatcggcaggatgtgaccagcaccccctgctggattgagatccacctccatgggccgctccagtggctggataaagtccttactcagatgggatcgcctctcaaccccatttcctctgtctcatagtgcagaagcactcttcaactctatcttagcggacttgtttaattttagaggaatttccagtacagatactgtgagctgatatggaaaaacagatattatggcttatttttctacataattgtgaccaacacatttgtattttgtgatgaatttacatttgtttgtattcatgttcgttgtgattaactttcaaaagtattgtaaacaatgttgagtattttgcccccattgagaagtttggcattgaccttaaactggaacatgcttgtgtttattgtcccaagagtttttaatttgttaattttttacaaagtagtgcatcacataatgaagatttatcctgtaagagggcaaaaacacacaaaaactcctaggtgatatgtttctagtaatttctttgtcctatcacctttgaaaaagcatcgtacattgttttgcaaagacaacatagtagagctgcttaaaggaaactgttgactctaatttgaaggacactgtgcactcctaacgtgacgttcagtgacagcaagatggtggatttctagatgtcatacagagacattttaatatagctaagngtttgtcaatgtaatgtgactttgtgctatatatcatttgtaaaacattcctttttaaaaatctctattatatgtcgtttactcaagtttgtcataagttttacttaacagttacagtgtgtgcacggccttgttcagctgtgtttgctgctttgggccagtgtttcaagaactctaattttaatgtgcattaatcttttcattttgcacttttaaaattctatttttttatttatatcttctgggggttttttgttgttgttttgagacacagtctctttgtatatccctggctaacctggaaattactgtgtaggctagcctcaaacttggggtaattctcttgcctctgcttctgaagttctaggattacaggcatgtgccccaggtatagtgctctctgctggtttgtaaagttcagcccctgctgatggtttgcatggagacctttgaagtgctccgaacccctttctttgtcttaacaagtcagtcctctgctacctggggtctccgtaaaaatgtgtgttctctgtgtacacagagctaaaca

SEQ ID NO: 1235 - DNA, 2365 bp, Cricetulus griseus
ctggagcacaacctgtttccatggacaagcaaaatattagacttctagagcagaagccatataaagtaagctggaaagcagatggtactcgttacatgatgttgattgatggcacaaatgaagtttttatgattgacagagataattcggtgtttcatgtttcaaatctggaatttccatttcgtaaagatctacgaatgcatttatcaaatacccttttggatggagaaatgattattgacaaagttaatggacaggctgttccaagatatttgatatatgacataattaaattcaatgcacagccagttggagattgtgattttaatattcgcctgcagtgtattgaacgcgaaatcataagtccacgacatagaaaaaatgaagactgggctcattgacaaaacacaggaaccatttagtgttagacctaaacaattttttgacatcaatatttcaagaaagctcctggaaggaaattttgccaaagaagtcagccatgaaatggatggacttatttttcagcctattggaaaatataaacctggtcggtgtgatgatattttgaaatggaaacctcccagtctgaactccgtggattttcgacttaagataacaagaatgggaggagaagggttgcttccacagaatgttggccttctatatgttggaggttatgaaagaccctttgcacaaatcaaggtgacaaaagaactaaaacagtacgacaacaaaattatagaatgcaaatttgagaacaacaagctggggtctttaatgaggcagagaatagacaaaagtttcccaaatgcctacaacacagccatggctgtgtgcaacagcatatcaaaaccctgtcaccaaggagatgctgtttgagttcattgaacagatgtgcagcagctgcccaaggacagaagcgaaagtatcccctggaccctgacacagagctcatgccacccccaccacccaagagactgcaccggccaacctagtccctgcctgttgcctcactttcacagccagagaaattaaagagacaaacatgacttggtactggcacttgtcttaagggaagacatgtagccaacctgtatatatttgatatatttggtttctcagaactgcagcacatcatggacctaaatattttatttatacctgataaatccagccttaccttgtggagtctgaagactgaaatatccaaaggtttaaatcagattgaagtcaatgaaatagaggccttgtttgtatgtgaatagatacctttacatttgattcatagctagcaatctgaaactgtgagcacattgagttttttagaagttggattttaagttttcctcttaaaaatataggcagtggtattagaaattctcattgtcacttatcatggatttcttatatttctgaattttctatattctgaacaatgacaaggtcaagtattatgcacattaaacatttttgtctggctatataccattttaagggtccctgacatatatgaaactgttctgattggcttgtgagggaattcagaattagctactagcaaacaacagcttaatgtatttatttttagagacacaggttttaagtgtatgtatttaagacaaattttcatgatctgaatttttatatatgtataagcatatatgtgaaagtatatgcaacagtgtatattcttgtactgatacagccagaaatgaaaacccaaatgtgttacctagcagactgagtatctgatggaatttttatttgacataacacagagaaaccaaaactgtatttatatgaacctgagttttaacattttttaaagaaacctttcttgtgcagtgcttttctatatgtaatactagggctgtgctttgggcttatgcccctgttgttcccaagttacgtgatgtgcagcacatttattcaaaatgctgttttaatggttttttttctccctatattgcttttgtatatttgggcacttaaaggatttaaacatctgactgctacagtgattgttgaggggaaattgtcaaggttccttctgtcttttacacattggatccaaaactgcctgtggactccagacagtctagtgcctgcttccccagggtcagtgactatgtcatggatggtctgctcctaagctggtacaaaagtagagtcctttttcagatataataacaagcttttgccagtgatctttaatagaattaaaatgcttatggtaactaacattttaagtgactcttgtgaaaagagcattgtataggacttactttttcagtttgtcttttccattcaattttggtaacatcataattattggtgttcataaacagatcccatgtagtcccca

SEQ ID NO: 1236 - DNA, 2364 bp, Cricetulus griseus
ggcccccgaagcgtcggcctccgcctcggccccgccgcttcgctgcttggtactcaccggtttcggtggctacgacaaggtgaagctgcagagccggccggccgcgcccccggccccgggtcccggtcagctgacgctgcgcgtgcgagcctgtgggctcaacttcgccgacctcatggcccgccaggggctgtacgaccggctgccgccgctgccggtcacccccggcatggagggccgcgggcgtggtggtggccgtgggcgagggtgtcggcgaccgtaagccaggggaccgggtgatggtgttgaagaggtcagggatgtggcaggaggaggtaaccgtgccatcagcccagactttcctgatgcctgaggccatgacctttgaggaagctgctgccttgctggtcaactatatcaccgcctacatggttctctttgacttcggcaacctaaggcctggccacagcgtcttggtgcacatggctgcaggtggggtaggcatggcagccctgcagctgtgccgcaccgtggagaatgtgacagtgttcggaacagcctcagccagcaagcatgaggtgctgaaggagaatggggtcacacatgctatcgactaccacacgactgactatgtggatgagatcaagaagatctcccccaaaggagtggacatcgtcatggaccccctgggtgggtcagacacagccaagggctaccacctccttaaacccatgggcaaagttgtcacttacgggatggccaacttgctgacgggccccaagaggaacctgatggccatggcccgcacttggtggaatcagttcagcgtgactgctctgcagctgctgcaggctaaccgagctgtgtgtggcttccacctgggctacctggagagtgaggtggaactgatcagtaaggtggttacccagctcctggctctgtacaatcagggccacatcaaaccacgcattgactcggtctggcccttcgataaggtggctgatgccatgaagcagatgcaggaaaagaaaaatgtgggcaaggtcctcctggttcctggacccgagaaggaggcctagggcgaagggctaagggcccttgagagccgggacgggagaagatgggaagccctgttgtgttgcccaccagcctcttacatttcatcccctgtcatgatgctctctctgccctccctcccctccttgctctgagcttgctcttccccccccccttcctgtcctcataagaggttgggaagtgaccacttggatgtctgggccctgccaaggggacagggagggtcagcaggaagctgcttcctgccccctaccctctccctgggcctgccatgctgcttttgtgccaaggttagccagtccctgcccgtcctgtcctgtccacttccacctctgcctcgccttccctgctgccccaccacctccccaaagattctaagtgtcagctcaggatgtggggctaatctgtgtgagtccagcatggacctgtgtctctgtagtgtccccgcaacccaggccaacgagtgcccgcccctggacttgatcagtacctaaccttgtctcctgccacacatttcttaagcacaatttggcttcttcctactgggcacccttccccttcactgaggtctctggatttgtctcagtgccttagcattggaaacctgttcttcctgtctccgactccttttccactctcttctccccagtgccttccctgtcctggtggagctgaggcctttctcctccccagtcctacaacactgccaaaaatctgtgtgatgttccaggggtgggagggtcggctccagcctctggggatcagttgcttttactgtggtctgtgccctatcccgtctctgttggtggtgaggaaagaggcaggaagctagaccagccagagttctgggagatactgctgggtcttactctaggaccaaagtgagaatcccaggcacagagcacattccctttgctgtccagggaagttgctgccttcccagagcctagaggctgcttggaggctccgccccaaactttgtttacactggtgggggaggaggagcttgggcaggggagctaatggggtagttacaaggacctgggctactggagtcaaagtggggacctgtgaggctgggtaggggtaaccccctctgcttctgagtttggattagggagagctgttactccagccatcgtcagtgagaggcaggggaggggcccagccactctgttgtctaaatgaggcctccacgtaggaagtgcgatttctgcttttgtgtcccgtcccccaccccattaccacagctgcctttgtgtttgtgtcaaataaaaagccaaaccc

SEQ ID NO: 1237 - DNA, 2364 bp, Cricetulus griseus
  modified_base (154)..(154): a, c, t, g, unknown or other
  modified_base (197)..(197): a, c, t, g, unknown or other
gtcatcttcggacacagctgtgggaggctcaggcagagatggagaatattaaggcaattgccacagtctctgagaatactaagcaagaagctatagatgaagttaaaaggcagtggagagaagaagttgcttcacttcaggctgtaatgaaagngacagttcgtgactatgagcatcagtttcatctgaggctggancaggagcgagcacagtgggcacagtatcgagaatctgcagagcgggaaatagctgaatcagacagtgacatgtttaaagatggactccggagagcacagtctacagacagcttgggaacctcaagctcgttgcaatcaaaagcattaggctataactacaaagcaaagtctgctggaaacttggatgaatcggattttggaccgctggttggagcagattctgtgtctgagaactttgatactgtgtcccttgggtcactgcagatgccaagtggctttatgttaaccaaagatcaagaaagagcaattaaggcaatgacacctgaacaggaggagactgcatccctcctctccagcgtcacccagggtatggagactgcatatgtatctcccagtggttaccgattagtgagtgagactgaatggaatctcctgcagaaagaggtacataatgctggaaataagcttggtagacgttgtgatatgtgttccaattatgaaaaacagttacaaggaattcagattcaggaagctgaaacaagagaccaggtgaaaaactgcaggtcatgctaaggcaagctaatgaccagctggagaagacaatgaaagagaaacaggagctagaggactttatcaagcagaacaccgaggactcaagccaccagatatctgcacttgtcctaagagctcaagcctctgaggtcttacttgaagagttacaacagagcttttctcaagcgaagagggatgttcaggaacagatggcagtgctgatgcagtcacgtgaacaggtttcagaagagctggtgaggttgcagaaagacaatgacagcctccagggaaagcatagcttgcatgtgtcattacagctagcagaagacatcctcccagatactgtggaggtgctccgggaactggtgttaaaatatcgagagaacattgttcatgtgcggacagcagcagaccacatggaagagaagctgaaggctgaaatacttttcctaaaagagcagattcaagcagaacagtgtttaaaagaaaaccttgaagagactctacagctggaaatagaaaactgcaaggaggaaatagcttccatttctagtctaaaagactgaattagaaagaataaaagttgaaaaagggacaagttggaatctacgttaagagagaagtcacaacaacttgagagtctgcaagaaataaaggttaatttagaggaacagttaaagaaagaaactgctgcaaaggctactgttgaacagctcatgtttgaagagaagaacaaagctcagaggttacagacagaattagatgtcagtgaacaagtacagagagattttgtaaaactttctcagactcttcaggtgcagttagagaggatccggcaagcagactctttggagagaatcaaggcaattttgaatgataccaaattgacagacattaaccagctccctgagacatgacaccccggtagcaggattctaacctgcattttgggtttttaactcatctttagaataacattaattattatttaactcttattggaagaagtcacagcaaaaggaagactggagaaatgcaaatctggagggagaaggctgctgtgcacaaggacagccaacagatgtttcaaagggaacactaatgggacaccagactcgattccaacaggtgtagggatcagattggtgccagtaaagtgctgtttccttgcctgctttctctaacacggattctggaacacatttcctgacatgaaagcaacttccccatagtgtttggaactacgttttctgttcatacaaactgggagagagaagtttctttttctgttgtctagggctcatcagtagcagtgttcggatagcagagaggtgtagtgtgctatatgagtattttatattaaaatatgaagtgtgagagcaggccattggctgttgactgtatttcccttgttcagtgctatttttttttctttttaccattttatcttctattggaggaccttaaatgctactgaaaaatgcctgagaactacaggaccgtggcaaacaaaaaagcaattcaacaaaattaggagaatctggatacttggctagggctatctttatattggaagttgaaatttaaaggaaaaagcacaagaaatcttggaagc

SEQ ID NO: 1238 - DNA, 2364 bp, Cricetulus griseus
atcacaaggcactcagttaccgagccacgtcacgccaacaacaggggtaaccaacaatgtcacttcacacgcctccatctccaagcaggggtattttgcctatgaatcctaggaatatgatgaaccactcccaggttggtcagggcattggaattcctagcaggacaaatagcatgagcagttcagggttaggtagccccaacagaagctcgccaagcataatatgtatgccaaagcagcagccttctcgacagccttttactgtgaacagtatgtctggatttggaatgaacaggaatcaggcatttggaatgaataactccttatcaagtaacatttttaatggaacagatggcagtgaaaatgtgacaggattggacctttcagatttcccagcattagcagaccgaaatagaagggaaggaagtggtaacccaactccgttaataaaccccttggctggaagagcaccttacgtcggaatggtaacaaaacctgcaaatgagcaatcccaggacttctcaatacacaatgaagactttccagcattacctggttccagctataaagacccaacgtcgagtaatgatgacagcaaatctaatttgaatacatcggggaagacgacttcaagtacagatgggcccaaattccctggagataaaagttcaacgacacaaaacaataatcagcagaaaaaggggatccaggtgttacctgatggccgagttactaacattcctcaagggatggtgacggaccaatttggaatgattggcctgttaacatttatcagggcagcagagacagacccaggaatggtacatctcgctttaggaagtgacttaacaacattaggcctcaatctgaactctcctgaaaatctctatcccaaatttgcatcaccctgggcatcttcaccttgtcgacctcaggacatagatttccatgttccatctgaatatttaacgaacattcacattagggataagctggctgcaatcaagcttggccgatatggagaagacctcctcttctatctctattacatgaatggaggagatgtgttacaactcttagctgcagtagagctttttaaccgtgattggagataccacaaagaagaacgggtgtggattaccagagcaccaggcatggagccaacgatgaaaaccaacacatacgagaggggaacatactacttctttgactgtcttaactggaggaaagtagctaaggagttccatctggaatatgacaaattagaagaacggcctcacctgccatccaccttcaactataaccctgctcagcaagccttctaaaagacttcccttttcttggggtatggctgtctcagcacagtactcgacagatccgcagaactgatgtggctcaggcaccctggttttaattccttgaggatctggcaattggcttacgtaaagggtcaccatttgaggtcctgccttaccaattatgtgctgcccaacaactaaatttgtaatttgttttctctagtttgagcagggtctgaattttttcgtttattttctttttgccagcagacagacttgggtctataaagacaagcaagtacactgacagaagttaccatttagtttcttaaatgtaaaaaagaaaacccacaaaagactcaacaaaattagaccacaaaatttgcattgttcattgtagcactattggtaataaaataacaaatgtttgtgcatttttatgtgaagatccttctcgtatttcatgtggaaagatgagcaaggtctgcttctttcattttacttccccttctgtttctgaaaggcagtttcgccaggcttaatgcaagaatctgactgtagagattgccacagtctctggatggtttccagggctgtgttgttactgagcttcatcttcccagaatgagcaaaacactgtccagtctttgttacgattttgtaataaatgtgtacattttttttaaattttggacatcacatgaataaaggtatgtatgtacgaatgtgtatatattatatatatgacatctattttggaaaatgtttgccctgctgtacctcatttttaggaggtgtgcatggatgcaatatatgaaaatgggacattctggaactgctggtcaggggactttgtcgccctgtgcactaaagggccagattttcagcagccaaggacatccatacccaagtgaatgtgatgggacttcaagacgtgaactaagacaattcactctggctgtttgaacagcagcgtttcataggaagagaaaaaagatcaatcttgtattttctgaccacataaaggcttcttctctttgtaataaagtagaaaagctctcctcac

SEQ ID NO: 1239 - DNA, 2364 bp, Cricetulus griseus
cgggaaagccccgagaaagaatcggcggcacaaaatggcggcggcggcggccggggcttcggtgttggcggctcccgcgttggcggccggctcttccggctcgggggagccgccccagggtctcagggggtgctgatcggtgacaggctgtactcaggcgtgctcatcaccttggagaactgcttgctccccgacgacaagctgcgcttcacgccgtccatgtcgagcggtctcgacatcgacacagagactggcctccgcgtggtgggctgcgagctcatccaggcagccggcatcctgctccgcctgccgcaggtggccatggctacagggcaggtgttgttccagcggttcttttacaccaagtccttcgtgaaacattccatggagcatgtgtccatggcttgtgttcacctggcttccaaaatagaagaggctccaagacgaatcagagatgtcatcaatgtattccaccgacttcggcatctaagagaaaaaaagaagcctgtgcctctagtgctggatcaagagtatgttaatttaaagaaccagattaataaaggcagagagacgtgttctcaaggaagctgggcttttgtgtccatgtaaagggaactacatgaatgacagtcttcgaacagatgtctttgtgcggttccagcctgagagcattgcctgtgcctgtatctacctcgctgcccggacactggagatccctttacccaatcgtccgcattggtttcttttgtttggagcaactgaagaagaaattcaagaaatttgctttaaaatcctgcagctttatacacggaaaaaggttgatttgacacacctagaaagtgaggtggaaaagagaaagcatgccatcgacgaagccaaggctcgagctagggggctgctaccaggtagtgctcccattctggacagtgctgccgggttctcacctgctcctaagctggaatcccccaaagaaggtaaaggaaacaagtcttccccactgtctgtaaagaatgccaaacggaaagtggagggcccaaagaaagccaagacagacagccctgtgaatggcttgccaaaagggcatgagagccgaagtcaaagcaggagccgggaacagagctactcaagatccccgtcaaggtctgcttctccaaagagaaggaagagtgagagtggctctacctcaggtgggtccaagtcacagagtcgttctcggagccgcagtgactctcctccaaggcaggtacaccgtggtgctccctacaaaggttcagaagtgaggacctcccggaaatcaaaggactgcaaatacctcacccagaagccacacaagtctcgtagccggagctcctctcgttctcgaagccggtcacgagagcggacagacaattctggaaaatacaagaagaaaagtcattactatagagatcaaagacgggagcgctcaaggtcatatgagcgcacaggccatcgctatgagcgggaccatcctggacacagcagacatcggaggtgagatgggttccctggtggctgcccttgggccctccctcttgggcacaccttggcttcagtggccttgtagcatgatgttttttggaagtgttttcaattggaccttgaggtgagtttaactgatgggacagtgagcaagatgccctcaggctggcctgcggagtgctgtgcgtctgtcccagctgcaggcccacctcaactgcagaccttcgggtagctggatggaacagcaaaggcacgcgtccccattggtgtggcttggtgctattgataagctgtctcttcactcctaaactgattcaattacgttaagccaagaaagatgatttttcaaatgtttgcctatattaggttgtacttgtgtacatattttcctgtgtttcacaatgagaaaatggccttaatagcccccttattctctattcacgttgtaaataaacatgtgcttaatacaagtgaaagctatatatgaaaactcggaatttgaattctgtttgttagcttaacacttgtatagagaattctgatttttaaaatgtgaaggtatttaggtctgtgttgaaagtcatatatttttatctgtgcaatgctgagtgcaggccaccagctctagagaaattttacgaggttgaataaacacaattctcaggacacttgggatgtaagactttgtgggctgtgatgcttcttttcttatgtgcatgcctggggcttggctgtgggactcaggcatggagggagtgtttgtgatgagcaactatgcactgccaacctagctattctaggggaaatatgagctgtatattcccttatctttgctcccagttctcattaaagtgttggtatttt

SEQ ID NO: 1240 - DNA, 2363 bp, Cricetulus griseus
attcttaaagctatgaagagtgcagagtctcaaggccgatatgagatcatgctgagtctgcagagtatactgactggactgggtgctgctgctgcaccttgccacagggatatttataaagctgcacggtcctgtctaacggacagatccatggctgtccgttgtgctgctgccaagtgtcttcttgagctccagaatgaggccgtcttcatgtggagcacagacctggacagtataggccacactatgttttaagtcctttgaaggttccaattatgatgtgaggatttcagtttccaagctactgggcacagtgttggctaaagctgtacttgctaagcatccaggagcacgcccctaagcaaagtgctcgcagaacctctctggaggaagttctgagccatgcagcttggaccagcctcctccagaatgctctagcaactgtgcttgactgttggagtccagttgatggagaacatcaagaacttgatgaagtcagtctgcttactgccatcacggtatttattttgtctaccagtccagaagtgacaaccatcccctgccttcagaagcgctgcattgagaaatttaaggctgccctagagagcaaagaccctgtggtacaaatgaagacctaccagctcctacattccatttttcagtttccaaatccggccatttcctacccatacatttactccttagcatcctccattgtggagaaactgcaggaaatagacaagagaaaacctgaagacactgccgagctgcagatctttcaagaaggaataaaagtcttggaagcattggtcaccattgccgaggaacagcaccgctctcagctggtggcctgccttctgcctgtcctcatttccttccttttggaggagaatgctctgggatcagcaacctcagttatgagaagtctgcatgactttgctttgcaaaatctcatgcagataggccctcggtattcctcggtgtttaggaacgtcatggcttcatctccagccatgagagcgcggctggaggctgctgtaaagggcaatcaggaaagcgtccgagtggagccgccctctaaacatgccaagaacctgggcaggaactcaagcatccagttaaaaactaatttcctgtgatgctgctcttctggaacactgggcactgaattgtaacacttgcttgtctccttgctttggagacaaaagtgaaaacctgagacaaaagtgcacttggagatccagctgattgttctaatttcaggagtgattgaaacttaacattcttgctaattttggttttgttttgtttccattgactaagatcatggaactgccagaattcttgccaggcatttcaagaaagtgccaaagatcccaatttactaagtaatccactgctttgagaatgaagggatttcctctaagggtccgcacgttcaactctaacacagacgtcagtgtactatgaagttatcgacattcaccccataccccagctgctaatgcaaatcctgccataggtcattagtagtattaaatttcatccatttctcaaacaacataaatgattagagctgggaagggttcctgaggagactgaggcagcatggtcaccaaagttctgcgccagcctggactacatagcaagttccagagcatctaggactatgtgataagacttctgtcaaaaaataaattacatgcctttaatcccagcactcaggaggcacaggcaggtggatctctgtgagttcaaggccagcctggtctacagagccagttccaggacagccagggctacacagagaaactctgtctatagaccatctccatcctactattcctcagatggattttctgttacctctcttcattttgtttgtttttatttgtggaaatcattcatattaagagcttaatgcagattcatgtctatatctatgtgggattgtatgaatgtcaaatttagtacaacaaatttagaacttcagtgaatacaaatatgtttttttaacacagaatgtatttttaatataaaaatataatgataaagtcatattggttgaaaaatatctttggctgtgttcatgattgctaactttccctccacttcagtattgtactttgtgaattgagcactgtgtcaaagcaatgcagctttctgtcctaatttacaaactgcagggatggaggcctgttcagaattgagaaggactgattagatcagggactgcctgacagactctattttattacgtttgtatgtgagtactcttgtaaagctttcagattggaaaatgtttgacaaactaacactacaatcaacttttctatattacacaaataaagctaattttcttt

SEQ ID NO: 1241 - DNA, 2361 bp, Cricetulus griseus
agtagaagtagcacttccctcagcaaggacaacacagtgcacgacctttcggtcagcagatggcagccctacagagtcagctccaccaagtacagttggagcgcacaacactgaccagcaagcttcaagcatcacaggctgaaatcacatctctgcagcatgccaggcagtggtaccagcaacaacttgcgctggcccaggaggccagggtcaggctgcagggagaagtggcacacatacaggttggacagatgacccaagcaggccttttggagcacctaaagcttgagaatgtgtccctgtcccatcagctgacagaaactcagcatagatccatcaaggaaaaagagcgcatagctgttcagctccagagcattgaggagatgctacttccaaagaccaactcattagtgagctgaaagctaacaaaaaaacggctggactcagagatgaaggaactgaggcaggaactaataaaagtgcatggagagaagaagactagtggaagtagaacactcacgactagcaaaaggagatgtccctggttcaccaacagatggcagatcttgaggggcatcttcagtcagtacagaaagaacgagatgaaatggagactcacctgcagtctttacagtttgacaaagagcagatggtagctcttactgaggccaacgagacactaaagaaacaaatagaagagcttcagcaagaggccaagaaggccatcacagaacagaagcagaagatgaagcggctgggctcagatctgaccagtgcccagaaggagatgaagactaagcacaaggcttatgagaatgccgtgagcattcttagccgccgcctgcaagaggccctggctaccaaggaggccacagatgcagagcttagtcagctcagagctcagagcactggtggcagcagtgaccctgttctacatgagaagattcgggctctggaggtagaactgcagaatgttggccaaagcaagatattgttggagaaggagttacaggaggtgatcacaatgactagccaggagctagaagagtcccgggagaaggtgctggagttggaagatgagcttcaagaatccagaggcttcagaaggaagataaaacgtcttgaagagtcaaataagaaactggccctggagttagaacacgagcgagggaagctcaccggcctcggacagtctaacgcagctttgcgggagcacaacagtattctggagactgcactagccaagcgggaagctgacctggtgcagctgaatctccaggtgcaggcagttttacagcgcaaagaggaagaggatcgccagatgaagcaacttgtggaagctttacaagcctcattagagaaagaaaagatgaaagtaaacagcatgaaggaacagatggctgctgccaaggtggaagctggacacaaccgccgccactttaaggcagctacactggagctgagtgaggtgaagaaggagctgcaggcaaaggaacacctggtacagacactgcaggctcaggcagatgagcttcagattcaagagggaaagcattctcaagaaatagcacatttccagactgagctggcagaagctagaacccgcctccagttcctacagaagcagctggatgaacagatgagccagcagcccacagggagccaagagatggaaaatctcaaatgggaactggatcagaaagaacgagaaattcagtctctgaagcaacagcttgacttgacagagcaacatggcaagaaagagctagagagtacacagcagacattgcagactatcaggtctgagttggaaatggtacaggaagatctctctgagacccagaaggataagtttatgcttcaagccaaagtgtctgaactgaagaacaacatgaaaactctgctgcagcagaaccaacagctcaagctggatctccgccgtggtgcagccaagaagaaagaaccaaaaggtgaatccaactcctccagccctgcaacacccatcaagataccagactgccctgtcccagcctcattgctagaggagctgctgaggcccccacctgctgtgagcaaggaacccctcaagaatctcaacagctgtttgcaacagctcaagcaagaaatggacagtctgcagcgccagatggaagagcataccattactgtgcatgagtccttatcctcgtgggctcaagcagaagctgccccagcagagcatgcccaccctaggggagacacaaaaccacatagtcaaaacagtgttcccagagaagggctgggccaatgactacttgttctcattactaagtatttgtgactgctgaaggatatactctttgtcaatactatttatttgat

SEQ ID NO: 1242 - DNA, 2361 bp, Cricetulus griseus
agtctacagttgaaagcccatttggatgaggctcggactctgcttcatggcacccggggaactcatcagcgccaggttgagctcattgagcgagatgaggttagtctacataagaagctgagaactgaagtgatccagctggaagacaccttggcccaggtccgcaaggagtatgaaatgctgaggatagagtttgagcaaacacttgctgccaatgaacaagcaggtcccataaaccgggagatgcgccatctcattagcagcctccagaatcacaaccaccagctgaagggggaggtcctgaggtataaacggaaactgagagaggcacagtccgacctgaacaagactcgtctgcgcagtggcagtgccctcctgcagtctcagtctagtactgaggaccccaaggatgaacccacagaactaaaacaagattctgaggatctatccactcattcttcagcatcgaaggcatctcaggaggatgccagtgaagttaagtccaaacgggatgaagaagagagagaacgagaaaggagggagaaagaaagagagcgagaacgagaacgagaaaaggaaaaggagagagaacgagagaaacagaaactgaaagagtcagaaaaagagagagattctgctaaggataaggagaaagggaagcatgatgatggaaggaaaaaggaagcagaagttatcaaacagctgaagattgagctcaagaaagcacaagagagccagaaggagatgaaactgctgctagatatgtatcgatctgcccccaaggagctagttagagacaaagtacagctaatggcagccgagaagaagtcaaaggctgagttggaagatctcaggcaaagactcaaggatctggaggataaggagaagaaagagaacaagaaaatggctgatgaggatgccttgaggaagatccgtgcagtagaggagcagattgaatacctacagaagaagctggccatggccaagcaggaggaagaagctctcctctctgagatggatgtcacaggacaggcctttgaggacatgcaggagcaaaacatccgtttgatgcagcagttgcgggagaaggatgacgcaaatttcaagctaatgtcagagcgaatcaagtccaatcagatccataagttgcttaaggaggaaaaggaggagctggctgatcaggttttgacactgaagactcaggtggatgcccagctacaggtagtaagaaaactggaagagaaggaacacctgcttcagagtaacattggcacaggggagaaggagctgggccttaggactcaggccttggagatgaataagcgtaaggcaatggaggcagcccagcttgcagatgacctcaaagcacagctggaactggctcagaagaagctccatgactttcaggatgaaatcgtggagaacagtgtcaccaaagaaaaggacttgttcaatttcaaacgagcacaggaggacatctctaggcttcgaaggaagctggagaccaccaagaagccagacaatgtgcccaagtgtgatgagattctgatggaggagataaaggactacaaggctcgcctgacctgcccctgctgtaacatgcgtaaaaaggatgcagtgcttaccaagtgtttccatgttttctgctttgagtgtgtgaagactcgctatgacactcgccagcgcaagtgtcccaagtgtaatgctgcttttggtgccaatgatttccatcgcatctacattggctgatcacagtcaagaaagaggagctggctaggcaagcacttactcattaatcaccaggcctctacctcttctctccttgacagttggccaactcctttgttccccagactttgtccaggctcccctctcctgtagctagagaacattagtaaaaaagacctcaagtcctgagttttagaatgaactacaagttactactgtttgtcttccctaccagctttgtttgtgtattgctttcagatttttcagcattttcctcttggatctagcctagaagtcagactgatagttttgacattgagaggggaatacaggtggagcaaacataagctattctagaggagagaacttttaagaaataagctttctgtgggcccaaacttcttgatttgggaagtaaacctttccttaggttataaaatggtataattgtgatagtctctcctgtaagatttgaagccttaatgaaattgtatccaggataattcagtccatttcttacttctatctaagcgacttttaggggcacttggatttcttgctaatgttatttatgttttaaatattcagatacttagtagccttttagtttcttaaggccagaataatttcaaa

SEQ ID NO: 1243 - DNA, 2361 bp, Cricetulus griseus
gggtgaagatgtggaagaatgtggagaacacatgggtgggactctgctcgtaggcctcaacagaataagtcttcatgaagaaagctttcctgaggaggaaaattcacccaggggccagtccgacttcttttatgagtttagaaaactcaccttcaccaaaggcaagtctcccaccgtagtgtgcagcttgtgtaagcgagaaggtcatctaaagaaggactgccctgaggacttcaagagaatccagctggaacctttgccaccactgacacccaagttctccagtatcttagatcaagtttgcatccagtgttacaaggtatttttctccaactcttatagaagatcaggctcgtgaacatatccaattgagcttgttttggctcctccaaaaatggatttggggttcaaaacagagtgaccttgacgtctgtatgacaattaacggacatgagactgctgaggggctggactgcgtaagaactattgaggagctggcaagagccctcagaaagcactcagggttgaggaacattctgcccatcacaacagcaaaggtgcccattgtcaagttcttccatctaagaagtggtcttgaggtagacatcagcttgtataacacactggctcttcataacacaagactcttatctgcatactcagccattgaccccagagtgaaatatttgtgctacaccatgaaagtgttcacaaagatgtgtgacatcggtgacgcgtcccgaggcagcttgtcgtcctacgcgtacactcttatggtgctatatttccttcagcaaaggtctccacctgtcatccctgtgcttcaagagatatacagaggtgaaaagaaaccagaaatacttgttgatggctggaatatttacttttttgatcaaatagatgaattgcccgcttattggccagaatatggaagaaacacagaatctgttgggcagctgtggttgggacttctccgcttctacacggaggagtttgactttaaggaacatgtgatcagcatcagaaggaaaagtctgcttacaacttttaagaaacaatggacctcaaaatacatcgttattgaagatccctttgatttgaaccacaatcttggtgctggattatcaaggaaaatgacaaattttataatgaaagcttttatcaatggtagaagagtatttggaattccagtcaaaggattcccaaaggactacccttcaaaaatggaatacttttttgatccagatgtcctaactgagggagaactggctccaaatgacaggtgttgtcgaatttgtggaaagatcggacacttcatgaaggactgtcctatgaggagaaaagtgaggcgacggcgagaccaggaagataccccaaaccaaagatactctgagagcaaagaaaaaagaagtaaagaggacagagaaattcagaacaagtgcacagaacaggaagtgctgactaaagaagacaagcccccacagtgcgtagcttccaaagcgaagccatcgagggcagtcgtggacctggggcgggagaagattctcaggacacctgtggaaaaatggaagcgacaggatgacaaagacttgagagaaaagcgttgtttcatctgtggaagagaaggacacattaaaaaggaatgcccacagttcagaggctctccaggcagtgcttttacatgaagacaaaaagaaacaaaaaacaaccatatttttgagtccccagtcaggtagcctttccagtaaatatatgactcaggggaaagcttcagtgaagaggacccagcaagaatcatgagggaaggaaacgcagccctggaaatggccagtcaggcacccctatccacttggaaaattaggttcacttcacaggacatagcaacacagatcaggcttcaacagaacagttgagggagatgttggaattttttaaattttaatgaaattgtcaatgaggaaaagaaaaattttaatacagtcttaacatcaatccccacagatttgaagaatttaatagaacataacaatgaagtcatgaaaacaagtagtcctatttgctggtttaagaaaaagaaagaaaacttcaaggggaaaatgcaagaataaaagtgctttttacttttatgatactcagaaattggggtggagagctcttacaaacctctggagatcaaagaggctgctgtctgccagtcacaagttggattggcacccttctggatctgactggagcaatgtctgaactgtttctctaacttcacaagcctttctgaaatagtacatcttcagaactatgccagtttatttatcattttaaaataaaatcgaactttgaatactgaaaaaaaaaaaaaaaaaa

SEQ ID NO: 1244 - DNA, 2361 bp, Cricetulus griseus
tcgcagaggagacagcgccgcagttgccgccagctcggggatttctggctcttttctcttcgccttaaattcgggtgtcttttatgaataatcaaaagcagcaaaaaccaacgctatcaggccagcgttttaaaaccagaaaaagagatgaaaaagagaggtttgaccctactcagtttcaagactgtattgttcaaggcttaactgaaactggtgctgatttggaagcagtagctaagtttcttgatgcttctggagcaaaacttgactaccgccgctatgcagaaacactctttgacattctggtggctggtggaatgctggccccagggggtacactggcagatgacgtgatgcgcacacgtgtctgtgtgtttgcagcacaagaagacctagagaccatgcaagcatttgctcaggtttttaacaagttaataaggcgctacaagtacctggagaaaggttttgaagatgaagttaaaaagttattgctcttcctaaagggattttcagagtcggagaggaacaagctcgctatgttgactggggttcttctggctaatggaacacttaatgcatccattcttaacagcctttataatgagaatttggttaaagaaggggtttcagcagcatttgctgtaaagctctttaaatcatggataaatgaaaaagacatcaatgcagtggctgcaagtctccggaaagtcagcatggacaacagactgatggagctgttccctgccaataagcaaagtgtggagcacttcaccaagtatttcactgaggcaggcttgaaagagctttcggaatacgtccgcaaccagcagaccatcggggcgcggaaagaactccagaaggagcttcaggagcagatgtcccgtggggatcccttcaaggatataattttgtatgtcaaggaagaaatgaaaaaaaataatatcccagaaccagttgtcattgggatagtctggtcaagtgtgatgagcaccgtggaatggaacaaaaaagaggagcttgtagcagaacaagccatcaagcacttgaagcaatacagccctctgctcgctgcctttactacccagggtcagtctgagctgaccctgttactgaagattcaggagtactgctatgacaacattcacttcatgaaagccttccagaaaatagtggtgcttttttataaagctgaagtcctgagtgaagagcccattctgaagtggtataaagatgcacatgttgcaaaagggaaaagtgtcttccttgagcagatgaagaagtttgtagaatggctcaaaaatgctgaagaggaatcggagtctgaaggtgaagaaggtgactgaattttgaaacaacatcctcagtaaagcaaacaggagttgtagataaaatgtcatgtctcatgtgtcctggttcttacatcttcctacctccctatatcaagcatgatataagggctttcatggcaatttttattttaactgtttttatggttcctggaaactgtgggtgtggtttctgaagccatgtgtaagaagctgcaggggctgtagaactgaatctgatgtcgcattggtttgtcagttaccttctacctcctggattttctactgtaataatgtgatgtaaggccttccgcaatgagcagttaactttattccctgggttttctatataaacagttttcaagatatgatttggttaaaaataatttgttacaaaaaattctgtttgcaaattaaactgtaaaagtatccaaaatctcaaaaggcaatgatttgtgtgataatttagtatgtccagagccctgttcataagtgaaaatcctgtagacaattgaatctataacatgaatggagagcaaacttgagttgagaactcacacatggcagaggtaggaagaagaaaactagagcttattcctagaaattcgattgcttttcttttgctatccatttgtagttggtaggaggaaaatgtagccacctttttttggaaaggctaaaagtgaacattttaagagtttcttaattgataaaagaaaatagtctagaataatgccaccagagactgagtggaaattgcccattttgaaggtgccattcttagaagccaatgatttggtatttaaagcttatcttgagagaataacatgtaatataatttgaaataaacgtttagtagccttgagagcattatagcaaaaacattgatgggtggggtgaatttgtaaaatgaatgactttgataaagttttatgcacaggcaaatgtactcattagattctgtgtagtgatctgcttttcctttgtaatttgtggtcctaaaaaaaaaaaatttttttaaataaagtccatcctt

SEQ ID NO: 1245 - DNA, 2360 bp, Cricetulus griseus
cattactgtaagagcatctcaagcagaggtcgttacaaccgtgatttggaacaggatgaagcatttattccagttggagaatcattgaaagacctgattgaccagtcacaaagctctggtagtggatctggactacctttattggttcagcgaactattgccaaacagattcagatggttcggcaggttggtaaaggccgttatggagaagtatggatgggtaaatggcgtggcgaaaaagtggcagtcaaagtgttttttaccactgaagaagctagctggtttagagaaacagaaatctaccagacggtattaatgcgtcatgaaaacatacttggttttatagctgcagacattaaaggcactggctcctggactcagctgtatttgtattacttgattatcatgaaaataggatctctctatgacttcctgaaatgtgccacactagacaccagagccctactcaaattaagcttatttctgctgcctgtggtctgtgccacctccacacagaaatttatggtacccaaggaaagcctgcaattgctcatcgagacctgaagagcaaaaacaatccttattaagaaaaatggaagttgctgtattgctgacctgggcctggctgttaaattcaacagtgatacgaatgaagttgacatacccttgaataccagggtgggcaccaagcgctacatggctccagaagtgctggatgaaagcctgaataaaaaccatttccagccctacatcatggggaaatggctcgtcgttgtattacaggaggaatagtggaggaatatcaattaccatattacaacatggtgcctagtgacccatcctatgaagacatgcgggaggttgtgtgtgtcaaacgcttgcggccaatcgtgtctaaccgctggaacagtgacgaatgtcttcgagcagttttgaagctaatgtcagaatgctgggcccataatccagcctccagactcacagctttgagaatcaagaagacacttgcaaaaatggttgaatcccaggatgtaaagatttaacagttaaacagttgtgagagagaatctagacttgcaagaactacccccaagaaaatgggtgattagcatgaaataggatgttggcttgattttcagactgtttcccgccacatcttcacaggctgctaacagtgaacctttcagtactctgcagaatataagattgggactgtttttatgaactgcatcaagactccaatcctgtaagaagcctctggtctaactctgggtaatcagtgtcctgtccataaagtgatgctttctgtgaaagccttcagagaactaatgagctcagcagagatggagagagactttgccttctataagaggaaacatccgtttgtttgtctttgtaaacagcctatagattatgatctctttgggatactgcctggttcatgatggtgcaccatgcctttgatgggcacaccagaattcctctgctgccatgggcttagaagaaaagaatgtatggttgttcaggaggggtttgtggctggtggtttaaacatgcaatatctgatcaacattctccaatatcataaaagtcatctaccttgtaactgtagtaactcctccatcaactttatttttaacataatagttgtaaaggccaaataagtttaaagtgtccataaatttggattgttttccttctatcaccattatcagctgttgtcctgaaatgtgctagtttttattcattcactctaatgaaagtcaatacttttttcttcttagatgtttttcttgtttagaataaaaagacagtaattttccaagaaccatgcatctctgatttggcccaagatcaagttggatattgagtagtctattccagggcagatttccttagtgaaaaccttgtcttttcagatatgtattgttttgaaatgtttccaacaggaaggatcatcccataaggaaagcttatgaatatggcttttgcaaagaattagacataatactgtaattttaggttgtgctctgtactctttcagtggaattatttaagctctttaatgacctttgttcttcccacttaaagataaaatgtagtatatattgtataaaatgaaaatattatagcttagggaaactgtacataaggcattgataggttaaaggaaacatttttattatgtaattgtaaaacaccaaaaatacggattcatctttgatatgtaacacactaaatgtattttgtacagcatctgatttaaaaaggtgccttattaagtttaccattaattgctttgttctatatacagattatgttcaatgtatcatttttcagtaaataacattattttagta

SEQ ID NO: 1246 - DNA, 2359 bp, Cricetulus griseus
caccagttatgacagactttacctggctctgaagaatgtcagcggggcgacttgaagccttcaggcgggccttgaagctaactaccagatgcccggagtgtgaaagcagcctaaagctgatccgctgcatgcagttttacccttttctgtacaacattacctcttcagtttgtagtggtcattgtcatgagaaaaccctggacaacagccatgacaaacagaaatattttgacaacccacagtcactggatgctgctggagaagagccctctgagcaaggagcagaggaggaccctgtgctttctgttgagaactcagggagggactcagaggcccttagacttgaaagcacagtggttgaggagagcaatggttctgatgaggtggagaaatcagatgaaacaaagatgtcagaagaaatactggctttggtggatgagtttcagcaggcctggcctctggaaggttttgggggaacactagaaatagaaggggcggtcgtctggaccttcagggaatacgccccagaatgcagtagccaagcaaatcaagcagaaaatggacaggcgttttatcaagcaaatttagagatcactggcccaaaggtggcatctcctggaccccaaggaaaaaacgtgactaccagagcctggggtggcccagtccagatgaatgcctcaaactccgctgggtagagctgactgccattgtgagcacctggctggcagtttcttccaaaaacatcgacatcacagaacacatagactttgccacacccatacagcagccagcaatggaaccgctgtgcaatggcaatcttcccacgagcatgcataccctggaccacttacagggagtggccaacagagccagcctgcactacacgggtgagagccagctaacagaggtattacagaatcttggcaaggaccagtatccacaacagtcacttgaacaaattggcacccgaatcgccaaggttttggaaaaaaatcagacgtcatgggtcctatccagcatggcagccctctactggagagtcaaaggtcaggggaaaaaagccatcgactgcctgcgccaggccctgcactatgctccccaccagatgaaggatgtgcccctaatcagcctggccaacatcctgcacaatgcgaagctctggaatgatgctgtcatagtggccaccatggctgtggagatcgcaccacacttcgccgtgaaccacttcactctgggcaatgtctacgtggcaatggaagagtttgagaaggccctggtgtggtatgagtcaacactgaagctacagccagagttcgtgcctgccaagaaccggatccagaccatccagtgccacctaatgcttaagaagggccggcgttccccctagggcatgccttcccttccctcagctctcccagccacagtcccgagcagagccccatcatgatcagtccccacatgggtgtgtgtgggaattaccaagtaagacatagcaggacttggcctgtagggctggctttgctggtttaagctcctcctccacagctaccctcagaagaggcatcttcagaaacagggtttcccacacactgtaaatactgagccaggacagccggagctccgctctgtcttcaaaacctccatgccttcacggctcctccgtggtccagcctcttccctggagaggccagagccacactgcccattctctgcttcctgtgtagcctctgttgttcctggaattgcaatgccacctggggctggtcagtgagaagcagggattcttgatgccccccaccagctctgctccctgccccagtctcgtccattccatgctgctatgttacaagctctcagagatagtttgcaggggaggaaggggaaacagttttacaaacaaaatatttacaacagcagacactcttagggtcatctgacctttgtaagttatttatgttggggtgggaggggggctgagcaggggagtcagccgtgtgcaacatctttatcatttgtattttaattgcagatcacaaggaaaccaatacattgaaatcctatataacaggtttatatatatagaatatgtgtatttgaagccctctacagactgagtctgtggtactaattccttgttcgctgtgttccccgtcttggactaggtgtgactgtcagccctctctgtgaggctggcacaccagctcctcagaggagagccaggagccagggttgggtgtcccatacagtgccctcaccttttggtccctggagaatcagaaactccaacattttggattctttaagggcacatgctgagaacaaaaataaaaattgttttatgagcaaaaaaaaaaaaaaa

SEQ ID NO: 1247 - DNA, 2359 bp, Cricetulus griseus
gtcggacggtttgaacgagacgaagacggaaccggagccgggcgcgcggtcagtggacgcgggttccccgagagccgaagatggcagtgaatgtgtactcgacgtcagttaccagcgataacctaagtcgacatgacatgctggcctggatcaatgaatctctgcagttgaatctgacaaagatagaacagctgtgctcaggggctgcatactgtcagtttatggacatgctcttccctggctccattgctttgaagaaagtgaaatttcaagctaagctagaacatgaatatatccagaacttcaaaatattgcaagcaggattcaagaggatgggtgttgacaaaataattcctgtggataaattagtaaaaggaaaatttcaggacaattttgagtttgttcagtggttcaagaagttttttgatgcaaattatgatggaaaagagtatgaccctgtggctgccagacaaggccaagaaactgcagtggctccttctcttgtcgctccagctctgagtaaaccgaagaaacctctcagctccggcagtgcagctccacagagacccattgcaacacagagaactactgcagctcctaaggctggcccagggatggtgcgaaagaaccctggtatgggcaatggtgacgacgaagcagccgaattgatgcagcaggtcaaagtattgaagcttactgttgaagatttggagaaagagagagacttctacttcggaaagctaaggaacattgaattgatttgccaggagaatgagggggaaaatgaccctgtacttcaaaggattgtagatattctttatgccacagatgaaggctttgtgatacctgatgaagggggcccacaagaagaacaagaagagtattaagcagcttggaccagcagagcaacatccgaattcttcactccaaatcatgtgcttaactgttaaatactcccttttattattcttagaggattcactggtttcttttcataagcaaaaagtacctcttcttcaaagtgcactttgcagaagtctctttccgatgagtttgagttaggagctgttgccttgtagcagagcagtattaacatctagttggttcaccaggggaacagagaggccaaccatggggctcttcatgtggatgctggtcacactgactgatggagaagggggttttgtaatacactgaggtgacaacctcagagaaatgtaaagactgaattgaatttaagctaatgtgaaattctggcagagaacgttttaataaatgccttaagagtatttaaaatatgcttccatatttcaaaatataaaatataacatgacaggagatttttgtgtctgatgttttgggaaggaagggccagactttagaccctttggaacctgctgtcacaggcctttcaagtctcttgaatctcacagatgtagtctttggcccagaaggaatgtctgaaaagttgttctgtaaagccatttggtgtcattgaccagttgcatccctgctataaaagcaagcagcatggtagcttgggtgaatagagggtgtctcggccctgcagtgcctgagatagacagagctcagttttcactgagctttcctctgaggacttcaatcagtcccctgagttcctatgtagtgtgtttctgggacttgcccacatctctgggatttgaacaggcattgagtcctgttgtactgtctgttaagtttacatttaacacgttctcttctctgctccccttgacctatggggactcctctggctccttaagtttgctgctgagtgttgtgaatacagcaggctggtgatcgcactgcaagttctttctggacctctggcaaaggagtgatcagtgaaggccagtgtcaccttgggctctgtgaggctggggtgtttggtgtctgctgtccacagctctccattgtcacccgaatactttgccagtgcactaataatctctttggagataaaattctcttagtgtgttactaaatgttaaaatgtttttttttttagaatatacagtaccatgactgaaatattaatatttaaaagacttcattccttaattctccctcatttgctttgcccacagcctattcagttcctttgtttggcagaattctgcaaaatatatgttactcactactgagattgttcagcccctaatgtgtttgtattgatttgtttctggtggtagcttgtcttatgctgtgtgtagaaaacaggtattttatgacagattgttatgtagtgcatgctgtgtggaattcagaggaaaatccagatttagtgattaacaattgccaaaaaaaaaaaaaacccagcttcactggctttaaaaag

SEQ ID NO: 1248 - DNA, 2358 bp, Cricetulus griseus
cgacggcgctatggtggattgtccagtgtgcaagcagcagtgctactccaaagacatcgtggagaattatttcatgcgtgatagcggcagcaaggcttcctccgattcacaggatgctaatcagtgctgtactagctgtgaagataatgccccagccactagctattgtgtggagtgctctgagccactgtgtgagacctgtgtggaggcccaccagcgggtgaagtataccaaggaccacactgtgcgctccacagggcctgctaagactccagatggtgagcgcacagtctattgtagcgtccacaagcacgaaccccttgtgctcttctgtgagagctgtgacactctgacctgccgggactgccagctcaacgctcacaaggaccatcagtaccagtttttggaagatgcagtgcggaaccagcgtaaactcttggcctctctggtgaagcgcctgggggacaaacatgccacactgcagaagaacaccaaggaggttcgcagctctatccgccaggtctctgacgtgcagaagcgtgtgcaggtcgatgtcaagatggccattctgcagatcatgaaggagctgaacaaacggggccgggttctggtcaatgatgcccagaaagtgacagaggggcagcaggagcgcctggagcgccagcactggaccatgaccaaaatccagaagcatcaggaacacattttgcgatttgcttcttgggctctggagagtgataacaatacagccctcttgctgtctaagaagctgatctatttccagctgcaccgcgctctcaaaatgattgtggaccccgtggaacctcatggggagatgaagtttcagtgggatctcaatgcctggaccaagagtgcagaagcttttggtaagatcgtggctgagcgtcctggtacaaactccacaggtcctgggcccatggctcctccaagagcgccagggcccctaagcaagcaaggctctggcagcagccagcccatggaagtacaagagggctatggctttgggtcggatgatccatactccagcgcagagccgcatgtgtctggcatgaagcggtcccgctctggtgagggggaggtaagtggcctcatgcggaaggtgccgcgtgtgagccttgaacgtctggatctggatctcactgctgatagccagccaccagtcttcaaggtctttcctggcagcaccactgaggactacaatctgattgttattgagcgtggtgctgctgcagcagctgctggtcagactggaacagtgcctccaggagctcctggtgccctaccgttgcctggcatggctattgtcaaggaagaagagacagaagctgctattggagcgccacctgctgccactgagggtcctgagaccaagcccgtattgatggctctggctgaaggccctggtgctgagggaccccgtctggcttcacctagtggcagtaccagctcaggcctggaagtggtggctcctgagggtacctcagcccctgtaggtggaccaggtgtcctggatgacagtgccactatctgtcgtgtctgccagaagccaggtgacctggtcatgtgcaaccagtgcgagttttgctttcacctggattgccacctccctgccctgcaggacgtgccaggggaggagtggagttgctcactctgccatgtgctccctgacctaaaggaagaagatggaagccttagcctggatggagcagatagcactggtgtggtagccaagctctcaccagtcaaccagaggaaatgtgagcgtgttcttctggccctcttctgccacgaaccctgtcgtcccttgcaccagctggctactgattctacattctccatggagcagcctggtggtaccctagacctaaccctgatacgtgctcgtctccaagagaagctgtcacccccttatagttctccccaggagtttgcccaagacgtgggccgcatgttcaagcagttcaacaagctgactgaggacaaggcagatgtgcagtccatcatcggcctgcagcgcttctttgagacgcgcatgaatgacgcctttggtgacaccaagttttctgctgtgctggtagaaccgccaccgctgaaccttcccagtgctagcctaagttctcaggagctggctggtggtcctggcgatggtccttgaagctggagctcttgtggtcagcccagtcaagctctggtctttgtccttccaccccgtttcccctcctcctttggtggcttgactcctgctcttggtggccctgtccttcagtccctcctcacaaaatggtttttacttctgtggatttaataaaaacttcaccgagtcaaaaaaaaaaaaaa

SEQ ID NO: 1249 - DNA, 2357 bp, Cricetulus griseus
  modified_base (342)..(342): a, c, t, g, unknown or other
ggagtcggcggtggcggcggcaccaaggcgcccaagccttccttcgtatcgtatgtgcgccctgaggaaattcactcaaatgaaaaggaagtaacagagaaggaagtcactcttcgcttgttgccaggtgaacaactgctttgtgaagccagcacagtcctgaagtatgtgcaggaagattcctgtcagcggggcgtctatgggagactcgtctgcacagacttcaagatcgccttcttgggggatgacaactcagccttggacaacggaggtgaaactcagtttaagaataagattgtaggagaaaatgatgttccacttcactgtgtggatcagatttanggatgtttgatgaagaaaaaaaacctggccagcggagaggatcactttcaaacatcagcgacagcttttctttgccactcacccagtccaagtcatctcccaaaagaggatttttttcaaggggaagaaacagatcattttaatcaaaaaccttctaggcaagagaattagtaagcttattaactcttctgatgagttccaggacaactctcgagagttctatgacaactggcacagtaagcccatagactaccacgggttgttactgccccatatcgaggggccagaaattaaggtgtgggcccagcgctacttacgttggattccagaagcccaaatcctgggtggtggcagagtggccactatgagcaaactcttggagatggtggaggaagtgcagagcttgcaggagaaaatcaacgccaagcaccacagacaggaggctgtccacacacaggcaccgtgcctgctcaggaactctgcccgcctgtcctctttgttcccttttgcgctgctccagcgacactcctccaagcctgtcctacccaccagtggctggaaagctctgggaggtgaagatgacctggccaaacaagaagacgagtttgtggacctaggggatgtatgacttgtctcctcagggactgtgaaagaggcatgccagagggtggggcagttgttcctggactggtgttgtggtgtttgcccagtactatgtaggagaaagtggaggctcccaggaagagagctggttctcctttcattcccagtcctgaaagatgatgcaattaaagctgtgcctccagtactcataggacggagttcctgcttcacctgccataggattggagtcacttcctgacacctgtgtaacatgtacacaaatgcctcacggccaggttgctgtgaaagcttccttctcttttctgtgccaagataattatgtagccattgggaacaagagtgcctctctgcaaccccttacgttgctccctgcaccttcccccagtcatagacgctggggtaggcaggtcactttcgaatgtggctttcacagcaaagcaatcgtaagtgtcagattcgattatcacgggatgcctcagtgattcaaaagccatagaagaaattcaactctgcctggtcaccttggatctgctgttttaaatatatatattttttagggtttgaaagtatcctttgtaaggatcattccttttattctcaatggagccctgtccaacccctcaataggcaggaagctaggagagtaggagagggcaagggacctcatttgagaacatctcaaatgtttgcctttctacagttgctgttttggagagctcctattgaggctctgccactacttcccaaatactcagcagataactatttttgttaccatattgtaacgtgaatatttatacggtagcctctacagtcttatgatttcctttccaaaaatgcctcatgtgatgttttttccttcacaaggtatggtttaaaggcacaaggtcatgacccttgctatagcagttgaatgtgcattgaaatatttttctatttttttaaatcacaatagaaaaggtaagcaagctgttgtaacctgtgtggtttatgacagtttatgtatttatatttgaaaccagatttctataacttgtatttgtgtatagaactttccatgggtttatatattgtgaatttttatccaagattgagatgtggattatgcttaacattaaaagataaaataagaccatttgtttaaaatacactgtgcaagtttgggagtatatattaataacttactgtgtatagtacccggtgtttgtttatgcctccaagtttttacactgaagataaactagctttaattaaattcaaataatctaagggcataagcagttaggctgagtcagtataaatgtgcagtttattttctggtgttaatgaaggtttattctcctgtctcactgcgctgtagctgactacagagattaaagcacaacttagaa

SEQ ID NO: 1250 - DNA, 2357 bp, Cricetulus griseus
tagaaggctgagatctggcggcggcgccgtgggccgcggtgcggcgggcgggaggatgggcacccagggcagcccagtgaagagctacgattacctgctcaagttcctgctggtgggcgacagcgacgtgggcaagggcgagatcctggagagccttcaggacggcgccgccgagtccccatacgcctacagcaacggaattgactataagactaccaccattctactggacggaaggcgcgtcaagctggagctctgggatacatccggccagggcagattctgcaccatctgtcttactcgaggggtgcgcagggaatcctccttgtgtatgacatcaccaaccgttggtcctttgatggcattgaccggtggatcaaggaaatcgatgagcatgcacctggtgttccccggatcctggttggaaaccggctgcacctggccttcaagcggcaagtcccaacggagcaggcccgagcctacgcagagaagaactgcatgaccttctttgaagtcagccccctgtgcaacttcaacgtcattgagtcctttactgagctctctcgtatcgtgcttatgcggcatggcatggagaagatctggaggcccaatcgagttttcagcctgcaggacctctgctgccgtgccattgtctcctgtacccccgtgcacctcattgacaagcttccactacctgtcaccatcaagagccacctcaagtccttttccatggccaacggcatgaacgctgtcatgatgcacggccgatcctactccctggcaagtgggactgggggcagtggcagcaagggcaacagtcttaagaggtccaagtccatccgccccccccagagcccacctcagaactgttctcggagcaactgcaagatctcctagcgggacctgtgggttccgcctgttcagactcggggcttacgctggagcactcatggccaggcactaggccctgctgtgtgcaggaagacttggctacacaaccctgcctgggtctctccgggctttcctccacatctgagctagtggaggggaggggcgtgcaggagaaaacatgctccacggaccaggcagcagggctgctggtgctacggggaccaggtctgaaccaattctggactccaggctgggagtgagcctggctccccttatttatatggagaacattttacctgttttgtacatttttaaagggctgtcagggaagcctatatacccctcatagccacatcagccgttggggaagctcaggatgtcagggaaggaggaatgaagcagtgatggagggtttcagtgttgaagccagatgatgtttggatttacaaagacccttcctgggtgttgatgttgctcagaggccagtgggaaacagatgctctggcagcagacttggctgcagcgtccattctgacaaaggtggtcagtatgctagacataggcaagggttctgttcctgaggcctaggagaaaagttggttgtacctgggaaccccacttgcatccctccccattgtgccctggcactttgggtgatgtttactatatctgggcattgggcacagggcctaggacctcagtgtccagcagcttgaactcatcaactttgactgtgtttcatagctgctccttgcctattgtggcccttctgcctataagttcttgtcactggaatctctttaaactgtttcttagtgacactctctggaacatcaagccccttgttagggacccactagctggagcaacttctgaagccatggactattcctccgtaatgctcctcctaccccaatctgttctagtcagccttcacccctgtggggatgttgtccccagtggatgtcctatgtgactgcttccctgtctttgcctgttgatacagccctcaggcacgctggtgcttaactctacctcctgccctcagggctttggccatagcaggagccatgaccccttactggggtccttcttagtgcacatttcttaagaccatcttgccatgggtgttacgagggcactggtagacacagcgccggcctgctgttctgggagattaggttaatgcctgtagggacagggctgtggttgtgggaactgcctgataagcagcagcccctgggacctggcccagaggctggatacaatcaagcatcacccttccccaccagtcctgttgctgttgatagagaccttttctctgaatctctagtagaatggtgtagactttgaggacctggattggcctgcgtgcacaccatcaacactacccttgctgctgtggactccaccattcctgggttctttgttcttacttctttgtacagtaaatgtacttcagcagt

SEQ ID NO: 1251 - DNA, 2357 bp, Cricetulus griseus
actcgatggagggaaatttgataagcatgagggaagaccattcttttcatgtttcgctacagaatggaagcttcttgccttgagctggccttggaaggagaacgcctgtgtaaatcaggggactgccgtgctggcgtgtcattttttgaagctgcagttcaagttggaactgaagacctcaaaacactcagtgctatttacagccagctgggcaatgcttacttctacttacatgactatgccaaagcgttagaatatcaccaccacgatttaactcttgcaaggactattggagatcaactgggagaggctaaagccagtggcaatcttggaaacaccttaaaagtgcttgggaattttgatgaagccatagtgtgttgccagcgacacctggatatctccagagaacttaatgacaaggtgggagaagcaagagcactctacaatcttggaaatgtgtatcacgccaaagggaagagttttggttgccctggtccccaggatgtaggagagtttccagaagaagtaagaaatgccttgcaagcagctgtggatctctatgaggaaaacctgtcgttagtaactgctctaggtgaccgagcagcccaaggacgagcctttgggaatcttggcaacacacactacctccttggcaacttcagagatgcagtcatagctcacgaacagcgtctccttattgccaaagagtttggagataaagcggctgaaaggagagcatacagcaaccttggaaatgcatacatattcctgggggaattcgaaactgcctccgaatactaccggaagacactgctgctggctcggcagcttaaagacagagccgtggaagcccagtcttgctacagtcttgggaacacatacactttgcttcaggactacgagaaggccatcgattatcatctgaagcacttagcaattgctcaagagctcaaggataggattggcgaaggaagagcatgttggagtttaggaaatgcatacacagctctgggaaatcatgaccaagcaatgcattttgctgaaaagcacttggaaatttcaagagaggttggggacaaaagtggggaactgacagcgaggttgaatctctcagacctgcagatggtccttggcctgagctacagcacaaataattccatgatgtctgaaaatattgaacttgatggcagcttacatggtgcacgctccaagctgggacgaagacacagcatggaaaatatggaacttatgaagttaacaccagaaaaggtaccaaattggaacagtgaaatccttgctaaacaaaaacctctcattgccaagccctctgcaaagctgctgtttgtcaacagactgaaggggaaaaagtacaaaagcagcagtaccactaaagttcttcacgatgccagcaactccatcgaccaccatgctccaaatcctcaaaagaaaaccagtgcagaaactattggagatgaaggattctttgacttactaaggcgatttcaaagcaacaggatggatgaccaaaggtgctacttacaagaaaactgtcgcacatcgtccacagcagcttcttctactacccccaagatgatgaaagcaccgtctgttcctgtggtatcccccaacacagatgagtttttagatcttcttgccagctcacagagccgccgtctggatgaccaaagggccagtttcagtaatttgccagggctccgtctgacaaaaaacaacaatcagtctgtacttgagcacctgatgacaaatgacaagaaagagcctgatgaagacttctttgacatccttgtaaagtgtcaagggtccagattagatgatcaaagatgtgctccaccacctgccaccacaaaggggccaaccgtccctgatgaagacttttttagccttattttacgctctcaagctaaaagaatggatgaacaaagagttcttttgcagagagatccaaacagagacactgagcttggactaaaggaacttttgcaaaacaatgctttgttggaatttaagcattcaggaaagtaactagcaaaccactagaagctgtggtatagattccttgactagtgtttatgaactaggaatttaaatgaaccctacattagaattcagtcctcttactgaggtcatttttctaaggatctggttgacaatgacttttttatacttacccttgaatatagtggattgccttgcttattgaaaaataatgtaaatgtcctatgtaaaaaaaggtgaaaaatagtcataaaattctagtttctctaagaaaactatattcaatatatttttaggcaaagccagtgggagagataagaaataaactacttttagcatgc

SEQ ID NO: 1252 - DNA, 2355 bp, Cricetulus griseus
gaacagtgcgattgcaattatgggacacagcaggtcaagaacggttcaggagcctcattcccagctacatccgtgactccactgcagccgtagtagtttacgatatcacaaatgttaactcattccagcaaactacaaaatggattgatgatgtcagaacagaaagaggaagtgatgttatcatcatgttagtaggaaataaaacagatcttgctgataagaggcaagtgtcaattgaggagggagaaaggaaagccaaagagctgaacgttatgtttattgaaaccagtgcaaaaagcaggatacaatgtaaagcagcttttccgacgtgttgctgcagctttacctggaatggaaagcacacaggacagaagcagagaagacatgattgacataaaactggaaaagcctcaggagcaaccagtcagtgaaggaggctgttcctgctaatcttcccctggcatcttcaacccttctgcagaagctcactgctttggcccccatattctttcattgactgcagtgtgaatattggcttgaaccttttcccttcagtaataacgtattgcaattcatcattgctgcctgtttcgtggagatgatctattagcttcacaagcacaaaaaagtcagtgtcttcattatttatattttttaaaagccaaacaattcagcatattcgtgataactttgaggattagatacattttcttaacatttttccctttttaatgttatgataatgtactttaaaatgatgaaaatctcagcagtgtgaatgtggcttgttaaggagcagtgtgttcacagctgcatttgcctaccttttttctgtctcccagcttttcttgcctcttctcctttccttgttcataccctccccaaacaaacaagaggtggcaaacagcagtctgacaggccctttggaattatccttagttttacagataccttttgctccaggccatgagccacagtgtccaaaattatttcccagcactgatataaactacttagaccttctttgaggtcagaactcagctgttgctgtcatgatgggcagtgtttgaatgaggaaagggttctgttgtgtcttcaaagtgagtccataatgaatttactgagtgcttacaggtaaaggagcataaaacatatttctgaccagagcaagtgaccctttcacatgagcttttactagactctgggacagaagagtagtcaaatatgtcagaactgtttttcaatatttatttcatcatggagaagcaatagattcacttgggtttcttttctataaaaaaaatgctatgaagacaaggcattgtaaaaatcagtttcctttaagaatcagcagaaaaatacaatttgacgacatgaggaaaactactgtatctagtagaaataatgatatctaaagtttaccaacaaaagaaccctcgcagactagcaaatacccctctgctctggacatctgaggtcaaatttgaatatggaaataatttccttgcaagcccctagaggcagatcagagaaagcatgcattaagagggaaaggagagaatggaaataaacatgactataatgcagatttatgccttattttttagcatttttaaaatgttgggtctttcaagctgtttttgctttttattagatctatataaataagttaactagcaatttagttttgtatttaagctataattaatctttcctttggtgatatttatttctttgccttttttttaactttaaatttttaggtgttttgttgagtatttagagcttcatcaccatggcaatatgtatttcccttgaagcgttgcaaacaattatactaggagtgcacccttttaatctttactagttattgtgagattgctgtgtaagttaataaacacatttgtaaatacattgtttgcagggaaaacattgtgagttctagctcagaagaagcctgctgagtttatgttgtaagcattacttaacacagtgtaacgatgaaaagacaacaaaagtaacttcacacttcctcacctcctcattgcaacacaatccttaactgggaaaacctgactcccctctcctcttcttcctcctctcacttactctcaccttgtaatacttggagagcacttggattatggatctgaatagagaaatactttcagataatcattagcccacataccctgtaacttatactcaaagatgggatggagttgtaaagtgcttttataatacatattattgttaaaagcaaggattgactcttttcttttattttgacatggcatgtcctgaaataaatatcaattcaatatggaaaaaaaaaaaaaaaaaaaaaaaaaaaaa

SEQ ID NO: 1253 - DNA, 2355 bp, Cricetulus griseus
ggggcgggctgcccgggccatggcgcataaagcctctggccacctgcagggctactgctgctccggccactgcctgagactcaccttgctggaacgtgagcctcggcttctgtcatctctgtggcctctgtcgcttctgtcgcctgtcccccttccaggcccctgagccccgcgagcccgggccgcacacgcggacatgggcggcagcgccagggcgcgctgggtggcggtggggctgggcgtcgtggggctgctgtgcgctgtgctcggtgtggttatgatcctcgtgatgccctcgctcatcaaacagcaggtactgaagaatgtccgcatagaccccagcagcctgtcctttgcaatgtggaaggagatccctgtacccttctacttgtccgtctacttcttcgaggtggtcaatcccagcgagatcctaaagggtgagaagccagtagtgcgggagcgtggaccctatgtctacagggaattcagacataaggccaacatcaccttcaatgacaatgatactgtgtcctttgtggagcaccgcagcctccatttccagccggacaggtcccacggctctgagagtgactacattatactgcctaacattctggtcttggggggcgcagtaatgatggagagcaagtctgcaggcctgaagctgatgatgaccttggggctggccaccttgggccagcgtgcctttatgaaccgaacagttggtgagatcctgtggggctatgaggatcccttcgtgaattttatcaacaaatacttaccagacatgttccccatcaagggcaagttcggcctgtttgttgagatgaacaactcagactctgggctcttcactgtgttcacgggcgtccagaacttcagcaagatccacctggtggacagatggaatgggctcagcaaggtcaactactggcattcagagcagtgcaacatgatcaatggcacttccgggcagatgtgggcaccattcatgacaccccagtcctcgctggaattcttcagtccggaagcctgcaggtctatgaagctcacctaccatgattcaggggtgtttgaaggcatccccacctatcgcttcacagcccctaaaactttgtttgccaatgggtctgtttacccacccaatgaaggtttctgcccgtgccttgaatccggcattcaaaatgtcagcacttgcaggtttggtgcacccctgtttctgtcacaccctcacttctacaatgcagaccctgtgctatcagaagccgttctgggtctgaaccctgacccaagggagcattctttgttccttgacatccatccggtcactgggatccccatgaactgttctgtgaagttgcagataagcctctacatcaaagctgtcaagggcattgggcaaacagggaagatcgagcccgtggtcctcccattgctgtggtttgagcagagcggtgccatgggcggcgagcccctgaacacgttctacacgcagctggtgctgatgccccaggtacttcagtatgtgcagtatgtgctgctggggctgggcggcctcctgctgctggtgcccgtcatctaccagttgcgcagccaggagaaatgctttttattttggagtggtagtaaaaagggctcgcaggataaggaggccattcaggcctactctgagtctctgatgtcaccagctgccaagggcacggtgctgcaagaagccaagctgtagggtcccaaagacaccacgagcccccccaacctgatagcttggtcagaccagccatccagcccctacaccccgcttcttgaggactctctcagcggacagtccgccagtgccatggcctgagcccccagatgtcacacctgtctgcacagcacacatgcgcccaggcgtgtgcaaaatcactcagggaccagggacagacccgctgctgaaggctccagctgagtcacaggcactctcttctaagtggcctgtgagccaggctgtggggattgcaactgccaccagcccctcccatggggagctggccttgcccaggccctcgacttctcatgctgcccttgtcttcctccctcaggctaaaagctgtagtccccatggaagacagaactgtccactccgtaggggttgggtgtgcatcagcctcttgtgccaaggccaggcaagcagttccagggcctgacgggtctgcacatgtactctggagctgggtctggtccttttcctccaatctctgctatgtcacctgcaactgtcccttttttctactggaagagaaattttatcaccttttggaagaaactcatgattgaagcaataaacattttcacagatttaaaaaaaaaaaaaaa

SEQ ID NO: 1254 - DNA, 2355 bp, Cricetulus griseus
gtcctacgacgtcatggtaccatttggccctcttgccttcatgccaggaaaacttgtccacactaatgaagtcactgttttacttggggacaactggtttgcaaagtgctcagcaaagcaggctgtgggtttagttgagcaccggaaagaacatgtaagaaaaaccatagatgatttaaaaaaagtgttgaaaaattttgaatccagagttgaattcacagaagacttgcagaagatgagtgatgctgcaggtgatattgttgacataagagaagaaattaaaagtgactttgaatgtaaaggaaaacaacgaattgctcataaacctcattccaaaccaaaaacttcaaatgttttcgaagcagattttgaaaatgatgtaaaacccaaggatttgcctgctgatgaggaattatgggctcgacttgaagagctagagagacaagaagaattgcggggtgaacttgatagtaatcctgatactgtgattacaaatggcgaagacacagtgtcttccgaggaggaaaaggaagaaccaggcacaggcacgggtgtgaatgtggcgcctccggtgacagactcctctgcctctgccggctgtagcatgcatgctcgaaatgcagagctccccaatggccaagccagtagtcaagatgatgatgatgacgatgaagatgacactgaggaagatgaggatgaggatggtgatgacagtgaccacactatttcaatagataattctgtaccaacaatatatttctttcatactgttgaacctaaaagggttcgaataaacactgggaagaataccactttaaaattcagtgaaaagaaagaggaagccaaacggaaacgcaggagtggtgctgggagccatgctccccacgagctgcctgccatcaggagcccggctgacatttacagagtctttgtggatgtcgtgaatggcgagtacgtgccccggaagtccatcctcaagtctcgcagcagagacaacagtgtgtgcagtgacaccagtgagagcagtgctgcggatggggatgaccggcgctgcgtcctgaggagcctcagctgcgaggaggcctccgagggcagggggagcactttggaagaactgcaggaaaaccaccccaagaagctgttgccctcagaagcgtccgaggctttttctggaactgtaatagaaaaagagttctcattaccccccttagcaccacagtcagccattgttcatcatgtcctacccactattccagagcgaaaagaagttctgtcagaaggatctgaggaacctgcaaagagggtttcaaagttcaaagctgccagactgcagcagagaaactagagcctgcagctcaagcttcacttgaggacacacagcaaattcagcccatggagttggaaagacgtcctgctcacttggcagcaacagctctctcacctttctcagtggcatttaaaaagtcaaagtaaatgtttgaatactgtgacgttctgctggctttgttaattctctgagtactgtctatggccttaggatgcagtagcagcatttggattttcttttcaaagaatactgtcatgcgttgtttttgtgtttccaactaaacacaggcagttttgtaccagctgtgatgttgtgcttgccatatggactgtgctaaagaaattttaaattttcaaatagaatcaacaattatattacttgctttcacattttaaaggcactttaaaaaaatctacatatctcttgtaggttatacaactaggtggttcttggaaaagcttcctttgaatgtcatactgtagtgtttaaggcaagaagctgcacaaaccctatgggaaattttgactagaagaatattttgtacaacttttttttttgcaagtaaaatttttatgaaacttggtttctaaaatgttgtgaacttcctggtttagaattgtgtataaaaatgtctttgatttgtgtatatatttacttgtagccaaacgccttaaagaacacattcagtctcaggttgaccagtacagtgcaagtgtttgatcatagcttgatgcatgctaaaatgtagcttttaaaaagcattcgcattagaactaaaataagccatcaaccccagtccaccccctattcatggctaaatatttaaaggttatttatagtttctttaatgaattcttgcttaaacaaagtgaaatgatgtcctagaaaagtcaaagttgtaactagagcaatgccactgtctaagtttatgaaatatgtatattaatgataaagggatgaacttgaatccattaatggacaagcctagaacaggggactgaatttgaaagactgcctaaaagtataat

SEQ ID NO: 1255 - DNA, 2354 bp, Cricetulus griseus
  modified_base (656)..(656): a, c, t, g, unknown or other
tgtaagcaagttgaagccacttcaagatttgacttctctaactctcattgacaatccacttgcaacccttcctcattacctccaatttaccattttccatctccgttccctggaaagtttggagggtcagccggtaaccactcaggatagacaagaggctttcgagagattcagtttagaagaggtggagagactggaaaaagacctggagaagaagatggtggaaacagacgagcttaagaacaaacaaacaaaatttcttgaagaaataaaaaatcaagataaactaaataagtcattaaaagaagaggccatgttacaaaaattagaacacgaagtagaagaattgcatagaaccatccagaaacatcaacaacgaaaggacttcattgatggaaatgttgagaatcttatgactgaactagaaatagaaaagtctctgaaacgccatgaggacattgtcgatgaggttgcctgcatagagaagactcttctgaagcggcgctcggagctcagggaagctgaccaacttctggcagaggccgagcatgaactttcctgcactaaggagaagacaaagcatgctgttgaaaagtttgctgatgctgaaagaaatttattacaaattgagtcagatgctgaggcattagaaaagngagcccaggagactgcacttaaccttgtgaaagcgagctggaaacactgagaagccaggtgacaagccagcagcaggagttggctgtcctagacacacagctgaggcatagaagggaggagctgctcctactgcaggacagcctggtccaggcaaaagctgacctccaagaagccctgacactgggtgagacggaagtcgctgagaagtgcagtcacatcagggaagtaaaatcacttctggaagaactgagttttcagaaaggagaactgaatgtccacatcagtgaacagaagactcagctcgcacttataaagcaggagatggagaaggaggaagaaaatcttcagatagtttacagcagctgtcgaaacataagactgaactggaagccataaactccctacaagaggaactaggtaatacccaagaccatttgaatcaagcaaagcaggacctgctccataccacccaacgccagaatgcttgctcactgagcaggagcagctgcagaaggatatcagcaagtggattgccaggtttgagagctgccagaaagagacagagactaaagaacagcaacttcaggagcttcagaatgagatcagagagagcaagctccagctagagcagcaagaaatgatgtttcaaaaactccagaaggaaacagaaagtgaggaacagaagttagaggctggtaaagtgacactgaagcaacagcaagagcagctggagaaggaggtgacagagcagaaaaccaaactggaacagctgctcacagatgtgtcagcagctgaaggacgcctcaggaccctgcaggaagaagggcggtgcagtgagagcctggagaagttgctgtcccaggccaaacagcagctttcagaacgggaacagcagctaatagggaagtcaagtgagctgctggcccagcaggaagaggcagatgctatgagggcagatttcagcctcctgcgaaaccagttcttaacagaaaaggaaaaaggcagagaagcaggtggctggcctaaaggaagcactgaagttccaacggagccagctggagaaaaaccttctggagcaaagacaagagaatagctgcatgcagaaggaaatggccacaattgaactggtagcccaggacaaccatgagcgggccaggcgcctcatgaaggaactcaaccagatgcagcatgagtacctggagctcaagaaacagatggcaaaccagaaagatttggagagaaggcaaatggaaatcaatgatgcaatgaggacacttaagtctgaagtgaaagatgaaatcagaaccagtctgaagaatttcaaccagtttcttcctgaactcccagcagatctaacagctattttggaaagaaatgaaaacttaggagaattggaaagtttgaaagagaacttcccattcaccacaaatgagagactttttgaagaaaaatccaacttttcccaaattcacatcatggatgaacactggcgtggagaagcactccgtgaaagactgcgccaccgtgaagatcgactcaaggctcaacttcgacactgtatgtctaagcaagcagaagtgttaatcaaagggaagcggcagacagagggcaccttacacagtctgaggagacaagttgatgctttaggagaactggttactagtagctctgtagattcaacgtcaccacccagcctg

SEQ ID NO: 1256 - DNA, 2354 bp, Cricetulus griseus
ggctatgtatacagcacagggcgtgatggcacctactaccagctctttgtacatggtggccagctcccaggcccagtcctaaggcagaaggcctgtcgaggcatgaactgggtagctgggcttcgcatggtgcctgatggaagcatggtcatcttgggtttccatgccaatgaatttgtagtgtggagcccccggtcccatgagaagcttcatatggtcaactgtggtggaggacaccgctcctgggccttttctgatactgaggcagccatagcctttgcctaccttaaggatggtgatgtcatgctctatcgggctctaggtggctgcactcggccaaacgtgattctccgagagggtctgcatggccgtgaaatcacctgtgtaaagcgtgtgggcactgtaaccctaggccctgaatttgatataccctgcttggagcctcctgactacctggagcccggcagtgaggggcctggtctgattgacattgtgattacatgcagtgaggacactactgtctgtgtcctagcgcttcccacaaccacaggctcagcccacgcactcacagctgtttgtaaccatatctcttcggtgcgtgctctggcagtgtggggcattggttctccaggtggcccacaggattctcgaccaggtcttactgctcatgtagtgtctgcagggggtcgggctgagatgcactgtttcagcctcatggtcactcctgaccccagcaccccaagccgcctcacctgccatgttatgcacctttcatcccaccggctggatgagtactgggaccggcagcgcaatcggcatcggaaggtcaaggtggaccctgagaccaggtacatgtctcttgctatttgtgagtttgactccgacaagcctggctatggcccccttgtggctgcagcctgtagtgatggagcagtgaggctttttctcttgcaggactctgggcgaattctgcatctgcttgctgagactttccaccataagcggtgtgttctcaaagtccattccttcacacatgaggcacctaaccagcggcggaggctgatcctgtgcagtgcagctacagacggtagcctggccttctgggatctcaccactgcgatggaccgtggctccactaccctggagtctccagcacaccctgggcttccctacaagctgggcactccctgcttgaccgtccaggcccatagctgtggggtcaacagcctgcacaccctgcctacacctgagggccaccatcttgtggccagtggcagtgaagatgggtctctccatgtcttcattcttgctgtgaagatgccagagctggaggagactgacggggaggctaagctggtaccccagctatgcgtcctagaggaatattctgtcccctgcgcgcatgctgcccatgtgacaggcctcaagatcttaagtcccagcctcatggtctcagcctccatagaccaacggctgaccttctggcgtctggggcaaggtgagcccaccttcatgaacagcactgtgtaccatgttccggatgttgctgacatggactgctggcctgtgagccctgagtttggccaccgctgtgctcttgggggccagggactcgaggtttacaactggtatgactgagttaccacaggtggttgaagaactgagcgtggggcctgcttgtagacggtggagcagggatctgctgtctacgtatatgcccagtgtgctctgaggaatgaggcagtaccatattgacgtgcaacgcatcagtagggtgccgcataggcggaccaagaatatgcctcactctcttcagtgggataaaactatttattttggttttaagtgcccaacatctgtgaggttttgtttttttccccggttgatgattttgtaaacattcccagttactgggcccttagatgtggctcagtggagggaggcccagcagagccaagcctgtgtggaacacttcacgtaccgcccttagtagctgtaggcgggcaaacatctgaccaaagaggtgtggccgaggttcctgaaagaaaaggaaccaggcttatcctcttgtctccctgtctttatcctgtgtcccccacattccccacagacacccttttgctgtatactcacccctagaatgtgcactcggttatagtatgagctgaaatccatgctgagttgcaccaggaacttgcacacctagagacagaggttgaatcactgagttgttgtcctgttcttgtgtcataacccagaataaagaatagtgtgtgaagtgaacaaaaaaaaaaaaaaaaaaaaaaaaaaaaaaaaaaaaaaaaaaaaaaaaaaaaaaaaaaaaaaaaaaaaaa

SEQ ID NO: 1257 - DNA, 2354 bp, Cricetulus griseus
gttttgggatcattgagccttgggttgattccatcacttaacagaaagggacagaacccagagtagctctcatcatggccttgaacgttgccccagtgagagacacaaagtggctgacactggaagtctgcaggcagtaccagagaggaacgtgctctcgctctgatgaagaatgcaaattcgctccaccccccaaaagttgccaggttgaaaatggaagagtaattgcctgctttgactccctcaagggtcgctgttcaagagagaactgcaagtaccttcaccctccgacacacttaaaaacacaactagaaattaacggaggaacaacttgatccagcaaaagactgcagcggcgatgctagcccagcagatgcaatttatgtttccaggaacaccactccatcctgtgcccacttttcctgtaggtcccaccatagggacaaacacagctattagctttgctccttacttagcgcccgtcacccctggagttgggttagtcccgacagagattctacccaccacacctgtcattgttcccggaagtccaccagtcactgtcccgggctcaactgcgactcagaaacttctcaggactgataaactggaggtatgcagggagttccagcgaggaaactgtgcccggggagagacagactgccgctttgcacacccggcagacagcaccatgatcgacacaaacgacaacaccgtaaccgtttgtatggattacataaaggggcgttgcatgagggagaaatgcaaatattttcaccctcctgcacacttgcaaggccaaaatcaaagcggcgcagcaccaagccaaccaggccgcggtggccgcccaggcagccgcggctgcggccacagtcatggacttggctttccctcctggtgctcttcacccattaccaaagagacaagcacttgaaaagagcaacggcgccagcacagccttcaaccccagtgtcttgcactaccagcaggctctgaccagtgcacagttgcagcaacacacggcgtttatccctacagtacccatggtgcacagcgctacgtccgccactgtctctgcagcaacaactcctgcaacaagtgtccccttcgcagcaacagccacagccaatcagataattctgaaataatcaacagaaacgggatggaatgccaagaatctgcattgagaataactaaacattgttactgtacatactatcctgtttcctccacgatagaattgccacaaactgcatgctaaacttagttcttctggagagaccaccaccctaaggctagttccactatgtcatatatgagtattaaatatggtatgcttagtatattccagcctaagatagataactacctgagaccagctgcaatgttcaaagacacaaaggatgaggttttctttcccagggttgtaagcatagtttctgtccctaggaatattgtcttatctccgtaactatagccgatgcagaaagtacagccaatagactcatttcgactcagaatatttcaaatttagcaataaacagttagcattagtttaagtacttattccaagggcaggttcgatcctaactccaatcaccgtcatttcatttcctgactggatcaaagggtatggttcacttcttgacaagatgaacgctgcagcaaagacaagaagtgaagtaaaacagatacctgcctggcaggtctaaaatttgaatggcagttcaagcacaattgcctggggacacatcagagtgtgggattcgggttgccgtggagatgccgcactgaatcatgggattctagaataacattgcatagaattagaaaaaaaaaaattttttttttcttttgcttattcatttaaactcattgagaagacagtagacattactaaaaggtaaattatgggagtcactgaactatttttgtagactaattgttgtaactgtctttttttcctttcatttcatgatttttattttaaaaattattaacacatagatattttcagccctttaataatggagcatcaaaaacatcacctgtatcccccagcaaatagagatgactgtattttttactatgatatccattttccagaattgtgattataatatgcagagagtcaaatatgccatttacaataaggaggaggcaaggcaaatgcatagatgtacaaatatatgtacaacagattttgcttattatttatttataatgtaattttatagaataattctgggatttgagaggatctaaaactatttttctgtataaatattatttgccaaaagtttgtttatattcagaagtctgactatgatgaataaatcttaaatgctttgttt

SEQ ID NO: 1258 - DNA, 2354 bp, Cricetulus griseus
gatgaggatttaactgaagcagttcattctttgggagtaaatgatattttggagataaaattttttgaaaatcgggcaaatggacaatcaaagggatttgcccttgttggtgttggatctgaagcatcatccaaaaagttaatggatctgctgcctaaaagagagcttcatggtcagaatcctgtcgtgactccttgcaataagcagttcctgagtcagtttgagatgcagtccaggaaaactacacaatcaggacagatgtctggggaaggtaaagctggtcctccaggaggcagttcacgtgcagcatttccacaaggtggtagaggacggggccgtttcccaggggctgttcccggtggggacagatttcctgggccagcaggaccaggagggccacctccacctttcccagctggacagactccaccacgtccacctttgggccccccaggcccacctggtccaccaggtcctccacctcctggtcaggtcttgccgccacctctagcaggacctcccaatcgaggagaccgccctccaccaccagttctttttcctggacaaccttttgggcaacctccgttgggtccacttcctcctgggcctccacctccagttccaggctacggccctcctcctggtccaccgcctccacagcagggaccacctccacctccaggccccttcccacctcgaccaccaggtccacttgggcctccccttacacttgctcctcctccacatcttccgggaccacctccaggtgccccaccaccagctccacatgtgaatccggctttttttcctccaccaactaatagtggcatgccaacatcagatagtcgaggtcccccaccaacagacccatatggccgacctccaccatatgataggggtgactatggtcctcctgggagggaaatggatactgcaagaacacctttgagtgaagctgagtttgaagaaatcatgaatagaaatcgggccatctcaagtagtgctatttcaagagctgtgtctgatgctagtgctggtgattatgggagtgctattgaaacattggtaacagcaatttctttaattaaacaatccaaagtatctgcagatgatcgttgcaaagttcttattagttctttgcaagattgccttcatggaattgagtccaagtcctatggctctggatcaagacgtgaacgatcaagagaaagggaccatagtagatcacgggaaaagagtcggcgtcataaatctcggagtagagatcgccatgatgattattacagagagagaagcagagagcgagagagacacagggatcgggatcgggaccgagaccgggagcgcgaccgagagcgagaataccgtcatcgttagaagctgaaggaagaggaacaccttccaagacaaacagtcttcatgggggaaaagtgacgcttgtccagcagtttgcttcttgtgattgaactgaacctgtaaggattcatggataaactgaacaggaatagatctgaataaagcaaatctgcataaatggtaaccagtagctctacttttattttttatgttgcttaattgttttatttgaaggaaacctgtgtgatttaaaaagttgatagcttttgcaactttattactggttatatatatttggccattataatgtgcaagcaattggaaaaacttcaagtaaatgcttgtttttatagtagtttgttcttgttaaaatgttcatatgataatgtctgtaaacagcaccactttgattacaatagatgtagtgttgtaataaactgttgaatggggctgatgtgtaaagctgttcaagttatttgatgtttacacctcagggaaagtcttgtgtgcagcaatatctaaagataatgttactatgacaacatttttactgtcctttaaaaagcattgcaatagggtgtttggatatgcatcaatctaatcttgcgttcagtgaattaaacataaccaattaagtgtctcgcccttgattttgatattaggataggtgattacatggatatttaatatttctatattctgcttttctagctgtttttacctagttagcttgtgaatttgctgaatggtatgtaaacttgtaaaaactgaaatttggcagatatagcgattcagtcaatgttttaggggtgaaaaatttgaggttgtaacatttttggtaaagactcatgtatttgctacagtagtgcagctcaattacaccccagatatgctgagatggttaattgtgaactgctagcatttaagagagagttgataattctgatttgacacagttaatttactgtttcatgctgatggtgccatagacagtgtaa

SEQ ID NO: 1259 - DNA, 2353 bp, Cricetulus griseus
cggacgttgagagaacgaggaggtaaggagagaaaatggcgtccacggattacagtacctacagccaagctgcagcccagcagggctacagtgcttacaccgcccagccaactcaaggatatgcgcagaccacccaggcatatgggcaacaaagctatggaacctatggacagcctactgatgtcagctatacccaggctcaaaccactgccacctatgggcagacagcatatgcaacttcttatggacagcctcccactggttataccactccaactgccccccaggcgtacagccagcctgtccaaggatatggcactggtgcttatgacaccaccactgctacagtcaccacaacccaggcctcttatgcagctcagtccgcatatggcacccagcctgcctacccagcctatggccagcagccagcagccactgcacctacaagaccacaggatggtaacaagcccgctgagactagtcaacctcaatctagcacggggggttataaccagcccagcctaggatatggacagagtaactacagttacccccaggtacctgggagctaccccatgcagccagtcaccgcgcctccatcctatcctcctaccagctactcctcttcacagccgactagttacgatcagagcagttactctcagcagaacacctatggacagccgagcagctatggacagcagagtagctatggtcaacaaagcagctatggacagcagcctcccactagttacccccctcagactggatcctacaaccaggctccaagtcaatatagtcaacagagcagcagctacgggcagcagagttcattccgacaggaccaccccagtagcatgggtgtttatgggcaggagtctggaggattttccggaccaggagagaaccggagcatgagtggccctgataaccggggcaggggaagagggggatttgatcgtggaggcatgagcagaggtgggcggggaggaggacgcggtggaatgggcgctggagagcgaggtggcttcaataagcctggtggacccatggatgaaggaccagatcttgatctaggccttcctatagatcctgatgaagattctgacaacagtgcaatttatgtgcaaggtttaaatgacaatgtaactttggatgatctggcagacttctttaagcagtgtggggttgtcaagatgaacaagagaactgggcaacccatgatccacatctatctggataaggagacaggaaagcctaaaggtgatgcaacagtgtcctatgaagatccaccaactgccaaggctgctgtggaatggtttgatggaaaagattttcaaggaagcaaacttaaagtttctcttgcccgaaagaagcctccaatgaacagcatgcggggtggcatgccacctcgagagggcagagggatgccaccaccacttcgtggaggtcctggtggcccaggtggtcctggaggacccatgggacgcatgggaggccgtggaggagacagaggaggcttccccccacggggaccccgaggctcccgagggaacccctctggaggaggaaatgtccagcaccgagctggagactggcagtgtcccaatccgggctgtggaaaccagaacttcgcctggagaacagaatgcaaccagtgtaaggcccctaagcctgagggcttcctcccgccacccttcccacctccgggtggtgatcgaggccgaggtggccctggtggcatgcggggaggaagaggtgggcttatggaccgtggtggtcctggaggaatgttccgaggtggccgaggtggagacagaggtggcttccgaggtggccgtggaatggaccgaggtggctttggtggaggaagacgaggtggtcctgggggccctcctggaccattgatggaacagatgggaggaagaagaggcggacgtggaggacctgggaaaatggataaaggcgagcaccgtcaggaacgtagagaccggccctactagacagacccgcagagctgcattgacgaccagatttatttttaaaccagaaaatgttttaaatttataattccatatttataatgttggccacaacattatgattattccttgtctgtactttagtattttcaccatttgtgaagaaacattaaaacaagttaaatggtagtgtgctgagttttttttttttttttttcctttttaaagtatggttgttttaagacttaacaatgggaaccccttgtgagcatgctcagtatcattgtggagaaccaagagggcctctaattgtaacaatgttcatggttgtgatttttttttttaaataaaattccaaatgtttataaact

SEQ ID NO: 1260 - DNA, 2353 bp, Cricetulus griseus
ccagagaagcagggaagctatggtcctctgctcccactgccacctctgggagcacacaagggggctgggtaccaagctggtgggctgggcagcccctacctgaggcagcaggcatcccagaccccttacctgccccctgttggaatagacacttattcttactcctctgcacccctcccagcaccctcaccaggactcaagctggaaccccctcttgctccaaggtgcccgctggactttgtcccccaaaatttgggtttccttatgccagggatgacctctctctctatgggcatccccagggcttgggggagcaccaccttcccattcccagaacagtgtgcaacctgtgccacagcccagtgccttccagcgagcactgcacccctgtgccaaagagcgccagtctgttccacagaaaggtgccaggcctcccagctctccaccaatgcctgtgattgacaatgtttttagttctggccccctaccgggactacctggatgtgcagacacctgagcccacagctgagcaggactctgctccaaccaccaataagagccaagacaaagattgcaaggggaccctgcctgtccaggatgggacctctaggcctcactgctctcttcgtgaggaggtggctctggacttgagtgtgaagaagtctatggcagaggctgtccctgtcaaggtccctagtcctgaggtacatggtaagcccactgaagctgtggataggccagatatggaaaacccagtgtcaggtctgccaggcctaaaaagatggtcacagaaatatctgaagtggccacagaagcctcaccaaggaccaacttccacagctctgtggccttcatgttccgaaagttcaagatcctccgtcctgcacccttagctgccgctattgtcccatccccacctaccccccaaccccccatcagtgcccatgggactacagattctcactcagcctttgccggtggcatgcttcaacctggccctaccaagcccaccagccatagctgtggcctccccggccccagcctctgctccaactccatcaccagctccagcccctgctccagcctcaggccctgctccagtcactgctcaagtttccactgcagcctcagcagactccctagaacagcactttacagggctgcacacgtcactctgtgatgccatctcgggctccgtggcccactctccacctgagaaactgcgtgagtggcttgagacaactgggccatggggccgggctgcatggcaggacggccagggtgtgcaggggctactaggcaagctgctgtcccagctgcagaggtttttgtgcacacagcaatgccccttccctcatgtagtacgagctggtgccatctttgtgcccatccatctggtgaaggagcgtctctttccaaagttgccacctgcctctgtggaccacgtactgcaagagcaccgtgtagagctacggcccaccactctgtcagaggagcgtgcacttcgtgaacgtgctttacatggctgcacctcacgcatgctaaagctgctggcactgcgccagctgcctgatatctaccctgacctgctgggcctgcagtggcatgactgtgtacgccgccagctgggtggttttaacactgaggccagaactttatccccatcagaatccacagtgaccagagatgagccagaaagccaagccctggctcgtaagtcaccaacccccaaggtcaagaagccagggaggaagccaccgacacctggccctgagaaagcagagaggaccactggggaagggtcacgtgatccctcgtctagctctggtgccagcactagcccaccaggtcctaccctgagggcacgcttccgcagcctgttggaaaccgcctggctcaatggtgtggcactgcctacttggggccacaaggcctcaggaccagaccggccttcgcctcacccccagctcctgggcagccagagccatcacctttagcatcggtaccgtgtcctgggcaaacacttcacctctcatgagcccttgttccccatttgtagaataagacaacacagcctacctcacaagggttgttgtggggatgatgtctgatacacctattacgatttggtctgcttgcccaggacaggcctttgacctcaatcaggctgtgggataaccagacggaggctgggactggggactctggtatttcccaaggtttttagggcaacctccctgtagtggggctgagctcagctggtggctggcaagctgtggctcctgccttatttaagggttttgatgagactgggccctgggggccagctattaaagcatttgggttgtttttg

SEQ ID NO: 1261 - DNA, 2353 bp, Cricetulus griseus
  modified_base (759)..(759): a, c, t, g, unknown or other
ccctgcaggacattgcctccaggtgtacagccaatgaccttaagtgcatcatccggctgatcaagcatgatctgaagatgaactcgggtgcaaagcatgtgttagatgcccttgaccccaatgcttatgaagccttcaaagcctcgcgaaacctgcaggatgtggtggagcgagtccttcacaatgagcaggaggtgaagtaccaaggccagcgacggactctgagcgttcaggcctcactgatgactcctgtgcagcccatgctggctgaggcctgcaagtccatcgagtatgcaatgaagaagtatcccaatggcatgttctctgagatcaagtacgatggtgagcgagtccaggtgcataagaagggggaccacttcagctacttcagccgcagtctcaagcctgtcctgcctcacaaggtggcccactttaaggactacatccccaaagcctttcctgggggtcagagcatgatcttggactccgaagtgctcctgattgacaacaacactggcaaaccactgccctttgggactctgggagtgcacaagaaagctgccttccaggatgctaatgtttgcctgtttgtttttgatttgtatctactttaatgatgtcagcttgatggacaggcctctctgtgagagaaggaagcttcttcacgacaacatggttgaaatccagaaccggatcatgttctcagaaatgaagcaagtcacaaaagcctccgacctggctgacatgataaaccgggtnatccgagagggcttaggaaggggatgtccatcttcctcatgggctgctatgaccctgacagccagaagtggtgcactgtcaccaaatgtgctggaggccacgatgatgccacacttgcccgactgcagaaggagctagatatggtgaagatcagcaaggatcccagcaagatacctagctggctgaagatcaacaagatctactatcctgacttcattgtttcagacccaaagaaagctgctgtgtgggagatcacaggggcagaattttccaaatctgaggctcacactgctgatgggatctccatccgatttcctcgatgcactcgaatccgggacgacaaggactggaaatctgccactaacctccccaactcaaggaactataccagctgtccaaagaaaaggcagacttcgatgtagtggctggagatgaggggaattccagtaccggaggtagcaatggtgagaatgagggcactgctgggtctgctgcaccccacaaggcccccccatgaaaccaggagacaagctggctatgaagtcttctccagtgaaagtaggggtgaagaggaaagctgctgatgaaacccaagtgcccgacaaaggtactgttggatgtcttcactggggtgcggctctacttgcctccttccacaccagacttcaaacagctcaaacgctactttgtggcattcgatggagacctggtacaagaatttgacatggcctccgccacacatgtgctgggtaacagggacgacaacactgaggcccagctggtctctccagagtggatttgggcatgtatccggaaacggaggctgatagctccctgctaggactttggtcttgcttgctctttgagctgtcctcacgttcctactctacttctacatgaggctcagcctggatggtaggggctgttcgctaagcagtgcaccttcttacaccctccaactcttcatggtcccttatggatcaggagttttcttttccacttagctcttgaaggtccttttccagtgggacagtgtaaataactcacatggtgcttcccatttgctcttgagaatcgtccttacgctagcttcacttctagtcagtccctcaatttctcccatacacacttgtgattgaaggcagtcacagcatgcagcaagggggccttggctgagaccaggcggcccaagcatctccaagagtggaatgtaatccctgaagagcaatagctctgtgcatgtggcctgatgcttgcctcactggtactgtgaggcctctggcatcgtccccacaccagatgggacaggcatctgtatttaaactttattacaaaattataaagcagagctctgtaacaaaaaatacacatttgggtttgctttttaacacccaggtgagaaaaatcttaatataagccacttggagcaacacattcacatccaaaagattttaacaaatttgtacaatatagactattaattctttacagcttattagtttagaaccagctattccaaccgataaaccagctgtctgtctttaaactaagtatgaactggtatataatcaaaaaaaaaaaaaaaaaaagttaa

SEQ ID NO: 1262 - DNA, 2352 bp, Cricetulus griseus
gggaaattcctgcccaggttaaaaagtctggaatggaaaagagtgctcagacatcactggattcccaggaggaggcaacagggattctgccagtgggaaaacaaaatcagtgtttggaatgtaactttaatgaatctctggaaataaatttagaaagctcagcagtaaactgtaaaataatggcacaatgtgaagaggaaatcaatgatttttgcagttgcaaagcaggttgtcagttccctgcttgtgaagataatccagtgtcttcaggacaactggaagagtttcctgtactgaacactgacaaatgccaagggagagaatggtatagaagaatatccagatgctaaagagacacccagtcgtgaagagcgtctgttagattttaatagggtgtcttctgtttatgaagcaagatgtacaggagagagaggttctgaggcaaaaccaaatggcctccacaggaagatgtgttccagcgccagctctgacacgggtgacacaggctccgaagccggcggagagtggggtgggcccccaacacagaggagctcttctcccgaacacatctctgaccctgcagagtagtaccagtcattgaaaatgctgtgatggaaattgccttctgtgagggaagtagactagactgtgctgtccagtgaggaatgggtgtgcatgtgcttgtcctagcgcgtcccgcttctgcatcgcagctgcaggccttcctctggcggcagtgtcgccatcaccttgtcagcactgtggctacaaccgccaccgtccagagactctagctctgttctctgagccaggagatcagtcctcccctgcagtgggtcagggccttgctgaaggaggagggaagcatggtgactcatctgcaggctcattcagaagatctcatggacattgctgtaggaacacaagggtgtgctttagagacttacagaatactgtgctctctcttaggattcccctaaagtaccatggaagatactgtggcttgtgactttcttgctagctgaagaagccaaggatttgaggcatggggtggatggggtaagttctgaactgaagtctccaaatgaacttaaaaacatttgacatgcagtgaggccacctcatcaccccaaagaaatctttggctgctgcagctagctgctcttgtggctgtgatgtagtatagcttgtatctcattttgtgttttgagagaatgttctgggcaagttctgcttgtggtgggctggggtgggtagaggaatttcccacatacctgtgtgattgctgttctgattatcgcctcatgtgacttggtgaagcaggcagaaggcacacctctcaaagatgcagctaagggcactcatcacctctttgagctctctcttgcagcactgccacagacactaagagggccaattgtgcaaagcctaaacatccaaaattatttttctcttttaaccaacttgtttttttaaaaacacctcgtctgtgacatgagttgagcatgtccagaatatcaggaatggctgagaggtctgaagtagccaagctggcctcaccagtaaggtgggctggcttgctggctgggggcatcttgccaccttagggtttgttttcatacagcacatcttctgacactttatagtgacttgtgtgtgcgtgtgtgcatgtggaaggtttcatgttgctcttatttatttacagacatcagataagttttatgtatttctttcttctggagcttcctaaaatttgattaacatctgcactgaaatatagcctatcatcaaaggtaaaaagaattgaaagttgtaaattcccaaaatcaatgcagtcataattaccctagaaattgttgctctgaccaaatggatttcataccgtgaacttggatgacctggacagccaatgtttgtcaggaaagggctccaggtagcaaagacacctacctcctcagctgtggggagaggccccccacaggggatgcggtggtcataaaaggcaaagggataaatagattctgtatttggtttcttttgtagttaaatggctgaagctcagaggctttggcgcagaattgaagtgtggtttttaatttcgtgaatggatgatcacaaaaaaagcattaaaaaaaaagttaggcaaacgctgaaacgcactgtggtatgaagcgcgttgcatatccgtagcactgaagtatcagctccattcctgggctgagtattttttccgtggttgtattgttctgatttcacgtacaccagagtaactgtatttttttttttgttttgttttgttttcttgttggtagttaacaccaaaataaaaaattacaaaaatagaaaaaaaaa

SEQ ID NO: 1263 - DNA, 2351 bp, Cricetulus griseus
  modified_base (2112)..(2112): a, c, t, g, unknown or other
  modified_base (2202)..(2202): a, c, t, g, unknown or other
ctgaaatgtatcgaagaatgtcgtggaaccctggaatggttcctggaacgataatttagtggacaccagccctctgaagaaagatcctctccaggacatttgcaagagatacatggaagatctgaaaaagatctgttttcacagggacttaaattcaaagaccaccttgaaatttgtgcatacctcctttcatggagttggacatgactatgtgcaattggcttttcaagtatttggttttaagcctccaattccggtcccagaacagaaagatccagatccagagttctctactgttaaatgtccaaaccctgaagaaggggaatctgtgctggaactctctctgagattggcagagaaagagaatgcccggatagtgctagccacagatcctgatgcagaccggctggcagtggcagaacttcaggagaacggccattggaaagtttttacagggaatgagttggcagctttgtttggatggtggatgtttgattgctggaaagaaaacaaatcaaatgctgatgtgaagaacgtgtacatgctagccaccactgtctcttctaaaaattttaaaggcgattgcacttaaagaaggatttcattttgaggaaactattaccaggctttaaatggattggaagtaggataaaagatctcctagggcatgggaaagaagtcctttttgcatttgaagagtctattggttttctgtgtggaacctcagtgttggataaagatggagtgagtgccgctgttgttgttgctgagatggccttttgctatcttgcacgtacgggacataaccactggatatgacagcagccagcccaataagaatcagtactgcctgtgagtaaaacagccaaatgattaccgaacaagtgggacagaaccaaagataaagtattacgcagagatgtgtgcatcacctggccagagtgacactgccttactggaagaagaattaaagaagctcattgacgctctgatagagaattttcttgagcccagtaagaacccttttctttcctctgttcagctggttaaatagactatatacatttgaaatgaaaatgtttggagggataggagtcaaatgttttcataatcttaaatgacagtcagtcattacagtgaaagtgttaacagcggcacgccattcctcctatatctgaaacaatacaaaagtgagttttcttattaaactgtggttaagcttagttacatatcttgtaattgtgtatagcatggtttaaaagaagaaacattatataactatagggttagttaaggaaattaattcttaaagatgtgtgtgtttgctgtgggtactgttcctaaggaaggaaggaaggagagacaaggaaggaaggaaggaaggaaggaaaaaatgtttcaggtgcccttgttgtgatgtatatttactgtatgtatttaagactggtatttactgaacataaaacaatagtggcagcactcctagtggctttgttcttgtcacatttctcagtgcattctcaggggtctggtgtgaactaaacagtgttcctgcattggatataattttatcggtccgttttcagatggctaagcgaaatcttgcaagctacataggtgcttcctctatagaaaaggtttgttggcgctaaaaaaggttgtagaaaaaaataaataggaaaatgtcagaaaggaacacaagtttatcatatgccctaaattcccagctccagcctagtttcccacctgcaattgttgctttttcctggaagggcacacagtgaccttattataataaatacacattctaggatattctctgcctttctgacctatacttccaaagtattcatggctggttaattgacctgcaatgactatgttacccttgaaccttacaatattgtctgatgtattagccagttgattctgtttagttcactgacactccttaacacacctgtcagctgcctgagagcaaaggtcatgctttatcatttttaatatctactctgtttaattcagcatctcctcttacgcagtatttaactggtgataataaatattaggatgtatcgtgtgttattagagtcactcaggcaaaaaaagggngggtatctgcagctatatatggtgagaccttgttatcggctacaataagctcttggtgtatgtacatcattgaatatgacaggtaaaacncaataagaatggattaaattctgatagtagctcagaatcatgcctttgtttaacagtttctgtcaacatcccatcttccctgaaaatagtgggcatattgttagcctgtgagaatttgcactttatgtatttgattgtggtatttctgt

SEQ ID NO: 1264 - DNA, 2350 bp, Cricetulus griseus
cttccatggaataatttgtaggataatgtatgatatattccctttcaagaagctggtgaatttcattgtgagtgactccggggcacatgttctgaattcttggactcaagaagaccagaacttacaggagctcatggcagcactggctactgtgggcccccctaaccctcgggcagaccctgagtgctgcagcattctgcatgggcttgtcgcagccgtggagaccctgtgcaaaatcactgagtaccaacatgaggctcgaacgttactcatggagaatgcagagcgagttgggaatagaggacgaatcatctgtattacaaatgcaaaaagtgatagtcatgtacgcatgcttgaagactgtgtccaagaaacaattcatgagcataacaagcttgctgcaaattcagatcatctcatgcagattcaaaaatgtgagttggtcttgattcacacctacccggttggtgaagatagccttgtgtctgaccgtcctaaaaaagaactctcccccgttttgaccagtgaagtccacagtgtccgagctgggcggcacctcgctaccaagctgaatgttctggtgcagcagcattttgacttggcctcgaccaccatcaccaacattcccatgaaggaagagcagcacgccaacacatccgccaactacgacgtggagctacttcaccacaaagacgcgcacgtagatttcctcagaagtggtgatacccactcaggtggcagcagtagagaaggtccatttaaagagacggtaaccctgaagtggtgcacacccaggaccaacagcatcgaactacactattgcactggagcatatcgaatttcaccagtagatgtaaatagtagaccttcttcctgcctcactaattttcttctcaatggtcgctctgtgttgttggagcagccgagaaagtcaggttccaaagtcatcagccacatgctcagcagccatggaggagagatctttctgcatgtcctcagcagctctcgatccattctagaagatccgccttccatcagtgaaggctgtggaggaagagtgacagactaccggattacagattttggtgaatttatgagggaaaacaggttaactccttttctagaccccagatataaaatggatgcaagtctagagatcccgctggaacgtgcaaaggaccagttagaaaagcacactcgttactggcccatgattatttcacaaaccaccattttcaacatgcaagcggtagttccattagccagtgttattgtgaaagagtctttgacagaagaagacgtgctaaactgtcaaaagacgatatacaacttggttgatatggaaaggaaaaatgacccccttcctatttctacagttggtaccagaggaaagggccctaaaagagacgagcagtaccgcatcatgtggaacgagttagaaacgcttgtcagagcccatgtcagcaactccgagaagcatcagagggtcctggagtgtctgatggcgtgtcggagcaaaccccccgaagaagaggagcggaagaagcgagggaggaagagggaggacagggaggacaagtcggagcaggcggcgaaggagcatgggccggagaagccgcggccagactcagacaggttgaaaggtattttagaacgagggaaagaagagttggccgaagcagaggttataaaggactcacctgattccccagaaccaccaaacaaaaagccccttgttgaaatggatgagacgccacacatggaaaagtctaaagggccaatgtccttattatccttgtggagtaacagaatcaacactgccaattccagaaagcaccaggagtttgctggacgtctgaactctgtcaataacagagctgagttatatcaacaccttaaggaggaaaatggtgaggaggttggactgactggaggaccccgaacttcaatccctttcttaaagtgctcacactctcctgttgtgaatgggatggagacaacagaaaatggaaaagccagccgtcagtgaagagtgactggagaaactaagtttagtatattgcaaaaatattttgggcagaatttgatataagtacttttacagcaagattatatagctatgttgcctggacttgtttttacatttgtaaagaatttcaacaaattatcttttttgtactaattctaagattggcagagtcaaaatatatacatttgagatttgtcctcccaaatcacaatttattttatggtaaaaggtgttccctctggaaatgttttttaaaaaattcttaggctcctctttgccaaataaaactattaaaatgtatgaaatgcaaaaaaaaaaaaa

SEQ ID NO: 1265 - DNA, 2350 bp, Cricetulus griseus
tctgaagagaatgaggaaccctcatccgaagactctcgaaactttgtagataagctcaacgagcacatgatggagagtgtgctcatctctgactctcccaacaacagtgagggtgatgtgggggaccttggctgcctgcaggatgttgtggagccaccaggaggtgttgctgatggcaggatgcccagtgccacgaacaaggaagcaggggacaccttgagtaatggcagcgaaaccgatggagacgacacgcccagagacgtttcagacatgacacctgatagcagagcatctctcaaagaagactcaacgcaggaagatgtgactggcatgcctgcactggagaactctggcacagaggacgcagggcctggtaatggccaagctcacccagaagaacggacctcagaagtgtcgtccagtcagtcctcctcaaaagatgagcctgtacctgtctgcaccatcttcagccaggccacctctgctccctcccagccacacttgtttctgcaggacggctttgagtcgcagatggtaaagtctccgagtttcagtagcaccagtgagacgtcagccaagacccctcctccgatggtccagcccagtcccagcctaagtacattttttggagacacaatgagctccaattccttggcctctgacttttttgaggttccccagttccagaaaagctctcttcactcactgcccctgtgggagaaaagtcgccagataccaccagcccatcttactctacaaggatggaacgatcagaatcaggtgtttccccagcacctctggacgtccctgagtctccaaagccattctcacagatccaggctgtgtttgccgggagtgacgaccccttcgccacagccctgagcatgagcgagatggaccggaggaatgatgcatggcttcccagccaagagaccagagaggtcctgatgaaggtagcgacccagcaatatggcactgtgttcatagacaaggagaacctcaccatgcctggcctcaagtttgacaacatccagggagatgcagttaaggacttgatgcttcgcttcctgggtgagaaggctgcagcaagaagagaagtcttaaccgccagctcggttgaacagtctttcgtggggctgaagcaactcattagctgccggaactggagggcggcggtcgacctgtgtggacgcctgctcacagcccacggacaaggctatggcaagagtgggctgcccaccaaccacacaacagactccttgcagctctggtttgtgagactggcattgctggtgaagttgggccttttccagaatgctgaggtggaatttgaaccctttggaaatctggaccagccagacctatattatgaatactacccacacgtgtacccgggacgcagaggctccatggtccccttttcgatgcgcattctgcatgcagaactgcagcagtatctggggaacccacaggactccttggaccgactacatagggtcaagaccgtctgcagcaagatcctggcaaacttggagcaaggcttagcagaagatggcggcctgagcagcgtcacccaggagagcaggcaagcctccatccagctgtggaggtcacgtctgggccgtgtgctgtattccatggcaaactgtctgctcctgatgaaggactacgtgctggctgtagatgcttaccgcgcagttatcaagtactacccagagcaggagccacagctactgagtggtattggccgcatcctcctccagattggagacataaaaacagccgaaaaatattttcaagacgttgagaaagtaacgaagaagttggatggactgcagggtaaaataatggtcttaatgaacagagcctttctgtaccttggccagaataactttgcagacgctcacaagttcttcacagagattttgaggatggaccccacaaacgcagtggccaacaacaacgccgctgtgtgtctgctttacctgggcaagctcaaggactccctgcggcagctggaggccatggtgcagcaggaccccaggcactacctgcatgagagcgtgctcttcaacctgaccaccatgtatgagctggagtcctcaaggagcatgcagaagaagcagggcctgctcgaggctgtcgccagcaaagaaggggacagcttcaacacacagtgcctcaagctggcctagttcccgccaggtatctgcaccctgcagacacttgagcagggggatcaggaaacgcgtttgacaggcgtataggagcatgccttgagctggggccactctcagacccgctgccctgcctgccatgcagtccccacagcactgcctgttggtgaagg

SEQ ID NO: 1266 - DNA, 2350 bp, Cricetulus griseus
tcccaggccctgctcggggcctgcttgctttgagagacagtgggatcctctttgatgttgtcctggtggtagaggggagacacattgaggctcatcgaattctgctggctgcatcatgtgattatttcagaggaatgtttgctgggggattgaaggagatggagcaggaggaggtcctgatccatggtgtgtcttacaatgccatgtgccaaatcctgcatttcatatacacgtctgaactagagctcagcctgagcaatgtgcaggagaccctggttgctgcctgccaacttcagatcccagaaattatccacttctgctgtgacttcctcatgtcctgggtggatgaggagaacatccttgatgtctaccggctggcagaggtctttgacctgaaccgactgacccaacagcctggatacctacatcctcaaaaactttgtggccttctcgagaactgacaagtaccgccagcttcccttggaaaaggtctactctctcctcagcagcaatcgcctggaggtttcctgtgagactgaagtgtatgaaggggccctgctctactattactccctggagcaggtgcaggctgaccagatctcactgaatgagcctcccaagctcctagagactgtacgttttcccttgatggaagttgatgtccttcagcagctgcatgacaagcttgatcctagcccactgagggacaccgtggccagtgcccttatgtatcaccagaatgagagcctgcagcccagccttcagggcccacagacagagcttcgctcagacttccagtgtgttgtgggctttggaggcattcactccacaccatctacaatcctcagtgaccaggccaagtatctgaatcccctattgggagagtggaaacacttcactgcctctctggctccccgaatgtccaaccagggcattgcggtgctcaacaacttcgtgtacttgattggaggggacaataatgtccaaggcttccgagctgagtcccgatgctggaggtatgacccgaggcacaatcgctggttccagatccagtccttgcagcaggaacatgcagatctgtgtgtgtgtgtcgtgggcaagtacatctatgctgtggcaggccgtgactaccacaatgacctgagtgctgtggaacgctatgatcctgccaccaactcctgggattatgtggccccactcaagaaggaggtatatgcccatgcaggcaccacactgcaggggaagatgtacattacctgtggtcgcagaggagaggactacctgaaagagacgcactgctacgacccagaaagcaacacatggcatactctggctgacgggcctgtgcgacgtgcctggcatggcatggctgctctcctcgacaagctgtttgtgattggaggcagcaacaatgatgctggctacaggagggatgtgcaccaggtggcttgctacagctgcacatctcggcagtggtcaatggtctgcccactcccagctgggcatggcgaacctggtattgctgttctagacaacaggatatatgtgctgggtggccgttctcacaaccgaggcagccgcatgggctacgtgcacatctacgacatagagaaagactgctgggaagaggggcctcagctgaacaattccatctcaggccttgcagcctgtgtgctcaccctaccccgctccctgctctgtgagccaccccgagggacccccaaccgtagccaggcagatgcagatgttgcctctgaagtgatgagcgtgtcggactgggaggagtttgacaactctagtgaggactagggatctcatgcctagtgtttaggagtgggtaactgggacagtgaaagccatagggcctgggttcctggttcaccagctgccctttttcactctgtttcttcagccagcctgctgccagcattttcaaactctatggctatgagttatattacaaggaaaagctctccagaaaggctgctatcatctgagggagtgaccaggcccatcctctgtgaactttgaagggctggtatctctatttggcctcttcttcctcttagtctggtctctgatgggttaagtaaggtccctcctgcaagaggtcctggggctagcagtcctagccgtggccaaagttcatgagttccttcttcctgtgacccacatggtctggtgagcagctccagctgcctgcagccagggccttgagcagctggcgagctctcaagggacaggggaaactatatacctggaactggtcccagagatgatgagatacccccatagctgtgtgtttctaatccaattttgttgaaaatgaaataaaacattatataaaagg

SEQ ID NO: 1267 - DNA, 2349 bp, Cricetulus griseus
cagctcatctggtctggccacggtgctgcagcccttacagcccttgacaggacgacccgggaagcctgccctgagctggactacttcgtggccttctcctctgtaagctgtggacgtggcaatgctggccaaaccaactatggcttcgccaactctgccatggagcgtatatgcgagcagcgtcggcatgatggcctcccaggccttgccgtgcagtggggtgctattggtgatgtgggcattgttctggaagccatgggcaccaatgacacggtcatcggtggcacgctaccacagcgcatcgcctcttgcatggaggtgctggacctcttcctcaatcagccttatgcagtcctgagtagctttgtgctggctgagaagaaagctgtggcccaaggtgatggtgaagcccagagggatctggtgaaggccgtggcacacatcctaggcatccgggacctggcaggtgttaatctggacagctcactggcagacctcggcctggactccctcatgggtgtagaagtgcgccagatcctggagcatgagcatgatctggtgctgcccatgcgcgaggtgcgacagctcacacttcggaagctagaggaactctcctccaaggcgggctcagctagtgagacgacagcccccaagtccaagaatgacacagccttgaagcagacccagctgaacctcagcaccctgctggtgaacccagagggccccacccttacacgactgaactcagttcagagctctgagcggcctctgttcctggtgcaccccatcgaaggctccaccactgttttccacagcctggccgccaagctcagtgtgcccacctacggtctgcagtgcacccaagccgcgcctctggacagcattccggacctggctgcctactacattgactgcatcaaacaggtgcagcctgaggggccctaccgagtggcggggtactcctttggagcctgcgtagccttcgagatgtgctctcagttacaggcccagcagggcccaacccccacccacaacagcctcttcttgtttgacggctcacatacctatgtactagcctacacccagagctatcgagcaaggatgaccccaggctgtgaggccgaggctgaggctgaggccatatgctacttcataaagcagttcactgatgcagagcacaacaaggtgctagaggccctgctatcactgaaaagcctggaggaccgggtgactgctgccgtggacctcatcaccaaaagccaccacagcctggaccgccgtgagctgagctttgccgctctgtccttctaccaaaagcttcgagccgctgaccagtataaacccaaggccaagtaccatggcaacgtgacactgttgcgtgccaagacaggtggtacttacggtgaggacctgggcgctgattacaacctctctcaggtgtgcgatggaaaggtgtctgtgcacatcattgagggcgaccaccgcacgctgttggagggcagtggcctggagtctatcatcaacatcatccacagctccctggctgagcctcgagtgagtgtacgggagggctagacctgccagccgtgaagccacgctccacacccaccaccagagatgctccaattcctaccatactctaaatgcagggactggggagggtcctgctggtgggaccccctgctcccagtggcccagcaccaccccctcccttggtggctgctagaaacaggactatcacacgtgtcccagccacttagcggggttctcagagccactgacttggagacaccatggtctgtgaagagtcagtggaggccggccggagccaaactgagccttttctgccacgtggcctttgccatgctggtcatttctccattaaattctcatatttattgcattgctgggaaagaccccccaaggctcattctagaaccctttaaaatggcagaagctgtgtggggcaagtgtctgggaaaatttccagactcactgtagacaggctgctggctagagcccctttttattctggcctggccctgcccacgacagggcggggtatggagagggctggttccccggaatgaggaccccagcagacactgtagcccatggcccttggtccccagcacccccggctgcacccatgatgcagggccaacctgaccctgcggacagcaccggaaactgactgtattttttccaagaacaaattgctgcttgggttttgaatttactgcagctgtcagtgtaaagaaccatgtctggactgatttttacaccaacctggtaaaaatgctgctcttgatgctgttcccttcccacaattaaactgcatgtgagcga

SEQ ID NO: 1268 - DNA, 2348 bp, Cricetulus griseus
ctgaataaggccaacacttatgcagaacaacattttgcagatgtcgtacttagtgaagagtttctcaacctcggcattgagcaagtgtgcagcttaatctcaagtgacaaacttaccatatcctcagaagagaaggtatttgaagcagtaatagcctgggtaaaccatgataaggatgtaaggcaggagttcatggctcggctcatggaacacgtccggctacccttgcttccacgggagtacttagtacagagagttgaagaggaagccttggtgaagaatagcagtgcgtgcaaagattacctcattgaagccatgaagtaccatttgctgccaacagagcagcgcatgttaatgaagagcgtgcgaacccggctgaggacacctatgaaccttcccaaattgatggtggtagtcgggggccaagcaccgaaggccatccggagtgtggaatgctacgacttcaaagaggaacgatggcaccaagtagcagagctgccttccaggaggtgcagagcagggatggtctatatggctgggcttgtctttgctgttggtggttttaatggttccctaagagtccgaactgttgattcctatgacccggtgaaagaccagtggaccagcgttgcaaacatgcgagaccgaagaagcacgctgggggcagccgttctaaatggattgttatatgcagtggggggctttgatggcagcacaggtttatcgtctgtggaagcgtacaacataaagtctaatgagtggtttcatgttgctccgatgaacacgaggaggagcagtgtgggtgtgggcgttgttggaggtctgctctatgctgtggggggttacgatggggcctcacgccagtgtcttagcacagtagaatgctataacgctactgcaaatgagtggacctacatagcagagatgagcaccaggcgtagtggagcaggtgttggagtcctaaacaacttattatatgctgtaggaggtcatgatggtcctttagtacggaaaagcgttgaagtatatgaccccaccaccaacgcctggagacaggttgcagatatgaacatgtgcagaagaaatgcaggtgtttgtgcagttaacggtctgttatatgttgttggaggagatgacggttcctgtaacttggcgtcggtagagtattataaccccacaacagataaatggacagttgtgtcctcttgtatgagcacggggagaagctatgcaggggtcacagttattgataaaccattatgagcctggaggatgatttcagagtgtctatacatgagaaactgccgttgacaagtatttctgaagagactgagagcctagcgcttctccacttgtagctgcactttacgtctcagagaagacaagaccatctgcctttagaggcctcggatactgaagattatttttggtagaagcaccgtgtaggctttctctgcaccgagcagcagctgactgacttaacaagagacctagactacagtccctactctgtggtatttgggcagcagtcgctttcataaaaaccagttcttatcagcctcgaatgactacggattattttgtgaaagagaataaagttaacatgtgtccttgtaaaattaagttttatctttattcttcctcctgaaaaatctctactgggaacagaaaaatcttttgacagattaaaatctatgtaagtatacaacatagttgggggatgaaactgtctgcttttataaatatctttgattacatgaatataataaatggtgtgcatataaatgtgtgtctatatgctttcctttaaatatgtttgaaaagatgtttgaaacttgattatctatttataattggcacagtactttgaattatgccagtactacattgtaaaacagagttgtattttttgatatttaacaatgcttaacactttaaaatgccacttctgaggaatgaacacggtgttaacacactttaatatgtgtgatgccaaacttttttaaataaaatataaattatgcttatttattattttctttagtttcatcttggtcatgttttggtgtgtgtttttaattttttttcttaaagtaacacctttggcatgaacatccctgcaggtttttgatgaatataatgaatgtatggaattcaactgaatttgcatggtcttaagaattttttctgtgtgtataaatttagctgctattaatgaaagagaaagctttctgtgagtaaccatgtgtattgagcagatagtttttctgagatcttctattaatctctttaaagatgaccaacatgtgtctttcttgaattatctttgaataaaagtttgtatatta

SEQ ID NO: 1269 - DNA, 2347 bp, Cricetulus griseus
cgagagaggcacttgaagaaggtgggtggagatgcctgcctcctccgaggagcggacccaggcagccccggccttctgccccccagggttctgaatccgagccaggcattctcatcctgccaccctgggctccctcccgagagctgggagaaaccaaagccacctatggcctctgctgagggaccagcagtgccatccccatcaccacagagggagaaactggagcgttttaaacggatgtgccagctgctggagcgggtgcctgatacctcctcgtcctcctcggactcagactctgacactcatctggcacatcacttagtgaggatgaagctccgggggaggctcgcaagtgggcggcggccagcccggggcaggctctggcgagaaggagaaccggtggggggcggcgggctgggggaccgactgctcagctggcccctgggccctgccccaccacccacggcctccacagttggagcggcacgtggtacggcccccgcctcgaagccctgagcctgacactctgcctttggctgctggatccgaccaccccctgcctcgggctgcctggcttcgtgtcttccagcacctgggaccccgagagctgtgtgtctgcatgcgagtctgccggacttggagccgctggtgctacgacaagcgtctgtggcctaggatggacctaagccgaaggaagtcactgaccccacccatgcttagtggagttgttcgccgccagccccgtgctctggacctcagctggacaggtgtctccaaaaagcagctcatgtggcttctgaaccgactgcaaggcctgcaggagttggtgctttccgggtgctcctggctctctgtctctgccctgggctcggccccactgccggcacttcggctcttggacctccgctggattgaagatgtcaaagactcccagcttcgtgagctgctgctgcctccaccagacactaaaccagggcaaacggagagcagaggttcggctgcagggtgtggcagaacttcgcctggcaggcctggagctcactgatgcctctctgaggctcctactgcgccatgctccccagctcagtgccctggacttgagtcactgcgcccatgttggggacccgagtgtccacctcctcacagctcccacttccccctctccgagagacactggtgcacctcaatctcgctggatgcccaccgcctcacggaccactgccttccactgttccgtcgctgcccccgtcttcgccgcctggacctacgctcctgccgccagctctcacctgaagcttgtgcccggttggcagctgctgggccacctggcccctttcgctgcccagaagagaaactacttctcaaggacagctagttggatgcctatgctccgttcccctgtacctctcgccttcatttcaccccgtgggaggccaggttatttttcttcatgacttggcactcctctaagtgtaatgacttgagattcctgcccagtgacttgagcccagcctcccccttctcccacacctgcactgatatctcccggggcctttgcttcccctctctcccttccacctgcttcattgtccatccccttgggggaatgggtcaagaggtactggggaggtgctgagccaaagggacggtgggaggggcggtgagagtgcaagtctcaagcagggaagagtgagggaagtgatatcttgtacacaggatactgggagtgcggaagggtgggtgtggggagggcagaaagccgaccaacaagggttcagggaacaaaaaccagttgggtgggatggggggccaaaaagggaaaccagaggagcaattggggaatccatgaatcagatagggggctctagaagccaagacatgccaggactgggggctgggagaggagcagatgtggagatagtaagtaccctctctggggttacccctctccccttccttccacccagatttcagttctttcccccacccagactccttgaacgtcactgaaaatggcagctattgcaaggagtagggccacgggtctacctgttgtccagctcgtggtccaggggagtggtgaggggtagcccagacccctgcctggctctctacacaatacttgaacattcatctgtactgaagtgttacttgaaccgggggaacctcggacctgggggattgtggtgtgaggggaccggcttgaccaagactgggctagtgggtacccagtttggaccgtcccacccccaactctctctgtcttgaacagctccacccctctgacccgagttgggggtgggggatgtcagcttaaagatgggcaagatagggaaaaaaaaaaaaa

SEQ ID NO: 1270 - DNA, 2347 bp, Cricetulus griseus
aatgaatgcacctccgggcaaaactactgccaccaatccacccattgcgtcaacaagctgggcacctatgcttgcatctgtcgccaaggctggaaacctgttcttggatcccccaatggcccaaccaacacaatgtgtgaagatattgatgagtgcagctctgggcagcatcagtgtcacagctccaccatttgtgataacaccccaggctcctacaagtgccgctgccgtccaggttggaagccaacttctgggtccctcaatggcccaaagaacactaagtgccaagagccatccttcccgacatggacactgctgcccacagcccagagccaaagtctttctcgcttctccattgaagtccggaatctgctcaaagactttgatctagccacggccaaccacaccattcagaaagtcattgaggccatggacaagctgcagttgctcaagtacatggaacaaacccttcggaccttggcccagttcttacccaaaggctccttcacctacacgtcgccctcaaacactgaactgtcgttgatgatcaaggagcaagacaacaaagatatcaccacagtgtaccatagccaagcttgggtgaaactggactgggctgtggcagctggagccaaaagctcagaaaacggccactccttggcaggcatcctgtccagtccaaacatgcagaagttgctaactgatgcctccatgcacctgaaccagagccgggatatattggaggagcgcttcgaaagcccacttctaaatgtttcacttacgctcctctcaaacatcaattccatcttctgaccaacaccgacactaggaaacttgcctcgaacgtcacattcaacttcgccacgtgaagacctgatatgtgccttcttggacactggtgacgatgggaatgggcactggtccactgacggctgctcaatgaacggcactatctgccactgcaaccacctgagcagctttgccatcctgatggcccagtaccacgtgcaggatccgagactggaattgatcaccaaggtggggctgtcactttcgctcatctgcctgctgctgtgtatcctgaccttcctgctggtgaaacccatcccagagctctcgaaccgtggtgcacctgcacctgtgcatctgccttttcctgggctctgtcatattcctggtgggcatcgagaatgaagggggtgaggtgagcctgcgatgccgcctggtggcaatgatgttacactacttcttcttggcagccttctgctggatggccctggaaggtatagagctctacttccttgtagtgcgcgtgttccagggccaaggactgagtacacaatggcgctgcctgttcggctatggggtacccttcctcatcgtggctatctcagcagctgccaaaatggatggatatgggcaacaaacatactgctggttgaaccataaggagggctttctttggagctttgtgggacccttggccttcatcattttttgtaactctgccatttttgtggttactgtctggaagctcacaatgaaattttctgaaatcaacccaaacatgaagcaattaaggaaggcacgggtgctgaccatcacagccattgcccagctcactgtgctgggctgtacctgggtcttcggcctgtttctcttcaacccccacagcacatggctgtcctacatcttcaccttgctcaactgcctgcagggcctcttcctctacttgatgctctgcctgctcaataagaaggtgagggaagagtaccgaaagtgggcctgcatggttgctggcaacaagtactcagagttcagctcttccacaacaggcactggcaccagccagagtcacacacgggctctcaggccctcagaatcagggatatgaaggcaagttccagccaggtcaccagcatacactcaaggctgtcactctgtcttctgttcctggcaatgagccctgtaacagggtaaaggggccactggtcctgcttctggttgcctctctgccccatcacagctactgcctaccacagaaacagaagccagccagcaccaccttagcccactgccctggtacatgaaacaggcagtcctggggacagatgcaggtcccttgaccttggcacataagaggccagggtgctgggttcaatttctttaagcgaagactgatgctatgtcagccatcaatgatcttgcctgctgccaaagctcacggtacagaggcccagctgccccacatccagggaggaagggtctcactgttataaaggttttatgttttgtaatattttttaaacctgtaaacctctcaatgttgacacataaaattaaatat

SEQ ID NO: 1271 - DNA, 2347 bp, Cricetulus griseus
cgcggagaaaatggcggcaggggtcgaagcggcggccgaagtggcagcgacagagcccaaaatggaggaagagagcggcgcgccctgcgtgccgagcggcaacggagctccaggcccgaagggtgaaggagaacgaccaactcagaatgagaagaggaaggagaaaaacataaaaagaggaggcaatcgctttgagccatataccaatccaaccaaaagatacagagccttcattaccaacataccttttgatgtgaaatggcagtcccttaaagacctggttaaagaaaaagttggtgaggtaacatacgtggagctcttaatggacgctgaaggaaagtcaaggggatgtgctgttgttgaattcaagatggaagagagcatgaaaaaagctgctgaagttttaaacaagcatagtctgagtggaagaccactgaaagtcaaagaagatcctgatggtgaacatgcaaggagagcaatgcaaaaggctggaagacttggaagcacagtatttgtagcaaatctggattataaagttggctggaagaaactgaaggaagtatttagtatggctggtgtggtggtccgagcagacattctggaagataaagatgggaaaagtcgtggaataggcactgtgactttcgaacagtccattgaagctgtccaagctatatctatgtttaatggccagctgctgtttgatagaccaatgcacgtcaaaatggatgagagggccttaccaaagggagattttttccctcctgaacgaccacagcaacttccccatggacttggtggtattggcatggggttaggacctggaggacagcctattgatgccaaccaccttaacaaaggcattggaatgggaaacctagggcctgcaggaatgggaatggaaggcataggatttggaataaataaaattggaggcatggaaggaccctttggtggtggtatggaaaacatggggcgatttggatctgggatgaacatgggcagaataaatgaaatcctaagtaatgcactgaagagaggagagatcattgcaaagcagggaggaggtggagctggaggcagtgtcccagggatcgagaggatgggccctggcattgaccgcattggcggtgctggcatggagcgcatgggcgcaggcctaggccatggcatggatcgagtgggctctgagattgagcgtatgggcctggtcatggaccgcatgggctcagtagagcgcatgggctctggcatcgaccgcatgggcccaataggtcttgaccacatggcctccagtattgagcgcatgggccagaccatggagcgcattggctctggcgtggagcgcatgggtgccggcatgggcttcggcctggagcgcatggccgcgcccattgaccgagtgggccaaaccattgagcgcatgggctctggtgtagagcgtatgggccctgccattgagcgtatgggcctgagcatggatcgcatggtgcccacaggcatgggggccggcctggagcgcatgggccctgtgatggatcgtatggccactggcctggagcgcatgggcgccaacaacctggagcgcatgggcctggagcgcatgggagccaacagtctggagcgcatgggcctggagcgaatgggcgccaacagtctggagcgtatgggcccggccatgggcccagcattgggcgctggcattgagcgaatgggcctggccatgggtagcgctggaggtgctagctttgacagagccattgagatggagcggggcaactttggaggaagcttcgcaggttcctttggcggagctggaggccatgcacctggagtagccaggaaggcctgccagatatttgtgagaaatctcccatttgattttacatggaagatgctaaaggacaaattcaacgaatgtggccacgtgctgtacgccgacatcaagatggagaacggaaagtccaaggggtgcggtgtggttaaatttgagtctccagaggtggctgagagagcctgccggatgatgaatggcatgaagctgagtggccgagagattgatgttcgaatcgatagaaatgcttaagcagttgccttttttaaacatcaataccagacctctgaatttgtattttttcttgttaaccattttaatttgttggctggatgtataaagatgtttaaaaaattcagttgctttttggggtaatttgaattaattttttaatgagtggggttccatttgattgtttgcattgagattgcaatgtgcgcaattttttttgtagttgtggcatcttgttgacatcgaatatgactttgataataaataccagttgctgaaagt

SEQ ID NO: 1272 - DNA, 2346 bp, Cricetulus griseus
tgtgggagggcttaaggaagtaaaatggcggacctggcgaacgaagaaaagcctgctgttgcaccatccgtctttgtgttccagaaggacaaaggacagaagaggtctgctggcagctccagcccagaagccggagaagattctgaccatgaggatggaaactactgccctcctgtcaagcgtgagcggacatcctctctaacacacgcagaggagaagagcagcggcttccggctgaagcccccaacgctcatccatggccaggcgcccagtgcaggtctgcccagccagaagcccagggaacaacagcgtggtgttctccgcccggctgtgctgcaggccccacagcccaaggtgctgtcacagacggtccccagcagtggcaccaatggggtcagtgtgccagcagactgcacaggaccagccacgtccgcatcaccagaaaacctcacacagaagagccccctctgaacctcctgatgggacaaacatacttgaggagaaagtacttcagaaaactccacatggcacctcagaggaggggcactgtgaagaggagcaggtggcgccacaggcctttgtgtttggacagaacttgagggacagagtgaagttaatgaatgagaatgccgatgtggcaggtgtagacagcgctgcatatcccagctcagagacgcccaccgcaaccaactactttctgcagtacatcagctccggtgcagacaactcgacccacagtgctgacacctccaacaagtttgtgtttggccagaacatgagcgagcgcgtcttgagcccccccaagctgaatgaagccagttcagatgccagcagggagactacgcatacccagtcagggtctgagccatcgtcccaggaggctgcccccaagaaagagtcactggccgagtcagccgctgcctacaccaaggctacagcctggacatgtttgctagagaaggtggaggtcataacaggggaagaggcagaaagcaacgtgctgcagatccaatgtaagctgttcgtgtttgacaagacctcacagtcatgggtggagcgtggccggggacttctccggctcaatgacatggcttcaactgacgatggcacgttacagtcccgactggtgatgcggacccagggcagcttgcggctcatcctgaacacaaagctgtgggcacagatgcagatggacaaggccagcgaaaagagcatccgcatcaccgccacggacgccgaggaccagggtgtcaaggtcttttgatttcggccagctccaaggacactggccaactgtacgcagcattgcaccaccgcatactggccctgcgtagtcgggctgagcaggaacaggaggccaaggcacctgcacctgagccaggagccccacgggccaccgaggaggaagacagtgatgaggatgcagtgctgactccctcaggggtcacgggagctggcacaggtgatgaaggggatggccagacacctgggagcacatagcagcggagccgctgagccaggctgctgctttgtcgtctgtccgatgcccgtccctccctgcaggccacatcatggtggtgtctattgccggggtggccgcaggctggatccacgtgtcccctctgcagcagatggggatgccaggatgcggcttgggactcagacctcatcatattgatgagcagaaagaacatttcccgccctcctccgatcgaaacggcacattgacacttgtcacagcttcccctgggcagtgacagttcgaactctgggctcagtgttctgttgagcaacctgctgtctgctcggcttcccgctctaccgggtccacatgactaatgcctcttgttcatttctgatggcttggcttttgagggcctggatgaagctgcttgtgggttgagctgacttgatgcccctgtgggcagcgtccggcccccacggtgactccctaggtttgggcctgagaacacctgtctggaagaaggtgacgcgcccaggagggttcctgtgctgttgctcacctgctctctaagcaggtccccagtgcagcacagcccttaggtgattgaccatctagggcccctgagaggcaaagggagcctgcaaagggcctgtcattgggcggaagatgacacccccacccatggactgtgtggctccatctctggctaggccacacccggggagccagcaaggacaccagaggctgcctggcagatgggtcacactgcttccagccttagccagccagtgacaagtgactccagacattgcccatgtgttttggaacatttatgtaagattgaaatgtatttgagaactgcattaaaacttttaacaaaa

SEQ ID NO: 1273 - DNA, 2346 bp, Cricetulus griseus
cggcggccgggtgctggtggtggggcgcggggcggcatcggctgcgagctgctcaagaacctggtgctcaccggcttctcgcacatcgacctgattgatctggacaccatcgatgtcagcaacctcaacaggcagttcctgtttcaaaaagaagcacgtgggaagatcgaaggcccaggttgccaaagaaaagtgtgctccagttccacccccaggctaacatccaggctcaccatgacagcatcatgaacccagactataacgtggaatttttttttttcgacagtttatattggttatgaacgcgttagataacagagctgcccgaaaccatgtaaatagaatgtgtctggcagctgacgtgcctctcattgaaagtggaactgctggttatcttggacaagtgaccactatcaagaagggtgtgactgagtgttacgaatgtcatcctaagccaacgcagaggacatttcctggctgcacgatccggaacacaccttctgaaccaattcactgcatcgtctgggcaaagtatttgttcaaccagctgtttggagaggaagatgctgatcaagaagtgtctcctgacagggccgacccggaagctgcctgggagccaactgaagttgaagccagagccagagcggctaatgaagacggagacattaagcgtatctccactaaggaatgggcgaagtcaaccggatatgacccagttaaacttttcaccaagctttttaaagatgatattaggtacctgctgacaatggacaaactctggcgcaagaggaaacctccagttcccctggactgggctgaagtgcagagtcaaggagaagccaatgcatctgatcaacaaaaccaggcccagttgggtttgaaggaccagcaggttctggatgtaaagagctatgcaagtctgttttccaagagcatcgagaccctgagggtccatttagcagaaaagggggatggcgctgagctcatctgggacaaggacgacccaccagcaatggacttcgtcacttcggctgctaacctcaggatgcacattttcagcatgaatatgaagagcaggtttgatataaaatcaatggcggggaatatcattcctgctatcgctaccaccaatgcagtgatcgccggcttgatcgtgttggaaggtttgaagattctgtcaggaaaaatagaccagtgtagaaccatttttttgaataaacagccaaacccaaggaagaagctcttagtgccctgcgcactggaccctcccaacagcaactgttacgtttgtgctagcaagccagaggtgaccgtgcggctgaatgtccacaaggtgactgtcctcaccttacaggataagatagtgaaagagaagttcgctatggtggcaccggatgtccaaatagaagatgggaaaggaacgatcctgatatcttcagaagagggagagacagaagctaataaccccaagaagttgtctgattttggaattagaaatggcagccggcttcaagcagatgacttccttcaagactacactttactgatcaacattcttcatagcgaagatctaggaaaggatgttgaatttgaggttgttggtgatgccccagaaaaagtgggtcccaaacaagctgaagatgctgccaaaagcatcaccaatggcagtgacgatggtgcccaaccttcaacctccacagcacaagagcaagatgatgtgctcatagttgattccgacgaagaagggccttcaaacagcgctgacggcagcgaggacgacagagcccgcaagcggaaactggaagagactgagggagccagtgccaagaggtcccgcttggaacaagccgaagatcttgatgacgtcatagcgttagactgagccgactgagccgcccttgccctggtcagaaccaaaggttttgtcctttctgtcgggcgtgcatgctgccttcctgtaaatagccttagctgtcattgcctagtgggaacctgtggggtaggaacgctgagacctgggtataaatattatgcctttatttttggctggagaagagttatttttagcctagatctaaccattttcatactcttacctgaaagatcacataagtgtcaagtgctatgcattgaaacttgtttttaaatgttacctggcactgtatattaatgtaaaacaatgttaatttactcaaattttcagtttgtactgcctggtatgtctgtgtaagaagccaatttttgtgtatttgttacagtttcaggttatttatatttgatgttttgtaaactcaaacaacaaatatactgtacttatggaccaaataaatggcgtctgcatacttg

SEQ ID NO: 1274 - DNA, 2346 bp, Cricetulus griseus
tactcgtcctcagacccggtgacggtgctgaatgcgaacacggtgcgctcgactgtgctgcgctccaatggcgcctgggcggtggagttcttcgcctcctggtgtggccactgtatcgccttcgccccgacgtggaaggagctagcctacgacgtgagggaatggaggccagtactgaatcttgctgtcctggactgtgctgaggaaaccaatactgctgtctgcagagacttcaacatcagtggcttcccaactgtgaggttttttaaggccttctccaagaatggttctggaataacattgccagtggctgatgctagcgtggagacactacgtaggaagctcattgatgctctggagtcccacagtgacatgtggtcctcatccaggccaaagctgaagcctgccaagctggtggagatcaatgaattctttgcagaaactaatgaagattacctggtcctgatctttgaagacaaagactcctatgtgggtagagaggtaactctggacctgttccagcaccatataccagtgcacagggtcttgaatacagagagaaatgcggtgagcaagtttggagtcgttgaatttccatcgtgctacctgctgtttcggaatggctctttctcccgagtgcctgtggtgatggagtccaggcttttctatacatcctacctgaagggaatgtctggaccaatcctggtggatcccccaaccacaaccataagcccagtcactactgatgtagtacccacagtgtggaaggttgcaaaccacgccaggatctacatggccgacctggaatcctcactacattacatctttctcgtagaagtgggaaagttctcagttctggaaggacagcgcctactggccctgaaaaaacttgtggcggtattggccaagtacttccctggtcggcctttggcccaaaacttcctgcactccatacatgactggctccagaggcagcagagaaagaagatcccctacaaattcttcagagctgctctggacaacaggaaggagggcattgttcttactgagaaggtgaactgggttggctgccagggcagtaagccacatttccggggctttccctgctccctgtggatcctcttccacttcctgactgtgcaggcaagtcggtacagtgaaaaccacccacaagagccagctgatggccaggaagtcctccaagccatgcggagctatgttcagtggttctttggttgtcgagactgtgctgaacattttgagaatatggctgcttccaccatgcaccgggtgagaagtcccaccagtgcagttctctggctctggactagccacaacaaggttaatgctcgcctctcaggtgctcctagtgaggacccctacttccccaaggtgcagtggcctctccgtgaactgtgtttcgattgccataatgaaatcaatggacgtgagcctgtgtgggacctagaagccacctacaggtttctcaaggctcacttctcctcagaaaacatcatcctagacactcctgcagggcagggccctcctgagcatatggaagagccgcagaggggttacacagggggcatactcaggggcagcaacacttgagcaagagagacactgaggtcttaacgctgcctgaggtgaaccacctccaaggccctttagagctaaggcgagggggccgaagtcccaagcagctagtcaacataccctgaaggggagccggaggccccagctatacggggtcaaggcccatggttacaggttctgggcagggggttttcccacctggacattagcctctgtgtggggctctactctgtatccttcgtgtgcttactagccatgtacacctactttcgggccaggctgaggaccccgaagggtcatctagtcacccaatagcctgaagagcccaggaagaggacaggaaatggaactgcctagcttaggagagtagcaagtccaagaaagccagttgttgcagtgaacccattgagtctgctgtgaaaggttccctagacaagacagaaacaggctcccagtgccatctaaccagcagggggcaggggcagcctaaagcaggggttggggggttcgtgggaggctcagaccctggcttcagcactacattcctgttttggcagcatatgtgaagtcctgccccatttccgctgaagtctcaatgtttcctgcttggccttggccttaaattgaggtagacaagtccagagtttccatccatgaagagaggatcctgggctgggtgggctggagtggacctcctcactgcattctgaggcttcctccttccctccctctcaacatgaagaaaatgca

SEQ ID NO: 1275 - DNA, 2346 bp, Cricetulus griseus
cttgcttcgaaaattaaagaggttcaggggcgaccacagaaaacacagaataccattatcttggagtctcatgtcatctgctgcacactgagcacaagtggtggtttgctgcttgagtctgcttttcgaggacaagggggtgtcccctttagttgcgtcattgtggatgaggctggacagtcttgtgaagttgagacactttctccacttattcatcgctgcaacaaacttatcctagtaggagacccgaaacagctccctcccacagtcatttctatgaaagcacaggagtatggctatgaccaatcaatgatggcacgattctgcaagctgcttgaagagaatgtggagcagaacatgattggcaggctgccgattttacagcttaccattcagtacaggatccagacatatgtctcttcccttctaattatgtttataacaaaaacttgaaaacaaatagaatgactgaaaccattcggtgttcatcagagtggccatttcagccctacctggtgtttgatgttggagatggttcagaacgacgggataatgactcatacataaatgttcaagaaataaagttggtgatggaaataattaaacttattaaagacaaaagaaaagatatttcctcccgaaatattggcataataactcattacaaggctcagaagacgatgatccagaaggatttggagaaagaatttgataagaaagggcctgcagaagtggatacagtggatgccttccagggccggcaaaaagctgtataattgttacctgtgtcagggctagtgctgtgcaaggttcaattggattcctggcaagcttgcaaagattgaatgtcaccattacacgagccaaagtacagcctttttatccttggacatttgaggactctgatggaaaaccaacattggtatgaactgattcaggatgctcaaagcgtgggccattattaagacctgtgacccaaactatagacatgatgcaaatgaaaattactgaaactgaagcctgtgctacagaggagtctgacccatcctccagccactgccccaagaggcaccgagacctcagggtggcttgcccagcaacaaactggacagtggacttgccaagacatcttttgctgcttctctgtaccatacaccctctgatgctgtcactaaggaacctgaaaggccacctcttcaagaccgacttcgagatccacgactgcttaggagattggatgctgaagccaagggaacactcctgaaaaatgcacagcctctgaactcccagctccctgggctagtccatctcctgggagagtctggcattcctttgtttttacacgacctgagttttattgtgccaccatccactgccatcgttgcccctatgaacagccataggtctcctcttcaggctgagccaccaccggctcaccctgctgctccttccaccagtaagaggaagtacagtgaccgagactctgggttcagtcatagaagggaatccagggacttcagtgaagaggaaagacgtggctctgtgactcatcacatgctgaggagtactgactggaacaggagaaggctggaacaggaggacagcagtgctaagaagagacggtttctatagtagctcctggcagtgagactgtcatcctcaggtagctagtgacaccatacacatcagctgggttttagttttgtttcccttgaagagtctgagttaaaggatgaaaataccttctaacccttaggctattggtcatcttcagtactttttgccaattgtatacacttggagagggcatttgtttacctgtaatgtctgtgaggtcaaaattcaaaacattgggatcttttgttatcctcctttccagcaaccaagccttgccttagaatcctctctcagcggattgtaagtgtgtgtcgttagatttggaaaccttatttattccagttagtaaaggtatttgcagaaagcatttgctgtgtcaggtggccttttcctgaaggcactgtcatgagtagttaatcctgacaaaatgaaaagttcactttgtcttttctgtggttaaaagaacatgccctgactactttcaaaatgttatttcaaggctaatgtattataccttacctgtctcactttgcttctctcttatttaccacagtttgttcagttatgttttcatgaattatcaggagcaaatttgaacaagaacatgtgaataatctcctgtaaatgagttttataacaagagtgtactaaactattttctaaaattacttgtgcacattgggaatctttctgtagctttgtgttttgtatgctctggattcataactg

SEQ ID NO: 1276 - DNA, 2345 bp, Cricetulus griseus
cacctccacgcctgccctgcttgggcttgtggctgacaggctggaagccctcgagtcgcagcctcctggtgagctagagaggaccacaggggtagccatctccgtgctttcaacctggctggcctctcaccctgaggattttggctctgaggtcaagggtcagcttgaccggcttgagagcttcttgcttcggacagggtatgcagcacaggagggtgttgggggggcagtgctgacctcatccgaaacctccgggcccgggtagatccccgggccccaaccttcctaagcccctggcccttcctggcgattcccctgctgaccccacggatgtcctggtgttcctcgctgaccacttggccgaacagctgaccctgctagatgcggagctgtttctcaatctgatcccctctcagtgtctgggaggcctgtggggtcacagagaccggccaggacattctcacctctgcccatctgtccgagcgactgtcacacagttcaacaaggtggcaggggcagtagtcagctccgtgctgggggccacctcaattggagaggggccaggtgaggtgaccgtgaggccactccgacccccgcagagggcccggctcttggagaagtggatccgtgtggcggaggagtgccgtctgcttcggaacttctcctcagtctatgctgtcgtgtcggccctgcagtccagccctgtccacaggcttcgggcagcctgggggaagcagccagggacagcctcagagtcttttccagcctgtgccagattttctcagaggaggacaattattctcagagcagagagctcctcacgcaggaagtgaagctgcagccccctgcagagccacactccaagaaagccccaaggtctggctccaggggtgggggtgtggttccatacctagggaccttcctgaaggatctcgtgatgctggatgcagcctccaaggatgagttggagaacggctacattaattttgacaagcggaggaaggagtttgctgtcctttcggagctgctgcgcctccagaacgaatgtcgtggctatgacctccgacctgaccccgatatccaacaatggctccagggcctccagccattaactgaagctcagagtcaccgtgtgtcctgtgacgtggaaccacctggtaccagtgactctccggctgcacggatgcttcggccgacgctagtggtctcacagtggacagaagttctgggctctgttggaggccccacccctcttgtgtcctgggatcggcccagtgttggagatgaggcacccggaacccccgcgcctctgctgacccggctggcccagcacatgaagtggccgtccgtctcatctctggactctgccctggaaagcagcccctccttgcacggtgctgctggccctagccacctgtctcctccagcctcctcccctaggccttcccgaggtcaccgccgttcagcgtcctgtggatctccactgagcgggggcacaggagagggggcctctaggagtgctggatatgggggaggggtatccggaccagagtcctctgattgccgaattatccgagtccagatggagctgggagaagacggcagcgtctacaagagcatcttggtgacaagccaggacaaggctcccagtgtcattagccgtgtccttaagaaaaacaatcgtgactctgcagtggcttcagagtttgagctggtacagctgctgcccggggagcgagagctaaccatcccgccctccgctaacgtcttctatgctatggatggctcatctcacgatttcctcctacggcagcgcagaaggacctctgttgccacgccaggggcccacaccggcccctctgcctcaggaactcccccaagcgagggaggagggggctcctttcccaggattaaggccacagggaggaagattgcacgggccctgttctgaggatgaagtcctgttggtttacagaaatcacagcactcacaccaggtgtgagcagccaccagtggtagccatcactccagggcagaaagcccgaaaggtggccagcagctccgggccagccaagtgccatttgtttaccaaaccacctcgaaagccaaccccgtgggactggtggtcatatagccacattggatccctgcatatggcttccacctctggggaatgtggcgtaccgtcagtgttgagaagagtgctagctcctgccacatgctagcctgtgaagggccaaggaaaggcccagaggctctgagcccagggcagaggacaatgacaagacgttctgtcactgtgacaacactataataaaccaaaacactacctgaaaaaaaaaaaa

SEQ ID NO: 1277 - DNA, 2344 bp, Cricetulus griseus
cggcgagcggcgccgagaacggctctgaggtggccgcgccaaccgcgggcctggcgggctccaccgacgtcgccacgggggcggcgggcgagcgcacgccccgaaagaaggagcctccgcgggcctcgccgcccgggggcctggccgagcctcccggatccgccgggccccaggcggggcccacggccgggcccggctccgcgacgcccatggagacgggaatagccgagacccccgagggccgacggaccagccggcgcaagcgggcgaagctctcaggaagcagcctgtttcccagacatcatcagtgggcctcagcagacacagaaagtttttctgttcatcaggaaccgcacattgcagttatggttggacaacccaaagattcagctgacatttgaggctactcttcaacagttggaagccccttacaacagtgatactgtgcttgtccaccgagttcacagctacttagagcgccatggtcttatcaacttcggcatctataagagaataaaacccttaccaactaaaaagacaggaaaggtgattattataggttcgggtgtttccggcttggcagcagctcgacaactacagagttttgggatggatgtcacacttctggaagccagggatcgcgtaggtggacgggttgctacatttcgaaaaggaaactatgtagctgatcttggagccatggtagtaacaggtcttggagggaatcccatggctgttgtcagcaaacaagtaaatatggaactggccaagatcaagcaaaaatgcccactttatgaagccaatggacaagctgttccaaaagagaaagacgaaatggtagaacaagaatttaaccggttgctagaagccacctcttaccttagtcatcagctagacttcaacgtcctcaataataaacctgtatcccttggccaggcattggaggttgtcattcagctacaagaaaagcatgtcaaagatgaacagatcgaacactggaagaagatagtgaaaactcaggaggagctgaaagagcttcttaataagatggtaaatttgaaggagaaaattaaagaactccatcagcaatacaaagaggcatcggaagtgaagccaccccgagatattacagctgagtttttagtgaaaagcaagcacagggacctgaccgccctctgcaaggaatatgatgaattagctgaaacacaaggaaagctagaggaaaaacttcaagaattggaagcaaaccccccaagtgatgtatatctctcatcaagagatagacaaatacttgactggcattttgcaaatcttgaatttgccaacgccacaccactctctaccctctctcttaaacattgggatcaggatgatgactttgagtttactggcagtcacctgacagtaagaaatggctactcatgtgtgcctgtggctttagctgaaggcttggatattaaactgaacacagcagtgcgacaggttcgctacacagcctcaggatgtgaagtgatcgctgtgaatacacgttccacaagtcaaacctttatttataagtgtgacgcagttctctgcactcttcccctgggagtgttgaagcagcagccaccagctgtgcagtttgtgccacctcttcctgagtggaaaacatctgcagttcaaaggatgggatttggcaaccttaacaaggtggtgttgtgttttgaccgcgtgttctgggatccaagtgtcaatttgtttgggcatgttggcagtacgactgctagcaggggcgaactcttcctcttctggaacctatataaagctccaatactaatagccctggtggcaggagaagctgctggcatcatggagaacattagtgatgatgtgattgttggccggtgcctggccattctcaaagggatttttggtagcagtgcagtaccacagcccaaagagacggtggtgtcccgctggcgtgctgatccctgggcccgaggttcctattcctatgtggctgcaggatcttctggaaatgactatgatttaatggctcagccaatcactcctggcccctcaattccaggtgccccacagccaatcccacgacttttctttgctggagaacatacaattcggaactacccagctacagttcatggtgctctgctgagtgggcttcgagaagcaggaaggattgcagaccagtttttgggagccatgtacactttgcctcgtcaggccacatcaggtgtccctgcacaacagtctccaagcatgtgagacagatggttctgaaaacagaagccaatggacatgtgatctgccatgtaagcaaactcttctagcaatactcatccta

SEQ ID NO: 1278 - DNA, 2344 bp, Cricetulus griseus
ccctggacaaatgttgggaagttggtgtttgtgggcaagaagtttgagattttgcccgatggccttccctctgccaggaagctggtctattacacagggtgtcccacacgctcccggcatctcctgcagctgttgagcaatagccaccgcctgtacatgaacctgcagccggtcctgcgccacctccgcaagctggaggagaacgaagagaaaaagcagtaccgggaatcctacatcagcgacaacctggaccttgacatggaccagctggaaaagcgatcccgtgccagcggaagcagcgccggcagcgtgaagcataagcgcttatcccgccactccacggccagccacagcagctcccacacctcgggcatcgaagtcgacactaagccccgggacccagggccagaagacagctgttcaggcagcgccatgcaccgcaagctgaagacctgcagctccatgactatgccgaaaaccaaagacttccaccgatcgacatagcctgagccttgacgacatcagactgtaccagaaagacttcctgcgcatcgcaggcctgtgtcaggacactgctcagagttacactttcgggtgtggacatgaactggatgaggatggcctctactgcaatagctgcttggctcagcagtgcgtcaacatccaagatgctttcccggttaaaagaaccagcaaatacttttctctggacctcactcatgatgaggtcccagagttcgttgtgtaagttccacctgcgggcagccctgcgggcagtcgctgtctgctggaggctgtggagtccgaggttctttacatattatttgtgccatattttttctaccccaaacttagctctttctttataatatccatgatggaaacaaaagccttgggacaatgcactttaagtattatgcagaggtaaaagatacacagaatgtaaaaagacaagtgcgcccggatgtttattgacccttcgggaagaagtgtgctttatagtttacccagcttccagactgttaggttgtggtgtgtgtgtgtgttcatctcttgttttctagctcaaatacatgtttatcacgtggaagatgttagccacagacaatcagttgataaatgtagagttaagagtgactttccttgtgtgcctttggccaagattctcaaccctgattgcataagacttatctggggagcttttcaaacaagcctgggtccaaccccgggccaacttaaatcagtctcttgtgggatccaagagtgtctttttattagttttgaaatagaagtctgcagaggatattagtgattgtgaatgggccatttttaagacagttactgccctgctgctgttacagtgtctaatgaaagcaaccaggagaatgagtttatcaacttgatatgcagtgaaaatgttgctcgcacttcaggagagaacttcatagcacaatgtctttctaagggatgtttttaatgatttagtattttacagcatttgtttaccatattttgatactccatttttgctatctgccaggttttattaaaaaaaaaaactatgtattattttctaaagaaactcatatttttgtacaaaattatgttttcaagtaacgaagaaatagatttagggtacagcagaacataggcagtgttccctgtggatgggagtcagtgttacagaactggcggcagccacaagcccgccccaccatgctgccctcctgtgtgggcacagtttcaaccagaatctcacccagtagctctcacctgaccctttacaaagaagaaaaaacgttctgtggtcatgacattattttgcttttgtggaatgcttttagaacaaccaaagtttctgataccagaatgtaactcagtctccttgcggaaggatgaaagttgaagggatgacttaatgacttcttttgcttatgagtcattgcataacctcaccactttttcttagaggcttaggggccagaccctggtgaagttggcactctcaagaacccagattgccatgttttcctctctgctccagaatccagtctccagggttctgccatatgtatgtgaaaatccactttgaataattgacatttttgtattgggaaatcgtttttaaaaataaaggaaaagaaaagtatacagctgttatttatgctgcatttgttaacatgtccgttgctggttaatacaccggtttggtctatgtcactgctccacgtcatctgcatttgtatttgcaacagtgagctttatatctaagtaagctgtaaataatcctttctgtgaaaggatcctcatgttgggatgatactgaaatatgtttaaaaaaaaa

SEQ ID NO: 1279 - DNA, 2343 bp, Cricetulus griseus
ggaaggagagggctggagttgaggctgccggcggccgagaggggcggcgggctgggtgcgccgcggagcccggcccgagagtcccgagcagcgtcccggggcgccgccatgacgcccgatctgctcaacttcaagaagggatggatgtcaatcttggatgaacctggagagtggaagaagcattggtttgtgctgacggattccagcctcaaatattacagggactccaccgccgaggaggcagatgaactggatggtgagatcgacctgcgctcctgcacagacgtcaccgagtatgcagtacagcgcaactatggcttccagatccataccaaagatgccgtttataccttgtcggcaatgacctcgggcatccggaggaactggattgaggctctcaggaagactgtgcgtccaacttcagccccagatgtcaccaagctctcagactgcaataaggaaaacacgctgcatggctgtggcacacagaagggctccctgaagataggggagcagcggacaggctctgaggttatcggccggggtggccctcgcagagtggatggatctcggcagtcactggactacgtggagctctctccattaaccccaagctccccgcagcgcgtgcgcactctgacccgctccacttctgagcgtccacccaaacaggaggatctagagcgggacctggcgcaacgctctgaggaaaggcgcaagtggtttgagtccacggacagcaggaacccagagactcccagtggtgatgggcctcgaaggggcctgggtgcccccctgactgatgaccagcagagccgactcagtgaggagattgaaaagaagtggcaggaactggaaaagctgcccctgcgggagaataagcgagtgccgctcactgccctgctcaaccacggccgcagcgagcgccggggacccccaaatgacagccatgaggccctggagaaggaggtccaatctctccgtgcccagctagaagcatggaggctccgaggggaagctcctcagaatgcccccagactccaggagaacagccatattcctccaggctacatctcacaggaagcctgtgagcgcagcctggcggagatggagtcctcacaccggcacgtgatggatcagctgcagcagcaccatgaacgggagctacagcggctgcagcaagagaaggagtggctcctggctgaggagacggctgccacagcctcagccattgaagccatgaagaaggcatatcaagaagagctgaaccgggaactgagcaaaacacggagtctccaacagggtccagatggcctgcagaagcaacaccagttggacatggaggcactgaagcaggaactgcaggtgctgtctgagaggtactcccagaaatgcctggaaatcggtgccctgacacagcaggcagaggagcgcgagcataccctgcggcgctgccagcaggagggtcaggagctgctgcgccacaaccaggagctgcactcacacctgtcagaggagatcgaccgtctacgaagcttcatcgcctcgcagggcacaggcaatagctgtgggcgcagcagtgagaggagctcttgtgagctggaggtgctcctgagagtaaaagagaatgaactccagtacctgaaaaaggaggtgcagtgcctccgggatgagctccaggtgatgcacaaggacaagcgcttcacggggaagtaccaggatgcatatgtggagctgaaccacatcaagacacggtcagagcgtgagatcgagcagctgaaggagcacctgcgcctggccatggctgccctgcaggagaaggaagctgtgagaaacagcttggctgagtagaggtccctgtggttcagctcagctgaggaccctccagcgccgagggaccagccaccctccttctctgacagaagtcagaagccaagctttcttctctccctgggtcacatgtgcactcacacctgctacacacatgcacgcgcactcgcacatgcacacacacatgtacacacacacatgtacacacacacacacacacacacacacacacacacacacacacacactgcggatctgagctcgtccctcgcactgggtcttaccttgcaccttcttcgggattttatatgtgaagagattttttatatagaattttttttttgcctttttttcctaaaacactttaaactttataaaaggcaattcttggtggcatgtgcctctagcactggctcctgtgccctccactgccctgcttgggcctccttcctaccctgggcatcttgcaaaggcccaagcagggccagagtgagttgaccagaaggaaaaggc

SEQ ID NO: 1280 - DNA, 2343 bp, Cricetulus griseus
cggcgcgggtggaggaggtagtagcggcagcagcgcctgcgcgtctcctgtcagggtcggcaggctggtcccctgggcggcccagctggacgtggccgagccgaagcccgggggccgatggcgatgaactataacgcgaaggatgaggtggacggcgggcccccgtgccctcccgggggcgctgccaagacccggaggccggataacacggccttcaaacagcaacggctgcccgcctggcagcccatcctcacggccggcacggtgctgcctaccttcttcatcatcggcctcatcttcatccccattggcatcggcatcttcgtcacctccaacaacatccgtgagatcgagattgattacactggaacagaaccttccagcccctgcaataaatgtttgtctccaaatgtgacatcctgtgtttgtaccattaacttcacactggaacagtcatttgagggcaatgtgtttatgtattatggactgtctaatttctatcaaaatcatcgtcgttacgtgaaatctagagatgatagccagttaaatggagaccctagtgctttgcttaatccaagtaaggaatgtgaaccttaccgaagagatgaagacaaaccaattgctccatgtggagctattgccaacagcatgtttaatgatacactagagttgtttctggttgccaatgaatctgatcccatacctatgccaattcctctgaagaggaaaggtattgcttggtggacagataaaaatgtgaaattcagaaatccacctggaaaagaaagcctcatggaaaaatttaaagaaacaacaaagccagtaaattggcataaaccagtatatatgctagaccctgatgaggataataatggattcataaatgaggacttcattgtttggatgcgtactgcagcgttacctacttttcgtaagttgtaccgtcttatagagcggagaaatgatttacatccaacattaccagctggacagtactatttgaacatcacatacaattacccagtacattcttttgatggacgaaaacggatgatcttgagcactatttcatggatgggaggaaaaaatccatttttgggaattgcttacatcactattggatccatctccttccttctgggagttgtactgctagtaattaatcacaaatatagaaacagtggtaatactgctgacatcaccatttaattttatattctgaaaacaaatctactgcatgtgcatcgaggccagtcctgttcaacctagcttttgaatgctgatgtctggttagtatgtcattttgaagttggcacataacttaaaacaaaaaaacaaaaaaaccgcctttgtcctttgcttcttacatatggatgacttatgaaaatatatgacgggtataaaaattaggtatattgattatatcaatattgtaactgctaaaatggcattctaatgtctgctttttattgggacaggtcatgtgatgcatagagcctctttcatgtgaaatgagtctactgcttaaacgtttatgctgtgttgatgacattatattgacatgatgttgtacatgtgtgcctactgtgtgaagaaagggattatgagatgtaggagtgtaatggcttgctaaccctttgaaatttggttacagttcagattgaagaaagactaaatataaataaaacacttcatcattttcatgtgtcgtgtgtaaaggcttaaagtccctccttgttgaggtggttcatgtgttcagtttctcttattatagttatttgataataactttgatttcatatattaaatcaaaaggtctgagtaatgtttcagtttagattaagatgtgcttaagaagaaaaaaaaaattcaatggttcatagtagaaatgtgccacttatgctttgtctgatatgaaattctgttaaaaaaagcttgtaattcatggtgacttttaacttatgaaaatattgcttgcatgggctggttatgtgatttatggatatataaaaatttctcaggacataagttctttttttctctcaaactattcttttgtcagtcatccagaatgctgctgttctgaaaattgtctttcacatatatatataatgttcagtttatttgggggattttcataagacatgagatgtttctgccagtctttctagagtaagtgctatttaaagaggactgctagcctgcatctctttctctaactgggggccaaggggtctgaagaagaaaactgaagaagtctgacattcccacgtcttggagaagatggaatctttaaaagtacagttgaagtgaactaaattaaaaaaaaaaaaaaaaaaaaaa

SEQ ID NO: 1281 - DNA, 2343 bp, Cricetulus griseus
gggatggtaacgtaagggcgctcggcgagcccgtctctcctcgaatgaaaggaaacaacccctggcgacggagccccgctcttcggcagtgccggagaaccgacgcccgccttcctccttctcccctcgtgggcgctgtcctcccgtcgcccgcccgagggccacgctgcatttcttgaggcttaaagtggcattttataagcatttgtaaaatgtcaagctcaattgaacagaaaaaagggtctacaagacagcgcaaatgtggcttttgtaagtccaatagagacaaggagtgcggacagctactcgtgtctgagaaccagaaggtggcagcacatcacaagtgcatgcttttttcatctgctttggtgtcatcacattctgataatgagagtcttggtggattttctattgaagatgtccaaaaggaaattaaaaggggcacaaaactgatgtgttctttgtgccattgtcccggagcaacaattggctgtgatgtgaaaacgtgccacaggacttaccactaccactgtgcgctgcatgataaagctcagatccgagagaagccttcgcaaggcatttacatggtttattgtcgaaaacacaagaaaaccgcacataattctgaagctgatttagaagaaacttttaatgagcatgaactggagccctcatctccaaagactaaagaagaaaagtcgacaaaaggaagaaccaaagaaagaactgaagacagcagatctacatcctcccatggaaccgatgaaatggaaagtagttcctaccgagataggtctccacacaggagcagtcctaatgacaccaggcctaaatgtggattttgccatgtaggggaggaagaaaccgaagcgagagggaagttgcatatatttaatgccaagaaggcagccgcacattataagtgcatgttgttttcttctggtactgtccagctcacaacaacatcaagagcagaatttggagattttgatattaaaactgtacttcaagagattaagcgaggaaaaaggatgaaatgtacactttgcagtcagcctggtgctactattggatgtgaaataaaagcctgtgttaaaacctaccattaccactgtggtgtacaagacaaagcaaaatacattgaaaatatgtcccgaggaatttacaagctgtattgtaaaaatcatagcggaaatgacgagcgagatgaagaagatgaggaacgagaaagtaaaagccggggaagactagcaattgatcagcaactaacccagcagcagcttaatggaaactaggttcctgggacagagagagttagaaaccgagaataagacaactgcaacttctatgctttttttcactcttttctaaaataaaaaagggtttgtaactttttgaatgagatttgcaaataagaaacaacatgctaacttgactgtacattgatctattctgcagctggttgaacagcatttttaaatgtaacaggtggaaaattacactgtgcttattgactgaatttttaaactgctagtcccttaagatcacattttgttaaagtgtgtatttacacatttacttaaatcaagggactcaatgcttgctttattttaaccatcttttgttgttactttagaaggaaactagcttagtagtggattgccttgtacgtcttcttccttttgctcttaatatgccatgatgtgtatgtgattaatttcaaggttcatcatgacttgaagtgcaaggacagatctctagtttgttaccaagcgatgtgtacttttttttttttctttatttgttttattctttttgtcattattaatattcaaatgtgtaatctttgcaagcgtatattgaagattattctggagcatttattgccttaccagaaatgttagtaggaaatgttctttagagtagaagggtagacttgcgtttctatactttaataagttcctgggccgagggggagggggagttttactttcatctcattgtttaaaaacccacacctgagtaaatttcatttcaaggatcagcagtctcaaacttgaggtggtacttgttcagtgtacactactcaagatactaacagagtaacatgatctagagatctgctattgactcgaatctatgtacttgaacaaatgtgtgaatctcaaatatctcaaagcagaagtgttgtagaatgttgttgtctttttgaaaaagcactgaagttagaccaaggcacagtttagttttaacagacatttaaagttaattgtaaagtataaggaatgcgtcatgggtacaaaaatcaaacctggattctcaaaaaaaaaaaaaaaaaaaaaa

SEQ ID NO: 1282 - DNA, 2343 bp, Cricetulus griseus
cccgggatgcctcctgcttcacttggtgtaaatggctgataagcagatcagcctgccggccaagctcatcaatggtggcatcgctgggctaatcggggtcacctgtgtgttccccatcgacctggctaagacacggctgcagaaccagcagaatggccaacgcatgtatgccagcatggtctgactgcctcatcaagaccatccgctctgagggctacttcggcatgtacaggggagcagctgtaaacctgaccctcgtcacccccgagaaggccatcaagctggcagctaatgacttcttcagacatcagctctctaaggatggacagaagctgaccctgccgaaggagatgtttggcaggctgcggggctggcacctgccaggtgattgtgaccacccccatggagatgctgaagatccagctgcaagatgcaggccgaattgctgctcagaggaagattctggctgcccaggctcagctctcagcccagggaggtacccagccctcagtagaggctcctgctgctcctcggcccacagccacccagctgacccgtgacctgctgcggaaccatggcattgctggcctctacaagggactgggggccacactactcagggatgtccccttctccattgtctacttccccctgtttgccaacctgaaccagctgggccgtccatcttctgaggagaagtcacctttctatgtgtccttcctggcaggctgtgtggctgggagtgcagccgctgtggctgtcaacccctgtgatgtggtgaagactcggcttcagtcacttgagcgaggtgttaatgaggacacttactcgggatttctggactgtgccagaaagatctggagacatgagggcccctcagccttcctgaaaggcgcatactgccgtgcactggtcatcgccccactgtttggcatcgcccaggtggtctactttctgggcatcgctgagtccctgctggggctgctgcaagaaccccaggcctaagcccatggctgcttctccccagcctacgggctgaggccagaacagggtgaccagcacaagcctgagaaggactggtctctccccagtcctccccaacaaacaacaaggcaggggagggtgcagggtccacatgggtggtgcacacataggcccccatggggtcctgagggacaaaaaattgggatcaaggtcttatttatgtagaaaatgcagaattctgtacattcctcaagccagtcctgtcccatccctgtaccccaacccagtctcacctggcctgaacaccccctgagacagagctggtctctgggctggggctcccaggcctggtttggacaggcagaccctaccctgtagtccactggctccggtctccgaggctctcctggtctacaaacgggacccacccacccacccaaaattatttattgaatttgctgtgcccacgtggctctgcctgtcctccgtccatcagtctgtttgcccctgcttctctttctgcctctaccaggatcccactctgcctccccagttagccttacaggaggactggagtgttctgtcctcatgttaagctaggattcccaggctggctgtgcggccacatcaattctgatcccaggcatcccgcacatactcttcctgtgggacccggaatgttgaggtctttgtgtgcctatgatggggcaggttgccctgcccccccaccccctcttgcagtcgtctgaccaggctgcatggggataggcccttaagggcacagttgcctttccctatggagtcaggcatcctgtgcttgtgtgctgtgtatgcctcaggtcttctgctgaccccgtccaataatttagttctccagcctggtggctcttctgatagagtcctactcctgggcagagattgcttgtgggggtaaagggtgggcatgaaggccaggcatgaaggccagtgtggcgcctgggccacccagctttctgggccgctgtccatatttggaaagccccacccccatccccagccctggatcctctgttctgaatcaaagcagccctcttcccctgccctggccatgtgattgtgtttggtgattgactgaagtgctggtgctgtgtccctcaagcccgaccccctccgtggaggccccttcccagtgacactacctggggctcaagcctgggcctcctacttcacggttgctcctgggagcctcccctcctatcatgtctgtaccttggaagctgctgctcctgcttaaagaattatatttttttcttttgaagagtttaaaaagttgtaactttttgtgtcttgtcatgtaaaagataaataaatattctaaat

SEQ ID NO: 1283 - DNA, 2342 bp, Cricetulus griseus
gcctgaaacgcagcaccgaggctctgcaccccactccgagagcgacatcccagaacaggaggaggagattctggggtctgacgatgatgagcaggaagaccccaatgactactgtaaaggaggttatcatcttgtgaaaatcggagatctatttaacgggagataccatgtgatccgaaagttgggctggggacacttttcaacagtgtggttatcatgggatattcagggaaagaagtttgtggcaatgaaagtagttaaaagtgctgaacattacacagaaacggcactagatgaaatccgactgctgaaatcggttcgtaattcagacccgaatgatccaaatggagaaatggttgttcagcttctggatgactttaaaatatcaggtgttaatggaacacatatttgcatggtgtttgaagttctgggccatcatctactcaaatggattatcaagtctaactatcaggggcttccgctgccttgtgtcaaaaaaattattcagcaagtgctacagggtctggattatttgcacaccaagtgccggatcatccacactgacatcaaaccagaaaacatcttgttgtcagtgaatgaccagtacattcggagactggctgcagaagccacagaatggcagcgatcaggagccccacctccttctgggtctgcagtcagtactgctccacagcctaaaccagctgacaaaatgtcaaagaataagaagaagaaattgaagaagaagcagaagcgccaggcagagttactagagaagcgaatgcaggaaattgaggaaatggagaaagagtcgggccccgggcaaaaaaagacctaacaagcaagaagaatcagagagtcctgttgaaacacccttgacagagaacccacctaataaaatgacccaagagaaacttgaagactcaagttccagtggtcaggatcagaccctcacggagtgtgctgtagagggtggtgacacagaaattaattgcaatggagtaattggagtcgttaattacactgaaaacagtaacaatgaaacattgaggctgaaagaggacctgcgtaatgctaatgactgccgtgtgcacactttgaagcaggaagctagtttcctgacctccccaaatggagacagcagtgcatctccagaaacagactcttgcacacctgtgacctctgaggtgtcagagaccatggtgtgccaggcctcctccgtagagcaggacatcagccaccttcaagagagcatccgggcagagattccttctggggatgagcaggagcaggagcataatggaccactggacaacaaaggaaaattcactgctggaaattttcttattaatccccttgagccaaaaaatgcagaaaaactcaaagtgaagatcgccgatcttgggaatgcctgctgggtgcacaagcatttcactgaagatatccagacaaggcagtatcggtctttggaagttctgataggatctggctacaacacacccgctgacatctggagcactgcgtgcatggcctttgaactagccacaggggactatttgtttgagcctcactcaggggaggattacacacgtgatgaagatcacatcgccttgatcatagaacttctggggaaggtgcctcgcaagctcattgtggcagggaaatattccaaggaatttttcaccaaaaaaggtgacctgaaacacatcaccaagctgaagccttggggccttctggaggttttggtggagaagtatgagtggcctcaggaggaggctgctggcttcacagatttcctgctgcccatgctggagctcatccctgagaagagggccactgctgctgagtgtctccgccacccttggctcaattcctaagccccttctgctcaagctgcaacagagttcatcaggctgaccctccgaccctcccctctgagacttttccctcttccctttcagggtgaagctcttttcttccagggcttctaaattttttttaatccaacatgttcatttgggtttgcttccttgaccctgtggaaatcgccacagccgctggacatcctaggtgaatttggccttagttgggctctgccaaagactaaaagtatgaacagccccaccctctgccctgcccttttcattaggttgtcaacaccctttttaaagagggctgtgaagatctgtgagcccctccttttattcaccaactctaagagtctggtttctaattcgtatcccgctgccagcataaggttgaggagggaggggtatgaatctgtgagcagcagcagagacattaaaagtgctgtgtccaggccatgtcatctgcctggattc

SEQ ID NO: 1284 - DNA, 2341 bp, Cricetulus griseus
cgagacatgtccttgtcccagccaaccattgctgctattagtaatgtgctgagcttcctgctgcaaggcttccccagcagcaacgatctgctcaggtttggccagttcatttcttctactttgccaacctttgcagtgtgtgagaaatttgtggttatggaattaataatgatgagaaacccaactcaagaggacatgcagccctttcgcatatgaagatatcaaggaggtacataagaggcggtacctgctgcagcctattgctgttgaagtcttctctggggatggacggaattacctcctggcattccaaaagggaattcggaataaagtctaccaaaggttcctggcagttgtgccatcgctcactgacagctcagagtctgtctccggccagagacccaaacaccagtgtagaacaaggatctggattacttagtactttggttggagagaagtctgtgactcagagatgggagagaggtgaaatcagcaacttccagtatttgatgcacttgaacaccctggctggaaggatcctacaatgacctgatgcagtacccccgtcttcccctggatccctcgcagactatgactcggaggaggttgatcttactaatcccaagacattacaagatcttcttccatcacctagacaacctgaggcttccctgacaacctgtaaaagaactcaaggagcccgtggggcaaatcgtctgcacagacaaggggattcttgcagtggagcagacaaggttctgatcccaccagcgtggaacaagacctttgcctggggctatgcagacctcagctgcagactggggacctatgagtcagacaaggcagtgacagtctatgaatgtttgtctgagtggggtcagattctctgtgccatctgccccaaccccaagctggtgatcacaggtggaacaagcacggtggtgtgtgtgtgggagatgggcacctccaaagaaaaggccaagcccctgacgctcaagcaggctttactcggccacactgatactgtcacctgtgccacggcatcactggcctatcacataattgtcagtgggtcccgagaccgaacctgcatcatttgggacaagctgtcattctaacccagctccgaggccaccgagctcccgtttctgctctttgtattaatgagttaacaggagacattgtgtcctgtgcaggcacgtacatccatgtgtggagcatcaatggcaaccccatcgtgagtgtgaacacattcactggcaggagtcaacagatcgtctgctgctgcgtgtccgagatgaatgaatgggacacacagaatgtcatcgtgacaggacactcagatggagtggtccggttctggaggatggaattcttcaagttcctgaaacaccagctcctgagcctgtggaagagctggaaatgcaagaaggctgtcctgaagcacagatagggcagcaagcccaagatgaagacagcactgattctgaaacagaggagccgagcatcagccaggatccgaaggaagccagcccagcagcaccagccacagccccgggcagcctcctgcagagccactgccacatggtgtactgacagcggctctgatgactccaggcgctggtcggaccagctcagccttgatgaaaaagatggcttcatatttgtgaactattccgagggccagaccagagcacatctacagggccccctcgcccactccaccctaaccccatcgaagcacggaattacagccgattgaaacctgggtaccggtgggagcggcagctggtgttcagaagcaaactgactatgcacacagcctttgatcgaaaggacaatgcacacccagctgaagtcaccgcattgggtgtttccaaggaccacagcagaatcctggtcggtgacagtcggggccgagtgttcagctggtctgtgagtgaccaacccggccgctctgctgctgaccactgggtgaaggatgaaggtggcgacagctgctcaggttgctccgtgcgcttctccctcacagagagacggcaccattgcaggaactgtgggcagctcttctgtcagaagtgcagtcgatttcagtcagaaatcaagcgcttgaaaatctcatccccagtgagagtctgtcagaactgttactacagcttacagcatgagagagggacagaagatgggcctcgaaactgccgagactgagggagaccacggatggcccagggagctctttgggtcctgccacggcttcgaaggcattgaagcagtctctatttaccacacacctcttcacgctgagtgtttgaagtgttgagttcaaagggatcattggatc

SEQ ID NO: 1285 - DNA, 2341 bp, Cricetulus griseus
gatggcggctgtggtggagaatgtagtgaagctccttggggaacagtactacaaagatgccatggaacagtgccacaattacaatgcccgcctctgtgctgagcgtagcgtgcgtctgcctttcttggactcacagactggagtagcccagagcaattgttatatctggatggaaaagcgacaccgaggaccaggattggcctctggacagttgtactcctaccctgcccggcgctggcgtaaaagcgtcgagctcacccacctgaggatcccaggctttcctttccatctattaaaccagacacagaccagaccctgaagaaagaggggcttatatctcaggatggcagcagtttagaggctctactgcgtactgaccctctggagaaacgaggtgctccagatccccgtgttgatgatgacagcctgggcgagtttcctgtcaccaacagtcgagcacggaagcggatccttgaacctgatgacttcctagatgatcttgatgatgaagactatgaagaagatactccaaaacggtcggggaaaggggaaatccaagagtaagggtgtgagcagtgcccggaagaaactggatgcttccatcctggaggaccgtgataagccctatgcctgtgacatttgtggaaaacgctacaagaatcgacctggcctcagttaccactatgcccattcccacctggctgaggaggagggagaggacaaagaagactctcaaccacctactcctgtttcccagaggtctgaggagcagaaatccaagaaaggacctgatggattagccctgcccaacaactactgtgacttctgcctgggagactcaaaaatcaacaagaagacagggcagcctgaggagctagtgtcctgttctgactgtggccgctcagggcacccgtcctgcctgcagttcacccccgtgatgatggcggctgtgaagacctaccgctggcagtgcatcgagtgcaagtgctgcaacctctgcggcacttcggagaatgacgaccagctgctcttctgtgatgactgtgaccgtggctaccacatgtactgtctcaccccatccatgtcggagcctcctgaaggaagttggagctgccacctgtgtctggatctgctgaaggagaaagcgtccatctaccagaaccagagctcctcctgatgtgccacccggctccccacacacctaaggctgttgctctcctctaccttggttttcattacccctcttcttcttctttcactctggtagttctgcccaactgcctttggcaacagcacagggaggtggcaactcttgactgcctctggtcccaagccctcagggagtaaggagcagcatgctgccccaggctgacctgtgggcccagcttctctctgctctccaagaagtgcattcactctgcttgccttgggcccaagtccctggtaatcacagggttcaaatgggttcctctaagaagtatgagagcagctcacttgtctcaagcctggcctacccctcctcccccccctctgggggccaaaagttttaccccaggggtgaaccaagcccaaaccttgcctggagcaccaccagtgagtcagacagacagaggtggcacttgctaggaccctttcctaccccttgttctgcttcactttgccttctcgccaaagcagtcctgtgtcttctgtcatgctacatggggtcctgtgcttgcactgtgatgctctcaggcacctccttctgcccagtcccacaaagagacaagcagcttcacctgcccttcccgtgcttggctggcgcgctcacaggtggtctctggcaatccaaacatttcccatcctcagacttttgagtcttctgcctccttccttgttccctttggttttgtgggggagagggacaatgtcagggggccctgccagaagcttggggaccacaagaagttggataatgtgcctgttttttaactcgataaaaatgcctacctccaaaatccccttttcgttcttcctggacctgggcattcagcctcctgcccttaactgaatcaggagcctctgcctcctacctgtgtatcctgactctgggtcacagggaggtccccctttccttgcacactagctagcagctggtaaagtcttcacactctgatttttgtttcctgcttagtggcactgacattaagtaggaggggacagtccatgccagaacactctggaatggccttcctccttggctgtgggcaggccctgacttgtttctgcaaagttgaggcccctcctcctatccttagttcctgtatccaaaacattagtaagaataaacatttttacagag

SEQ ID NO: 1286 - DNA, 2340 bp, Cricetulus griseus
gaaagcacattgcaatgcattatagcaatcccagacctaagtttgaagattggctttgcaacaagtgctgccttaacaatttcaggaaaagactaaaatgcttccgatgtggagcagacaagtttgactctgaacaggaagtgccccctgggactacagagtctgttcagtcggtggattactactgtgatacaattattcttcggaacatagctccgcacactgtggtggattccatcatgacagcactgtctccctatgcatccttagctgtcaataacattcgcctcataaaagacaaacagacacaacagaacagaggttttgcatttgtccagctgtcttctgcaatggatgcttctcagctgcttcagatattacagagtctccatcctccattgaaaattgatgggaaaactattggagttgattttgacaaaaagtgaccagaaaagatttggtcttccggatggtttgcggctgctcagtggtcatccactcagtctcaaagtggtgaagggaggcagtgttgactacaattacctgcagccaggccaggatggctatgcacagtacactctagtactcacaggattaccagcagttttatcagcagcaatctggaggactggaatctgaggcatcatctacgtcaggcacagctgtgactaccacctcatcagctgtagtgtcccagagcccccagctctataatcagacctccaatccacctggctctccgactgaggaagcacagcctagcactagcacaagtacacaggccccagctgcttcccctgctggtgtagttcctggtaccaaatatgcagtacctgacacatctacttatcaatatgatgagtcttcagggtattattatgatcctacaacaggcctctactatgaccctaactcacaatactactataactcattaacacagcagtacttatactgggatggagagaaggagacctatgtaccagctgcagagtctagcactaaccagcagacgggcctgccttccacaaaagagggaaaggagaagaaagaaaaacccaagagcaaaacagctcagcagattgccaaagacatggaacgctgggctaagagtttaaataagcagaaagaaaattttaaaaacagctttcagcctgtgaattcgttgagagaagaagaacggagagaatctgcagcagcagatgctggctttgctctctttgagaaaaagggagccttagctgaaaggcagcaactcatccccgaactggtacgaaatggagatgaagaaaatccccttaaaagaggtctggttgctgcttacagtggtgacagtgacaatgaggaagagctggtggaaagacttgagagtgaggaagagaaactggctgactggaagaagatggcctgcctgctctgccggcggcagtttccaaacagagatgccttggtcaggcaccagcaactctccgacttacacaagcaaaacatggacatctaccgaagatccaggctgagcgaacaggaattggaagccttggagctaagggagagggagatgaaataccgagatcgagctgcagaaagacgagagaagtatggaattccagaacctccagagcccaagcgcaagaagcagtttgatgctggcactgtgaattacgagcagcccaccaaagatggcattgaccacagtaacattggcaacaagatgctgcaggccatgggctggcgggaaggctcaggcttgggaagaaagtgtcaaggcatcacagctcccattgaggcccaggtccggctaaaaggagctggcttaggagccaaaggcagtgcatatgggttgtcgggtgccgattcctacaaagacgctgttcggaaagccatgtttgcccggttcactgagatggagtgagactggggaagcaatgatgggcacagggagcaagccatctcctcaatttgctcttattttctgtctctaagagcatgccttgtgctattaatagtttagggtgaaccacttcattcttcggggttctcccttccaccttaaaggagctcctttatgtgggtaaacagccttccttcccacctgagggcttgtgaacagaggggacaatgggctttttatacttcagtgtacatagtgtaaatgtaatgtgttctccatgttgtagcctgtgttgtgtccctccttcctaggggcttgagaagctctgagtggttgtcaacaccaaagccaccactgtcatttgttgttgttatgtcttggcaatagccttgtgtatatttgtatattatacatttgtacagaattttggaagattttcagtctagctg

SEQ ID NO: 1287 - DNA, 2339 bp, Cricetulus griseus
gtgtccccggccttgagggcagtggcctgcttaggaactacctcagccgccgcgttcccgagccgccgttaccgcccgggacgatgatgccccgcctgctgctgcgcgcctggccccgccgccgggcgcatgtttttggggagccccaagtcggcccttgagtaccagctcgggacccgacaacgagtacctgcaacacagcatcgtgcccaccactgcactaccaggatagcctgccaaggctgcctatccccaaacttgaagacaccatgaggagatacctcagtgcacagaagcctctcctggatgacagccagttcaggaaaacagaagaattttgtaagagttttgaaaatggcatcgggaaggaactgcatgagcacctgcttgcccaggacaagcagaataagcataccagctacatttcaggtccctggtttgaaatgtatttagctgctcgagactccattgttttaaactttaatccatttatggcattcaatccagacccaaagtctgagtataatgaccagctcacccggacaaccaacatgactgtttcagctgtccggtttctgaagacacttcgagctggccttctagagccagaagtgttccacttgaatcctgccaagagtgataccaatgccttcaaaagagtcatacgctttgttccttcctctctgtcctggtatggagcctacctggtcaatgcatatcccctggatatgtcccagtattttcggcttttcaattcaactcgtatacccaaacccagccgtgacgaactctttactgatgccaaggccagacacctcctggtcctaagaaaaggaaatttctatgtctttgatgtcctcgatcaagatgggaacatcgtgaatccctcagaaattcaggcacatctaaattacattctctccgacagcagccctgtgcccgagttccccctggcatatctgaccagtgagaaccgagatgtctgggcagagctcaggcagaagctggtgcatagtggcaatgaggaagccctgaggaaagtggactctgctgttttctgcctctgcctagatgacttcccaatgaaggacattgtccacttgtcccacaccatgctgcatggtgatggcacaaaccgctggtttgataagtcctttaacctcattgtagccaaggatggcactgccgcagtccactttgagcattcgtggggggatggtgtagcggtgcttaggtttttcaacgaggtgttcagagacagcactcagactcctgccatcactccccagagccagccagccactaccaactcctctgtgtctgtgcagaaactcagctttaagctgagcgatgctttaaaggctggcatcaccaccgctaaggaaaagtttgatgccaccatgaaaaccctcaccattgactccattcagtttcagagaggtggcaaggaattcttgaagaaacagaagctgagccctgatgcggtggcccagctggccttccagatggcttttctgcgacagtatgaccagacagtggctacctatgaatcctgcagcactgccgccttcaagcacggccgcactgagacggtccgacccgcctccatcttcactaagagatgttctgaggcatttgtcaaggagccctccaagcacagtgtggacgagcttcagcacatgatggccgagtgctccaaataccatggccagctgaccaaagaagcagcgatgggccagggctttgaccgacacttgtttgctctacaccatctggcagtagccagaggggtcaccctgccggagctttacctggatcctgcatacaggcagataaaccacaacatcctgtctacgagcactctaaacagcccagcagtgagtcttggcggctttgcccctgtggtccctgacggctttggcattgcatatgctgttcatgatgactggataggctgcaacgtctcctcctacacaggacgcaatcccggcgagtttctccaatgtgtcaacaagtgcttagaggacatgttcgacaccttagaaggcaaagccatcaaaacttagcttctcagtgggtgaaattcttcatcatgaacatggatgttcatgtagcctgtagttactattctgtacctaacaaaactagccctgaggtgctcgactagccagtgcttcaggcatgagcaggaagattccagctaaagataatgagaggttgccactcaaagcccttcgttcaagaactagggtttggaaaactaactcctaactcttgtgtatttattgtttaaacagaaataaactacggcgttgcttgcagatacaaaaaaaaaaaaa

SEQ ID NO: 1288 - DNA, 2339 bp, Cricetulus griseus
  modified_base (23)..(23): a, c, t, g, unknown or other
gaaaatcgaaacatttggctagngtacgtgtggttcaaaaaaacctcgtctttgttgtaggtctgtcacaacgcctagccgacccagagttttaaaagaccagagattttgggaatttggtaaaatacataaagttgtcatcaataatagcacatcatatgcaggctcacagggtccgagtgccagtgcttatgtaacctatatccggtcagaagatgctctcagagcaatacagtgtgtcaacaatgtggtggtagatggcaggacacttaaggcgtctttaggtacaacaaaatactgcagttacttcttaaagaatatgcaatgcccaaagcctgactgcatgtatctgcatgaattgggagacgaggcagccagcttcacaaaagaggaaatgcaggcgggtaaacaccaagagtacgaacagaagctactccaagaattgtataaattaaatcccaattttcttcagctatctacgggttcagttgataagaataagaacaaagtgacaccattacagaggtatgatacccccattgacaaaccttcagattctctcagtatagggaatggtgataattcccaacagatatctaacagtgatacgccttcaccaccacctggtttatcaaagtccaatcctgtcatccccatcagttcatccaatcacagtgcaaggtctccttttgaaggggcagtaacagagtcacagtcattattctcagacaattttcgacaccccaaccctataccaagtgggcttcctccttttcccagctctccacagacacccagtgattggcctacagctccagaaccacagagcctcttcacgtcagaaacaatcccagtatcatcatctacagactggcaagcagcgtttggttttggctcttctaaacagccagaggatgacttgggttttgatccctttgatgtcactcgaaagccttagcagacctgattgagaaggaactgtccgtccaagatcaaccttccctttctcccacgtctcttcagaactcctcctcacacactacaacagccaaaggtccaggctctggattcctgcattctgctgcacctacaaatgccaactctcttaatagtaccttttcagtcttgccacagaggttccctcaatttcagcagcaccgagcagtttattaattcgttcggttttccaggccaggcagcccgctatccttggatggccttttccacgcaatagcatcatgcacttgaaccacacagcaaaccccacctcaaatagtaatttcttggacttgaatctcccgccacagcacaacacaggtctgggagggatccccatagcaggggaagaagaggtgaaggtttcgaccatgccactgtcagcctcttcccattcattacaacaaggacagcagcctacaagtctccacactactgtggcctgacagcagaactgagaaaggagaggattagactctggggtgcttgcatgggcaactggatttttgcatgattcctttctgattttgcatttaatgtatacacccaaaagagccaaatataaaacgttcctcatgcctacaactagcgtgtacctcatagttgcctaaagtatttcttccattaggcctttaacataatttattagcgaatacatataaaacaagactggtggtgtcatttaatgctcagaaagatgttgtcagccattgtttttagttgcctagatttatatcatatattatgcattacatgtatacaaactgttttgttcttcttcatttgcacatttgcacttttcttttgaatggttgttaattatacgtagatggttaaaaggtattattatggcctaaatgcaatataatctcttttctaatgcactgcctagtataccaggaaatgcctcaaaacagaatttcaacttgtagttgatttattagaaacttgaacatgggtaaacattgtatgtaagtagtagccatagtaaataaaacatcttatttgaagatgttgctcatgttatatagcattggcattttctgggttacctttcaatataaaatatggtgacttcctgttacatacaacaaaataaatggcttcatcctgaggtatagtggagtaaagtgaaaatttattcttgtttcttttctttcttttttttggtttgagtatcatagaattgaccaattatctatctaatttgtgtttttacagttcagcataaatgccaatctctagtttgcatttaaaagtaaatttatagcaacataatgagaaagcaaactgtcttagaaaacaccatcacaatactgtatacttattaaacataagccttt

SEQ ID NO: 1289 - DNA, 2338 bp, Cricetulus griseus
cgcgcccgcgcctctcgcacccgagagcaacttcctcgatccctaagtcctcgcaaccttcctatccttttgtgtgcttataaaggctcctgggcttctctatccagagttgttctgtgttggttggccatggggagcactctgggctgccatcgctctatccccagagacccctcagacctgtcacataaccgtaaattcagtgcagcctgcaacttcagcaacattctggtgaatcaggagcgactgaacatcaacactgccaccgaggaggaactgatgaccctgcctggggtgacacgtgctgtggccagaagcatcgtggagtaccgagaatacatcggtggcttcaagaaggtggaagatctagcactggtcagcggtgttggggccaccaaactggaacaggtcaagtttgagatctgtgtgagcagcaagggtaactctgcacagcactctcccagttccctgagggcgggacctgctggctgagcagcagcctcatcacctggccacctctgtgcccctcactccacgagtcaatatcaacacagctaccctagcgcagctcatgagtatccgaggcctcaccgagaagatggctgtcagcatcgtggactaccgccgtgagcacggtccttttcgcagtgttgaggatctggtgaggatggatggaatcaatgcagccttcctggacagaataagacaccaggtgttcgcagagaggtccaggcccccatctacccacaccaatggaggtcttacctttactgccaagcctcatcccagccccacctctctgagcctgcagagcgaggacttggacctgccaccaggggggcccacacagattatctccatgcggccctctgtggaggcctttggaggtatgcgggatgggcggcctgtgtttaggttggccacctggaacttgcagggctgctctgtggagaaggccaacaaccccggggtccgagaggtggtctgcatgacgcttctggaaaacagcatcaaacttctagctgtgcaagaactgcttgacaaagaggccctggaaaagttctgtacagagctaaaccagccgatcctgcccaacatccgaaagtggaaggggtccagaggatgctggaggtctgttattgctgagaagccttcaagtcagctccagaagggcgcctgctactctggattcctgtgggacacagcagccagtgtggaactgagggacatccccggccaagagagctcacctagcaatggtcatgggaaggctgtgggtcccagtccgttcctcgccaggttcaaggtgggaagtaatgacttgaccctggttaaccttcagctgacagccctggccctcccaggagctgagaatccaagcaagaatcacggcgatggccaccggttgttgaactttgcactaactctacaggaaactctaaaaggagaaaaagatgttgttattttaggggattttggccaagggccagatagcagtgactgtgatatcctaaggagagaaaaatttcatcatgtgatcccagctcacaccttcaccaacatcagcaccaggaatccccaaggctccaagtctgtggacaacatctggatcagcaaaagcttaaagaaagtgttcacaggtcactgggctgttgtgagagaaggtctcacaaacccttggattccagataactggtcctggggtggagtcgcttctgaacactgtcctgtgcttgctgaattatacatggaaaaggactggagcaagaaggaagtccccaggaatggcaatggagtcaccctagagcgaagtgaggccaacattaagcatgagcgatgatgacctcactgtttctaccgtctgactcgggagggcaaaggaaggagctggcactacaggctgagaagattcggggcctttgaatcagcatcctgaggaccttcgtcttggtccctggaccactgcctgctttgtgaacactttagaacatctcctgaggggagcctatcaggcactggatatgctgggcactacagcaaagctagctgggactgcaacatcttgatgctggacagctgagttcaggcttggggtgggggctgcactgctgaatgcatcgcatggcagcatgagagcagcaacagaggtaaagcagagatgtggaagtggttgaggctgacaagcaatgccacggctctcatgtctgcctcaccgggacgtgacgttctgcagacaaattccaggaagcttttaactgtgatgaatgcacttctcaaagtatttttagttttagttttaaaaaagataataataaacagattaatctgactggcttca

SEQ ID NO: 1290 - DNA, 2338 bp, Cricetulus griseus
caattttgaagcagccactgagtagcttccagaaggccctgctgctcaaccagaaccatgtgcagaccctgcagctccgagggatgatgctctatcaccatggcagcctgcaggaagccctgaagaacttcaagcgttgcctgcaactagagccatacaatgaagtgtgccagtacatgaaggggctcagccatgtggcaatgggacagtttttatgaaggaattaaagcacaaacaaaagttatgctgaacgatcctctgcccggtcagaaggctagcccagagtacttgagggtgaagtacctccgagagtattctcgatatctgcatgcacacctcgatacccccctgacggaatataacatcgacacggatctaccaggcagcttcaaggaccactgggccaagaacctgccttttctcatagacggctacgaagagcagccaggcctgcaacctcacatcaaggatgtgctacatcagaactttgagggctacaggcctgaagtacaagagatgatatgtgtggctgaccgcctgggctcactgatgcagtatgaaacacctggcttcctgcccaacaagaggatacacagagccatgggcttggcagcactggaagtcatgcaggctgtacatcgtacctggactaattcaaaggttcgcatgaatggaaagacaaggctgatgcagtggagggacatgttcgacattgccgtgaagtggagaaggatcgctgatccagaccagcctgtactgtggctggatcagatgccagcacgaagtctcagcagaggtttcaacaaccatatcaacttaatcaggggtcaggtgattaatatgagatatctggaatattttgaaaaaatacttcattttattaaagatagaattcttgtttatcatggagcaaataatccaaagggcttgttggaagtcagagaagctctggaaaaggtacataaagtggaagaccttcttccaattatgaagcagtttaataccaaaacaaaggacgggttcactgtgaacaccaaagttcccagcctcaaagatcaagggaaggaatatgacggcttcaccatcactatcacaggagacaaggttggcaatatcctgttttctgtggaaactcaaaccacagaagagaggacacagctgtatcatgctgaaatagatgccctttataaagacctgacagcaaaaggaaaagtactgatcctctcctccgaattcggggaggccgatgctgtctgcaacttaatcctatccttagtttattacttttataatttaatgccattgtctcgaggatctagtgtcattgcctattcagtcattgtgggagcactgatggccagtggtaaagaagtggctgggaagatccccaaagggaagagttagttgactttgaagccatgacagcccctggttcagaggccttcagcaaaatagcaaaaagctggatgaacttgaaaagtatctccccttcctacaagaccctgccatcagtgtcagagacattcccgactctgagatccatgatggaggtgctcaacacggactccaccccacggtgtctaaagaaactctagctacatgagaggatttgtacacatgaagggccaggcctcttgcttcttaagttattttttaaacatggaattattatggaattaggttctttattacttttgataccaatttttgataggaattgaatacttgaaatcactttacttttctgaaccataacagaaatcatgaaaacgggttttgggggaaagctacttgaccaggaagggaagtgtgtgtattaatggcacctgttggttcccatgtgttaaggcatactgttccttccttacagcaaaaaaatgtttacttcaaaaaccaaaaattaataattattaagatgaacaaagccagcaaataagcaggccttgtctttactcgtcagaggtatagatgttcctcagacttccttcctgtgcacctttgtggggtgaactactgccatgcccccatgtgtgggccttccatcctcccagaaccacggaagggccctgccacctatggttccatggcttgtgcaaacgacacagacagtatttgccaatgtcccgacactgaatcactgaaccatgttcctctttcttttgttggaagaataagccgaggtgatttctgtaagtcaccgagtttgggcactggattatgttgtttttatgtgtgagctagttttgcttttaggtataagaacattgagaaagtctcttgttttctcagataaggtgaatgatgcagtaagatggtccattaaacttgcagtttcaaa

SEQ ID NO: 1291 - DNA, 2338 bp, Cricetulus griseus
  modified_base (1892)..(1892): a, c, t, g, unknown or other
cctggcgagtcacacttgagttcggaccaccgagggcgcgcttctcttgttgaccatgtcatggctctttggcattaacaagggccccaagggcgaaggcacggggcctccgctgcccttgccgcccgcgcagcctggggcggagggtggaggcgaccgtggtgctggagaccggcaatcgcccaaggacaaatggagcaactttgacccgacaggcctggagcgtgcagccaaagcggcccgcgagttggagcactcgcgccatgccaaggaggcgctgagccttgcgcagatgcaggagcagacactgcagttggaacaacagtctaaactcaaggaatatgaagctgctgtagagcaactaaagagtgaacaaatccgtgtgcaagctgaggaaagacggaaaaccctgagtgaagagacccggcagcaccaggctagggcccagtaccaagataagctagctcgacagcgctatgaggaccagctgaaacagcagcaacttctaaatgaagagaatttaaggaaacaagaggaatctgtgcagaagcaagaggccatccgtcgagccactgtggagcgagagatggagctgcggcataagaatgagatgttacgggtagaagctgaggcccgagcccgggccaaggctgacagagagaatgcagacatcatccgggaacagattcgcctcaaggctgctgagcaccgccagaccatcttggagtctatcaggacagctggcaccttgtttggtgaaggattccgtgcttttgtgacagactgggacaaagtgacagccacggtggctggattgaccctactggctgttggagtctattctgccaagaatgctactgctgttgctggtcggtatattgaggcccgcttgggaaagccatccctggtgagggagacttcccgcatctccgtgctggaggcactgaggcatcccatccaggtcagcaggcgactggtcagccgaccccaggatgcactggagggtgtcatcctcagtcctagcctggaggcacgggttcgagatattgcgatcgcaacaagaaataccaagaagaacaaaagcctgtatagaaacgtcctgatgtatggaccaccaggaactgggaagacactgtttgccaagaaactcgcactgcattcaggcatggactacgccatcatgacaggcggggacgtggcccccatggggcgggagggtgtgaccgccatgcacaaggtcttcgactgggcaagcaccagccgacgagggctcctgctctttgtggatgaagcagatgccttcctcaggaagcgagcaactgaaaagatcagtgaagacctcagggctactctgaatgcattcctacacaggacaggacagcatagtagtaagttcatgctggtcctggccagtaaccaacccgagcagtttgattgggccatcaatgaccgcattgacgagatggtctgctttgcactgccacagcgggaggagcgagagcgcctggtgagaatgtattttgacaagtatgtccttaagccggccacagaaggaaagcaacgcttgaaggtggcccagtttgactacggaaagaaatgctcagaggtggcccagctgacggaggggatgtcaggccgggagattgctcagcttgctgtggcatggcaggccatggcatatgcctctgagaatggggtcctcacggaggccatgatggatgcccgagtcgaggatgctgttcagcagcaccagcagaagatgcagtggcttaaagtagagagacccaatcccgaggccagcgagccaccatgtccttgactcctcatctgctggctggaccaagacatcttgtacgcctgactggggacagccagcctctgtgaccacactnttcctttcttctcctgtcaatgcctttgcccagctgtgggatgctggtggtgtcagcttctctgcctcccacacctcctagtctctctctgtatgagtgctggcagaggaaggcatgctgccttcctgtaccccagtacactggtaaggcttgtctataagcccagagcagagaagggaggaagcagagtgctgcatcacaggccaatagctatggctgtgccagcaagactgggacctgcagggaccagactacaggcaggaaaggcctcctggacatttctcctgccctgcatacttctgtgccaagaattggcccagcctttactaggtagagtggatctggtgctagacagcctctgggctgtggcatccaggattcagaggtgccaccttccccttgactggatctttgaaatgtggactataataaaactgtgactgatt

SEQ ID NO: 1292 - DNA, 2338 bp, Cricetulus griseus
cgcgcatggaggccggctgaggagcgccgccgcctcgctcggcatcctacatcaatcaggaagctgctgtccagtcatgggagggagaggagaagccaactcaagagactgatatggaacccgtggtaacatcaggggcctcagaaacagttccaagggtgccttctggagaccctcaaaacatctctgatgtcgatgccttcaacttgctgctggagatgaaactgaagcggcggcgtgagcggcccaaccttccacgtactgtgacccagctagtggcagaggatgggagcagggtatatgtggtgggcactgctcacttcagtgatgacagcaagcgggatgtagtgaagactatccgggaagtacagcccgatgtggtagttgtggaactgtgtcagtaccgtgtgtccatgctgaagatggatgaaagaacgctgctacgagaggccaaggaggtcagcctggagaagctgcagcaggctgtcaagcagaatgggctcatgtccggactcatgcagatgttgctactgaaggtgtctgcccatatcactgaacagctaggcatggccccgggtggcgaattcagggaagccttcaaggaggccagcaaggtaccattctgcaaatttcacctgggtgaccggcccatcccagtcacctttaagagggccattgcagcactctccttctggcagaaggtcaagctggcctggggcctgtgcttcctgtcagacccaatcagcaaagatgatgtggagcgctgcaagcagaaggacctgttggagcagatgatggcagagatgattggggagtttcctgacttgcatcgaaccattgtctcagagcgtgatgtctatttgacctatatgctgcgtcaggctgcacggcgccttgagcttccccgagcctctgatgctgagcccaggaagtgcgtcccatctgtggttgtgggtgtcgttggcatgggtcatgtgcctggcattgagaagaactggagcaccgacctcaacatccaggagatcatgacagttccccctccatccatctcgggcagagtgtcccgggtggccgtgaaggctgccttctttggcctgctgggctacagtctgtactggatgggccgtcgaaccatgaacctggtcctatcactgcctgctgcgcagttttgcctccagagagtgagtgaggcccggccaggccggtaggaggaccatggaaagaagagaccacacccaggggctctactcctctgcatcacatccggtgctcccgaggaactggcaccacctgtccagggatgtccctgggtgcagatgcatccaagccaccccctatgggggcctgggctaggcttaccctaccttccttatgcccagcccacccaaataaagaatatttaactgtctgagctcaggcttcccagcagccccaaacacacactgtaggggccacccacgggcatcagggccgtccacagtgtcaggacccagcagcctaatttcaggagggccagaagctgagaagaggcactaaagtgccccatgcctaaccccagggtgggcctggcaagctgttgctctacctacctcactgtgccttgtgctctggctggcaagagcatctggccctgagtgcatctcactgtgggtttggggcgtgtccatgtagctccttcctgtgggtgtgtagggtctttggctggcctggacatgcatgtggcattgccagttgcatctctgcctgcagagagtctgtggtttgtttggtttttgttttttaatgtcaaaaagttttttactcaggtaattttgacgtcaaagaaaaaacaaactcaagcaaataccaggaaatacaagccttaaatccagtgaggacaaagaaatctttttatttgtatttgtgtgccccaagtgggcagtgtatcttagagcgtcagcttgcagaagggtccaagccagcccctgctggactccacaacagctcagtgtggtgtggggctgcctcagatatcagcctgcttcctggctgcccttggtgcctggaggggctaggcctgattcctgtggattaggtggaatgcccaaactgcactgtggacagtagtggacccaccatgggccacagccattcacgtgtacaggctgtggctcctggcatactatatagcctggcaagaccaagaccattctgattatccttgtgttgactgccaaatcaagtgaaacactgagctgggcaggggatacagggctggttgggctatgtacttctgtctcacactcgtggattcattccctagaaagaaaaataaattttaattttggaaaaaaaaaaa

SEQ ID NO: 1293 - DNA, 2337 bp, Cricetulus griseus
ggagggcctgttatgaacacaggccacccaatgggtgtgaactcagatcctttccttatggcagcaggttctcttggtggaaacctggctccatttccaaggaatccaacttctttccaaagttcatcgggctcattggcttcaaatccagcacattttcctgctggtgctcgtgacccaagcatggcttcttttccaagagggatgaatcccactggcactggtgcagtttctttcccaaggccaggtggtcttttgggaccaggaccaggaccaggcttaaaccctagaacaggggctcttccaggcccagggcctatgtctaaccccagattaggagggcttcctgggccctggtcctatggctaatccaagggcaggtgggctcctgggagcaagtcctgaccccagaagtggtggccccatgggtcctggatgtgtgcccaacctgagggcaggtgtcttatcctctggtactggtcctcccaatcctaggccagttggcctgggccccggaccaagtcctaatctgagatcaagctttttaggtacaaacgcggctcctaggtcgggtgtatttccaggcccaggcctggggcccaacccacgagcaggtggtttaggtccaggccttggacctaacccgagagctggtggcctaggcccaggcccaaatctggacactagagcaggtggcctcttgggtacaggatctggtcttaatttaagaatggctggacctcaaggcttagatcttgcccccattctaagggcagcaggtcttttaggagcaaattcagcttctttctcacaggcttctggaaacatgggcacaaacccacctaccatgtcaagagtacctggtcccataggcccaaacacaggtcctggctcccgaggaattggccttccagggccaaatccctctgccatgccgagggctcctggccccatgggccctaattcagctcatttctcaagaccaggtggcccaatgggggtaaattctggagcctttcccagggggacaggatcaggaggactgaacccaactgtcttttctcagtcttctggtacattggcttcaaatccaggtacatttcagaggtctgctggtctccagggctcaaatccagcaattttcccaagagcctctgggccactaggccccaaccaacctaactttccaagggccactggccttcagggtccaagtccagctgccttcccacgatctgctggtccattaggcccgggtcaagttgctttcccaaggtcagccgctgggcaccttggctcttctccagcaggccctgtgggtatcaacccaactccttttgcaaggccaacaggaaccctgggtcttaacccagcttcctttccaaggatgaatggccctgtaaccaagactgtggtcccatttcctcgggtaggcagcctccctggttcaaatccagctgctttccccagaccagggggtccaatggctgcaatgtacccaaatggaatgttacccccttaaataccatttttcttccagggccactttgttttttaagcactgtggttctgtggtggggctgtctcttagataaaagagtagatttggagctacagtctgaagaacatagctggggctcaagttcaaatgagcattcttttcctctgctttttttcttgactgaaggcaaatgttatttgtgagacatggcctatggcagacagggatgattctggcctcaagaaaaagggtctctggccttctggaagcctgctgtgcttttgtcccacagctttctgccccttgtttcttactagtttcttgaattgttcttgtggacttttcctcagggattcattggcctgcaggtcctaattgcccgcttcccattggagaactggctcacttgctatctggtgatgctacattggtgagcagatcatgcttcagtaactctgacctgggcaccctggacctggtcatgttctactgccagacctttccctgggggcttgaacacagaatggggaggtggacactcatgtcacagatcctaccacatttctgctttgtagctcctttctcctgggacttaggtggccagacttaaggctcctctgatcatccagctccctcccactggtactcccaatcaaagaacctcaaactcaaactgatgtggaggggaattggggaattggggtgggggtggagggataaaagggagaatcactgtgcttcgttcagcctgatgtgaaggatggttggtgtttttcctgcattgtatcttttcttactgtttctttaataaatgggatgagagggcggttgctgtc

SEQ ID NO: 1294 - DNA, 2336 bp, Cricetulus griseus
gtggactttgctgtggagaacagcactggtgggggtgtggcagtcactcgccctgtcacgtggcagctggagtacccaggtcaggcccccgaagcagagaaagacaaaatggtgtgggagatcctggtgtctgagagggacatcagagccctcatccccctggccaaggccgaggagctggtgaacacagctccattgacaggagtgccccagcgcatccctgtgcgtctcgtcactgtggacagtgggggagccctggaggaggtgacagagcacattggttgtgagtcagccaacacacaggtcctgcaggtatctgaggcctgtgatgctgtgtttgtggctggccaggagagtcggggggccaagggagtgcgggtggacttctggtggcgccgactgcgggcctcactgaagctgaccgtatgggccccactattgcccctgcacatcgagctaactgacacgactctggagcagattcgaggctggagggtcccaggcccagcagaagggcagctggagcctgaggccgctgttgaggaggcagagaaacgctcccggggctgccgcctgcagtaccagagagctggtgtgcgcttcttggtaccctttgtggcccacccgctggatggtggccgccgcctcacctacctactcggccctgactggctgctggatgtgactcaccttgtggcagcccatgcccgtgtgcaagatcctcgcatagcctccttggaaggcggccgtatcctagtgggtcgggagcctggagtcacctctattgaggttcgttccccactatctgactccatcctgggggagcaggcactggctgtgacagacgacaaggtctcaatgctagagctgagagtgcagccggtgatgggcatctcattggccctgagccgaggcatgatccaccctggggaggtcacagccacgagctgggcccagtcagctcttccagctccaaagcaggaggtggccctctccctgtggctgtccttctctgaccacactttggcccctgccgagctctacgaccgcagtgacctgggactgtcagtctcagctgaggagcccagtgctgtcctaccggcggaagagcagggagcccgacttggtgtggtggtgagtggagtaggtgctgaagggctgcccctacacgtggctctgcacccaccggaaccgtgtcgccggggccgccatcgtgtgcccctggcttcaggcactgcctggctggggctgccccctttgcccacgccagctcctgccctcccatccagtcctgcccggagtccaccattcacagaagccactgtggagggaaagcggcaggtagcgggtggtatggggggccatgtggacgttagaggcaagtttgagcgggcagaggaagaggctgggaaggaagaggatgaggccaaagaagaggaggaagacgaggaagagatggtgcctgcccctcagcgtgtcaccgacctagagctgggaatgtatgctctgctgggtatcttctgtctggccatcctcatctttctggtcaatggtgtggtcttcgtgttgcgttaccagcgcaaagagcctcccgacagcgctacggacccttcctccccgcagccgcacaactgggtctggctgggcaccaaccaggaggaactgagtcgtcagctggaccgttgctcctccccgggcccacccaagggggaggggggctgcccctgtgaaagtggagcaggaggggatgccccaaccgtggcccccagtgcttcagagggcactgtcggctcctcgagcaccctggcccgcaaagaagctgggggacgtcggaagagagtagagtttgtgacatttgcgcccgcacccccagcccagctgccggaggagcctgtaggggccccagctgtacagtccatcctggtggcaggtgaggaggacatccgctgggtgtgtgaggacatggggctgaaggacccggaggagcttcgtaactacatggagaggatccggggcagctcttgactactccctggcctgccaagtgcagcttcagccaccagcccaggcagtgggaccagtggggtgtctggctggacttcttgcctggcccttatgctcatcctctggtgcttgttgatccgagtcccctgcttgggtccccttgggacccccccaggtcccctccacccccatcccttgttgtggaccatggtcaagagggagggcgcatgccccttatttatgggaaccacttcattctaatgttgggtacagaataaatgagaatgggaacaggcataaaaaaaaaaaaaaaaaaaaaaaaaaaaaaaaaa

SEQ ID NO: 1295 - DNA, 2336 bp, Cricetulus griseus
gatgatgaagaggggttggctggatgcttggcacaggcacgaggagttgccaagaaagtcaatttgggcatggctctggccaggctctgcctcctgctggggcggctgtgtgcccgaaaactcaagctatcccaggcccgggtgtactttgaggaagcactgggggctctggaaggcagttttggggacctctccctggtggcagcagtgtataccagcctggctactgtgtatctgaagcagaagaatggggagaaatgtgtgcaggtcgcacccaaagctgcagcccttttcttggggacgcctggccatgcatacagtacggacactgagctcctgaagtacgcactgcgcagggccatctgtggcctcagcccacaggcccgaggcccgtgcctgcttcctgctggccaggcattacacccacctcaagcagcctgaggaggcactgccgacatctatggccggaagtgcctgccccatctggcactgagctgcctcagggtgtcctcactgtggactaggtgctcgttggccagctccttgaggagtgtggacctggtactccggatcctggtccaaaatagccaaaaggagggcaaaaccaccgcctccccacccagattgcttactacctcagaaaggcattggcttctctcactccgggcacgggacaggcactgtgtgggcccctctatgccagtctagctcaactgtacagccaccatcagcagcacaaccaggccattgcctttatgtctcaggctgcagaagctgacactgcagctgggatctaccctgtcgtagaccgtttggtggcgcttgcctggctgcacatgctttgtggaaagaacttagtagccatggacatcctgaagtccaatcttagacgcagctgtggccaacaaggaccaggggcaggacccgacaggctgccgaaggttacttccgagctctgcacatggcctacagccagggccacctcaagagccaggcagtagtcctggccaacttcggggccctatgccttcaagctggtgcacgtagcttagcccaacactacctgcgggaggcgtgtgggactcttctcccagctgcccagtagtgtgtgtggccgggacttcacccaggttctcctgtggttgggccaactatgcacccgtagggccctccaccaacaggccaagtgctactacgagtgggcctttctggtggctgtggagatgggaccatctggagagtcagttacaggctgtgcaaaagctatgccacttctacagcaaggtcatgcccaacgaggtacgatgtgtcatctaccatgagttccaactggcactggcacgcaggacagctgacaaggtgctagaaggtcagctcctggaggccatcagccagctctacctgtcgctgggcactgagcgggcctacaaatctgctctggattacaccaaacggagcctggggattttcatcgacctgcagcagaaggagaaggaggcacgtgcctggctgcaggctgggaagatctactatatcctgcgccagaatgagctggtggacttgtacatccaggtggcacagaatgcagccctgtatactggggatcccaagctggggctggagctatttgaggcagctggagacatattcttcaatggaacctgggagcgggagaaagctgtgtctttctatcgggaccgggcactgcccctggctgtgactataggaaatcaagaggcagagctgcgcctgtgcaacaagctggtggcccttctgtctgcactggaggcaccccaggagggcctagaattcgcccatgaggccctagcactcagcatcaccttgggtgaccgcctgaatgagcgagtggcctaccaccggctagccaccctgcatcaccagctgggccacggagaactggctgagcacttcttcctcaaggctttgtcactttgcaactcacccctggaattcgatgaggagactctgtactatgtgaaggtgtatctggtactgggtgacatcatcttctatgacctgaaggatccctttgacgcagctgggtattaccagctggcactggcagcggccgtggacctgggccacaagaaagctcagctgaagatctacacacgcctggccaccatctaccaccacttcctcatggaccgtgagatgtccctcttcttctatcaaaaagcaaggacctttgcctcagaactgaacctccgcaggaccaacctggtgccccagcgcttctgtggccggacaccctggctggccccctggttacccatcctgacaacctgagaagggtctgtgcaaggggactcttc

SEQ ID NO: 1296 - DNA, 2335 bp, Cricetulus griseus
cccagccgtcaagatgggtgaatcaaatgaagacatagaccagatgttcagcactttgctgggggagatggatctcttgacccagagtttaggagtggacactcttcctcctccagaacccaagccacccgagaagagttcaactacagtgtgggtttaaggatttacatgagtccttaaatgccctggaagaccaagatttagacaccctcatggcagatttggtagcagatataagtgaagctgagcagagaaccatccaggctcagaaagagtcctcccagaatcagcaccactcagcgcttcaggaggcatcagatggctgggttgcagcgtcacttggttatggagcaagtgctgctgcagctggtgttggccactatgaagatgctttaccacctccaccagcagaacccatgttagaccttccaccacctccaccacctccaccacctcctgaacctctctctaaagaagaagaagaagcccaagcaaaggctaataaaattaaattagcactggaaaaactgaaggaagccaaggtcaagaagcttgtggttaaggtgcatatggacgataatagtaccaagtcactgatggtggatgagcgacagttggctcgggatgttctggacaatctttttgaaaaaacccattgtgactgcaatgtggactggtgtctttatgaaatatatcccgaattgcaaattgagagaatttttgaagaccatgaaaatgttgttgaagttttatcacactggacaagagacacagaaaacaaagtactgtttttggagaaagaggaaaaatatgctgtgtttaaaaatcctcagaatttctacttggataacaaggggaaaaaagaaaacaaagaaaccaacgagaaaatgaatgctaaaaacaaagaaaccttacttgaggaaagtttctgtggcacatccatcatcgtaccagaactcgaaggagctctttatttgaaagaagatggaaagaaatcctggaaacggcgctactttcttctgagggcttctggaatttattatgttcccaaaggaaagacaaagacatcccgagatctggcgtgttttatacagtttgaaaatgtaaacatttactatgggattcagtgtaaactgaaatacaaagcacccactgaccactgctttgttctaaagcatcctcaaatccagaaggaatctcattatatcaaatatctctgctgtgatgatgcaagaactctcggacagtgggttatgggaataaggattgccaagtatgggaagaccctctatgacaactaccagcgggctgtagcaaaagctggacttgcctctcggtggacgaacctggggactgttggtacagcaatgccagctcagactagtacagtacaggacttaaaacaggcaccagccagcccaatggtcagattccccaggcagtgccttctgttggtgctcttctccaagaggcccagacacaagttgaaacaactaaggaggagaagcaaggcttgggtaaccactacccaggtgcaaccaaagagaatcatcgcctgaagtccagcctgccaccaccccctccagtaagacgatcttcggacacctgtggcagccctgccttaccaccaaagtccaagggccttggtagcagcgccttccccgccccgcccgacgacttcctgcctccacccccgccaccaccacccgaggaggacagcgacagcgagttacctccaccacctccaagcctcctggaggagccaccggactttgtgccaccacccccaagggctgcggcctttgaaggctctgaattgccaccaccaccaccaccccctccctgtctctcccaggagacgacgaccatgtcatctccaatgccccccaaaaagcccccagtgccccgcaagaggcaagagaaccaaggactccccggtgcagcaggaagcggcgagcaagatttcatgtcagacctcatgaaagctttgcaaaagaaaagaggcaatgtgccctagggatatatgttagtgtctgtgatcatttctaatttgatccatgtttttggtactctattgctgtggcatcttgatcattttagtaaaatgttttctgactagaaatcatgtaaaactcttcacagttgtaaatattatgttcacatccattaaggcagctgaggttttcaaactaactacatccatccaagcacatacatgtacatcccgtatgttttcacctgagtggatttcatcttgcagtccaggcttcctgaaatgatattctaggttcgttttattgtattcagaaggctcaatttttaaaaattaaatttt

SEQ ID NO: 1297 - DNA, 2335 bp, Cricetulus griseus
atgatgtcccagagggggtagagagtgtgatagagcggctcctggttgggttgaaggacaaggacactgtggtgcggtggtctgcagccaaaggaattggtaggatggctggaaggcttcccagagagctggcagatgaagtagtggggtctgtgctggcctgcttcagttttcaggagtgtctggcattggcagagcctggcttccaggagaacgagggaaggtgccctgtctcccacggaattgatattttgactacagcagactattttgcagttggtaacatatctaactgtttcctggttataagctggcttccaggaatataccaagccgatgattgaccacttggtctccatgaaaatcaaccattgggatggggccatccggagaactgtctgcaaaggcactgcacaacctgaccccacaagatcctgagtacatagccacccatgtattcccaacattgttgttgatgacactgagtccagatctacacacaagacacggtgccatcctttcttgtgcagaggtcacctatgccttatacaagctggcttcacagacaaacaggcctgtcacagactctctgggtgagaaggcagtgcaaagcctgaagcagatccaccagcagctttatgatcgtcatctctataggggtctgggaggagaacttatgagacaagcagtgtgcattttaataaagaacttgtcactttccagaatgccctttaaaggtgacaccgttatagatggttggcagtggctgataaatgacactctcagaagccttcactttgtttcaagccattccagacaacagatcaaggaggcagctgtctcggccctggccgccctctgcagtgaatactacatgaaggagcctggggaggcaggctctgccgtggagacggagctgattccacagtaccttgctgagctccagagcccagaggagatgacccgctgtggtttctcctcagccttgggtgccctcccaaatttccttctcaggggtcatctgcagcaggttctcacaggtctgagaacagtcacctgtacttctcccaaggatgtaagctttgctgaggccaggagagacagtttgaaggcgatctcaagaatttgccagacagttggtgtgaaagcagagggtcctgcagatgaagtcatgtgtaaagagaacatttctgaagtttattctgcattgctgggctgcatgagtgattacaccacagacagcagaggggatgtgggagcctgggtccgtgaagctgccatgaccagcctcatggacttgacacttctgctggcacagagagagccagtgctaattgaagcccacatctgtgagcgtgtcatgtgttgcattgcccagcaggcaagtgagaagattgatcggttccgtgctcatgctgcccggatattcctgactctcttgcacttcgacagccctcccattccccatgttccccaccgcagagaactggaaagtctgtttcccaggtctgacgcggcctctgtgaactggaacgcaccttcccaggccttcccgctcatcacccagctcttgggactgcccacctacagataccatgtcctgctgggcctggccgtgtctgttggtggtttgacagagtctacggtcaggcattctacacagagcctctttgagtacatgaaagggattcagaaggatgctcagctcctggagagcttcagtgaaaccctcctgaaggtctttgaggacaacctcctaaatgacagggtgtccatatcactgctgaaaatgttggaccagctgctggccaatgggtgcttcgacatctttacctctgaggaaaaccaccccttttgtgtgaagttgctcgcactttgtaaggaagaaatcagaaagtcaaaagacatccagaaacttcggtcaagcattgcagtgctctgtgggatggtacagttcaacggtgatgtgagaaagaaggttcttctgcaactgttcctcctccttggccaccctttccctgtgatccggaagaccacagcaagccaggtgtacgagatggtgctcacttatagcgacttggtagatgccgatgtgcttgacgaggtcatgtctgtgctcagtgacacagcctggggcggagagcttccagttgtaagagggcagcggaaccacctgtgtgatctccttggcgtgcccagaccccagctggttccaaagcctgctcctggaagctgagtccttgcctacctagctgggatgtcctgccctgaggcttcacaacaagctttaccatcatggaaacattgtgtcacagacctctgagaaaggtggcac

SEQ ID NO: 1298 - DNA, 2335 bp, Cricetulus griseus
ggctttagtggcagcatgaagcgcgcccagactgcggaggaacgagagcgtgaagctaagaaactgaggctcctcgaggagcttgaagacacctggcttccttacctgacccccaaagatgatgagttctatcaacagtggcagctgaaatatcctaaactggttctccgggaagccggcagtatatccgaggagctgcataaagaggtccctgaggccttcctcacactgcataagcatggctgcttgtttcgggacctggttaggatccaaggcaaagatgtgctcaccccagtgtctcgaatcctcatcggggacccaggctgtacctacaagtacctgaacaccagactcttcacagtgccctggccagtgaagggctgcaccatcaattacacagaggctgagatcgctgctgcatgtcagaccttcctcaagctcaatgactacctgcagggtgagaccatccaggccttggaagaactggctgtcaaagagaaggctaatgaagatgctgtgcctttgtgcatggcagagttcccaagggttggcatggggtcatcctgtgatgatgaagtggacattaagagcagagcagcctacaacgtgactttactaaacttcatggatccccagaaaatgccctacctgaaagaggagccttatttcggcatggggaaaatggcggtgagctggcatcacgatgagaacctggtggacagatcagccgtggcagtgtacagctatagctgtgaaggctctgaggacgaaagtgaggatgagtccagcttcgagggcagagatcccgacacttggcatgttggtttcaagatatcgtgggatatcgagacgccaggcttggcaatacctcttcaccagggagactgctatttcatgctggatgatctcaatgccacccaccagcactgtgttttggctggttcacagcctcgttttagttccacccaccgagtggcagagtgctcaacaggcaccttggattatattttacaacgctgccagttggcgctgcagaatgtcctcaatgactcggataatggtgacgtctctctgaagtccttggaacctgcagttttgaaaaaaggagaagatatccacaatgaggtcgagtttgagtggctgagacagttctggtttcaaggagatcgaaacaaaatttgcaccgattggtggtgtgaacccatgactcagctggaggggctgtggaagaagatggagagtgtgacaaatgctgtgcttcgtgaagttaaaagagaggaactccctgtggaacaaaggaatgaaattctggctgccatcctggccccgctcaccgtgcgccagaacctgaggaaagaatggcacaccaggtgccagtcccgaattgtccggtctttaccagctcatcagaagccagactgccgaccctactgggagaaggatgacccttccatgcctctgccctttgacctcacagaagtggtttcagagctcagaggcctgcttctggaagcaagaccctagaggaagcacaattcttcaggggagaagaaaaagatatctttggctttcctccccaaaccttggacaagggtagtgtagacacctttcaacctgtaggtaataggacctgggtttcagttcaagacagttagaaaataaagctcacaaatactaaaatgttgaataatcaatcactcagtgtttcagtctgatttggtgttaaactagaacacctgtacactgcacacaggaagaggaaggaacaacaaaggaaatggccacatcctggctttacggggcttccctgatccaatgacaggccagccctgaaatgaaatgacctaagtaaggtgtaggtggcttcagatgtcacaggttggcccaccaccaccatccccagctgccaggctctggtttattaggccccatgatatttcttctgtgctctattccattaggtgccaaaattaaaaattggggagattccacataaaataaaaatttctgcattctctttagaagtcagaatgcctatgtgctcctgggtctctatacccgcatggcagtggcttggcagtgtctgtgacctctatgctctgctacgaccctgctactccttgtcgtcattttataaacatgatcccccaacagtgctttctaaacctgcttgctcacacccgttagtagaaagcagtagtgtcgcgtgctcagtgtgtgttcctcctgttgaactgtgttcatggtctgcttgtactgctgtgctgtgtgcacccgttcatacacaataaagaacaaaaagatgagaaaaaaaaaaaaaaaaaaaaaaaaaaaa

SEQ ID NO: 1299 - DNA, 2335 bp, Cricetulus griseus
aaaactggcttctctggacagcctacctattggacaccttgtaactttaaagaaactcaatgtggctcacaatcttatacattccttcaagcttcctgaatattttccaatctgaccaacctagaacacttagacctttctaataactatatccaaacaatttactacacagatttacagactttacgtgaaaatccccagctcaatctttctttagagctgtctttgaacccaattgactttattcaacctggagcctttcaaggaattaggctccatgaactgactctaagaagtaattttaatagcacaaatgtaatgaaaacttgcattcataacctggatggttttacaagtgcatcggctgatcttgggagaatttaaaaatgaaaggaatgtagaaaggtttgaccgctatgtcatagaaggactgtgtaaggtgaccatttgaggagttccggttcacatatgcaaatgagttttcagaagatatcactgattttgattgcttggcaaatgtttctgcaatgtctctggcaaatgtgtatctaaagcgcctagaagacattcctaaatatttcaaatggcaaaccttagcagtcattagatgtgaacttaagcaatttccacctctggaactcccctttcttaaaaaggttgattttattaccaacaaaggggctaccagttttggattttcagcattccactttaaaaaaggccactgaattttcaatgttcttaccccttgaaaaactgctctatcttgacatctcttatactaacaccaaaattgatttcaatggcatattttttggcttgaccagtctcaacaccttaaaaatggctggcaattctttcaaagacaacatcctttcaaattgtctttacaaatactacaaacttgacattcctggatatttctaaatgccagttacaacaagtatcttggggggtgtttgacactctccatagacttgagttactaaatatgagtcacaacaatctactgcttttggatctattccattataaacagctgcattccctcaagactcttgattgcagtttcaatcacatagagacctccaaaggaataatgcaacatttcccaaagagtctagccttcttaaatcttactaataatccctttgcctgtatatgtgaacatcagaacttcctgcagtgggtcaaggaccagaggttgttcttagtgaagactgaacaaatgacatgtgcaacacctgtagagatgaaggactccctggtgctggactttaggaatgccacctgttatgtgcagaagaccatcatcagtgtgtcggtgatcagtgtgcttgtggtatccactatagcatttctggtctacaaattctatttccatctgatacttattgctggatgtaaaaagtacagcagaggagaaagcatctatgatgcctttgtcatctactccagccaggatgaggactgggtgagaaatgagttggtaaagaatttagaagaaggagtgcccccctttcagctgtgcctccactacagagactttattcctggtgtggccatcgctgccaacatcatccaggaaggcttccacaagagccggaaggttattgttgtggtgtctagacactttattcagagtcgctggtgtatctttgaatatgagattgctcagacatggcagtttctgagcagccactctggcattatcttcattgtcctggagaaggtggagaagtccctgctgaagcaacaagtggagctgtatcgacttctcagcaggaacacctacctagagtgggaggacaatgctctggggaggcacatcttctggagaaggctcaaaaaagctctgttggatggaagagcctggaatccagagggagcaacagaggcagaacaagaaacaacaacttccatctgaggaggacaaaacatcttggtctaatactcattctgtttacaagtattaaatattacagctcaccatggttttcctttttacctatttctttaggaaacctgattaatacatgctcatggacatcctggccaatacttagtatgctgtatttattaaataaaaattcctaatatacttttatttttataaattcagttatcatttttcatgccttctttatatactcatatcataaataaggctgttagagatatgctaggaacgcccatattcaactaacatttttcaagcaagtgtgtaaagtatactctgtcaccttgtcactgagtgtcattcttaaattattacttactaagttatggatgtcacagagacagtgttaaaaataatttgttgataggatatttt

SEQ ID NO: 1300 - DNA, 2335 bp, Cricetulus griseus
gagctggctaaccaaggtgcccatgacctgctgctctacgacaacgcccaaatcggtatccgtcaccccaacatcatctgtgactgctgcaagaaacatggacttcgtggcatgcgttggaagtgtcgtgtctgctttgactatgacctctgcacacagtgctacatgcacaacaaacatgaccttacccatgcctttgagcgctatgagacatcccactcacgcccggtcacactgagtccccgacagggtctccctcgagtcccactaaggggcatctttcagggagcaaaagtggtccgaggccctgactgggaatggggctcacaagatggaggggaagggaagacaggccgtgtggtggacatccgtggctgggatgtggagacaggccgaagtgtggccagtgtgacatgggcagatggaaccaccaatgtgtaccgtgtgggccacgaagggcaaaggtggacctcaagtgtgttggtgaggcagcgtgtttggagatggaaacttgcgagtggtcagttggtggtcaacggtggacctttagcccctcctgcttagtggcctatcggcctgaggaagatgccaacttggatgtggctgagcgttccagagagaacaaaagctcactgagtgtggccctggacaagcttcgggcccagaagagtgacccagagcacccagggaggctggtagtagaggctgcactgggaaatgtagctcgggctctggatctactgcgaaggcacccagaacaggtggacaccaagaaccagggcaggactgccctgcaggtggctgcttacttgggccaggtagagctggtgcggctgctgctgcaggcaagggcaagtgtggacctgctggatgatgagggcaacactgcactacactatgcagctctggggaaccagcctgaggccacaagggtactcctgagtgcaggatgtggggtggatgctcgaaatggcactcgaagcacagccctacatgtggctgtccagaggggcttcctagaagtggtaaagaccctgtgtgagcgtggttgtgacgtcaacttgccggatgcccatgcggacacgcccctgcattctgccatctctgcaggtgctggtgccagcagcattgttgaagtcctcactgaggtgcctggcattgatgtcactgctaccaatagccagggcttcacactgctgcaccatgcatccctcaagggccatgtgctagcagtcagaaagattctggcacgggcacggcagttggtggatgccaagaaggaagatggctttactgcactacatctggcagctcttaacaaccaccgtgaggtggcccaggtcctaatccgagagggtcgttgtgatgtgaatgtgcgcaaccggaagcttcaatctccactgcatctggctgtgcagcaggcccacctggggctagtaccgctgctcgtggatgctggctgcagtgtcaacactgaggatgaggagggagacacagccctgcatgttgcactgcagcgtcatcagctcttgcccttggtggctgacagggctgggggggacccagggcccttgcagctgctgtcgaggctacaggcctcaggtctcccgggcagcacagagctgactgtaggcgcagcagtggcctgcttcctggcactggagggtgctgacataagctatgcaaaccaccgtggcaggagcccactggacctggccaccgaaggtcgagtgctcaaggccttgcagggatgtgcccagcgcttccgggagcgacaagcaggtggcggtgggggtatgcccccgggcccccggcacgtgctgagcactcccaacaccgtgacgaacctgcatgtgtctggcacggcagggccagatgctgccgagtgcttggtgtgctcggagctggcactgctggttctgttctcaccgtgtcagcatcgcaccgtgtgtgaggagtgcgctcgcaggatgaagaagtgcatcaggtgccaggtggttatcagcaagaagctacgcccagacggttcagaggtggtaaacaccatccaggtgcccggtccgcctcggcagctggtggaggagctacagagccgctaccggcagatggaggagcgcatcacttgtccgatctgcatcgacagccacatccgcctagtgttccagtgcggccatggggcatgcgcgccctgcggcgctgcgctcaacgcctgccccatctgccgccagcccatccgcgaccgcattcagatcttcgtgtgagcgtgttcggcacaccatggccgataccagacccttctacaaaaaccctgtattttataaaaagattctcggac

SEQ ID NO: 1301 - DNA, 2335 bp, Cricetulus griseus
  modified_base (631)..(631): a, c, t, g, unknown or other
agaagattggactgaagacctttctgaaaccaaagttttcactgcctcgtctgttccagcagagaaccacatcacccctgggcaaagcattgacctggtggccttgctccagaagcctgtccctcccactcaagccgcagaagccaactcctttgaaacatcccagcagcagggctttggccaagcacttgtcttcacaaattctcaacacagcaatcagacggcacaagggtctggcagctccacttctgccaactcctattctcctcagagcccagcacactgccactttgccctccttgtcccagtctggtgacctgtccagcaatgccctttctcagcttagcagttctctctccagccaccagaacagcttgtcctctccacatacagcgcgccccacaagcacgccccacactcatgccagtgtggagagcaccccatcctcagccaccttctcaacagctgcaacctctgccccaagtgccccatccacgggggtctcttgcctgggagcactgggagcagtctgtgtctgggtgggaccacagtgagtgtgcccagcaacagtacccgggccacagcgttggtgacctcaggcaaagcacccccaaacctgcctcagggggtncctcctctgctacataatcagtacctcgtgggccctggaggactgcttcctgcttaccgatctatggatatgatgagctccagatgctgcaggtcgaggctgccaatggattacggtgatatcacaaagtttggccgaggagactctgcatcccctgcacctccaacgacaccagctcaggcacagcagagccaatctcagacccaccacacggcacagcagccctttttgaatcctgctctgccacctggctacagctatactggcctcccctattacacaggcgtgcccagtgccttccagtatgggcccactatgtttgtcccgccaacctcggccaagcagcatggtgtgaccctcaacactccccctaccccttttcagcaggccagtggctatgggcaacacacttacagcacaggttatgatgatttgacccaggggacagcggcaggagactacaccaagggtggctatggtggatcatcacaggcaccaaacaagtcagctggatctgggcctggcaaaggagtatcagtgtcttcaggcaccactggcctaccggatatgactggttctgtctataacaagacacagacgtttgacaagcagggatttcacgcagggacacccccacctttcagcctgccctctgccttgggctccactgggcccctggcccctggagcagcccctggttatgcgcccgcaccgttcctgcatctcatgcctgcccaccagcagccccacgcccagctgctacaccaccaccttccacaggacagcccgagtggctctgctcagcgcaaccagcccagctccctgcagcccaagactcaagcctccaaacccacctatggcaactctccgtactggacaaactagaccctgaaaacaagagggtgggctcttgtgcaggagagaacacgtggagcacatttctgggagcccggtgccctttcctagaattctgagacataactgtcagctgagcctctgtgggaagcctgcctcccagacccactgttgtatgtaatgtatttatgtatgtatttgtaaatgtgatagaagcctggagggactggggtgtggctactgggcagcatacaagtgtgctgtccccatctggacatcctcactgtagccaagtccacccctccccaccccttctgcctctaggccttccacgtggctcccagctcaggagctgtctggtgtgccactaaagggaagggtggtttggggactggggtcaggtaccaatgaagaatcacgactttctttatctcgctccctgtgaaatattgtttcttccttctgtaattacttcatacttgttgagaaactgatccttttgtcatttgtcatggtcccccttctaacaaatcttcagctgggaatagcagagatgatgcctgcacagcaggcacagcagggccttctgcttttggtctggtcctgccctaggggcttgcctttgaccaaccatttaaagaagaatctgaactgggtctcagagatgttcagcccgtcagctcccttagaaagaaatcaaagatctgcttccatctcagtgaaagcctgtctccaaacaaaggctcctctataccagttgtcccaaaccaggtgggcaaactgcttcagggttttctctcacccaaactccacctaataaagttcttgagagcaaaaaaaaaaaaaaaa

SEQ ID NO: 1302 - DNA, 2335 bp, Cricetulus griseus
agttactgaggcagaacagtgatgcacctgacccgtttgaccccactgcagtggtggccgagtttgagaatcaggatgtgagtctttctaatgagcaagactttgaccccctctggaagaggagggatgcagagagtcttcagcccctcgacgcatactgaaaagaacagctcagctacagtgactcagacttaaagagggccaaagctatcctggagcaaggggagacaccctggacagtgcctgcccaggatttgctgggccacagcctccagcaccaggcgcaaatcagcaactgtttcataccaccgacttcagagctaggtttaaataaggaagcactggttcacagtacattttccttctggactcagtcaaagtgccgaggcttagaaggactcaaggacaatgggtcaccactcttctgtaggaaggacattccaaaggaagtacagcggagcaggaccttctctgtgggtatttcttgtccacacaatcctggagaaccagtgacacccaactttgcaggtgttcatatggaaccagagcaagtcacccacagtcattgtgaagctcctagtggttgggttccaggctctgttcaggaggatgggaggactccctgcagccctctaaactgtggctccagtcctaagtcacagtgcccacatgttcaggaaagccaaggcagctcatccctgttggaagcaatgccagatgatggttttcagtctgaactgagtgctgaagccaggaggatattggcagccaaagcccttgcaaatttaaaggagtttgtggaaaaggaggaagtgaaaaggaaagtggaaatgtggcagaaagaattaaattcccgagagggagcctgggaaagaatatgtggtgagagagaccctttcatcttgtgcagtttgatgtggtcgtgggtggagcagctgaaagagcctgtaatcaccaaagaggatgtggacatgctggttgatagacaagccgatgccggtgaagccctgtttttactagagaaggggcagtaccagaccatcctctgtgtgttgcactgtatagtgagcctgcagacgcttcctgtggaggtggaggaagcttgcctttcacacgccattaaagctttcaccaaggttagttttgattctgaagatggaccaatagtttacaacaccctgaagaaaatatttaagcacacattggaagaaaagagaaaaatggcaaaagacagcctatgttatatttgtgccgttattcttttgtacatttggagggaataagaacccttctaaaacagtttttttcttaacagaactctccctggaatttcgataaaatagatcgttttagtagtaaaaccttaatatgtatcccccccacaagacatatatgtatctcctccttcagaaatatgacctaagaaagtcaccaagtgtcttaaactgttttatatttgttactaaggagactattaatacattgtaaaggacttttaaaaactttgaagctttgtggttttcttttcttttttacagatgtggcaaaggctttcaaagtgtgttatttttcagtgatccagtgattgaactcacgttaatagactgactggagtggctgggattttgtacttgtaggaagtagccctgctcttgtcaggcttccagacaacctcgcccttggctgtccgaggagggagcagctctcaacccagaagccttattccacttccccaacctgctgctgagccagttggcttctttacagagaaatgggaacagacatgaccagtgtgggcagttgctaaggagcagaactggcctttgtcctcgcaggcactgtgtagaaggggccgtgtgctggggtggaggctcctagccagcctgctctcgtggggcactgtggccattctgcacaggcaactcagacctggagcaagtcaagcaagccattgtgtgccctaggagtactggcactgctgccttgcttctcagaatgtgaggaaagaagcaagactgaattagaacaactgaaatttccctaactcatgcatttctgaattacactctagtatatcaaaaactattttaatcattagtcttaccaactctgatggcaaaggctaagtgtagctttcttcaccctgcattttcttcttgggaaatgaaatacaatagctgttaatgaactggcttacccatgttgaaatgtctttttaagtgcctagtctagcagcaggaaatagttgcattttatctcttgtggtacattctgaaatctgatgttcaaatagaatgtttgtcttcatctccatgtgcctcgaatgggcaagtga

SEQ ID NO: 1303 - DNA, 2334 bp, Cricetulus griseus
agttggatggtctgttgattttcctgtccacagcttggtgaagatgagttctcttatggttttgatggaagaggactcaaggcattccggatcagcaggaaactttggcagatcgagcccttctaccccatgtcctctgtaagaattgtgtcatagaattaaaactttggtcagaaggaggagcccttttttccaccaccagaagagtttgtgttcatccatgttgtacctgttgaggaccgtgtgcggactgcagttcctcccaagaccatagaggagtgtgaggtgattctgatggtgggacttcctggatctggaaagacccagtgggcactaaaatatgcaaaagaaaaccctgagaaaagatacaatgtcctgggagctgagactgtgctcagtcaaatgaggatgaagggtctggaggagccagagatggaccccaagagccgagacctcttagttcagcaagcctcccagtgccttagtaagctggtccagattgcttcgagatcaaagaggaacttcattcttgatcagtgtaatgtgtacaactctggccaacgaaggaagttattgctgttcaagaccttctccaggaaagtggtggtagttgtccctaatgaggaagactggaagaagaggctggagttgaggaaagaagtggagggagatgatgtgcctgagtctataatgctggagatgaaagccaacttctctctgcctgaaaaatgcgattatatggatgaggtgacatatggggagctggataaagaggaagcccagcccattgttactaaatacaaggaggaagcaaggaagctgctgcccccctctgagaagcggacaaatcgccggaacaaccgcaacaagaggaaccggcagaaccgaagccgaggccaaggctatgtgggcgggcagcgccgaggctacgacaaccgggcctacgggcagcagtactgggggcagtctggaaacagagggggataccgtaatttctatgatcgatacaggggtgactatgatcgattctatggacgagattatgaatacaacagatacagagactattacagacaatacaaccgggattggcagaattactactaccaccaccaacaggacagagaccgatactacaggaactactacggttaccaagggtatcggtgaagcccctgctgttttcacctgtcagccatgaagctgagtctctggggatgccaggcacccccaaaacacaaccaaggaaaacaggggctgtcggggtggggctgagctgctggggaggggtggtggggggagggtgtgcaacggaggggtgggggaggggaagtggaaacaaaactgtacaattttttaaaagtttgtggaaaagaatattgtcttattctataaaacatttcaaacctagttaggttatttgtaatcaaaaaaattcccaggccgatgggggacggggactgttggggactgcagatcagaatagtttgtcctcgtccatgttgtactcagtgagttccataaagtctggaggagagtgggaacacagccctcagtctgaagatggtgatttgccaggccctagtcttgggtcttctgagttgatagaggcaagagatctctggaatcatttgctaagattgtctgcctcttaacggtgtgagggaaagaatgtttctcagggtttcagctcacagaaacgcagcaagacgatgttcactgcgttaggatatgtacataggtgaatcctgtggtatgggctgtcaggcccaggtgctgagaatagcagcttactttatacagtatgggcactctgccctgctggtggtttgttttggttttgttttgttttggtacattttcccaactttttgaaacaggattccttctggggtgcttccgtgtgagccctaaagaggcctctcatcaagagacttcatttgggatcatttagtttataaatttaccgataccctcccagttattgacagaacaggtacaggttgctgggttcatgaatgtgggcaggatatggcagtgcttcaatattgagcttcaatttaaatcattatcttgcttagctaaaacttactcagcaacagtgtcctacagcacttcctggtgagaaaccctctgggctgtgctcctagaacatacttcacttccacttcctcacctgagcagttagttctcttgtttaaatttgtgctgagacgtggatcttcctgtcctgatgtccttgctgtgcactgcttttctgagtgttcagaccctcactctgactctggtctgttaagactcacccgtcagtacaaggactctttccaaaggctg

SEQ ID NO: 1304 - DNA, 2333 bp, Cricetulus griseus
cggagggatggagggaaggagatgaacgagattaagacccaattcaccacccgggaaggtctgtacaagctgctgccgcactcggagtacagccggcccaaccgggtgcccttcaactcgcagggatccaaccctgtccgcgtctccttcgtaaacctcaacgaccagtctggcaacggcgaccgcctctgcttcaatgtgggccgggagctctacttctatatctacaagggggtccgcaaggctgctgacttgagtaaaccaatagataaaaggatatacaaaggaacacagcctacctgtcatgacttcaaccacctaacagccacagcagaaagtgtctctctcctagtgggcttttccgcaggccaagtccagctcatagaccccatcaaaaaagaaactagcaagctgtttaatgaggaaagactaatagacaagtcacgagtaacctgtgtcaaatgggttcctggttcggaaagccttttcctagtagcccattccagtgggagcatgtacttatataacgtggagcacacgtgtggtgccacagccccccactaccagcttctgaagcagggagaaagctttgccgtgcacacttgcaagagcaaatccacaaggaaccctctccttaagtggacggtgggcgagggggccctcaacgagtttgctttctccccagatggcaagttcttagcgtgtgtgagccaggacgggtttctgcgtgtgttcaactttgactcagtggagctgcacggtacaatgaaaagctactttgggggcttgctttgtgtgtgctggagcccagatggcaagtacattgtgacaggtggagaggacgacttggtgacagtctggtcctttctagactgccgagtaatagctagaggccatgggcacaaatcctgggtcagtgttgtggcatttgacccctataccactagtgtagaagaaagtgaccctatggagtttagtggcagtgacgaggacttccaggaccttctttcattttggcagagatcgagcaaacagtacacagtccaggctgtccaaacggaactctacagacagccgccctgtaagtgttacctatcggtttggttctgtgggtcaggatacacagctgtgtttatgggatcttacagaagacatccttttccctcaccaacccctctcaagagcaaggacacatacaaatgtcatgaatgccacaagcccgcctgccggaagcaatggccacagtgtcactacaccggggaactctgtgccccctccattgccacggtccaatagccttcctcattcagcagtctccaatgctggtagcaaaagcagcgtcatggacggggccattgcctctggggtcagcaagtttgcaactctgtcactgcacgaccggaaggagagacaccatgaaaaagaccataaacgaaatcatagtatgggacacatttccagcaagagcagtgacaaactgaatctagttactaaagccaaaacggaccctgctaaaactctgggaacatccctgtgtcctcggatggaagatgtccccttgttagagccgctgatctgtaaaaagatagcccatgaaagactggctgtcttggtttttcttgaagactgtatagtcactgcttgtcaggagggatttatttgcacatgggcaaggcctggtaaagtggtaagttttaatccttaatgctgcaccagatctagaacttgactaggtagtgattttttccttgcgggaggggtgggctgtacaatgaatgtgaatgacacttgttaatgtaaatctaagtgcatcagagccatacttttggatactgcatgccatgtaattccgaatcatttgataacccaccttagagcatttacaatacataatcagactaattgccagccaagtcagtcatccctctgggtatatagagccccaaagttagcactcctgtctcagactattccacttacagggaaatcgtgacactgtgcagaaataaggacatgaaaatgctaaagtcaaacatctctgctttaactggcatatttttgcgcaccactcaactagattgttgtacacatggtcagtgtatgttcagcacagatggccactaattatcatttatagtccaactttttaccttaaaccataaactgtttaggaatttatgaaatctaacttaggaacaacgtgttcatcagggttgattgatattatttttacattgtctggcaatccacagaaagagaagagccttaaattttttaaaacccatttttagtcattttatgacaattaaaaattgtttaataaacatcttttt

SEQ ID NO: 1305 - DNA, 2333 bp, Cricetulus griseus
gctcagggcagggggtacagcccaggactactgggccttagcccacaaggaggacaaggctgacacgagacacgagctgccgaagcacaccatctctggagcggccagaaccacggctgagagtggagcaccttcccctgcttaccattgagccacccagtgacagctctgtggaactcagtgaccgctcagatcgaagctcactcaagaggcagagtgcctatgagcgcagccttggtggacagcaaagcagcccaagcatggcccccacggtggccctccaaaggcatcccccgagaggagcctgagttgcggcctcggccccccagaccctctcgagagccacctggccatcaatggttcagccaaccggcagagcaagtctgagtctgattactcagatggggacaatgatagcatcaacagcacatccaactccaacgacaccataccgaattggcctgaatctcttcaacaagaagcctgagaagggcatccagtatctcattgagcgtggcttcgtgcctgacacgccagtgggggtggcccacttcctgctgcaacgcaagggcctcagccgccagatgatcggtgagttcctgggaaaccggcagaagcagttcaaccgtgatgtgctcgactgtgttgtggacgagatggacttctctgccatggagctagatgaagccctccggaagttccaggcacacatccgagtccagggagaggctcagaaggtggagcggctcatcgaggcattcagccagcggtactgtgtctgcaaccctggggtgtacggcagttccggaacccagacaccatcttcatcctggccttcgcgatcatcctgctcaacacagacatgtacagccccaatgtcaagcctgagcgcaagatgaagctggaggactttggtcaagaacctccgaggtgtggagtgatggtgaagatatttcccccggggagacactggattgggagtctatgagcggatccgtaagcgggaactgaagaccaatgaggaccatgtgtcccaggtgcagaagggttgagaagctcatcgtgggcaagaagccgattggatccctgcatcacgggcttggctgtgtactctctcttccccatcgaaggctggtctgctactgccggcttttcgaggttccggaccctaataaaccccagaagctgggactgcaccagagagagatcttcctcttcaatgacctcctggtggtgaccaagatcttccagaagaagaagaactcggtgacatacagcttccggcagtccttctccctctatggcatgcaagtcctgctcttcgagaaccagtactaccccaatggcatccggctgacgtctgctgtccctggagcagatatcaaagtgctaataaacttcaacgctcccaatcctcaggaccggaagaagttcactgatgacctgcgggagtctgttgctgaagttcaggagatggagaaacaccggatagagtcggagctggagaaacagaaaggtggtcgtgcggcccaggcaatgtcccagtgctccagccttttcagcccttccagccaccgcagcctccagtgctgtgctcctaagcctaggacctgaggactgcctgtggcctctgcctgcgcggagtccctttcagaaaggaaggagctgccgcctgaccgtgggctgcgtctaggaccttgtgagccagctggccagcccaaccacaagagatcatgagcccagtctggcccatcgctaccctgctggcttgctggggccaaccatttccctcccctgtcctgtcgtcatcgtcgaggtcacgtaccagcagatctgcaaactgagcactttgtatctctgcagagagcaaatcccgccagccacgtggaggtcagccttctgtctcccagtgactcagcctgcccaccccatcccctgtcggcatggctcatccttctcttgtcatctgcacagaaagacaactgataagcagagtgtatctggctggggccagctgatgaggagctgcctgcttcacagtgccccaagtcccttgctttccttaggccctgagtactgtctgtcctctgttgaaggacactgtctggagaggaaggggaactgcgctgcatgtcacctggcactggtcctgtggggctgtgctctctgtattgtacatttgcaaaatacatcagtgttactgttggcaaacagttggagtggtaacattaaatattgtcggctttttttttcaccatcttcccagccagtggtaagttaaccatgaacttgagtttgttctgaaaaagagacatggccattagatactctct

SEQ ID NO: 1306 - DNA, 2333 bp, Cricetulus griseus
gcggaagataaaaacagcggtgtttgatgactgcaggaaagaaggagaatggaagataatgctgttagatgagtttaccaccaagcttctgtcatcgtgctgcaaaatgacagaccttctagaagaggggataactgttatagagaatatttataagaatcgggaacccgtcagacaaatgaaagctctttatttcatctctccaacatcaaaatctgtagattgtttcttgcgagacttcggaagtaaacgtgagaacaagtataaggctgcgtatatatacttcactgacttttgccctgacagcctctttaacaagattaaggcatcttgctccaagtcaataagaagatgtaaagaaataaacatttcctttattccacatgagtctcaggtttatactcttgatgtaccagacgcattctattactgttacagtccggaccctagtaatgccagcaggaaagaagcagtcatggaggcaatggctgaacagatagtaacagtgtgtgccactctggacgagaaccctggagtgaggtataagagtaaacctctagataatgccagtaagcttgcacaactggttgaaaaaaagcttgaagactactacaaaatggatgaaaaaggcctagtaaagggtaaaactcattcccagctcttaataattgaccgtggctttgaccctgtgtccactgtcctgcatgaactgacctttcaggcaatggcatacgatctactaccaattgagaatgatacatacaaatacagaacagatgggaaggacaaggaggcagttctggaagaagatgacgacctgtgggtccgggtccggcaccggcacatcgcacttgtgttggaggaaattccaaaacttatgaaggaaatttcatcaaccaagaaagctacagaggggaagacgtcacttagtgctcttacccagctgatgaagaagatgccccacttccgaaaacaaatgacaaagcaagttgttcatcttaacttagctgaagattgcatgaataaatttaagctgaatattgagaagctctgcaaaactgagcaggacctggcacttggaacagatgcggaaggacagcgggtgaaggactccatgctggtgctcctcccggtcctgctcaacaaaaaccatgacaactgcgacaaaatccgagcagtcctgctctatatcttcgggattaatggaacaactgaagaaaatttggacagactgatccacaatgtaaagatagaagatgatagtgacatgattcgtaactggagtcaccttggtgtccccattgttcctccatcccaacaagccaagccggtgagaaaagaccgctctgcagaagagaccttccagctctcccggtggacaccctttatcaaagacatcatggaggatgccattgataatagattagattccaaagaatggccatactgttcccggtgcccggcagtgtggaatggctctggagctgtgagtgctcgccagaaacccagagctaactatttagagctggaccggaaaaatggatcaagactgattattttcgtaattggaggaattacatactctgagatgcgttgtgcttatgaagtttctcaggcacataaatcctgtgaggttattattggttccacacatattttaacacccagaaaactgctggatgatataaagatgctgaataagtcaaaggataaagtttcctttcttaaggaagagtagcttttttattgttgtttggaggtttttgttaatatgttcaactaaaacagaagatgttgctgtcataacttaaacagtgtaaatattttatggagtattgtgcttttcaagtgtacttcttaagggactttatggatttattggatttgtcatttctaataatttaaatactcttgctgctttgactaagatatgacattaaagtgctttctaatcaggaagttttcacctttggagcagaatctgttagagatatgggtggtttttacagccacctatataaatactaattactcactggatacttaggctgaaatacagtgtttgggggcaaaatgattttgaatgaagagattataaaagtaaaaactgtaaatgtatgtatgatagaattatttcttataagtgcagtttcttaaaactgaaagtcaaaaattttatgtataaaataatcccaattattaatatggttttactgtgtatattacctgcaagatacttctacagaacacagttttatatgtttgagatcatgtctactcaagttagaaactaaaaataatcatgaacattctaagaaaataaatatataatt

SEQ ID NO: 1307 - DNA, 2332 bp, Cricetulus griseus
gtgcctgtgcaagcctggagtggttgggcgccgctgtgacctctgtgcccctggctactatggctttggtggaacttcaccagtggccgtggctgtcaggccttgtgccttgccacccaaccagggccagaggccccacctgcaatgagttcacagggcagtgccactgtcatgccggctttggtggaaggacttgttctgagtgccaaaagctccactggggagaccctggcctgcagtgccgtgcttgtgattgtgatcctcgaggaatagacaaccctcagtgtcaccgttccacgggccattgtagctgccgtccaggcgtgtctggcgtgcgctgtgaccagtgtgctcgtggcttctcaggtgtttttcctgcttgtcaccccctgccatgcatgctttggagattgggatcgtgttgtacaggacttggctgctcgtacacgacgcctggagcagtgggcccaggagttgcagcaaacgggtgtgctgggtgcctttgagagcatctttttgaacatgcaggggaagctgggcatggtacaggccatcgtgagtgcccgcaatgcctcagcagcctctaccgccaagcttgtagaggccacagaaggactgcgccatgaaattgggaagaccactgagcgcctgactcagttagaagcagagctaacagatgtacaggatgagaacttcaatgccaaccatgcactcagtggtctggagagagacgggcttgcgcttaatctcacactgaggcagcttgaccagcatctggacatcctcaaacattcaaatttcttaggtgcctatgacagcatccgacatgcccacagccagtctacagaagcagaacgccgtgccaacacctctacccttgcagtacccagcccagtgagcaattcagcagacacccggcgtcggacagaagtgctcatgggggcccaaaaagaaaacttcagccgcaaacagttagcaaaccaaaaggcactgggacagctctcttcccgtacccacaccctgagcctgacaggcataaatgaactggtgtgtggggcaccaggggaccaatcctgtgctagcagcccctgtgggggtgccggatgtcgggatgaggatgggcagccccgttgcggtggccttggttgcagtggggcagcagccacagcagatctggctctgggccgggctcggctcacacaggccgagctgcagcgggcactggtagaaggtggtggcatccttggccgagtgtctgagactcgccggcaggcagaggaggcacaccagcgggcacaggcagccctggacaaggctaatgcttctaggggccaagtggagcaggccaaccaggagcttcgggaacttatccagaatgtgaaggacttcctcagccaggagggagccgatcctgacagtattgagatggtagccacaagggtgctggaactctccatcccagcctcacctgagcagatccagcacctagcaagtgagattgcagaacgcgtccgaagcctggcggatgtggacgcaatcctggcacatactatgggcgatgtgcgtcgggctgagcggctactacaagatgcacagcgggcacggagccgtgctgagggtgagaaacagaaggcagagaccgtgcaggcagcactggaggaggctcagagggcacagggtgctgctcagggagccatccggggagctgtggctgacacacagaacacagaacagaccctgcaccaggtacaagagcgggtggcaggggcagagcagtcattgaactctgcaagtgagcggactcagcaattggatgctctcctggaggccctgaaactgaaacgggcaggaaatagcctggcagcatctacagctgaagaaacagcaggcagtgctcagagccgtgccagggaggctgaaaagcagctgcgggaacaagtgggtgaccagtaccaaactgtgagggcgctggctgaaaggaaggctgaaggtgtgctggccgcacaggcccgggcagaacaactgcgggacgaggctcggggcctgctgcaagccgcacaggacaagctgcagcggctccaggaactggagggcacctatgaagagaatgaacgtcagctggagggcaaggcggcccagctggatgggctggaggccaggatgcgcagtgtgcttcaggccatcaacctgcaggtccagatctacaacacctgccagtgaccactccccagggcctagccttgtccccaggcactgatccacacgcgtgtgtgtccacacattaaagagcttttggctagcaagtgctttcaataaagcagtgtgaacctcc

SEQ ID NO: 1308 - DNA, 2331 bp, Cricetulus griseus
cggcttggcttgggagccgtagctcgggagttgggtcctgggccgccgttgttaccgcgtctgcgtcttgtctccggccccttcgcgggatggcgtgcggggcgacgctgaagcgacccatggagttcgaggcggcgctgctgagccccggttccccgaagcggcgacgctgtgcccctctgcccggccccactccgggcctcaggcccccggacgccgagccgccgccgtttcagatgcagatgccgtcgacgagtctccagcagcctgccctgcccagcagcgagcgtcgccttccaactcccgagcaaatttttcagaacataaagcaagaatatagccgttatcagaggtggagacatttagaggttgttcttagtcagagtgaagcctgtacttcagaaagccagcctccctcctcggcactcacggcaccaagttctccaggtgcttcctggatgaagaaggaccagcccacctttaccctccgacaagtggggataatatgcgagcgtctgttaaaagactatgaagataaagtccgggaggagtacgagcagatcctcagtaccaagctcgcagaacagtatgaatcttttgtgaaattcacacatgatcaaattatgcggcgatatggaacaaggccaacaagctatgtatcctgaagccttcttgcctatctgggtaccaggtgtgacctcaagagatggctgctgtacactttttgcaactggtttgatatcacatttcagctccaactttgcatcctgagaacacttaaatgtttctgcaggtccattttatacaacttgaaagaccttaaaactttctggttgccacaagcatatctttcttttctgctcatccactaaacatctgtaccctactgtgataggttttccaaacaaaagtacctggagcagcagtttagcaaagaatgccttcagtggcactcaacacgtggagtttccccaagcacagctctgtgagaagtgtgtgtgtgtgtgtgtgtgtctgtgtgttttaagttattatttgtattgtgcaaaacattttttgatcttggggattctggctgtgaatttgatgcacgacaattatggttagaaacatttttttggtctacagaagatcattaatgtttggtgaccatataagttgtaacagtggattgttttgtgtgtaggtattatcgttaaatacagggactgtttccaggcacagaatttgaatcataagttaggatggacattagacatgattatgatgatgtagggaaggtctgcagtcctgaatctgcaaatacatggtgagaaattagaacaaactggagatgggccatcaatacacggactctgcctagctgtgctggaaaaatactttgactccaagccttaaaataccctgtggagtctgagctcacctcattcatacagtcaaggagctccctggacactggacttctacagggaaaagttctcccctggagcagaacatcagggtgtgctcggagcctaacacaggagagtgcagggctgggccaggccttgcagcactgctacttgggaggagccacttcaccttctcatcgtttttcaacaaagaatctggatcttttgtccaggttctcccaaactcccctaaggtgtccgtgttcaactgttggagcttggttttggcacctccctgcctgaagttgcttgttctctaccttggtcctgaggctgtgagcagaaagcagcctctgttttgaggaggtgggagttacgtatacatttatttttactgtgacttgttcaggaccacatttaacaaaatgccttgtttcctttactattgttttggaaaggaaagttttattaaaattgttttagtttgaatatagaatagttttattaattacggctttattttggaaaactcttgagttttaattcaaatgtttgccaatgccttccaaagtaaggtgatattcagagacagttgttgagatccgatggctacggacatttctggggtattcacatttgaagattccttattaatgaatgtctttgacttaaatctaaccaaaaactgcaacattattctttgtacattttcattatatagtgttaacaagcttagttgcaaacaaataaaatacttaagctatttgtttaccttgccttcttggtactgtaataatgtgtattcagataactcatctgagactgctataaccatttccatagttcaacaacctgttgaagatttagactcctagagcccaccatcgctctttcaataattaaagattggttaactcacttaaaaaaaaaaaaaaaaaaa

SEQ ID NO: 1309 - DNA, 2331 bp, Cricetulus griseus
tggtaagccccacatgtcaccagaatcgctgtcggggaagcggcgtttggaacccgaccaggagccgcagccacaagagccccctctcctccaagacactgattccagtctctctgacagcgaggagagtgtgttttcaggccttgaagactctggcagtgatactagcgaggactacactgaaggagtggatggagcagattgtgataaggacagcaatagaacggaggaaacctctgaggtgcaggtacaggcaggcccctctggtccaaggacggaggaggagggagctctgaccagagatgagtatgaggaggacagttctgatgaggaggacattcggaacactgtgggcaatgtgcctctggcatggtacgatgacttccccacatgtgggctatgacctggatggcaaacgtatctacaagcccctgcggacacgagatgagctggaccagtttctggacaaaatggatgacccggatttctggcgcactgtgcaggataagatgacagggcgtgatctgcggctgagtgatgaacaggtggccctggtacagcggcttcagagaggccagtttggagatttgggctttaacccatatgagccagccgtggatttcttcagtggtgacatcatgatccaccctgtgaccaaccggccagctgacaagcgtagtttcattccatccctaattgaaaaggagaaggtgtctcgcatggtgcacgccatcaagatgggttggatcaagcctcgacggccccaggaccccacccctagcttctatgacctgtgggcccaggaggatccgaatgccgtgctggggcgccacaagatgcacgtgcctgcacccaagctggccttgcctggccacgctgagtcttacaacccacctcctgagtacctgcccaccgaggaggagcgcttggcatggatgcagcaggagccttgtgagaggaagcttaacttcctgccacaaaagtttcccagcctgaggacagtgcctgcttatggccgcttcatccaggagcgttttgagcgctgccttgacttgtatctgtgcccacggcaacgcaagatgagggtgaatgtggaccctgaagaccttatccccaagcttcctcggccaagagaccttcagcctttccctgtgtgccaggcccttgtctacaggggccacagtgaccttgtccgctgcctcagtgtctccccagggggccagtggctggcttcaggttcggacgatggctcattgaggctctgggaagtggccactgcccgctgtatgaggactgtgcttgttgggggtgtggtccggagcattgcctggaaccccaatcctgccatatgcctaatagctgcagccatggacgatgcagtgctgcttctgaaccccgccctgggagaccggctgctggtgggcagcacagaccagctgctggatgccttcactccacctgaagagccaacattgcagccagcccgctggctagaggcctccgaggaagaacgccaggggggcttgcgactacgtatctgccacagcaagcctgtgacacaggtgacctggcatgggcgaggggactacctggctgtggtgctgtctagcccaggacacactcaggtgctgatccaccagctgagcaggaggcgcagccagagcccattccgccgcagccatggacaggtgcagtgcgtggctttccaccccacccggcccttcctgcttgtggcctctcagcgaagtgtccgcatttaccacctgctgcgccaagagcttaccaagaagctgatgcccaactgcaagtgggtatctagcctagctgtacacccagcaggtgacaacatcatctgtggcagctatgacagcaaactggtgtggtttgacctggatctttccaccaagccatataaagtgctaaggcatcacaagaaagccttacgggctgtggccttccacccccgatacccactctttgcatctggctcagatgacggtagtgttattgtctgccatggcatggtgtacaatgacctgctgcagaacccactgctggtacccgtcaaggtgcttaaggggcacacactgacccgagatctgggtgttctggatgtggccttccaccccacacagccatggatcttctcctctggggcagatggtaccatccgactcttcagctaggctgatgcactattgtgggcggcctggaacagggtgggtgtgcctatacagactcaatagaatccccagaaggaagagtggtattgatatgcttgtcacctactgaggtgtaagtggctttattgggcaataaattggggcacca

SEQ ID NO: 1310 - DNA, 2331 bp, Cricetulus griseus
  modified_base (720)..(720): a, c, t, g, unknown or other
agaggacttgaaagaccttggagaaattggtacgaggagcttatggttctgtcaacaaaatggtccacaaaccaagtgggcagataatggcagttaaaagaatacggtcaaccgtggatgaaaaagaacaaaaacaacttctcatggatttggatgtagtaatgcggagtagtgattgcccatacattgttcagttctatggtgcactcttcagagagggcgactgttggatctgtatggagctcatgtctacctcgttcgataagttttacaaatatgtatatagtgtgttagatgatgttattccggaagagatcttaggacaaaaatcactttagcaactgtgaaagcactaaaccacttaaaagaaaacttgaaaattattcacagagatatcaaaccttccaatattcttctggacagaagtggaaatattaagctctgtgatttcggcatcagtggacaacttgtggactccattgctaagacaagagatgctgggtgtaggccatatatggcacccgaaagaatagacccaagtgcatcacgacaagggtatgatgtccgctctgatgtttggagtttgggggatcacattgtacgagttggccgacgggccgatttccttatccaaagtggaatagtgtatttgatcagctaacacaagtggtgaaaggagaccctccacaactaagtaattccgaagaaagggaattttcncccagtttcatcaactttgtcaacttgtgccttacgaaggacgaatccaaaaggccaaagtataaagagcttctgaaacatccctttattttgatgtatgaagaacgtactgtcgaggtcgcatgctatgtttgtaaaatcctggatcagatgccagctactcccagctctcccatgtatgtcgactgataccgctgctacatcagactttagaaaaaagggctgagaggaagcaagacgtaaagagttttcatcctgtatcacagtgtttttattgctcgcccagacaccatgtgcaataagattggtgttcgtttccatcatgtctgtatacttctgtcacctagaatgtgcatccctgtaatacctgactgatcacagtgttagtgctggtcagagacctcatcctgctcttttgtgatgaacatattcatgacgtgtggaagtcagtacgatcaagttgttgactgtgattagatcacaccgtaaattcatttctagactcaaaacctggagacgcagctactggaatggtgttttgtcagacttccaaagcctggaagaacacagtgatggatgtactatgtctgaacctagagacttgggcttgagtgagaagagcttgcacagccagtgagacacattgccttctggagctgggagacaaaggagggatttcccttttttcaccaagtgcaatagatttcctgatctgatattctgttgctttacagtcacaagtctaccacttgtcatagaagggtgctgccaacttgatgctctgcttgccaccaactgccaggactgaacaaaggaaacagtactgagggcaaagtttacagatgttttcgattctggtatcttctccagaacagtttgtagcagctatagattttcccttggccccaagcctggtacttgagccattgtgactcactaacagggagaagtagctagtagcaatgtgccttgatgacctggtaggtactgctgtgtctctcagagtggcactcataaatactataaaacaataaagggagaatggtgctgttcaaagttacatccctattcattgcagaatttaaaaatggtttatctcttggtccacttgcctaacttcccccttttctacccctggccccctaacccttagactctttgagtttcactaggagacattactgtatgtcttccttaagttgtaccaagccatcgtcctccattgctcccaggactcaagaggaatttgtttctctgctgtcagcttcctgtctggctcagtatagcctcactccgccattatgcaaatggagatcaagcaattctgactgtccaggagctatctcactttctgctgtgtgggtgaccacataaaaaggcaattttagtgtattaatcatagattattataaactataaacttaagggcaaggagtttattacaatgtatctttattaaaacaaaagggtgtatagtgttcacagactgtgaaaatagtgtaagaactgtacattgtgagctctggttatttttctcttgtaccatatgaaagtatataaaaattatcaaaaaagactgatgtgcagggattttgccttatttgtctgtaa

SEQ ID NO: 1311 - DNA, 2331 bp, Cricetulus griseus
gcggcccggctccccgcgtcccccgcccgccgcgactgtctggaagatggcgccgggcggatggaaatcctaatgacagtctccaaattcgcctccatctgtaccatgggcgccactcggcattagagaaagagattggtccagaacagtttccagtcaacgagcactattttggattagtcaattttgggaatacctgctactgcaactcagttcttcaagcactttatttctgtcgtccatttcgggaaaaagttctagcatacaagagccagcccagaaaaaaggaaaaccttctcacgtgcctggcagacctcttccacagcattgccacccagaagaagaaggttggcgtgatcccgcccaagaaattcatcacacggttgcgaaaagaaaatgagctgtttgacaactacatgcaacaagatgcccatgaattcttaaattatctgcttaatacaattgctgatattctgcaagaagaaaagaagcttctccaagcttctcgatttttcagaatcgggagggcgagtggaagacttagaatgtgcaagggtggatggagcacactgctgtgcgcacacgagatgcttaccttgtggatgggagcagttgagtggtctttcagacatacacaaagtacctttgggcccaacaactcgcagttgccttccttgacgcacagagctagcagacacggagcccagtgtcaggaagtcaaggatactctgcttctctggagaagcgtgtgatagtgtacagtgtttgtacagggagggaacagttggtcagcagtggcttcttggctccccaaggggaaagcctagctttgtaatgatcattttccttatttatttcattaaactggtggagtccaagcattactggagtgccagtgagtctgtcagcagatctgagcatatctcactagtttgtcagcagaagtagtcctgtttgttacagtcagggagtttccatgtacgtctgagcatcaagtggtatggcagtgactgaatgtaacttgcaggaagcaatggaagactatagtcaaagtcacagcagccaagctctgggtagtccatcacgctgcactctttgtgcagtggtggggtggcctgttgatgagcccctaattttctaaagtttgagtaaactgttgactgagaggcaaacggcaaaaagaaacgttttgtgctgctattattaccatatattttctgtacctttgagctcaggaaatgacttttatctgtttgtcccataagcagatttgtaacagggtcccttagctaatcgggcttcgcagacagatgtgctgggagaaaaaggtgaccttttgacaaactcattttctagtttctgaagcctccccctggctggggtttgtgatctgccagcattgcacagagaacacaacgaggagcatggcagagtcagagccgtgagagcacagctcaggtctgcgctggacagtctgcagggaaaggactactggctgttggctctaactctactttttatttttagttgcagatggacctaagtaaacattttgaattttatcagaaactcaataaactttcaaaacatacagggtttgggttggggactaggaatgtcagggtatagtaagtgaaaaggtgaaaagggtgacccgcccagcacgcattttgaggtgattgttctttgcctgtgagtatgaggagggcagatgcaagttgcgaacaaggctagccgccgtgtaattatgtacatgtttgctggggcagctgtcccaagttttgtatattaggacagaagtttctatgaattatcgtaactaaaagtcaatattctaagttaagccccacttctgaggcgtgtggcttctgtcataggaattttacctttagaaggttacttaagataggagccacatggcttaggaggggacaaggaaatgtgctatagtggccttacggcctcagccattagggtagggttttctctccttgatggccgtaggaagacctcactttcacatagtcctgatactttgtgtaaggatgcttttcattacagattctcttcgtgagggatgtggctgggagctgggaggcaaggtgctggagtcctagctctccagtgaacttaactgtgtgacctcgggcaagtcacttaacctctctgtgcttcagtctccctcttgtaaatgggagtaatacctacctcacagggttgttgtggggattaattggagagaatgtctgtaaatcgttttaaggttcttgaagaaggcgctatataaatacaagataatatctattaaagttggcttatttgtgctttgtt

SEQ ID NO: 1312 - DNA, 2329 bp, Cricetulus griseus
cgggcggggaggtggccgtctcctgaggccgcaatggcgggcacgccgggcacggagatccgggagaagttccaggcggcgctggccctgtcgcgggtggagctgcacaagaacccggagaaggagccgtacaagtctaagtacggggcgcgcgcgctgcttgaggaggtgcgcgctctgctgggcccggcgcccgaggacgacgacgagccggctgcggatgacgggccgggggaccaggccctgggcgcggccgagccgcgggacgccgagggccccggggagcagcgggcgctgcggcttgcggtgatcgagttccaccttggcgtgaaccacatcgacacggaggaactgtctgctggagaggagcatctggtcaggtgcctgtcgctgctgcgccccttccgcctgtcgctcggctgcgtgtctctctacatccaggcgcagaataacctgggcatcctgtggtctgaaagagaggagattgaaactgcacggtcctacctggagtcatcagaggcactgtacaatcaatacatgaaagagattgggagtccgcctcttgacccgactgagcattttcttcctgaagaagagaaacttacagaacaagagagatcgaaaagatttgagaaggtttacactcataacctgtattacctggctcaagtctaccagcacatggaaatgtttgagaaagcagctcattattgccacagcacactaaaacgccagcttgaacacaatgcctatcatcccatggagtgggccatcaatgccgccacactgtcacagttttacatcaataagctctgctttatggaggccagacattgtctgtctgctgctaatgttatttttggtcaaactggaaaaatcccagctacagaagacactcctgaagctgaaggagatgtgccagagctttaccatcaacggaaaggggaaatagcaagatgttggatcaagtactgcttgactctgatgcagagcgcccagctctccatgcaggacaacattggagaacttgatcttgacaaacagtcggaactcagagcattaaggaagaaagagcttgatgaggaggagagcatcaggaaaagggctgtacagtttggaactggcgagttgtgtgatgccatctctgcagtggaggagaaagtgagatacttgagaccgttagattttgaagaagccagggaacttttccttctgggtcaacactatgtgtttgaggcaaaagaattcttccagattgatgggtatgttactgaccatattgaagttgtccaggaccacagcgctctgttcaaggtgctcgcattctttgagactgacatggagaggcgatgcaagatgcacaagcgcagaatagccatgctagagcccctgattgtggacttgaatccacagtattacctgttggtcaacaggcagattcagtttgaaattgcacacacttactatgacatgatggatttgaaggttgctattgcagacaagctcagggatcctgactcacacattgtgaaaaaaataaatagcctgaataagtcggcactcaagtactaccagctcttcctagactccctgagggacccaaataaagtgtttcctgagcacatcggggaggacgttctccgccccgccatgttggctaagttccgagtagctcgtctttatggcagaatcatcactgcagaccccaagaaagagctagaaaatttggccacatctttggaacattacaaatttattgtcgattactgtgaaactcaccccgaggctgcccaggaaatagaagttgagttagaacttagtaaagagatggtcagtcttctcccaacaaaaatggagaggttcagaacaaagatggccctgacttaagcagatgcagccaggacctaagtcaatgctaggaccttaagcaacatagttaattcataatttatacctaattatgtaaattgccttgctaagtgacaggtgttttgcattttgatcgcttgttttcctgtttaaatattaacatttcctgccttgatttctaactgttaagtcctctgctgactagtacttgttggatttcacactagaaacaacacaggtagtgtgcctggtcgaagaacctgttactatgatgaatttgagaaggctactacctatagtcattctttgtaaaatactttctcaaactcctaaataaatctttcccttttaaaaatactaaaaatttaaataaaaatttacttgtttcaactagtaaaaaaaaaaaaaaaaaaaaaaaaaaaaaaaaaaaaaaaaaaaaaaaaaaaaaaaaaaaaaaaaa

SEQ ID NO: 1313 - DNA, 2328 bp, Cricetulus griseus
gctcagcgacagcccccgccgcccccgtcgcaggccccgccgccggggtcccaggcgcccgcggcgcccgcgctggctccggaccacctgcctcaaaacaacacactggtggcgctgcccatcgtagccatcgagaacatcctcagcttcatgtcctacgacgagattagccagctccgcctggtatgtaaaagaatggacttggtctgtcagagaatgttgaatcagggatttctgaaagtggagaggtaccacaatctatgtcagaagcaagttaaagcacaactgccaaggagagagtcagaaaggagaaaccattctttagctcgtcatgcagacatccttgctgccgtggaaacgaggctgtcactgctaaatatgaccttcatgaagtatgtggattccaacctctgttgcttcatcccaggaaaggtgattgatgagatttaccgtgtactgagatatgtcaactctaccagagcccctcagcgagcccatgaagtattacaggaattgcgggacatctcctccatggcaatggagtacttcgatgagaagattgttccaatcctaaagaggaaattgccaggatcagatgtgtctggaagactcatgggctctcctccagttcctggaccatctgcagccctgacaacaatgcagctcttctccaagcaaaacccttcaagacaagaggttaccaaactccagcagcaggttaaaaccaacggtgctggcgtgactgtcctcaggcgtgaaatttctgagctccgcaccaaagtgcaagaacagcagaaacagcttcaagaccaagaccagaaactgctagagcagacccagatcataggtgaacagaatgcacggttggcagagctggaacgcaagctccgagaagtcatggaaagtgcagtaggaacatcctcagggtctgggcagagtgaggagtctcctcggaagcgaaggaaggcaacagaagccatagactctcttaggaaatccaaacgacttcggaatagaaagtaaattggaatgtagttgtagctccagaggatgacacccatgactgggagtttaagcagttattcctgtcagaaggctggagcaacatggcgtcccttaggcttccaggcgatcagaacacagcttacacttggctcttgtggttggcatccttttcgcgcttctctggtggagccgatgcacagaacctccttactttgcaatagatctgtactaaccagacccatgctatcatgtttgggagctaacgtttttcctgtgcagatgatgtgttaagtttgtttgtttcagcatatatgcacattacatacggattttaaacaaacccattcttgacagactaaaaattaagtttaatacataaaatgtcctgttcacttgaaagaaaaaaaaaatctactttttaaatggacactatcatgtgtccatttacaaatgtagtgtgttttcagtgagaagccctaacatgacatccaaatgtttcatggtttgttgggaaggtaattttaaaataaacagtttcctaaaagattgtcagccaaggtcatccataaaggtccttttctagaacttgttttcagcaggtctcacttttgcagccctaggacgtagccatatcacccctgtcctgcagagccctgctcacctcctacatagactgctcagctggtttccaaccgacatgggttacaggaactcctcaagcttcccttctgatgtggagagcctagaggtaatggggcaattagcagtagccctactgttgtaaagacgattggggtgccccaggtcgaaagccaataatttggaatcaacttattttgtaaaacatgtttttttggagtactgaacttcacaggggcttgccttaatttagtagtttgaagatgtatgcgcaaatattctatgtgttgaaatgttaaaatattctatgtagccccaagagtgggtaaaacaagagtttaatgcctaaataaataagctaaaaggtgtcactacagcttggattttttagagaaaatgaacacataaaaaataggctatgcgtcatgaacaaaaatgatggcaccttgggattgcactatttcatgcactgttttataggccatttcatagcctgcacttttagcctccaaagaaatgctgtgtggtgcccgttcctcttagtgcgctcattcctaagacagtgctcacttctgttttcactatgctgagttagtttccttagctgccttccttgagttctctgcatcctttgccataatacttcctaggatccgagaactcctgtctcaatcagtttccaac

SEQ ID NO: 1314 - DNA, 2327 bp, Cricetulus griseus
  modified_base (290)..(290): a, c, t, g, unknown or other
  modified_base (389)..(389): a, c, t, g, unknown or other
ggcttttaattttgaagagtgaataaaactggctttgggagacaagatgacaacagctgcagagaggaagtatattaacattaggaaaaggttagaccagctgggctaccgccagactctaacagtggagagtctgcctttggtagaaaaacttttcagtgatttggttcatacaacagaaagcctgcggcagagcaggttgtcctcggcaaaggcggagaaggatagtgccaattgcgtatttttgtttggaaccttataaacttgagaatgtaaggctgagtaggganaataatgaattgtatctggagttgatgaagctaagagaacactcagaccagcacaattaaagagttagaaaactacactagaaaagtgttacacatganacagctgatctagtaaatttctggagaagcatattcaagaactcatggaaaccaaggaaacggtgacaaccgaagttgtgaacctaagtagcagaaatgaaaagctctgccaggagttaacggaaatcgaccagctagcacagcagctggaaaggcacaaagaggaagtggaaacctctgtgaaatgcggaaccttgaggaaaaaatgtcaaaacttcaactggaattagacttatgccataggaaaaggagagactgaatggcgagctccttctaaaatcagacctggaaactgttgttcatcagcttgaagaagaaaagtacagacttagcaaaaagttggaaagctttgtagtcacagaaagagaactgactttggaagttgagaggatgaggctagaacatgggataaaacgccgagataagttgccctcccgtttagacacattcctgagaggcatagaagaggagcgagactattagcgagagcgagtggagctcctagaaaaggaaatccaggagcacataaacgcacatcatgcttacgagtctcagatctcatcaatggtaaaagccatggctcggttagaagaagagcttcgacatattgaaaacgagaaggcagcagtgttaaacgatctgtcatctctccgaggactttgcattaagcttgactcaggcaaagacctcatgacccaacagctgaattccaaaagccttgagctggagaaggcaacagcagaattagaaaatataaaatcagaatcagaactatttaaaaaacaactgacaagtgagaggcagacaattaaaaatcttgaatcgttgttagctacgaacagagataaagaatttcattcccatctgacctcccatgagaaggacacagaaatccagctgctgaaggagaagttaaacctctcagaaagcaaactagctagccagagccgagaaacctccatgctacgagctaaagtgacacagttgcaggcagattatgacaatctgaaaaggcagatttcaagtgagagatatgaacgagagcgaacaatccaagagatgcgccgacatggtcttcccacatcgcctctgagttctactctgaaatctcctatacagtctcctgaacatattaatacatcgttatcaggaagatgatggttttcagtgagttcccacatggatctttataagagcacaagagtaatgaaatatttgaagtacttgttcctgcgaatcatgaacattgacacaaattctacctctgtcaaccttttatttaaatcagtggatatttatataaaaatgtttagtttaaaagagccgcttaactgatgtaatatgtgtatttttatttattcccaactaaaattaactccttaaaaatgtgtttatactgtgaattaatttaatatactcacactatgctttaataatgtttcttaatgaacaaaaatataagcatgtaaatattcttccattatttagatgtgtttggttttcatacctgtgtgtaagcccatagcatgatggactaagagagtgatccacttgatgcttttctcttgtgtaacatcaacctacatttactgtctatcatccagaaattatatttaaatatagtcttaataattcagagttttgtaagataacaaaatggaaatttggggcattttttacctaattagattcttcagtgtactagtctaaaatttcagaatatgaaagtatataatgtaaacatagaaaaatagtttattaacagtccaatatgtatctgacaataccagatacatattgtgacctctaacctcgcataactcagcccagtctttgagaatagtatgaaaacactgtccctagggcatataaattgaaaacagcttcttagaaattcactttcaaggttgtgtcattttaaagaactgagttgtatgc

SEQ ID NO: 1315 - DNA, 2327 bp, Cricetulus griseus
ttccattctcagatatcttcacatgcagcatctcaccctgtggcgcccccgcccccaactcatttaggcagtacagctgcacccatcccacagcatcttcctccagctcaccagccaatttcacaccatatcccagccccggcacctcctgcccagagactgcaccctcatgaagtgatgcagaggatggaagttcagagggagaaggatgatgcagcacccaacgcgggcacatgaacgtcccccacccatccacataggatgcacccaaactatggccatgggcatcatattcatgtgcctcaaaccatgtcctcgcatcctcgccaggctccagagagatctgcctgggaactggggattgaagctggagtgactgcagctacctacacacctggcgcactgcaccctcacttggcccattatcatgcccccctcgacttcatcacctacagttaggaacactttccaattaatggttcctgacatggcaggctatcctcacattcgttacatttcttcagggctggatggaacatcattcagaggtcctttcaggggcaattttgaggaactgattcatctggaagaaagactaggaaatgtcaatcgtggagcatcccaggggacaattgaaagatgcacatatccacataaatacaaaaagccttttccaccaagtgtgtgttgatcaatggttgatcaccaataagaagtgccccatatgtagagtggacatcgaggcccagctgccaagtgaaagttgacaccatattttagaactcttgctgtccctctcattcccatccttcctggtactgcagtcaaccaaagatggcatgacttacctgcgcagatctggaagccttgaactcggagtgctgactctgctacatggtacagctaccgctagacctacaacttatgtacacagttgattttgatgtatttataaaagctttttggtttttttcctagatttgacatttcttcctgtatcattttactgtatttttgcatgattccttgtattgcatttctttgcacatattatgggcttgtgaccctaaacttgcaggcaagattagctgctttagtaagtagtattttgtggttcttttttttgttttttgggtactttgttatttttatgtgtgtgtttgtttttgttttttgttttttttttttattcctattacttaacctttaatttaaatcaatcatgtactttagtttaatgtataaagatcctctagaaaatagataatattgtgtattaagacattccttaattaaattaggacaaaatggctgctgtatatttacaatatggagttctgagttaagtaccacctttaatattgggaacagaatgcaacccatgtcaatcagatgcaggtggtactcacatgaccagagtgatcaataggaattttcttggtgtatcctttcttccagcacagtgcaagatagagatgctattgatgccgtatgtttagactgctgttctgaccctatttatctttctctatgccatttggaactttattccctaatccagtttttgtctgctgtgaaacagctttgatgaacactaaatattaatttgagttagctggattgtatatacttgcagatttaaaaaaaatagggaaattgaaaaagacatgtagaattttgttaggtcttctgctaagcacgaataattaagatatctgcttattaattttataaaatcattcagtcaggatttaggattcagtcattggcaggtatctatgcattcatagaacttctaagggtccctcccaggttcacttttaagggatttttttatagtttaaataaagtcagctgaatctacatgtctcttgttttatttctctctaaacttgaaaataataaatctgcagatactgtgaggcacagattatattgtcaggctactgttggctatggttatagacacccacttcagacattaccaagagtcgatcactgattaaaaatttttaatttctatagttaagatttacaacataatatagagtaataaaagttaacatactaacatttctcctttggaggaagttttaatccacttcaggatgcatattatcaagatactttcatatacaggatagcctaattttatttgtttaaatatgcttaaatatgcccaagattgcaaatgcatccagtcagtaataccactgtctgtatgtggaagacatgttcccatggatcaatatgtgaagatgtacaataagcttgcaattaagccacctgctttgtaagtggattgattaataaataacttataattt

SEQ ID NO: 1316 - DNA, 2327 bp, Cricetulus griseus
atgatggagttttgatagaatatggcccagctcagctgtattgggaacctgctgaagtcttcctcaagcttcctgtgtgcaactcttactgcagcttattccattgcctgcaattggaattgcccagtcaaggatctccttcccctgagaaagagctgcttctgttgatcgaaatcatctcatttctaaagggcttggagagacagcaactgtgctgacgagagaggctgacttgcccatgactgctgcctcccattcttctgccttcaccccagtaactgctgctgcttctcctgtctctcttccccggacccctagaattgccaatggcattgcaaatcggttggctagccatgctgctgtgggtgcttctgccccttctgcgccccctgttcatcctccacctcgtcccccccagggttcattggctttgcctggcccatcgtatacaggcaactcccctttgattggtaggatcagttttatcagagagaggccgtcaccgtgcaatggcagaaaaattcgagttttacggcagaagtcggaccatggtgcatacagccagagccccgccataaaaaaacaattggatagacatcttccttccccacctacactggacagtatcatcacagagtatcttagagagcaacatgctcgctgcaagaaccccgttgccacctgtccacctttttctctctttactcctcatcagtgtcctgagccaaaacagaggcggcaagcgccaataaactttacctcaaggctaaaccgaagggcatcatttccaaagtatggaggggtagatggcggatgctttgataggcaccttatcttcagcagatttcgtcctatttcagtgttccgggaagctaatgaagatgagagtggctttacctgctgtgcattttcagcccgggagcggttcctgatgcttggaacctgcacagggcagctgaagctctacaacgtatttagtggacaggaagaggctagctataactgtcacaactcagccatcacacatcttgaaccttccagggatgggtccttacttctgacatctgccacttggagccagcctttgtctgcactttgggggatgaagtcagtatttgatatgaagcattccttcacagaagatcattatgttgagttcagtaagcactctcaggatcgggtcataggcacaaaaggagacatcgcccatatttatgatattcagactggcaacaagctgttgactctgtttaacccagatcttgccaacaactacaagaggaactgtgccacctttaatcctacagatgatcttgtcttaaatgatggcgtcctctgggatgtccgctctgcacaggccatccacaagtttgacaagttcaacatgaatatcagtggcgttttccatccaaatgggctggaggtcatcatcaatacagagatttgggaccttcgaactttccatcttttacacaccgttcctgctctggatcagtgtcgtgtggtgtttaaccacactgggacagtgatgtatggagcaatgttgcaggcagatgatgaagatgacttgttggaagagaggatgaaaagtccttttgggtcttccttccgaacatttaatgcaactgattataaacctatagcaactattgatgtgaaacggaacatctttgacctgtgtacagacaccaaagattgctatcttgctgtcattgagaatcaaggcagcatggatgccctgaacatggacacggtgtgcaggctttatgaggtgggcaggcagcgtctggcggaagacgaggatgaagaggaggaccagcagacagctcggacaactctgatttggaagatgacatcatcttatctctgaatgagtgatgtgccatccccacttggaagagaatcttggcaggccagagaaactgagtgaatgaattcagaacacctgccttttgcggtctcccagggctgtccgttaaggaactgtatgctctgcattgaggactatgatttagagcctccctggaatctgagggcccttctaaaaacaataacaaccacacacaacacactcacacacacacacacacacacacacacacacacacacacacacacacacacacacacacacacacacacacacacacagagctacagggactaggccctagttttgcgtcccctcctcctaggaaggacatagctttcctcaagggaaaaacaaacatgtctctgggtatttcacaatatattttctttgtataatgttctttacttaaagaacaagaatagtttttataaaacttaaaaaaaaaaaaaaaaaa

SEQ ID NO: 1317 - DNA, 2326 bp, Cricetulus griseus
agacagctgcagtacctgaagtccaaggcacttcgggaacgctggctgctggaggggacaccgtcctcagcctctgagggcaatgaggacatgaggaagcagatgcaggaggatgaacagaaggtccgggtcctggaggagtccatcaccaggctcgagaaagaaattgatgtcctggagtttggagaatcagccccagccgccccaaaagagaactctgcagtccctagcccggtccagcccctgtgtgcaagcccagccaaggaagaacagaagtcagatgtcatggtgaactctcagcagacaccacagggcaccccgaaagagaatcgcatgtcctccacgccggtgcggactccgggaggatccaccatgatgaaggcagccatgtactcggtggagatcacggtggagaaggacaaggtgaccggggagaccagggtgctgtccagcaccacactgctcccccgggatccactccctcagggcgtgaaagtctacgaggacgaaacaaaagtagtccatgctgtggacggcattgctgagaatggaatccagccactaagctcctccgaggtggacgaactcattcacaaggccgatgaggtcacactgagcgaggtggggcccacagctgggccaccagagcctcggggactcgcagaggattccagcaggagcacaccgtcaaggagggagatcacaggagttgaagctcagccaggagaggccacctcaggcccaccgggcatccagcctggtcaggagcccccggtaaccatggtcttcatgggctatcagaatgtggaagatgaagcagaaaccaagaaggtactgggcctgcaggacaccatcaaggctgaactggtggtgatcgaagatgcagccacgcccagggagccggcaccactcaatggcagcgcggctgagctcccagacaccaaggaagagaaccagacggggctctcggccacccccagcgatgcccaggatcttgacatgaagaagcctcgctgtagatgctgttctgtcatgtgagccgtcggggcgccccagtccccggtcccgtccttcgctccacactccacccagcagcccggccctccccggcgcctgcccaccctcaccctccgcctcacgggccccagacacctgtgtgtgtgtggtccctgtgcacctcgagtcacggtggggggtgctctgcccgtcaccacactccacactcaccccgaacctctgagccgtgtgtcttcccttggtgagagacaggccgacccacctcagatcccctaaggttggggactcccaactccaagtcactgcaggtttacacagacggctcatgcccaccatggtctcaacctggtgtccccttgttgccccaggccagcctgtctgtgccttattgctactttggggagtctctgaggggaccaaatgagagggtctccctggccaatgcgccagcagcctggtgtgggcaggtggggtgaggccacacttctttggagatcccgaagtctcaaagtcctagggtggaggacaggcacctgtggattcccccagtaagtaggggtagctcaaaataggggtaacccttaactggggatggatacatcacccccaagatggggccattgttggcaaggccccaaatcagccactccctgtctgggtcccccctaccatgcacacactgggcccttcttcctggtgctaatttagggacccttggagtcacctttaccctcttctctagttggcttggaccagggtcctgggtttcccacataccccataccctagaaggcaggggtacggctgccagcgctgcagagcctagcatttccaggcaggtctaggttgccccacacacaccttgggtgggagtaagggaatcccccatttgccgcctggctggacaggcgccatggcagggggtcacccacctgtgggcaggcagcagcagccactttggtaggaccacacccggtccaggtccctttccttgggactccagcctggtgtgtagagtacaggaccacccgtggggccctgtcactacccgaagctgcagtggggcacgcagaagccacagggtctgtgtcctgtccttcctgtggcctggaggagaggcactgttccctgaggggtgacttgtggccatggtcatggcaccccttcctcttcctcctctgagtctgcctgagtccctggagccctgagcctcggctgaagtgcccttgctgcccccttctgcttttgacgtgtgacgaggccctgccccttcactcccgtgttcttgactttcccagagaaacaaatt

SEQ ID NO: 1318 - DNA, 2326 bp, Cricetulus griseus
caactattacaagttctcaatgacgttctggctgagatcgaccccaagcaagatgttgatatcagagaggagatgccagagcagacagccaaacggatgctgaaccttcttggtatccttaaatacaaacctccaggaaatgccacagacatgagtacctttcgtcagggtttggtgattggaagtaaacctgtaatttacccagtgctccactggctgcttcagaggagtaatgaactaaagaaaagggcatatttagcccgttttttaataaaactggaggtgccaagtgagttttctacaggatgaaactgtggccgacaccaataaacagtatgaagagttgatggaagcctttaaaaccctgcataaagaatgtgagcagctcaaaacatctggattttctacagcagactcatgaagagagttgaacgtttgaagaaaagggtggagactgttcagaatcatcagcggatgcttaaatagccagacagcttcgggttgagaaagagagagaagaatttcttgcacaacagaaacaggaacaaaagaatcagctgtttcacgcagtgcagagattgcaaagagtgcaaaaccagctgaaaagtatgcgacatgctgcagcggatgcaaagcccgaaagtttaatgaagaggctagaagaagagataaaatttaattcatatatggtcactgaaaaatttccaaaagaactagaaagcaagaagaaggagttacattttttacaaaaagtggtttctgagccagctatgggccactctgaccttctagagcttgagtctaaagtcaatgaaataaacacggagatcaatcagttgattgagaagaaaatgatgagaaatgagccaattgaaggcaagctctcactgtacagacaacaggcatccatcatttctacgtaaaaaagaagccaaagctgaggaacttcaggaaaccaaggagaagttagccaacctagagagagaagtgtcagtaaagacaaaccagactcgggaattcgatggcgccgaggttttgaagggagacgagtttaagagatacgtcagtaaacttcgaagcaagagtacagttttcaaaaagaagcatcagataatagctgaatttaaggctgaattcggtctcttgcagaggactgaagaactgcttaagcaacgtcaggaaaccattcaacatcaactgcgaaccattgaagagaagaagggtgtatctgggtacagttacacccaagaagagctagaaagggtgtctgccctcaagagtgaggttgatgaaatgaaaggccggaccctggacgacatgtctgaaatggtaaaaaaactgaattcactggtatcagaaaagaagtcagctctggccccagtcataaaagagctccggcagttgcggcagaaatgtcaggaactaacccaagagtgtgacgaaaagaaagcccagtatgatagctgtgcagcaggccttgaaagcaatcggtccaaattagaacaggaagtgcgagggctccgtgaagaatgcctccaggaagaaagtagataccattatacaaactgtgtgattaagaacctggaagttcagcttcgtcgagcgactgatgagatgaaggcctatgtctcctccgatcagcaagagaaaaggaaagcaatcagggagcagtataccaaaaatattactgaacaagaaaaccttggtaagaaactccgggaaaagcaaaaggctgtacgagaaagtcatggtccaaatatgaagcaagcaaagatgtggcgagatctcgagcagctgatggagtgtaagaagcaatgctttctaaagcagcaaagccaggcttgcatcggtcaggtaattcaggagggcggagaggaccggctggtgctctgagccccgtgtcatcctttcgctttctagactcgtccctcctaaagttgtcttggaaaatgaagtgaaggcagatcatgtttaaaggtctttttaacatgaagaagaggcttgcattgtttagtttagccgtcgagtggttgtcctgagttatgggaaagggactgagcttgctatctgtaatgtaaacatgtgtccattaagaaccatgtagtttttaaagttgtaataacagtggattaatgtttttctcaatcttttttctgactttagaggactcttttaggaactagtatctcttgtttttgaagaaacccttgtctgaagtcagcagtccctacagttacttcagtttctttctcttctgtaaatgtaaaccagtttaatattttgaaaagcatttgttctcctcatgtgacttaaaagaaaataaagc

SEQ ID NO: 1319 - DNA, 2326 bp, Cricetulus griseus
cagaaagcagaaagtagaagctcagaaacaggcagaaaaactgatgaagcaaattggtgtgaagaacgtgaaactttcagaatatgaaatgagtattgctgctcatctagtagaccctctgaatatgcatgttacttggagtgatatagcaggtttagatgatgtcattacagatctgaaagacacagtcattttacctatcaaaaagaagcatttgtttgagaattccaggcttctgcagcctccaaaaggtgttcttctgtatggacctccaggctgtgggaaaacgttaattgccaaagctacagccaaagaagcaggctgtcgatttattaaccttcagccttcgacactgactgataagtggtatggagaatctcagaaactggctgctgctgttttctcccttgctataaagctgcagccttccatcatatttatagatgaaatagactcctttctacgaaaccgttcaagttctgaccatgaagctacagcaatgatgaaagctcaatttatgagcctctgggatggattggatactgatcatagctgccaggtgatagtgatgggagctaccaatcgccctcaagaccttgactcagctataatgagaagaatgcctacaaggtttcatatcaaccagcctgctctaaaacagagagaagcaatcttgaaactcatcctgaaaaatgaaaatgtggatagacatgtagatcttctagaagttgcccaggaaactgatgggttttcaggaagtgatctaaaagaaatgtgtcgagatgctgctctcctctgtgtcagggagtatgtcaattctacatcagaagaaagtcatgaagaagatgaaatccggcctgtgcagcagcaggacctgcatcgggcaattgagaagatgaagaaatcaaaggatgcagcgtttcagaatgttttgactcatgtttgtttagattagaagtaaagatcattttctgtcatgtaaacggtattactgcttgtcagaaatcatgaggaggaagttcagtccaacctgagtgtgggtgcttgtttgacctttttagccatatgctgttatagccttatagagtctaagctggtcttaaagtaataatttgttgagttattagtgagaagtgggatgtggttaggtgctggtttctcgacatgtgagtatgagtgtgagtgtgtatgtgtgagtgtatatcaatgtaaatatcgacatttttctttgatattctgtagataggtttaaatacagaagcttttttttaaaccccaactatggagtccaaaagcaccagatagatagtctgtagcataaccaagatctaagacaagatatgacaggtacagtgattcagccattcctagttgtcacttgttttggccacttgtaagttgaaaatttcctctgcagttgattgaatgaaccacatctgaatatgtgcatgtgtctcgattataggggttgtcaggggaatcagataacaaagcggctttctcagtcatcagcaatttcacctcattatgctctgacaccaagtagacaacttttaagtttttacactgatttacattaagatggattgaatcctttcacaacagtgggcttgagaaacctcagtgctctttatatgtgtacatgactttaacagttctataactatgttcctcaaatgttgtttagaagttacatgttctttaattatgttcaaatttcatttggtcacccaagcaaaatgatagtttatataaatagtcattattaaatgtgctaaaaaatactcattttgtaacttaaattaaaaaattttctcagcatagtttagattgtacaaatatacacatcagaattcctgtgttgtatctgtagtcacttgatgctatgtgactacatattaaatcttcatgggtttattggattactttctctggtattgtgtctcacaagacttactggactttattgctccatttgtgctttggtggttggagaatgcaggagaatgcctaggctaacaaaatgcaagtcatgcaagattgtgaaggtgttgtgaggtgaatgctgatacaagaccccaagaaacatgtgctttttatatgatttacaataaaaggtccttccttttgattctgtttcccacttagtccttgatcctttttcacttactttaaatcgtggccttttgttgtttataaaatctatgtttggacagtttttatcttgcagttgagattttcataccttttacaggagactatttttaatattaaattattctgttttaatattgtagttttagtaatttgtattttaatgtaatgg

SEQ ID NO: 1320 - DNA, 2325 bp, Cricetulus griseus
agacagtggtccgccagggtgagagcatcaccatccagtgtattgtaatgggaaatgatgtggtcaacttccagtggacatacccccgcatgaagagtgggcggctggtggagccggtgacagactacctatttggggtgtcctcccgaattggctccatcctgtacatccccactgctgagctgagtgactcggggacctatacttgcaatgtgtcggtgagcgtgaatgaccatggagatgaaaaggccatcaacatcactgtgattgagaatggctatgtgagactgctaggaacacttggtgatgtacaaatcgctgagttgcaccggagccggacgttgcaggtggtgttcgaggcttatccgccaccaactgtcctgtggctcaaggacaaccataccttgggtgactccagtgccggcgagatggttctgtctactcgaaatgtgtctgagacccggtacgtgtcagaactgaccttggtgcgtgtgaaggtggcagaagctggctactacaccatgcgggccttccatgaggatgcagaggcccagctctccttcaggctgcaggtcaatgtccctgtccgtgtgctggagctgagtgagagccaccctgccaatggggagcagacaatccgctgtcgtggtcggggcatgcctcagccaaatgtcacgtggtctacttgccgagacctcaaaaggtgtccacgaaagctgtcacccacacccttggggaacagttccaaggaggagaaccagctagagactaatgtgactttctgggaagaagaacaggaatatgaggtggtgagcacactgcgcctgcgtcatgtggatcagccattgtcagtacgctgtatgctgcagaactcaatgggcagagattcgcaggaggtcaccgtggtaccacattctacatggccccttacgacaactatgtcccatctgcccctgaaaggacatatagggtcaccttgatcaatgagtcaccagtgcttagctacacagacctcgtgggcttcagctaccaggtggccaatggcatggagttcttggcctctaagaactgtgttcatcgagacttggcagccaggaatgtgcttatctgtgaaggcaagctggtcaagatctgtgactttggcctggctcgatatatcatgcgggactccaactacatctccaaaggcagtaccttcctgcctctgaagtggatggccccagagagcatcttcaacagcctctacaccaccttgagcgatgtgtggtctttccgggatcctgctctgggagatcttcacactgggtggtaccccttacccagagctgcccatgaatgaccagttctacaatgccatcaagagaggctaccgcatggcccagcctgctcatgcctctgatgagatctatgagatcatgcagaaatgcccaagcctgacgctgccgatgagggcctcctagagggttcccccagccttgccagctccaccttgaatgaagtcaacacctcctcaaccatctcctgcgacagccccctggatctccaagaagaaccacaggcagagcctgaggcagagcctgaggcagagctggagcagccacagtgctcaggttgccagggacctctggctgaagcagaggacagcttcctgtagggtctgccccaccccacccaacctgaaactctcatttgcctcctagcacccaaccctcctggcctagcctggcctggcctggcctctctgcttctggaaagccatgagactctgagccagggctcctccaggggactccgtttccccagatgtaagaggaagagttgggcttggcctggacaggtatggaacctagattcctggagagagtcctgggtgtaaagtggtgtgttcacgtcctcctgtgtagccagttgcccctcagctggatcactccactttgatcttcccaagaacttggcaagaacctggtgcctgactcctggccaaacagaggccagccttggacaaggccatttcattagaaccctcctcccctggtgccagtcttagctttcccaggcccgagctggtctggggccagccatgcttcatgaacactcttaggggagaaggcagagctgagtacaggatgctctggcctgcagcccgctgaactctgggaagattccagataccacatctggggattcaggaactgagcctctccttcaggtccccaagtgcaattgcacagaccttgacttggcataacagtcagtgtcccaggaaaaccccctacagctgtcttgaggacacagaaggaccacgagacccttttcataccatga

SEQ ID NO: 1321 - DNA, 2325 bp, Cricetulus griseus
gaattcctcagagagagaagactgtaataatggcgaaccccctaggaagataataccagagaagaattcacttagacagacgtacaatagctgtgccaggctctgcataaaccaagagacagtatgtctgacaagcactgctatgaagactgaaaattgtgtggccaaaacaaaacttgccaatggcacttccagtatgattgtgcccaagcagcggaaactctcagcgagctatgagaaggaaaaggaactgtgtgtcaagtattttgagcagtggtcagagtctgatcaagtggaatttgtagaacaccttatatcccaaatgtgtcattaccagcatgggcacatcaactcctatctaaagcctatgctgcaaagggatttcataactgctctgccagcacggggtctggaccatattgctgagaacattctgtcgtacttggacgccaaatcactgtgtgctgctgagcttgtgtgcaaggagtggtaccgtgtgacgtcggatggcatgctatggaagaagctcatcgagagaatggtcaggacagactctctgtggagaggcctggcagagcgcagagggtggggacagtacctattcaaaaacaagcctcctgatgagaatgctcctcccaactccttttatagagcactttatcctaaaattatacaagatattgagacaatagaatcaaattggagatgtggacgacatagtttacagagaatccactgccgaagtgaaacaagcaaaggagtttactgtttacaatatgatgaccagaaaatagtaagcggccttcgagataacaccatcaagatctgggataaaagcacattggaatgcaagcggattctcacaggccacacaggctctgtcctgtgtctccagtatgatgagagagtgatcataactggctcatcggattccactgtcagagtatgggatgtgaacgcaggtgagatgctaaacacattgatccaccattgtgaggctgttctgcacttgcgtttcaataacggcatgatggtgacctgctccaaagatcgttccattgctgtatgggatatggcctccccaactgacatcaccctaaggagggtgctggtgggacaccgagctgccgtcaacgttgtagactttgatgacaagtacatcgtttctgcatctggagatagaaccataaaggtatggaacacgagtacttgtgaatttgtaaggaccctaaatggacacaaacgaggcatcgcctgtttgcagtacagagacaggctggtggtgagtggctcatctgacaatactatcagactgtgggacatagaatgcggtgcgtgtttacgtgtgttagaaggccatgaggaattggtgcgctgtattcgatttgataacaaaaggatagtgagtggggcctatgatggaaaaattaaagtgtgggatctcatggctgctttggacccccgtgctcctgcggggactctctgtctacggacgcttgtggagcattctggaagagttttccgactccagtttgatgaattccagattgtcagtagttcacatgatgacacaatcctcatctgggacttcctaaatgatccagctgcccacgctgaaccaccccgctccccttctcggacatacacctacatctccagataaataacccaacactgacctcatacttgcccgggactcgttaatgttgcagtatttaacatatctgccaagaccaggatgaacaacaatcacactcctacccggattccccggatggatcagcgaggagcagggctttgagactcctgttgggacagtcggtcagcagctgaccaggacggtctgctcggcacagccggctgcttcagtgctgctatcagaagatgtctttatcttgtgtgaatgattggaacttttaagcctcccctcctgttccctaccccctccctctgcacctgtttctctcccattgggttccagacaaagatgacttataaatatatttagtgttttgccagaactgctgctgggaacatcctttcccttgaaatacatttggaaagtggatgtgaattatggatgggaaggaacccttttacacttgtcccttggctaaattctttctgatttgtcctaactttagagacagagactgtctggaactctgttgacaagtaataaagtctggccctcatagcttgttttcgaactggaaatgacattgagactcctaaatcattctgtaaagaaaaaacatttatctttagtgatccaaagctggggagaaggctgtgaattttctagaaaaaaaaaaaaaaaaaaaa

SEQ ID NO: 1322 - DNA, 2325 bp, Cricetulus griseus
ggaagatgaagcagccatggtagagtcagtaggcctagctctagtgaagctaccagatgtccttaatcgcctgaagcctgacatcatgattgttcatggagaccgatttgatgcccttgccctggctacatctgctgccttgatgaacatccgaatccttcacattgaaggaggagaggtcagtgggactattgatgactctatcagacatgccataacaaaactggctcattaccacgtgtgctgcaccagaagtgcagaacaacacctgatatccatgtgtgaggaccacgaccgtatccttttggcaggctgcccttcctatgacaaactgctctcagccaagaataaagactatatgagcatcattcggatgtggctaggtgatgatgtaaaatgtaaagattacattgttgcactgcagcaccctgtgaccactgacattaagcattccataaagatgtttgaattaacactggatgcacttatctcatttaacaagaggaccctagttcttgtttaccaaattattgatgcagggagcaaggagatggttcgagtgatgcggaagaagggcattgagcatcatcccaattttcgtgcagtcaagcatgtcccatttgaccagtttatacagctggtcgcccatgctggttgtatgattggcaatagcagctgtggagttcgagaggttggcgcttttggaacacccgtgataaacctgggaacacgccagataggaagagaaacaggggagaatgttcttcatgtgcgggatgctgacacccaagataaaatattacaagcgctccaccttcagttcggtaaacagtacccttgctcaaagatatatggggatggaaatgctgttccaaggattttaaagtttctcaaatctattgacctccaagagccactacagaagaaattctgcttccctcctgtgaaggagaacatctctcaagatattgaccatattcttgaaactctgagtgccttggctgttgatcttggaggaacaaacctcagagtggcaatagttagcatgaagggtgaaatagttaagaagtacactcagttcaatcctaaaacctacgaagaaaggattagtttaatcctgcagatgtgtgtggaagctgcagcagaagctgtgaaactgaactgcagaattctgggagtaggcatttccacaggtggccgtgtgaatcctcaggaaggaattgtgctgcattcaaccaaactgatacaggaatggaactctgtggacctcagaacacccctctctgacaccttacatctccctgtgtgggtggacaatgatggcaactgtgctgccatggcagaaaggaagtttggccaaggaaaaggacaagaaaactttgtgacactcattacaggcacagggattggtggtggaatcattcaccagcatgagctgatccacggcagctctttctgtgcggcagagcttggccacctcgtggtgtctctggatgggcctgactgttcctgtggaagccatggctgtattgaagcatatgcttctgggatggccttgcagagggaagcgaagaagctccatgatgaggatctgctcttggtggaagggatgtcagtgccaaaagacgaacctgtgggtgccctccatctcatccaggccgccaaacttggcaacgtgaaggcccagaatatcctacgaacagctggaactgctttgggacttggggttgtgaacatcctccacactatgaatccttccctggtgatcctgtctggagtcctggccagtcactacatccacattgtcaaggacgtcatccgccagcaagccttgtcctccgtgcaggatgtggacgtcgtggtttcagacttggttgaccctgccctgcttggtgctgccagcatggttctggactacacaacccgcaggatccactaggcctcctgggagtggacatggactgagacccaagagctacttagtggaaccaggttcttttagatcagtacttcttcagaggcaaatttgggaggctgctgagatggctcagtggttaagagcctgagcacccatgtcaggcagtgcctgaaagtcaagctccagggcaagagcaaaagcttccttctttcatatccttacataggctgccatcagaagctgtggcctagattaaaggtggatcttcccacctcaaaagatccagattaaaaatgggtctttcctcttaaaatgatttaagaacaaatccctcacaggtgtacccagcagtttagttttagttaattccagatgtagtcaagttgacaaccaagatagctaccaca

SEQ ID NO: 1323 - DNA, 2325 bp, Cricetulus griseus
cataaagtcgctgtgaagatactcaaccggcagaagatccgaagccttgatgtggtcgggaagatccgaagggagatccagaacttgaagcttttccggcaccctcacataattaaactgtaccaggtcatcagtacaccatctgatattttcatggtgatggaatatgtctcaggaggagagctatttgattatatctgtaaaaatggaaggttggatgaaaaggaaagtcgacgtctgttccagcagatcctttctggtgtggattattgtcacaggcacacatggttggtccacaggggacctgaaacctgaaaacgtcctgcttgatgcacacatgaatgcaaagatagctgatttcggtctttcaaacatgatgtcagatggtgaatttttaagaacaagctgtggctcacccaattacgctgcaccggaagtaatttcaggaagattgtatgcaggccctgaggtggatatctggagcagtggggtcattctctatgccttgttatgtggaaccctcccctttgatgatgaccacgtgccaactctttttaagaagatatgcgatgggattttctatacccctcagtatttaaatccctctgtgatcagccttttgaagcatatgctgcaggtagatcccatgaagagggccacaataaaagacatcagggaacatgaatggtttaaacaggaccttccaaaatatctctttccggaggatccatcatacagttcaaccatgattgatgatgaagccttaaaagaagtgtgtgaaaagtttgaatgttcggaggaggaggttctcagctgcctttacaatagaaaccaccaggacccattggcagttgcctaccacctcataattgataacaggaggataatgaacgaagccaaagatttctacttggcaacaagcccacctgattctttcctagacgaccaccatttaactcggccacatcctgaaagggtaccattcttggttgctgaaacaccaagggcacggcacacccttgatgaattaaacccacagaaatccaaacaccaaggtgtgcggaaagcaaagtggcatttgggaattagaagtcaaagtcggccaaatgatattatggcagaagtttgtagagcaatcaagcaattggattatgaatggaaggttgtaaacccctattatttgcgtgtacgaaggaagaaccccgtgacaagcacattttccaaaatgagtctacagctataccaagtggatagtcggacttacttactggatttccgtagtattgatgatgaaataacagaagccaaatcagggacggctactccacagagatcgggatccatcagcaactatcggtcttgccaaaggagtgactctgatgctgaggctcaaggaaagccgtcagaagtttctcttacctcatctgtgacctcactcgactcttctccggttgacttagctccaagaccaggaagtcacacaatagaattttttgaaatgtgtgcaaatctaattaaaattcttgcacagtaaacctaaaactttgcttatttctttgattgcaataagcatgcataataaatatagccaaacacttccacttatcaagttttacatatatatatatatatgtgtgtgtgtgtcctctgtttggggggctcactgatatcacttatgatgtccaaatgcagcattgtgttcctgatgtgaagaaaggaagagtgtgttttttttaaagttccagctttgtaaatagaactaagtaatatctctataaactgtgtggaaggggaaggggcacaaaaggaggaaccaattaaataggaccttctaaaaattgttaattttgtaaactttgcttcttttataagttattctgtgattccttttagttaccgagttttattttgaagatatttaaatattgcacttgtataaatagtatgataaatgcagactattgcagtcaatttttttaagctaggatatctgaaatgataactttcagttaagtatgtcaagcttgcaacagaattttcacaaatgtattgtgaatgtagtttgcaaattcttatattgaaaatgtaaggggaatcaatgcaaatgatttttaatctttttttattatcttttcagcagtttatattttttttgtgattttatgcaaccatatttttactttgtcttgataactgaaagctgtataagtttttgccagaaaagtactgtatacatagttttaaaataacagattttgctgatatgtaaaaattttgccattaaaattgatttctcatgaaaggaacttttctaccaagttggga

SEQ ID NO: 1324 - DNA, 2325 bp, Cricetulus griseus
gatgaacacgaccaaagctgcgaagggcagccttctggctttgagccagcaggaagaactagtggatttgccaaccaactaccccttgagcgccagtgaagatgagggggacagtgatggagaaagaaagcatcaaaagcttctggaagcaattggttcccttgatggaaaaacaggtggaaattgcctgagagatctgaggctagtctgaaagtgtccgagtttaatgttagttgtgaaggctctggagaaaaattggccctttcagatctgcttggacctgctaaaccttcaccctcattggctgctgtaaaaaagcaactgagtagagtcaaatcaaagaagactctggaattaccccttaacaaagcagaggttgaccagatccacagagaagtggcattcagtaaaacttcacaaaccctctccaaatgggattctgtggttcagaagaatcgggaagcagagcagctggtttttcccatgggaaaggagtcatcttcctttgctcccattgaacatgtgtttagtgactggaaggcaagaacccctctggaacaggaagtttttaacctcctccataagaacaaacagccagtgacagaccctttactgactcctgtggaaaaagcctccctcagagccatgagcctggaagaggctaagattcgccgagcagagcttcagagggcccgagctctgcagtcctactatgaagccagggctcgaagaatgaagaaaatcaaaagtaaaaaataccacaaaattgtgaagaaaagaaaaggccaagaaagccataaaagactttgaacagctgaggaaggtcgatccaaacgctgcactggaagaactggaaaagattgagaaagccagaatgatggagcgaatgagccttaagcatcagaacagtggcaaatgggccaagtcaaaggcaattatggcaaagtatgacctagaggcccgccaagctatgcaagaacagttggctaagaacaaggaactgactcagaagctccaagttgtctcagagagtgaggaagaaggaggcgctgatgaggaagaagccctagttcctgatgtagtgaatgaagtacagatgaattcggatggagccaatccatggatgctcaggagttgtaatcgtgatgcgaaagaggatgagatccaggcagactctgaagaaccgtctgagcctgtggtccatgaaatttctgaaaatgagggaaatgaaaaatcagtggaagaggaagatgttttgttgaaagaatttgaggaaaggagatcccttaggaaaagatctaagtgcaaccagaatgctgagccagtgagtggccaagaaacaaaagattctaccagcaaggaggtattatctgaattgagggcattgtctaagaaactcagtgaggaaaatcatctctccaagaagcagaaagagagttcagcaaagactgttctccttgtccaggaagaggaacctgccctagaggaagaggagcctctcttgttgcagaggccagaaagaatacaaactatggagaaactagaagaactaggtaacgaggactgtcttccaagtaaggagccccctagagctgcagtagaaggggagcagatgaggaggaacccacaatatcagttgaaggggaagaagaaggagcaaatgatcagtctacagaacctcctgacttcaagaactccttctgtgacatcactggctgttcccacaacagtagaggagctggaggatgaagtggaaagagagcaaaagcaaatgataaaggaggcttttgccggggatgatgtcatcaaggagttcctaaaagagaagagggaagctatccaggccagtaagccaaaggacatggacctgaccttgcctggctggggagagtggggcgggatggacctgaagcccagtgccaagaaaagacgccggtttcttattaaagcccctgaaggtcctccgagaaaagataagaatttgcccaatgtgattatcagtgagaagcgcaacatccaagctgcagctcaccaggttcgggtgcttccatatccgttcacccaccatcagcaatttgaaaggaccatccagaatcctattgggtccacatggaacacccagagagctttccaaaagctgactgctcccaaggttgtcaccaaggcaggccatattatcaagcccataaaagcagaggatgtgggttaccggtcttccccaaggtctgacctgtctgtcatgcagaacaatccaaaacgacactccaaacatcaaaaacagactaaagaaaagttctatggattgaactgtcagaggagtgtcct

SEQ ID NO: 1325 - DNA, 2324 bp, Cricetulus griseus
ggaggggagtctgatattgaagaagaagaactgactcgagctgatcctgagcaatgccatgtacccctgaaacgcagatctgagtggagatgggctgcagatcgagcagctattgtcagccgctggaactggcttcaggcccatgtttccgacttggaatatcgaattcgccagcaaacagatatttataaacagatacgtgctaataaggggttgatagtccttggggaggcacctttcccagaccatacaacagacttattttcacttagttctgaggtgaagacagatcatgggatgttgaagcatcacacagacatgagcagttcaagctacttgacagctactcaccatccaccacacagcccccctggtgagacagctctccacctcatcagacacctccacacccaccagctctagctcacaagttggagccagcacttctcagccagtgaggaggaggaggggagagagttcattcgatattaataacattgtcatcccaatgtctgttgctgcaacaactcgtgtggagaaactacaatacaaagaaatccttactcccagctggcgagaggttgatcttcagtctctgaaggggagtcctgatgaagagaatgaggagatcgaggacctatctgatgcagcctttgccgccctgcatgccaaatgtgaggaaatggagagggcaaggtggctgtggaccacaagtgtgccaccccagcgtcggggcagcaggtcttacagatcatcagacggccggactaccccacagttgggcagtgccaacccctccactccacagcctgcctctcctgatgtccagtagtagccactctctgtcagaattctcccacggtcaatctcctaggagtcccattagcccagaactgcactcagcccccctcacccctgtggctcgggacagtttgcgacacttggccaatgaagacacccgttgctccacaccagagctggggctagatgagcagtctgtccaaccatgggagcggcggaccttccctctggcttacagtccccaggcagaatgtgaggagcagctggatgcacaggacatagcagcccgctgcactcgccgcacctcaggcagcaagactggccgggagacagaggtggcacccacctcacctcctgttgtccctctcaagagtcggcatctggcagcaacagttgcagctcagcgcccaactcacagatgaacagaattgagactatacagactcactacttattggcattaaagcttcagaaatctctgcgtttgatattcaaacatcatatgctggaattttcacagtttttagtgaatttaaggaatttagatcctcctttggttggtttggttttgttgtttctgttttcttgttttgttttcatgtcacacctgagcacttcctccaattgacagacaagttcaggaagagaccctgttggcctggtcctgcatatcctctgcactgttggatcactggacttcccaatgttagatgatcaccctctcccttgcacctgtggggtagggtggaccagccagatggcagcaggtacccattccctctcccctacaaactaggaagtctgtggagtacacagcatcacttctgtatcatgttttcactgagtagttcacatgtcatgtttctttcatgtccccatcagacagtcacttagactctccctcttctccgctccccttgcctgtggaacactgtctggtcctagctgtggtttccattgttccccaccaacctcctgttagccttgtgcctgtctcatgtataatcacatcaccaaaaaaggggagggggaaaggaattttctttttctgccattttataatcatacaaaaataataggcagactgcttaatggttggggttttttcacaattttcaacattagtgatttttttttttttctgtttgcaagttaaaaggtttgtcattgtttctttaaacaacaataatgcaccatatccctatgcataaagtgcttcttctatttataaggttgaaaattctgaataacccttttagcattagtaaaaaaaaaacaaaaagaacaaaaaaaacaaaaaagacaaaaatttaaaaaaacttgtattttgtaaatattttcttttcctgctttgagctgtgtaatggcagcgaacatgtagctgtctttgttctatagaaatgcttttcttcagagaagctgatctttgttaatgtcttgattctgttcgcaaagcacagactagtgacttaaaaaaaaaggaaaggaaaaatagaaaaaaataaataaaaaaaaaagataca

SEQ ID NO: 1326 - DNA, 2324 bp, Cricetulus griseus
aggattctctgcccaagcttaaggacctgacatttctcaagaaccagctggagcgcctacagcagcgtgtggaggatgaagtcaacagtggtgtagggcaggatgcctcactcttgtcttctccattcatcaagggattcctggcaggctatgtggtggccaaactgagggcatcagcagtattgggctttgcagtgggcacttgcactggcatctatgcagcgcgtatgctatacccaatgtggagaagacactgaagaactactttaggtcactacgaaagggacctgactagaccctttggggaaggcaggatgagcatgttgggactgcagagagtggacagtgatttgtcagcctgcaccctgcattccttccctccctagttccatgagactaacctaaaagtatggctcacgagtgctgtcttcaagccctaactgtggagtgtgcagctgactctgatcctaggtattctttctggtgatgtgccacagttctgcactcggtttccttcggatgtgtcccagttcctctgtcccttgctaactacacaggccacccagggtctggtatgggccatgagtgtagaagatgggggtatgccaggcctagcccgtccaagacaggctcgctggaccctgatgctattcctgtccactgccatgtatggtgcccatgcaccattcttagcactgtgccatgtggatggccgagtgcccttccggccctcctcagctgtgttactcactgagctgaccaaactattgttgtgcgccttctgcctactggtgggttggcaaacgtggccccagggcacaccaccctggcgccaggctgcaccatttgcactatcagccctgctctatggcgccaacaacaacctggtgatctatctgcagcgttacatggaccccagcacctatcaggtgctgagcaatctcaagattggaagcacagctctgttgtactgtctctgccttgggcatcgcctctctgcacgtcaggggttggcactgctgctgctgatggctgcaggagccttctatgcatcaggtggctttcagaaacctgtgaacgaccttcctgggcccctgtcagcagccggaacccatcccatgcccttgcatatcactcctctgggacttctgctcctcatcttatattgcttcatctctggcttgtcatcggtgtacactgagctaatcatgaaacgacagcggctgcccttggctctccagaacctcttcctctacacttttggggtgatcctgaacctcggattgtatgctggcagtggtccaggcccaggcttcctggagggtttctctggatgggcagtgcttgtggtgctgaaccaggcagtaaatggactgctcatgtcagctgtcatgaagcatggcagcagcatcacacgcctcttcatcgtgtcctcctccttggtggtcaatgctgtgctttcagcagtgctgctgcagctccagcttacagccgtcttcttcctggccacactgctcattggcctggctgtgtgcttgtactatggtagcccctaaggccttggccacccccactctcacttgtggctgtgtagattagatgcaaccaccagagccacctcccatcccccagcagcctgtaacaagtgccttgtaagaaaagctaaggaggtcacgttagcctttggatgttaagatgggtgagcgttacccctaggaggcataaagggtgggcttggttaaggaaacgcctaactgcatccctataaagaactgggaaccccaaacccaggcttaggcagtctatccttgaggaacccggccttgtcctgcatgaacatggctacttcatgtgaagttttgttcctgtctgcagtggtcactcctgaagaccccttgccctgaagcttcctgctgtctgctccacacagcatgacttccacataagggataattagtttgcccactccacagtgctgttcctcttacccagccgttctggaaaggtcagaggggggctggagcttgactcatctcagggaacactgcccctggaccctggcttaagcctacactcctgacccctgtgctaactcaggggccctgttgtagcccacttcacctctaaggcacttaggaggtactgttttcccactctgtggtgtcccagctcccagcagccagggaaggctctgcagagtaaccagggaccaggtacaaaaaacatttatagctaatcagtgtctaactacttaagcaataaggtcttaataaagtgttcagggtgtagggtgcttcctacaaccattcaacaaaaaaaaaaaa

SEQ ID NO: 1327 - DNA, 2324 bp, Cricetulus griseus
atcatctcaaggatgtcttccagaagtcccaaggatttaattaaatgcaagtggggatcaaggcctagcagctccaagtcggacactgcattagagaaatttaagggagaaattgcagcctttaaaacgtccctggatgaaatcacaagtgggaaaggaaaagtgactgatagggacaaatgcagacttttggagaaaattcaagttcttgaagctgagagagagaagaatgtttattacctcacagagaaagacaaagaaatacagagactcaaagaccagctaaaggcaagatacagctcctcctccttgctcgagcagctggaagagaaaacaaaggagtgtgggaagaagcagcagttgttggagtccttatccaaagagacagatgtcctgaagaagcagttgtccgccatgacgaaaagactttctgaactggaaagcaaagcctgtacactcaatctgtcacagagcgtgcctgcaaactgcttcaactcatcaatgagtagtattcatgaaaaggaaatgcagctgaaagatgctctggagaaaaatcagcagtggcttgtgtatgaccagcagcgagaggcctatgttaaaggacttttagcaaagatctttgagctggagaagagaaaagaaacagccgctactttactcccacagcagatgaaaaagactgaatcagaaggttatcttcaagaggaaaagaaaaatatgatcatctcttagaaaatgccaaaaaagatcttgaagttgaacgacaaaccgtaactcagttgcgttcagaacttgatgaatttagaagaaaatatgaagaaactcagaaagaggttgaagatttaaaccaactcttgagttcacagcggaaggcagacatagaacacctggaagaggacagacacaagacagagaagatccagagactcagggaggagagcagcatcttcaagggcaaactggaagaagagaggaaaaagtctgaagaactcttatctcaggtccgcattctttacgagtctctgttaaagcaccaagaggaacagaccagggtagctctgctggagcagcagatgcaggcatgtactctagactttgaaaatgaaaaacttgaccgccagaatatgcagcaccaactgtatgtgattcttaaagaactccgaaaagctagaagtcaaataacacagttggaatccttgaagcagctacatggctttgccttcacagagcagtcgttcccaatccagagagagcctgaaagcagagtgaaagttacctcacccaaaagtcccactgctgcactcaacgaaagcctggtggaatgtcccaactgcagtgtacagtacccagctaatgaacatcgagatctgctcgtccatgttgaatactgcacgaagtagcagaaccattcttgcctttgtacagaaaaggtccacactgtatcctgtttgtttatgggcactttgaatcacagatcacatctcttgcacaagaaactccctgtctgcccttggcactatggtgtatgagggcagccttatatttttctggccattttgcattttccttggtagcaatacctccctgagctgcttcatcatgaggctacagtgagagaatgtggtgagcagtgggtacccagactactagcacttcacactgtttttctaactagcacttacttcatactgttttagtacccgatgaacaagagctgtttggcttattgattatgggttaaaactatgaccagcaagcagatattttatgctttggggtaagagaatgggaaggtgattaagtacggctcttactgtgctgatattttttcatgtaagtgcttagtataatgacacttccagtttgatatctcttcctgttgtctaacggttactagaaaagttggggagttttataactttattgctgttaactcttctaagcacaatgcaggttttgtttgaagaatgcctttaagaagctgcacattttcactcattatctgaccataactttgacttaaatttcatcagcacagattggttccctaaaatgccaaatgaacaaaactttaacaaaactgtcttgcctcctcattcaattggaaggtattttattatatcttggtgagcttttgttttttggcactctcaaagatgggtgatcagtgaaattatcagatatttgttttctgaatagatatttttatatatgctttatgtaaaccaaaaagttgttttatttcttcaaattttctaacatgcttaaacctgggctactattagcaatatgaaggaggaaataataaattatttaataagttt

SEQ ID NO: 1328 - DNA, 2323 bp, Cricetulus griseus
gacacgtgaccatcaataatcatgaagaacccatttgcacaccttgctgagcccttggaccctgcacaaccaggaaagagatttttcaatttgaataaattggaggactcaagatatggacgtctaccgttttctatcagagtcctcctggaggcagccattcggaactgtgatgagtttctggtgaaaaaaattgacattgaaaatatcctgaactggaatgtcatgcagcataagaacatagaagtgccatttaaaccagcccgtgtcatcctgcaagactttacgggcgtgccagctgtggttgattttgcagcaatgcgtgatgctgtgaagaccgtgatgttaggagcaggactgttagcaaagaaagctgtggaagcggggctgagtgtgaagccttatgtcaagaccagcctgtctcccggaagtggtgtggtcacctactaccttcgagagagtggagtcatgccttatctgtcccagctagggtttgatgtagtgggctatggctgcatgacctgcattggcaacagtggaccccttcctgaacctgtggtggaggcgatcactcagggagaccttgtagctgttggagttctgtctgggaacaggaatttttgaaggacgagtccatcccaacacccgggccaactacttagcctctcccccattacgtaatagcataatcgccgggaccatcaggattgattttgagaaagagcctttgggagttaatgcacagggccagcaagtatttctgaaggatatctggccaactcgagatgagatccaggcggtggagcggcagtgtttaaggaggtctatcagaaaatagagactgtaaacaaaagctggaatgccttagcagccccatcagagaagctgtatgcctggaatcccaaatctacatacattaagtcaccaccgttctttgaaaacttgactttagatctccagccacccaagtctatagtggacgcctatgtgctactaaatttaggagattcagtaacaacagaccacatctctccggctgggaatattgcaagaaacagtcctgctgctcgctacttgaccaacagaggcctgacgccacgagagttcaactcttatggctcccgccgaggaaatgacgccatcatggcacggggaacatttgccaacattcgcttgctgaacaagtttctgaacaagcaggcacctcagactgtacatcttccttcaggagaaacccttgacgtgttcgatgctgctgagcggtaccagcaggctggacttcccctgattgttctggctggcaaagagtacggttccggcagctcccgagactgggcagccaaaggccctttcctgctgggaatcaaagctgtcctggcagagagctacgagcgtattcaccgaagtaacctggtcgggatgggggtgatcccccttgagtatctccccggtgaaactgcagactctctgggactcacgggacgggaacggtatactatcgacattcctgaaaaccttaagccacgcatgaaggttcagataaagctggatactgggaagaccttccaggctgtgatgaggttcgacactgacgtggaactcacttacttccataatggaggcatcctgaattacatgatccgcaagatggcccagtaggtgctggcctctcaggagacccgccgttggtgctagacccaacaaggcaccaggcccagctggtggaggcctggtaaagcagccacctctacctctaaggagggggctgccaagatgagcaagtgggcactgccattcctggaggcacagggccaggagtttctacattcttgatttgttaatctctttatgtttttctataatttggaatctagaatcatgggaaggtcagtaataccaaaaagagaattaccttgtctttaagttactgatcactggacgttgattttcaccctgactaatcttcaactgaacactagccagtattctcagacgtgtctcctactctttgtattgttcttctctgttctctgctcaatgaaaccttccccggagagcctgttcctctgtacattacaccagtgttaactgacataggcaagaacttcttcacacttcaaatcatggtggtgacatcatcctctccttctaggtgagcaaacacctaatggataggtcagccatcaaaagtgcatgattatgtaccatccgatcaacatgagagagatcatcttttaccattttcaactacttgttgagagggggcctttgttggagaaagcctctgccctcccaagtgcgggattaaaggcgtggtgccacc

SEQ ID NO: 1329 - DNA, 2323 bp, Cricetulus griseus
cttgtgggacgtggtggcagtgaaatcagagctgagccctattaccaggcaaacttcccaaatcagtgggtcaaacaaggggtcttctagacccggatctagagactccactaccctcaagacctacacagcaaccattaagtaggccaatgcagtctccaggacgaaactctatctcccctggtagaaatggaataagccctcctaataaactgtctcagctacccaggacatcatctcctagcactgcttcaaccaagtcctcaggctctgggaaaatgtcctatacatcccctggcaggcagatgagccaacaaaaccttaccaaacaagcaggcttatccaagaatgccagtagtatcccaagaagtgagtccgcatctaaaggactaaatcagatgaataatggcaatgggtctaataaaaaggtagaactttctaggatagtaacttcaactaagtcaagtggaagccttcctcgggtgagcacttggagaagaactggaagctcatcttctattctttctgcttcatcagagtccagtgaaaaagccaaaagtgaggatgaaaagcatgtgagctccatgccaggccccagaccactgaaagaaaaccaaccacccacaaaaggcacatggaggaaaataaaagaaagtgaaatctctcccacaaccatgctttctcagaccacttcctcaggtgctgccaatggtgctgaatcaaagactctgatttaccagatggcacctgctgtttctaaaacagaggacgtttgggtgagaattgaggactgccccattaacaaccctagatctggaagatctcccacaggtaacacccccccagtgattgacagtgtttcagaaaagggaaattcaagcactaaagattcaaaagatacccagggaaaacaaagtgtgggcagtggcagtcctgtgcacaccgtgggtctggaaaaccgcctgaactcctttattcaggtagatgctccagaacagaaaggaactgagacgaagccagggccgagtaaccctgtccctgcagcagagactgttgagacttgtatagtcgagcgtacccctttcagttcaagtggctccagcaaacacagttcacctagtgggactgttgctgccagagtgacgccttttaattacaaccccagcccgaggaaaagcagtgcagatagcacttcagcccggccatctcaaatccccacaccagtgagtagcaacacgaagaagcgagattcaaagacagacagcacagaatccagtggagcccaaagtcctaagcgccattctgggtcttacctcgtgacgtctgtttaaaagagctggaaggacaaacctaggaaaacctggtactcttcacaactgctgtatagagactttatttcaaagaaaactttaaaggttgaaactttttgtaaatagatttaattcttgttagagaggttttgttctggaaaccatatttgatagttcacttggtcctcactggtcattttgggaggcaactcttgttaggtaggaaaaaaacagtaaagccaagtatatttgtacagtatgttttacatgtatttaagtagcatccatcccatcgtcctttaattatcgcttgtcttaaaataacactacagatagaaactatatgatatattgctgttatcaatcatttctagattataaaataaagttacatcagggagaaattggtatttatgcaaaaatagtccttgtgaatccatctaatgtcataactaatcatgtggctgtgaaattcacagtaatatggttcccaatgaatatgtttacccagcctgctttgctttactgcatgaatgaaactgatggttcaatttcagaagtaatgattaatgattctgtggtcacatggtgtgcataggatagctacggtgtaacaattcacactattttgtgctcaaatctgtgtaactgtaaaacactgaatgaaactattttaactgaactagattttatcaaaagtaggtagaatttttgctatgctgtaactgttgtatattctggtatttgaggtgagatggctgctcttttattaatgagacatgaattgtgtctcaaactaaatgaacatttcagaataaattattgctgtatgtaaactattactagaaaattggtatttgtttgaaggttcttatttcacatttgtattaataattgtcaaaagggcctcttttaaaagctaaatgtaaattttttcttcagattctatgcattaagagtaaaatttcctcttactgtaataaagacaattgaagaagattgttgacacttaa

SEQ ID NO: 1330 - DNA, 2323 bp, Cricetulus griseus
cttacagtgcctgaagactgtcaggagagctgaggaccccaaaacaaactggctttgagacatgcaactcttcgccctccttctggtgaccctgttctacagggtggggggctccacctacacccctcagaagctctacggagaggtgacctctcctctatatcccaagccttaccccaatgactttgagacaaccactgtgatcatggtccccagggggtacagggtgaagctcgtcttctggcagtttgacgtggaaccctctgaaggctgtctttatgactatgtcaagatttctgctgataagaaaactctagggcggttctgtgggcagctggactctcccctggggaaccccccgggagagaaggaattcgtgtcccaggggaacaagatgctgttgacctttcacacagacttctccaatgaagagaatggaaccgtcatgttctacaagggcttcaaggcctactaccaggctgtggacattgacgaatgtgcgccccagtccaactcaatggaaggtgactaccagccccagtgccaacacctgtgtcacaactatgttggaggctacttctgttcctgccgtccaggctatgagcttcagaaaaatggacagtcctgtcaggctgaatgcagcagtgcgctgtacacagagccctcagggtatatctctagcctcgaatacccacagccctacccaccggatctgcgctgcaactccagcatccgggtagagcggggcctcactctgcatctcaagttcctggatccttttgaaattgatgaccaccagcaagtacactgtccctatgaccagctccagatttatgctaatgggaagaacttgggtgaattctgtggaagtcaaaagcctccagaccttgacacccgcagcaatgcagtggatctggtgttcttcacagatgagtcaggggacagtcgaggctggaagctgcattacaccactgagatcattaagtgcccccagcccaagaccctagatgagttcaccatcatccaggaaccacagccgcagtaccagttccgggattacttcattgccacctgcaaacaaggctaccagctcgtggagggaaaccaggtgctgcactccttcacagctgtttgccaggatgatggcacatggcatcgtgccatgcccaggtgcaagatcaaggactgtgggcagccccgaagcctgtctaatgggtacctccactacatcaccacaaaaggcgtgaacacctatgaagccaggatccaatactactgccatgacccgtattacaagatgaagaccagagctggcagcagcgagtctgtgcgagggttatatacctgcacagcccagggcatttggaagaatgaagaggaaggggagaagatgccccggtgtctgccagtgtgtgggaagcctgtcaaccctgtgaagcagaagcaacgtatcatcggaggggaggaagccaaacccggcaacttcccctggcaggcattcaccaacatccatgggcgaggaggcggggccctgctcggagaccgttggatcctcaccgcagcccacaccatctaccccaagggacacaacaaagaaagaaagcaaccctagtaatgatattttcctgggccacacaaatattgaagagatcgaaaaattgggacatcacccagtccgtagggtcatcatccatcccgactaccgccaagatgaacctaacaattttgaaggagacattgccctgttggaactggaaaacagtgtcacactgggtcccaacctcctccccatctgtctccctgacaatgagaccttctatgacaaaagcctcatgggttacgtcagtggctttgggataacagaagataaacttgcttttagcctcaggtttgtccgtctgcctgtagctgatcgagaagcatgccggagatggctccagacgaaaaagagtaatgatgtcttttctcaaaatatgttctgttccggggacccgactctaaagcaggatgcctgccagggggacagtggaagtgcgtttgcagtctgggacagagaccgtgatgtctggattgccaccggcatcgtgtcctggggcattgggtgtggtaagggatacggcttttacaccaagttacttaattatgttgactggatcaagaaagagatgggagaggaagactgaccccagagttcactaggtcagaacccagtatgtagtttacaaaataattatctgaccgattgttgataaccgccgtgattccctattaaaatcacagacagtacgtagactaaactctacttttctataatcccatcaac

SEQ ID NO: 1331 - DNA, 2323 bp, Cricetulus griseus
tataacatgtggcccagattcattagctacggatgccacgaaacaaacaactgtgagcgttagcttcctcttaccagatatcactgacacatttgaagccttcacgttgaaccttctgtcttccctcctgattgctgggcccaattcccccttttacaaagctttgattgaatctggacttggcacagacttttctccggatgttggatataatggctacacgagggaggctttcttcagtgttggcctccaagggattgcagagaaagatgtcaagacagtcagagagctcgtagacaggacaattgaagaagttattgaaaaagggtttgaagatgatcggattgaagctttgcttcataaaatcgaaatccaaatgaagcatcagtctaccagctttggcctggccctgacatcatatatagcctcttgctggaatcacgatggggaccccgtggagctcctgcagatgggaaattttaagcacaatcagcacaagctgactttatccatgaagccagatgacaaatattatgagaacaaaacgcaaatggagacagagaagctagagcaaaaggtgaattctctctcccaggcggacaagcagcagatctatcagaaaggtttagaattacggactcagcaaagtaaacctcaagatgcctcctgtctccctgcattaaaagtctctgacattgagcccatcatgcctttcaccaagtttgacatcgccctcgcagctggagacatccctgtgcagtactgcccccagcccaccaatggcgtggtgtatttccgagccttttccagcttaaacaccctaccagaggaactgaggccctatgtgcctctcttctgcaatgtgctgaccaagctgggttgtggcatccttgactacagagagcaagcccagcagattgagttgaagacaggaggcatgactgtttcgccatatgtgctccctgatgactcacagctggatacgtatgagcagggtgtgctattttcatctctttgcctggaacggaacctgccggacatgatgcatctgtggagtgaaatatttaacaacccatgctttgaagaagaagagcacttcaaagtgttggtgaagatgactgctcaggagctctccaatggtattccagactcggggcatctctacgcatctctcagagcgagcaagacgctcacaccttcaggagacttgcaggagaccttcggtgggatggatcaggtgaggttgatgaaaagaattgcagaaatgacagacatcaagcctatcctgagaaaactcccccggatcaagaaatatctactaaattgtgataacatgagatgctcagtgaatgccacccctcagcagatgctccaggcagagaaagaggtggaaaacttccttaggaatgttggccgcagcaaaaaggaacggaaacctgtccgcccacatattgtcgagaaacctacacacaatggtcccgatggcggtgcccatgttaacggctcccagatcatcagaaagctgataacagaccccaccttcaaaccgtgccagatgaagacacatttcgtgttgcccttccctgtgaattacgttggcgagtgtgtcagaacagtcccctatgctgatcctgatcatgccagccttaagatccttgcccgtttaatgacggctaaattcttgcatacagaaattcgagaaaagggaggtgcttatggtggaggtgctaaactcagccacagtgggattttcacactgtactcttacagggatccaaactccatagaaacactccagtcttttgggaaggccatagattgggctaaatctggaaagttcacacagcaggacatcgatgaagccaagctttccgttttctctgccgtggattctcctgttgctccatcggataaaggaatggaccacttcttgtatggcctctccgatgagatgaagcaggcataccgagaacagctctttgctgtcagccatgacaaactgacctctgtgagccataagtaccttggcatcgggaagagcacacatggcctggctatactcggaccagagaactcaaaaattgccaaagacccatcctggctcataagataatgagtcttgcacatttctgagtatatgtaagaaatcagagacccttaaaaactaagcctctgaactgaatttatttgaatgatcacaagtgttactgtttgagtgttgttccaaaagtcatagttgtatcatattaaaaatctgaccaaagatgtttattgacctaaaaaaaattaaaaactaaattaaaaaaataaaaaaaaaaaaaaa

SEQ ID NO: 1332 - DNA, 2322 bp, Cricetulus griseus
ccgccgcccgagtcggaaccgtcgggctgcagccgccggcaatgccgcgaaggaagagaaaggcagtagttcagatggaaccgaagattccgatttttctacagatctcgagcacacagacagttcagagagtgacacaagcccgggcttctgaggatttggagaagttaaggcttcaaggccaaataacagagggaagcaacatgattaaaacaattgcttttggccgctatgagctggatacttggtaccattctccctatcctgaagaatatgcacgactgggacgtctctacatgtgtgaattctgtttaaaatacatgaagagccaaacaatctggctgtcaccttgattggatattttctaaggagaagaattcatttctcaactacaatgtatcctgtatcctcactatgcctcagtatatgagacagggctatggcaaaatgctcattgatttcagttatttactttccaaagtggaagagaaagttggctctccagagcgccccctgtcggaccttgggctcataagctaccgaagctactggaaggaagtgctgctccggtacctgcacaacttccagggcaaggagtattttccatcaaagaaatcagccaggaaacagctgtgaatccggtggacattgtcacaagcacctagttttaaagagacaggacctaatagatgaatggatagccaaagaggccaaaaggtccaactccaataaaaccatggatccaagctgcttaaaatggacccctcccaagggcacttaaagtgacctgtccttctgagccagcgagcccaagcagtaggaatccgtaccctagggatctgtctgtcatttctgttgctcttgtgattggcaagtacagtatcctttgggaaggccatccccctcaggactgtcctggctccgaccttcgtgtacactgcagacactagttctgaggaactgttgtttcggcctcagtgaggttgcctggacggatctgtattaggctcaagtacagatcctcatagcactgacccaaggagttgtgttatggtactgtacctgtccagtcactggttccttcctcatgttctttagctccgtgaggtttgttgtgtcctgaactttgtgctagtgctttttcctgcctggtcaccagacctccaaacatggttgccaccgaagggccctttgcagttattccttacacattcttcatgaagggtggggaacaggcagcacttgtgagtatatgtatgtctactaggagggtccattcatcctgggtttcatctcatggttgctcttttttctccgtttttgtcaaatgacttgcctttagtcaggctcaggctgacccgagcttgggccgcctgaagcgtttcccaggggatcacagcacctggtccatgtggatgagaccatgttccctttgtattcacttgtgggcactggggcagtagcttgttggaaggaatggtaattttttttccacagcagaaaatgccccctctttcttttttcctgccccctttatgttggcagttgccaaatactttaacagttttcttttatgccacatgttaattgattcatcacactgcagatatttccacctgcctttgccagtctggtatagggcagctatacttccacataagttgcactgattttgtccagagcttcctgggagaagtggaaagtgcttgaaaatggcttctgtttctcagcccatgactcagcaagacagagtggccacaccctaccggtttgcttcccctttcagtagtgcctcccctacagcaggctgaagtgcttctgtccctccgagaacttcatttcccttgtgggacttgccaccatcatcctgttgtctggtttcctatttttggtggtgttaagtgaaggaagaaatgttccctctaatttctccctgtcccattatataacctgctatcttggggcagcttttgatgtctgacatgtcacccttcccaacttggtctcctccagcactgctgtcttcacgtggcaccctcaccacaatcctaactctggtcatttgtgcctttctcttgtcatctctgtacactactaatattcactgtgggttggagggagctgattttaagcatgttcagtggcagctcccttccagtttcagtgtcactgttaaaatttatccaaatgccgcttcactggggatttttcttaaggggtaaaggccttttacagatgcggaacccttccccacgtgtggtagaatgtgctcttctatatctactcaataaagcatgttctctgctcaaaaaaaaaaaaaaa

SEQ ID NO: 1333 - DNA, 2322 bp, Cricetulus griseus
cagcaaactacagagccagctgctgtccctggagaaggaagtggaagaatacaagaatttccgccccgatgaccccacacgcaagaccaaagccctgctgcagatggtccagcagtttggagtggactttgagaagcgaatcgagggctctggagaccaagtggacacactggagctgtctgggggggcccaatcaatcgcatctttcatgaacgctttccttgaactggtaaagatggagtttgatgagaaagatctacgacgagagatcagctacgctatcaagacatccacggatcaggacggctctcaccccaaaagtgtgctgagaagctcagttcctacccccggttacgagaggagacagagcggatcgtcaccacctacatcagggagcgagaggggagaaccaaggaccagattcttcttctgattgacattgagcagtcctacatcaacacaaaaccatgaagacttcattggatttgccaatgcccagcagaggagcacgcagctcaacaagaagagagccattcccaatcagggggaggatcctggtgatccgaaggggctggctgaccatcaacaacatcagtttgatgaagggcggctccaaggagtactggtttgtgctgacggctgagtccctgtcttggtacaaggacgaggaggagaaagagaagaagtacatgctgccgctggacaacctcaagattcgggacgtggagaagggcttcatgtccaacaagcacgtgtttgccatcttcaacacagagcagaggaatgtctacaaggacttacggcagatcgaactggcttgtgactcccaggaagatgtggacagctggaaggcttcgttccttcgagctggagtctacccagagaaggatcaggcagagaatgaggatggagcacaagagaacaccttttccatggacccgcagctggaacggcaggtggagaccatccgaaatctggtggactcctacgtggccatcatcaacaagtccatccgtgacctcatgccaaagaccatcatgcacctcatgatcaacaatacaaaggccttcatccaccatgagctgctggcctacctatactcatcagcagaccagagcagcctcatggaagagtcagctgagcaggctcagcggcgggacgatatgctgcgcatgtaccacgctctcaaggaagcactcaacatcattggggacatcagtaccagcaccgtatccacgcctgtgcccccacctgttgatgacacttggcttcagaacaccactggccacagccccactccacagcgccgacctgtgtccagtgtgcacccaccaggccggcctcctgcagtgaggggtcccacaccagggcctcccctgattcctgtgcctgtggggcctgcagcctccttctcggcgcccccaatcccatcccggcctggaccacaaagcgtgtttgccaacaatgaccccttctcagcaccgcctcagataccatctcggccagcacggattccccctggcatccccccaggagtgcccagcagaagagcgcccgctgcgcccagccggcccaccattatccgcccagccgagccatccctgctcgactaggctgcaggggggccatgttctggggggtcctcgtgcacccacagtgcaggagagttttggtggtctgggccccattactgctcccatgctgggaccaggctccctgtgggcaacctttaccctgtcctccctagcctggaggacatgacaatgagggaggtggggagtcccagacaacacgacttgggggctttgcactttgggacaagggaagatctctggttggcagtaggaactgcatccttgggaccatctggaaaaaaagatccaggctggtgtaggggaactctagccttgttctttcttggggtacaggaactgtcctacttttcctagggttcttcaggagtgagccaggcccagtatgctcagtgctggccgcccacctggcttaagttgtatatatatatcttctttggccatattaaccacacaacctgagcccagcccagtctcgacagccagaggtgcctttgtaccttcctcaggcctggagtcccttagctctggcctgcttgcctcactctcctcagcccaatgtggtttgtgctgtgtgagctgaggagaacatcaggggtctcttggctcccagccagacgcccccacaggatgggcgctagtgcatctgcagatcctgatcccaatgcttggtttgaccactgttaagtgcctgcctctgtatatcctattaataaactaaaataaaggg

SEQ ID NO: 1334 - DNA, 2321 bp, Cricetulus griseus
gagttttcttggaggcttttttggtcctatttgtgagattgatgttgcccttaatgatggcgaaagcaggaaaatggcagaaatgaaaactgaagatggcaaagtagaaaaacactatctcttctatgatggagaatctgtttcaggaaaggtaaacctagcctttaagcagcctggaaagaggctagagcatcaaggaattagaattgaatttgtaggtcaaattgaacttttcaatgacaagagtaatactcatgaatttgtaaacctagtgaaagaactagccttacccggagaactgactcagagcagaagttatgattttgaatttatgcaagttgaaaagccatatgagtcatacatcggtgccaatgtccgtctgaggtattttcttaaggtgacgattgtgagaaggctgacagacttagtgaaagagtacgatcttattgttcaccagcttgctacctatcctgatgtcaacaattctattaaaatggaagtgggcattgaagattgtctgcacatagagtttgaatataataagtcaaagtatcatttaaaggatgtgattgttggaaaaatttacttcttattagtaagaataaaaatacagcacatggagttacaactgatcaagaaagagatcacaggaattggacccagcaccacaacagaaacagaaacaattgctaaatatgaaataatggatggtgcaccagtaaaaggagaatctattccgataagactgttcttagcagggtatgacccaacccccacaatgagagatgtgaacaagaagttttcagtaaggtactttttgaacctcgtgcttgttgatgaggaagacagaaggtacttcaagcagcaggagatcatcctgtggagaaaagcacctgaaaaactgagaaaacagaggacaaactttcaccagcgatttgaatctccggaatcacaggcatctgcagaacagcccgagatgtaggcagaataggacaaagcagcaagaacaagaactgtagccaagaggtgaagctcagtgagctaaagatggtcccagcctggggagcgtccagctctgtctgctagtcttccttatcctcaagtgctgcgtttatctacagtatgattaaaagttctttgtgtacatacattttacaaagtgctttcttggaaacactggagaattcttaagctgccttccttgttttcttttttactgcacactgataagcactcagatgcatcagcataaacagtaaggattttcatgtgagtaggctggtatttgtaatttttttccttacgcataatgttgaaaatccttttctcttttttccatgctaatgattacctcttattctctatgtgcaaaaaattaaatatttttttttgttcaagtaaaatgagaaaacctaagcagcccttatgtgctgcaaagttttaaggcacggcttctcagtattttgaaaattgtttttacatgtgtatcagaaaccaacctggtgttgaatggtaggtgcttctggatctaccatttcatggccttctaaatttgaatctttggggtcttctaaggtatattaaaattttccaaccaagggattacatggcatgtcattgtggccttcttcccccatattaaccttttttgctagtactttctgtttcaccatgtgggttctgcagggtggagttgacatgttggcattttggacagtttcttggtaactagaacattggctagttcaaactcatgtaaatgtcacctactctatttaaaaacaaaaacaaaacactaaattcaagtcatttgttcagtgtctctgaagaaggcggtgcagtcatctgagcgcagatacactaatgtggaatatgggggcaagacagagcctgctgtgggcgctatgttcactcatgattcttttttatttattttgtaccagtattccttgacacacttcagagcaagttttgtcagtaaccttactttctgaggaaactgaacagcctgagtccatttctttaaacctattttactatgatggcactttaataaaatggccagcaagcaaccctggccaaaggttccacatatcgtgtcctggagcagctactgtaaatgtggatttctaagaatggccatctttctcttcatgtaagtgcctgttcagactttcagattttcaaaatgccaaatattttcatggtcacttgcatgtagtaataggagatattcagagattttgaaaaccaattgtatttaaccagcctcaagttgtgcaactatgatatataataaataatttgaaacagaaacttaa

SEQ ID NO: 1335 - DNA, 2321 bp, Cricetulus griseus
ctgtgaccggttgtactgcacgtatcgtggggacagagcttcggccacagttgtcgacgtgcggcctccccttgatgtcggccctcgaaaagagcatgcacctcggacgcctaccatctcgccctcctctgcccggcagcgggggcagtcagagcggagccaagatgcggatgggccctggacggaagcgggacttttctcctgtcccgtggagtcagtactttgagtcaatggaagatgtggaagtggagaatgctgctgcttctccatggaggtttaggccattctgcccttttccttgggctagtgttcacggcagcaatcatcagcagagtacagtgtaggattgtagctctggatcttcgaagtcatggagaaacaaaagtcaagaattctgaagacctgtcagcagaaacgatggcaaaggatgttggcaatgtggttgaagctatgtacggggacctccctcctccagtcatgctgatcgggcacagcatgggtggtgccattgcagttcacacagcatcagctaacctggtaccaagcctcttaggcctctgtatgattgatgttgtggaaggtacagccatggatgcacttaatagcatgcagaatttcttgcgtggtcgtcctaaaaccttcaagtctctggagaatgccattgaatggagtgtgaagagtggccagattcgaaacctagagtctgcccgagtctcaatggttggccaagtcaaacagtgtgaaggaattacaagtccagaaggctccaaatccatagtagaaggaatcatagaggaggaggaagaagatgaagaaggaagtgagtcagtaaacaagaggaaaaaggaagatgacatggaaaccaagaaggaccatccatacacctggagaattgaactggcaaaaacagaaaagtactgggatggctggtttcggggattatccaatctctttcttagttgtcctattcctaaactgctgctcttggctggtgttgatagattggataaagatcttaccataggccagatgcaggggaagttccagatgcaggtcttaccgcagtgtggccacgcagtccatgaagacgcccctgacaaggtagctgaagctgttgccactttcctgatccggcacaggtttgcagagcccatcggaggattccaatgtgtgtttcctggctgttagtgacctgctgtccacccctccctctacattgagctctgttgtaaatacatcgcaccagaggccactgtgatgccgctgtctcctcctcaccatcccgcccagccatgtgacaccggttccctgtagaggggcatccccagatgtacaaaccccttctgtatacccgtcaaaagcattgttttccagggcccttgtccaacagtggcctgcgcagtctggggtcctcagttcttcctctctcctcctgtgctcccttccttgcctagggtgaagcctccagagctcctccctgggcccctgttcctggcatcctgcaaatgtaccccaggctcagggatctccattccttgaggatgttcttggcatgatcctgccctacctcatgggatgggcaatgcacacactggcccttatttttccctttcaaataaaacaccagtcaggtacctttatcccagtcttaactgttctaagtcttgaagagccagggtgaccagggttcagggagaggtagtagatagcaagcatcccaagaaacctgcctgtaagccaggtccagccagtccaagcacatggcttcccgtctgggtgagccccctctcccactcccacatgtctgggcacctgccctgggctgaggccaggctgctccaggggcctcatgagccctcatctgccacagagcagcccaggttaaacacagcccatgcacaaagccacaggctaaatcctgtggaattgtttttaatgaatgaatttaaccattttcatagttggttcctgaaggtgtgccaagtgacgcttgcctcttctagacccacagcttctcactccacttgtggtttccatgttcctctgtagaaacatcatggactagcatccccagtctttgcccttctccagctgcctcatcacagcactgcagcctcccctgctgcccagggcacgccatttccacaggcagggaggggcagccccctgaagcccatctttctgtgacgtgtagccctctccagttttcacccaacaacttcctacccctgtcctgctgcacggtccagagtctgggaccgactttgtttctttgttatttatgatcttgtttaaagaaaataaatatctcccaaccttta

SEQ ID NO: 1336 - DNA, 2321 bp, Cricetulus griseus
ggctgcttatggagaaaaggatgctattttagaggcagacactgagttctggatttccgtcttgttgtgaattcagtgtccagcatcaggtccagagcttgatgcatatcctccagtatctagaaaagctgccagaggaaaaagaagaagctactcccaagacagtatctagtaagagtgaagtacaagaagaaatgttaccagtttttaaggtggacactcacacaagcaaacaacttcggcattttaaatatttgtcagtgtccttcatggcccagctcctggcttccaatcttttccttaaaaaggtggttgaaagtggtggtcctaatatcctacatggctttgagcagaggttgctagaaacagtactgggctacattaatgtagtagcacagaccatggaaaagaatgcagacaaactgactgtgaagttttggcgagccctactcagcaaagcttacgacatgctggataaggtcaatgccttgctgcccacagaaacatttgtctctgtggttagaggggctggtgggcaaccccctgccatctgttcgtaggaaagctcttgatcttttgaataacaagctgcagcagaacacattctggaagaagaaaacagttcaccgctttctaaaactggttccagtccttctggccattgtgcagcataagaaaaaagaggaagaagatgaacaagcaattaacagacagacagccctatataccctaaagctcctatgcaagaactttggagcagggaatcgagagcctttcataccggttctgagtgctgcagtacagctgatagcaccagagaaaaaggaggagaagaatgtcctgggaagcgccctgctgtgcatagcagaggtgacctccactttggaagcactggccatccctcagcttcccagcctgatgccatcgctgctgacggccatgaagaacaccagtgagttggtccacagcgaagtctgtctgctcagcgccctggctgccttgcacaaagttgttgagactctcccacacttcatcagcccctacctggaaggactgctaacccaggtgattcacctagagaaaatcactagcgaaatgggtcctgcctcacaggctaacatccgcctgacatctcttaaaaagaccctagctactacactgtcacctcgagtcctactaccatccattagcaagactttcaagcagatccagaagaactggaagaatcacatgggcccatttatgagcatcttgcaagagcacattggggtgatgaagaaagaagagctcttgtctcaccaatcagaactgaccacctttttcctgggtgccctggacttccgggcacagcactcagaggatgatctagaggaagttgggaaaacagaaagttggatcattggctgtctagtggccatggtggtgaagctctctgaggtcacattcaggcctctcttcttcaagctgtatgattgggccaagacagaagatgccccgaaagacaggctgctgacattttacaatctgaccaactgcattgctgagaagttgaaaggccttttcactctgttcgctggccacttggtgaaaccttttgcagacaccttgaaccaagtaaacatctccaaaacagatgaagcattttttgactctgaacaggaccctgaaaagtgctgcttgttgttgcagtttatcttaaactgcttatacaagatcttcctttttgacacccagaatttcatgagtaaagagagagcagaagccttgatgatgcctctggtggatcagctggaaaataggcttggaggagaagagcggtttcaagaacgggtgacaaagcacctagttccctgcattgcacagttctctgtggctgtggcagatgactccatgtggaaacccctcaactaccagattctgctgaagacaagagactcctcccctaaggtgcggtttgcagccttgattactgtcttagcagtggctgagaagctgagagagaattacattgttctgcttccagagtccattccttttctagcagaattgatggaagacgaatgtgaagaagtggagcatcagtgccagaagactatccagcagctggagaccttgctgggggagccgctgcagagctacttctgaagcagatcattctcatgttcttacgtggggggtgtggtgccatattacttttggtactttcacatctgccgatatttaatgtttttacaaaatccctgcctctcggggctcccacagaagcctctcctgccttatgtacagagttgcaaaggagtaaatggggtggtgttttatat

SEQ ID NO: 1337 - DNA, 2319 bp, Cricetulus griseus
gaggggaaaagggcatcccgggaaccccatttgtttgggattggtagaaggagttatcgggaaaattcaacttcattcagatcttccatggtggcttattttaattcggcagaaagcattggtgggcaaactcccaggagaccatgaagtctgtaaagttaccaaaattgctgtattgtcactttctgaactggaacctcaagagcttgagctggagctctgtaagaagcatcattttggaattaacaagccagagaagattataccatccccctgatgactccaagtttctactgaagacatttacacatatcaaatccaacgtctctgttcccaaaaaaaaaaaaagttaaggaaagtaaagagaaggagaagctggagagacgactacttgaggagctgctgaagatgttcatggactcagagtccttttattatagcttgacctatgacctgaccaactcagtgcagaggcagagcaccgaggagagggatggccgtcccctctggcagaaggtcgatgaccgatttttttggaataagtacatgatccaggatctcactgagattggtactccggatgtggacttctggatcatccccattatccagggttttctaccagataatgtgggctaacgaatggggactctatcagcagacagtatgctgggacagctgctctgaagggtgactttacaagaacaggagaaaggaagctggcaggagttatgaaagatggagttaactcggcaaataggtactacctcagtcgcttcaaggatgcttataggcaagccgtcatagatttgatgcaaggcattccagtgacagaagacctttattccatatttaccaaggagaaagagcatgaagctttgcataaggaaaaccagagaagccaccaggaactcatcagccagctcttacagagctacatgaagttgctgctgcctggtgatgagaagttccatgggggctgggccctaattgactgtgaccccagcctcaccgatgctgctcacagagatgtggatgtgctcctcctgctttccaactctgcctactacgtggcctattatgatgacgaagttgataaagtaaaccagtatacaacggctaagcctaagaagacctaggaaaaaataagaaacagatcaccaagcaagccatggggctggatgttcccatagttgagaagaagcttgagaggaaaagcagtaagcctcacgaagacatcattggtatcagatctcaaaaccaaggctctctggcccaggggaaaagttttctaatgagcaaattttcatctctaaatcaaaaagtaaagcagaccaaatccaatgtgaacattggcagcctacgaaaattaggaaactttacaaagcctgaaatgaaagttaactttctatgatggggacatgtcttcagataatgattcgtaccactctgatgaattccttacaaattccaagtcccaggaagacaagcagctagccaattctttagagagtgtagggccaacagattatattctcccaagctgtggtattattgcttcagcacctcgattaggcagtcggtcccagtctgccagcagcactgatgttagcattcatgttccttccgaggctactgttggtcatggaaatgggcttgcaaaaggccaggagtctcccttgaagagaagtccttcagctgacaacatacgcgtactgatgggctttgccaagcctgtggatgtttactgccacagatttgtacaggatgcacacaataaaatgactgagctgtcagagaccaggtctgtgtctcagaatagtgtggaaggaaatcaaaagactaacaatgtttctaatgaagaaaaccagtcacagtcaatgggacagatgccttctcgaccatcccagttaaatgtctcttgttctttgacaggcccacagtttttatcagttgaaccagtacattctgtggtctctcagaagagccccagctccgggtctagcctgctggaattagaggcggggctttgtgtgactccttcttcagagagcagcagcagcagagcagtctctccctttgcaaagatccgcagttccatggtccaagtcgctagtattacccaagctgggctaactcatgggataaacttggcagtggccaaagttcagaagagtccagcagaacctgaagtagctaatgaaattcagcaaaatgaacttaaaaatatgtttacacaatgccagacacgaataattcagatttagatttttagtcacaagcctatggtttttaaaaattcaaaatgaagttctcacc

SEQ ID NO: 1338 - DNA, 2319 bp, Cricetulus griseus
gtgtctccagcgctacccgtggcccgagggccaccaagggcctcggcctgtgggggctggaggggcgatccagtccggtctacgaagcctggcaatgccccgccacggagtgtcatccggccagggccatctcagagccgacttggagctgaggctggagacttccttaccggcacccaagttgggactcctttggatggggctggtcctggcgctggtgctgactctgtttgactccactgttctctggactcctgccagagcttatcctcttcctgcccaaggacatcccgtcaaattcagtgccatagtgcccccactccagaatgcctttgtgtggcggaacctctcttgccccgcctgcaaagtcttattcactgctctaaactacgggctgaagaaggagcccaatgttgcacgggtaggctctgtggccatcaagatgtgcaagatgctgaacatagcaccactaaatgtgtgccagtcagctgtccatctctttgaggatgatgtggtggaggtgtggacacgttcagttctgagcccgtctgaagcttgtggcttgcttctgggcccctcctgtgggcactgggacatcttttcatcttggaacatctctttgccatcagtgccgaagccaccccccaaaccaccaagcccaccagccccaggtgcccctgtcagccgtgtcctcttcctcactgacctacactgggatcatgactacctggagggcacagatcctaactgtgcagatccactctgctgccgccggagctctgggtggccacccaactcccaggcaggtgctgggtactggggcgagtacagcaagtgtgacctacccctgcgaacactagagagcctgttgaaagggctgggccctgcaggcccttttgagatggtgtactggacaggagacatccctgcccatgatgtctggcaacagtctcgacaggaccagctgagggccctgaccaccgtcacagacctcgtgagaaagttcttggggcctgtgccagtgtaccctgctgtgggcaaccacgagagcactcctgtcaatggcttccctcccccttcataaaggggaaccaatcttcacagtggctctatgaagccatggccaaggcctgggaaccctggttaccagctgatgcccttcatactctcagaattgggggcttctatgcccttaccccacgccctggcctccgcctcatctctctcaatatgaatttttgttcgcgtgagaacttttggctcttaatcaactccacagatcctgctggacaactccaatggctggtggaagagcttcaagctgctgagaatcgaggagacaaagtgcacataattggccacattcctccagggcattgcctgaagagctggagctggaattattacaaaattgtagccaggtatgaaaacaccttggctggtcagttctttggccacactcatgtggatgagtttgagatcttctatgatgaggagactctgagccggccgctagctgtagccttcctgggacccagtgctacaacctatatcaaccttaatcctggttaccgagtctaccaaatagatggaaactaccccggaagttctcacgtggtcctggaccatgagacctacatcctgaacctgacccaggccaatgcaccagaagccacaccacactggaagcgcctctaccgggctcgagaaacctacggacttccagatgcattgcctgcctcctggcacaacctggtctaccgcatgcgggacaatgagcaactcttccagaccttctggtttctctaccataagggacacccgccttcagagccctgtggcacaccctgccgcctggccactctatgtgcccagctctcagcccgcgcagacagccctgctctttgccgccacttgatgcccaatgggagccttccagatgcccacagtttgtggtcacggaccctattgtgctagtgtcccaggacccagagtggggaacattagtcccttaggaaagggactcattcctaagcactgttgagtcaacccagcaaaaacttctggagaaggagccctgtcaggccagggagcaaacgtcatggagagcttgtttggctggatctgggagagggtttggctgccctacctatgcccagtatctggattccccctgaggctgatgtcttctcagggccacaaagctgaggtctcagtgctctgaatagttagacaggagctgtcgccccaggcctgtgctatccacctgtgaaccctgcgctgctacgtgatcctgcaaggttgttaaaataaacagac

SEQ ID NO: 1339 - DNA, 2319 bp, Cricetulus griseus
  modified_base (1703)..(1703): a, c, t, g, unknown or other
  modified_base (1715)..(1715): a, c, t, g, unknown or other
gtgcaagagttcaacagtggactcctacactggcagctgggggcggcgacactacagagcacatccagactcacttgagagcaagatggagatccctcctcgaaggcgcccgcctccgtctctgagctccacaggaaggaagaaagagctggaaggcaaaggtgattctgaagagcagccagagaaaagcatcatagccaccatcgatgacgtcctgtctgcccggccaggggccctgccggaagacgccaacccaggacctcaaaccgatagcagcaagttccctttggaattcagcaggccaaaagccaccggaacatcaggctcctggaggacgagcccaggagccgagacgagactcccctgtgcaccatcgcgcactggcaggactcgctggctaagcgctgcatctgtgtgtccaacaattagttaggtacgttggggatcgcaaaaacccggtctgttcgagaaatgtccatggcgcttttatcgaaccttgcccagggggacgcactggctgcaagggcaatagctgtgcagaaaggaagcatcggaaacttgataagcttcctcgaggacggggtcacgatggcgcagtaccagcagaaccagcagaacctcatgcacatgcagcccccacctctggaaccccctagtgtagacatgatgtgcagggcggccaaggctttgctggccatggccagagtggatgaaaaccgctcagaattccttttgcacgagggtcggttgctggatatctcgatatcggctgtcctgaactctctggtggcatctgtcatctgtgatgtactatttcagattgggcagttatgacatacgtgagaaggcacgcatgtgtgagtgaagatagagggtcacatagaactggctgttttctgttctcgtttatccagcgtaggaagaaagaaaagtctttgctcctctgccccattcactatttaccaattgggaattaaatcattaatttgaacagttataaaattgatattgctgtctctgtgtataagtacatcctttgggaattttctatttcttttcttttttaaccaaagttgctgtctagtacattgaaaggtcacttctctttcacaaacaaacttccttttaaatgtcttttttttttaattcatgttgtattgcagttttggggaagtgaattgactttataaagaaaaaagttttagacaaagatgctaagataggaaatttcaccacaccgaggcaaaaaggtgaaagaaaaattgatccttgaattgatttcctatgagttttagtctccacagaatgaaaaaaacaaaacaaaactgcatcccgtcacccaaagctctgtgcaatagaaacttctagaaaaataggtgtaggggcttgaggaggtgtggcagtcagtagtcagaactatgatgatactggtttctccacaggaaagtggttacattaggctacaagcaaaaacagcgcttcagttaggggtgaaaatgcactcctaatggccatctgcagagttgcttcctcaccacgaccgccatgtctgctgtggttcagcctccacgtgacagttcttcacaattcctttcatcattttttaaatatttttttactgcctatgggctgtgatgtatatagaagttgtacattaaacataccctcattttgtttcttttttctttttttttttttttttntttttttttttntttttttagtacaacagtttaattaactttttatttttattttatatattttttcattaggaccatatctccaaaaaaaaaaaaaagaaacaaaaaatacaaaaaacaaaaacaaaaaaaaaaaaagaagggtaatgtacaagtttctgtatgtataaagtcatgcgctattgggagagcggctggtcccaatttgcttcatgaatcaaggtgtggaaatggttgcatatggattgatttagaaaatggataccagtacagacaaaaagaaaaagaacgaaagaaaaaaaagaaaaaaatgaaaaaaacttgatgtaaattcctccttttcctctggcttaatgaatatcatttattccgtataaaatctttatatgtcccacatgttaagaataaatgtacattaaatcttgttaagcactgtgatgggtgttcttgaatactgttctaatttgactacgtggttgcgtagtaaccacgttatttacaggaaataggggaaatgtaacagccacctcctggtaacgaagcctgaaggccagaagggacttttggggatacctacttgagagtggggacaacggtttgatttctacagattgtt

SEQ ID NO: 1340 - DNA, 2318 bp, Cricetulus griseus
cagaaagcacagaatctctttggcaagatggcagatattctagaaaagatcaagaacttgttcatgtgggtgcaacccgagatcacacagaaactgtatgtcgctttgtgggccgccttcctggcttcttgcttcttcccttaccgcctggtggggctcgctcttggcctctatgctggcatcaagtttttcctaatcgacttcatcttcaaacgctgccccaagacttcgagccaagtacgacacgccctatatcatctggaagaacctccccactgacccccagctcaaggagcgtgcaggtgccaccgtgtcacgcaggcttcagacaacctcatcacgaagctacgtctccagtgctccagctggtctgagtaaggatgaagatgctggccgctttcacagcaccaagaagggcaatttccatgaaatctttaacttgactgaaaacgaacgcccactagcagtgtgtgagaatggttggcgttgctgcctcataaaccgagaccggaagatgcccacggactacatcaggaacggggttctatatgtgacagagaattatctgtgcttcgaaagctccaagtctgggtcctcaaagaggaacaaagtgatcaagctggcggacatcacagacatccagaagtacaaagtcttgtccgtcctccctggctcaggcatggggattgctgtatcaactccatcaacccagaaacccctggtgttcggcgccatggtgcacagagatgaagcctttgagaccattttcagccagtatgtgaaaatcacatctgcagcagcctctggcggtgacagctagtattgactctgaggtgttgttggaatcctttctaatcgttggctaaagggtcagatgggatgtccttctcatctttggcaataattctcctggactatggctagttatggcagcctgggttttgcagacctgaagggctgggacttacctggacagtgtcgggctggcccgtgctgagcgcgtgaagcaccgttgaggacacctgtggacacgggtgggcagaggtggttgtggtgccttcttgccgggatggtaagacagagagaagtggtggggaggcccctctccagtgaagaaatggccagtcatctcactcggccctcagattctccttccatgctggacctactgtggacactgcaaggctttgggtagggcctctcagggcttggtatgtttggggtacctccccctccattttcagtgtctggtcctgagctgtcattcatcagacccatcttggtttgacattccagccaagagaccaggccagtggttgatggccagcaagggtccagaatggcatgttggcaaaagcacacttttttaacacttggcttttcgggaaggtttggagataagggagggccctgtgccacaggagatagctgtgggcagagcctagaggttgggggggtctgagttgccctgtacctctaacatctaacagtatttcttcttcctacatgctcaacaagggccaggcaaccccaccctacccatgcttcctgccccaaccaaggtggagattgcctgggtgggtgatcttgcaggcctgggactctgaagggtgcaaccaccaccccacctgtgcattttccaggtggatcactctgactccttcagcttgtcctgagtccttcaggtgtcactgagatcgttttttttgaagaaacagaagattctattttttacagagagcaagctgtttttcttatttttgtatcatttttcaaatgtaatttttacctttgctccaatcctcatttgctggtgtgggtgtgaggcctggtggcttgggctcatgacaccccattcccaggggcttcagaccacacactggggttgggaaaggcttgccaggcggccagatcaagcacacataccaccccagatgttccacaaaggcctcacagctccaggtacataggtgaaggagtctgaacatggaggcaggaccctcctccatccagagctgtggcttgggcctctgtaatatgctcgtgctctgaagagcaagggggacagggctgggccaggggcctgtgaaggcaatggcatacttagagacactggggtttttattggattgtgtgatttgaacaagtgtttaatttctgactaatcactgacctagaatgttcaatttcgtatatctgaagcttgagtctgttttggatctgtacataattgttattggtgtaacttttgttctacaaaaggatcatattctataaagaactgataggaaaaaaaatcctctgtcactttttttttt

SEQ ID NO: 1341 - DNA, 2318 bp, Cricetulus griseus
gaagaaggagatcgtggtcaagggggatgaagtgatcttcggggagttctcctggcccaagaacgtgaagaccaactatgtagtttgggggactggaaaggaaggccaacccagagaatactacacattggattctattttatttctacttaataatgtgcatctttctcatcctgtttatgtccgacgtgcggctacagaaaatattcctgtggttagaagacctgaccgaaaagatctacttggatatctcaatggggaagcatcaacatcagcgagcatagataggagcgcccccctggaaataggtcttcagcggtccactcaagtcaaagagctgcagatgaagttttagcagaagcaaagaaaccacgaattgaggatgaagagtgtgtgcgtcttgataaggagagattggcagctcgattggaaggccataaagaagggattgtacagactgagcagattaggtctttgtctgaagccatgtcagtggaaaaaattgctgcaatcaaagccaaaattatggctaagaaaagatctactatcaagactgatttagatgatgacataactgcccttaaacaaaggagttttgtggatgctgaagttgatgtgaccagagatattgtcagcagggagagagtgtggagaacaagaacaactatcttacagagcacgggaaagaatttttccaagaatatttttgcaattcttcaatctgtaaaagccagagaagaagggcgtgccccggaacagcggcctgctccaaatacagcccctgtggatcccacattgcgtacgaagcagcctattccagctgcctacaacagatatgaccaggaaagattcaaaggcaaagaagaaacggaaggctttaagatcgatactatgggcacgtaccatggcatgacgctgaaatctgtaacggaaggtgcatctgcccgtaagactcaaactcctgcagcccaacctgtacctagaccagtttctcaagcaagaccacctccaaatcagaagaaaggatcacgaacacccattattattatccctgcagctaccacttctttaataaccatgcttaatgcaaaagatcttctacaggatctgaagtttgtgccatcagatgaaaagaagaaacaaggttgtcaacgagaaaatgaaacactaatacagagaagaaaagatcaaatgcaaccagggggcacagcaattagtgtcacagtaccttatagagtagtagaccagcccctgaaacttatgcctcaggactgggatcgggttgtagctgtttttgttcaaggtcctgcttggcagttcaaaggatggccatggcttctacctgatggatcaccagttgacatatttgctaaaattaaagccttccatctcaagtatgatgaagttcgtctagatccaaatgttcaaaaatgggatgtaacggtattagaactcagctatcataagcgccatttggatagaccagttttcttacgtttttgggaaacattggataggtacatggtaaagcataaatcccatttgagattctgaatcttttgattcctccttttctgaaaacttggtgtaagaagcatggatatagcttgatctacagactgagacccaagctttatgaattcatcaagaacttgcaaatgaagaaggccacagagcagtcttttttaagaccttgtttgatgctgtgtgcttcaaaggggcattgcctcccatccatacaagcaaacttttttggcttacaactatttttttaatattagccttctagtctgtaacggaaattgtatattttgatagacgctttttctctattggttaaattagcattacttaaaatttgtttctctagaaataaatacaggttataaatgtgtgtatatttagaagttattaggctctctaagccatcttgcttctgatttttcattgctctatgattccttttactggaaaagactgtcatgaatggttttaaattttaagactctagaacttcaaaaccccatcaaagggaagtaactattaaatcagctgaaagtcagcctgtgtgtatactatgtctatactaactcatgtttaaaaaggaataatgaaaaatcaagaagtctttagtttcagttaaattcagccttttcaagatttcttttgtaaatgaatacatttaatgaatgtatattctctttgttgactttgatgattttaaacttaaagtgatatatttctaactgggatgtgtttccacttgaaaagaaatctcaaaaaacaaagattaaagtgtaataggctgtggtgatttt

SEQ ID NO: 1342 - DNA, 2317 bp, Cricetulus griseus
  modified_base (120)..(120): a, c, t, g, unknown or other
  modified_base (123)..(123): a, c, t, g, unknown or other
cctacacacctccaagcaatgagtttaagatcagcatgaaattggaagcacaggaccccaggaacaccacatccacctgcattgctacagtagttggactgacaggtgcccgatcccgtntgngccttgatggcagtgacaacaagaatgacttctggagactagttgactcctctgaaatccagccaattggaaactgtgagaagaatggtggaatgctgcagccccctctaggcgaacacccaagatccttattccccatcccacctctaccccatccaagtcagctgaacctttgaaattcccaaagaagaggggtcccaagcctggcagtaagaggaaacctcggactttgctgagcccaccacccacctcaccaacaaccagcacccctgaaccggataccagcactgttccccaagatgctgccaccatccccagttcagccatgcaggcccccacagtttgtatctacttgaacaagagcggcagcacaggcccccacttggataagaagaagatccaacgacttcctgaccattttgggccagcccgtgcctctgtggtgttgcagcaggccgtccaggcttgcattgactgtgcttatcaccagaaaactgtcttcagcttcctcaaacaaggccacggcggtgaggtcatctcagccatgtttgaccgggaacagcacaccctcaacctcccagcagtcaacagcatcacctatgtcctccgcttcctggagaaactctgccacaaccttcggagtgacaatctgtttggcaaccagcccttttacacagactcacttacccctcactgccacagagtacagtcacagccacgacaggtacctaccaggtgaatcctttgtccttggaaatagcctggcccggtccttggaaacacactcagacttaatggactctgccttgaagcctgccaaccttgtcagcacctcccaaaaccttcgaactccaggttatcggcccttgcttccctcgtgtggcctcccattgagcactgcctcagctgtgcgtaggctctgctccaggggagtgttaaaaggaacaaatgaaagaagggatatggaatcattctggaaacgaaatcattccccagggtcagatcggtatctggagagccgagatgctcctcgcctgagtggccgggatccttcttcatggacggtggaggatgtgatgcagtttgtccgggaagcagatcctcagctcggaccccatgctgacctcttccggaaacacgagatcgatggcaaggccctgctcctgctgcgcagtgacatgatgatgaagtacatgggcctgaagctggggcccgccctcaagctctcctttcacattgaccggctgaagcagggcaagttctgaacaggagccattcttctccccggaagccaccagccagctcccaggcacctctgtagggctctgggtgacctcaggactccaggaggctggagaaccaccactgctaccttcctgccatgatgtgtccttccatgaaggactgaggagggaagaatgtgggcccagggctggtgctgttcttcccccttagcctgctgtggctcccaggcccttctatttatttcaaggctagccaagcctctcacgggaagtttagactgagcaccttgcagagatggaggaagaggccaattctagggccttaaaaggccctggaacccaggccccttaccacctcctgggcttggtctagtgtccatggccccagccatgccttctcaacagatccccaaactctgaacttacggtgcagaccttttaaaaaagatcttttcttgttgctaatttattgcttctggcacttggacttaatgcttttcttgcaccagacatttttgggaaggagaccaccctctgtgatccagagagggcctctccagagaagtatggccctgtttcagaggacactgccctagggctctttctctgtgggatggacagagaggtatatgcacactgggcatggaaaggtgaggctccctcttcctacaccaggccctctgtagccccagtctctatctctgatggagttttcccaaccccctgcccgcatcacagctccctgccctggtcagaattgctgcaaaagatggggcctaatgcctttaggccacggggcccccatggtgggagggaggacctctaggctggaggggttttgccctctactagctactgtgcttcctcctaagcaagtcagcagcactgctgcccccactgccatctggactattttatgtcgtttgtttataaataaaaaacagtacaaa

SEQ ID NO: 1343 - DNA, 2317 bp, Cricetulus griseus
  modified_base (1004)..(1004): a, c, t, g, unknown or other
  modified_base (2311)..(2311): a, c, t, g, unknown or other
tggtggcggcggccaaagagcctacgccctgggctggggacaagggtggggcggctcccccagctgccaccgcctcggacccggcgggacccccaccactacctctgcccgggccgccacctctcgcgcccaccgccactgccgggaccctggcggccagcgagggcagatggaagagtatgaggaagagccctctcgggggtggcggcggctcgggagcctccagtcaggccgcctgcctcaaacagatccttctgctgcaattggacctcatcgaacagcagcagcagcagttgcaggccaaggaaaaagagatcgaggagctcaagtccgagagagacacgctccttgctcggattgaacgtatggaaaggcggatgcagctggtaaagagggataacgagaaagaaaggcacaagctgtttcagggctatgaaactgaagagagagaggaaacagagttgtctgagaaaattaaactggagcgccagccggagctttgtgagacatcccaggctctgccttccaagcctttctcatgtggacggagtggaaagggacacaaaaggaaaaccccatttggaaatacagaaagaaagactcctgttaaaaagctggctcctgaattttcaaaagtcaaaacaaaaactcctaagcactctcccattaaagaggaaccatgtggttccttatcagaaactgtttgtaaacgtgaattgaggagccaagaaaccccagaaaagccccggtcttcagtggataccccaccaagactctccactccccaaaagggacccagcgcccaccccaaggagaaaaccttctcaagtgagatggaagatttgccgtacctttccaccacagaaatgtatttgtgtcgttggcatcagcctcccccatcaccgttaccattacgggaatcctctccaaagaaggaggagactgtagcaagagaacctagatgacagtgtgttttctaaagaaggcatgcaaaaactaggagntagatgagaagagaaggaaaagatgggatattcagaggatcagggaacaaagaattttacagcgactacagctcagaatgtataaaaagaaaggaattcaggaatctgagcctgaggttacctcatttttccctgagccagatgatgttgaaagttttgatgactcacccccttcttgcctgttgtagcatttggacgaccattaccaaaattaactccacagaactttgagctaccctggttggatgagcgaagccgttgcaggttggagatccagaagaagcaaacacctcaccggacgtgtaggaagtagctgtgctggcaagaaccctgtcttcagatagttgtagcatgccgttccaagagaatggcagagacctgtatatgtgacctatgtcctcatgtatgttaccactcactggtaatgcctttccatacccccttcattttagttgtgttttcttcactctgagttcacaaaacaaacaaacgaaacctcttgcattgggctaattgtgaattctggagagttattggcacttcttttccctttttggggaaatgagctcttgagcttgtcctttagggtttagaaaaagagattggggatataagtttacaactagttacagtgctgaacagatgcattgtcatttggggatggcatgccagaatctttatagatgtccttgtgtcacatcacttctcaagtattccttagtggggtttcatcctattagccaaactttggtggtgaggtagaaaatttggtgagggtggggggtgggtatggaaagatatgcttcctttggctggcaaatgtctacatcttgaaacagttgtacctaatgaacctctattcgttagtaaaaatagatttatacatgtaccatcttggttcccactatcctgccccttcgtttttgtttacccaaaaaataaaaaagaaaaaaaaaaaaaaaaaagaaaaaagaaaaaaaaacagattgttgttgttgttgtctgttccctacatgggatacaacactgtgaaattcagtcttcaacagaaaggccctgcagttctcctaaaacatagttcttatttctttctttaacaaagtttaagctagtgttaataaattaaaagagaaattgcttgtctctccacctcagctttgttttatgcccgtttcatatcgttgtctgtgctgtaattcatacttttgataccatttctgatgtgtaaagtcggctgtcttgtaaatatcttataaagagttcaattgtaaataaactattgtaggaaaccgttaaaaaaaaaaaanaaaaaa

SEQ ID NO: 1344 - DNA, 2317 bp, Cricetulus griseus
gaaggaaccgggcggagcggccaacatggcggaacgcaggcgacacaagaagcggatccaggaagttggtgaaccatcaaaagaagagaaggctgtagccaagtatcttcgattcaactgtccaacaaagtccaccaatatgatgggccatcgggtcgattattttattgcttcaaaagcagtggattgcctcttggattcaaaatgggcaaaggccaagaaaaggagaggaagctttatttacaaccagggagtctgtggttgaatactgcaacaggcttttaaagaaacagttttttcatcgagccctaaaagtaatgaaaatgaagtatgataaagacataaaaaaagaaaagataaaggaaaatctgaaagtgggaaagaagatgataaaaagagcaagaaagaaactgtaaaagaagaaaaaacaaaaaaggaaaaagaaaaaaagaaagatggtgaaaaggaagagtccaaaaaggaggaaacaccaggaactccaaaaaagaaggaaactaagaaaaaattcaaacttgagccacatgatgatcaagtttttctggatggaaatgaggtttatgtgtggatctatgacccagttcacattaaaacatttgtcatgggattaattcttgttattgcagtaatagcagccaccctcttccctctctggccagcagaaatgagagtaggtgtatattacctcagtgtgggcgcaggctgttttgtagccagcattcttctccttgctattgctcgctgtattctgttcctcatcatctggctgataactggaggaaggcaccacttctggttcttgccaaacctgactgctgatgtgggcttcatcgactccttcaggcctctgtacacacatgaatacaaaggaccaaaagcagacttaaagaaagacgagagatcggaaaccaaaaagcagcacaagtctgacagtgaggaaaaatcagacagtgagaaaaaggaagatgaagaagagaaagcatcaggaaatcatggaacagacggctcaggtggagagcgacactcagacacagacagtgacaggagggaagatgaccgatcccaacacagtagtggaaatgggaatgattttgaaatgatcacaaaagaggaactggaacagcagacagatggagattgtgatgaggaagatgatgacaaagatggagaaatgcctaaatctgcacatgaaaaattataatctgactaatttggggactgaataagtgcagcaggttgggttttctatgttgggtgatcatcataatgtacacgtgacatttgtagcattctttaatccattttctgaaatgtatttgacattcaattacagtcagccttttgttttgtagaacattggtactattggcacagtctaaagccattaataactttatccatctgataattttacagtaagtaggcctcagttttgatagtcatcaaagaaacattgtccaccgtgacatttagattaagggcatttttaatagttgtatggctttttactgttagactaatggaaatcactaaagaaactgtagcatttcaaattatgcataagtatatagccattttgcagtttctttatgatgaaatacttaaactcattgttcttggtagatatgcttttgttttttttgttttttctcataaaattataccagaaaatttcttctttttaagatttttgagttagcagggatcaaaagcattttgtggaaacaaaccagctagtaacagtgcagcaacacttttaatttagctacaaattctccttttccaacttaggaaatccaaactgaattgtacattcaatacagagaaaggtggtcatctccaacagaaagtgaagagcactgattgtgaggactcttccttcatccccatctccttgtcataacataaaatgtattctgtacataatttacaaataaaacattttattttaattgttacttattatttagacatttctcaacacttaaatttgtaaaacaaaaaccatgtaagggtatgtttttagagagtttcagtaacccacagaacatttgatcttcctacagcagcttcagttttgtgccaacattccatatattttaatgagtaaaaattatacttattttaagtaagaacagacataaagtagctgtttgtacgccttaatgttcattttgacttattttaaatctttacatttagaaatggggactatgttatcagaccagaaggcactgctgtcaaagaaaatttgctgttctaaaataccaattaaaaataaaggatataaaagaaaaca

SEQ ID NO: 1345 - DNA, 2317 bp, Cricetulus griseus
  modified_base (1686)..(1686): a, c, t, g, unknown or other
gaacaagttgaaatcatcgcagaaggataaagttcgtcagtttatgatcttcacacagtctagtgagaaaactgcagtgagttgtctttctcaaaatgactggaagctagatgttgcaacagataatttttttcaaaatccagaactttatatacgggagagtgtaaaaggatcgttggacaggaagaagctagaacaactttacaatagatacaaagatcctcaagatgaaaataaaattggaatagatggtatacagcagttctgtgatgacctggccctcgatcctgccagcatcagtgtgctgatcattgcatggaagttcagggcagccacacagtgtgagttctccaaacaggagttcatggacggcatgacagagttaggatgtgacagcatagaaaactaaaggacccaaatacccaaagataggaacaaagaattagaaagaaccaggacgatttaaggatttttaccagtttacaacgatcaataccaaaagacacatggaatcttctgttagacttcagttcaatgattgcagatgacatgtccaattatgatgaagaaggagcatggcctgttcttattgatgactttgtggaatttgcacgccctcaaatttctgggacaaaaagtacaacaagtgtagcactaaaggaaccttctagaatgtacatagtctgtacaataaatacaacggaaaaatagcacagtcaatttctgctggctggaccgaactgaagatcaatcctcacagttcaaactgagggttgagacaaaactttaaaggatacatcttggaccatatcgtactccattcttctactggtggtttgggcttgtcttctagtctgggccactctaaacatttataattccaacattgtggatttcatcttatacctgtggacctattcttagtttgtcttcccataagtcatagaagcttgatggtgattattttgaggtttccattcttgcataaagcacaatgctgtcttcgtcagaaaacagtttggcataagaattaaacataataatgaacaccacaaacaatttataaaacttcttaagtatatgcttcgggctagttgcaaagactatgctggtagcatctcaaatgagagtgatttatctgagtggaccggatctggaatggtgtttggtttgagggaatctaactttcctgcaaacctcatgtactgttgacgtgagtggaatagctgatgaaagaaatgtcaaaataaccaacacatgaaaaaaattaggataacttggtgactacctgaaatatgttttgtgtttcagactctcacaaaggttctacaaaacagtctgtggttgtcttacccatgtttatacacagtggtcctgcagggactcttaatttaaaaaatactgtaatgggacataatgttagattccactctcgtctgcatcacacaccacataattggatttcattatgcttttgaaattgctctcctgctgaaaatacgtgtttctctgttaacatactgacatgtgtaagggtgtgtccataaatatttcgaggagaaagttaaaaatgatgaacttagatgttggatgactggccttctatagggacagagtttgcttcatgtgtccaggtcctctttggggcacaaaggaatgtgctttggggagaccagaacattttangctgatatggaaatgattaaactgctttttagtcacatgatttggaaattgcatagaagcttaccttatagatatatcactattccaatcataactttaatttaggaatacatttcaaataccaaaagaaagcttaaatttttatccacgttacaggaattggttattaaaagaaaaaagaaatcttgctgttttcagtatttcttgatttcatttttgtaaatatgaagaacttcaattatgaaagattaaagatatatatacatatatgtatatctttaaaagttttgctgacatatattgtttattccctacgtggaacattttgagttttgatattgttttaagattgattgattcaagtatgatttgttttcaaatgaaggcccattagcttctctccccacctcataaattttctttataaaatcttaatattcatttgtggcctaatgctttgagtttttacagattttatttttaaatgcaagacttttcaactttgtcatcagtttggtactaaacatttacaattactgtgtaattataagcaaaaatataataaagctttaatataattatgtagcaaaaaaagttaaggttagttacactgtggtggcatcttagaatt

SEQ ID NO: 1346 - DNA, 2317 bp, Cricetulus griseus
gggcgccgcatccatgttcgacaccacacctcactctggcaggagctcaccaagcagctccccatctcttcggaaacggctgcagctcttgcccccaagccggcctcctccctggctcctgagccagaaccgggcaccatggtggagaaggggtctgatagctcctcacgagaacgggtggtgtgcctgggacccccagcacccagagcctgggcagccggaacttcatccgcaacagtaagaagatgcagagctggtacagcatgctgagtcccacatacaaacaacgcaacgaggacttccggaaattgttcagcaagctccccgaggcagagcgcctcatcgtggattactcctgcgccctccagcgggagatcctcctccagggccgcctctacctctccgagaactggatatgtttctacagcaacatcttccgctgggagaccacaatttccatccagctgaaggaagtgacctgtctgaagaaggaaaagacggctaaaactcaatccccaacgccattcagatctggtgattgcactcggtgacatcacccctcggggcgactgaccgcagccaggagccaagccctgtgggtcaaggcgtggccgggtcaccccgaacctctcccgagccagcagtgatgcagaccacggggccgaggaggacaaggaggagccgacagccagccagctggatgcctcctccagccagacagtgagcccagtagcagaacctccaagtactgagccagccccaccagatgggcccacatcccctgggccccttggatctgctgtccagagaggaactattgacagacacgagtaactcatcttcatccactggggaggaaggtgacctggccgccctacttcccgacctctctggccgtctcctcatcaactctgtcttccacgtgggtgccgagcgtctacagcagatgctcttctcagactcgccattcctccagggtttcctgcagcagtgcaagttcacagatgtgaccttgagcccctggagcagcgacagcaagtgccaccaacgtagagtcctgacctacactatccccatcagcaacccactaggccccaagagcgcttctgtggtggagacccagacgctgttccggcgtggcccccaggcgggcgggtgtgtggtggactctgaggtgctcacccagggcatcccgtatcaggactatttctacactgcccaccgctactgcattctgggtctggcccggaacaaggcccggcttcgtgtgtcctcagagatccgttaccgaaagcagccgtggagcctcgtgaagtctctcattgagaagaactcgtggagtggcattgaagattatttccaccatctggagcgggaactcgccaaggcggagaagctgaccttggaggaaggagggaaggatggtcgcggattgctctcaggcctgcggagacggaaacggcccctgagctggagggggcacggagatgggcctcagcacccagacccggacccctgcacccgggccagcatacacacctcaggttccctcagctctcgcttctcagaaccgtccatagatcagggccccggggcgggcatccccagcgccctggttctcatcagcattgtcctcatcgtcctcatcgctctcaatgccctcctcttttaccgtctctgggctctcgagagaacggcccatacctttgagtcctggcacagcctggcactggccaagggcaagttcccccagacagctacggagtgggccgagatcttggctctgcagaagcatttccacagtgttgaagtacacaagtggaggcggatccttcgagcatccgtggagctcctggatgagatgaaattctccttggagaagttacatcaaggaattaccatcccggaccctcctctagacactcagccaaggcctgatgacagcttcccctgaggactcctgattgaaaagccaaatggacagaaggacacgcggaaccctggcagccactgctggcacggtgtgaacgccgccgggaggttcccgcctgcccctcccagtggccccgccaagagccgcacagacctggggaccacagatacaagaagcactttagatctgtgtgtgcgagtccagctgccactgcctgctcagccagggagctggcctggcctttggcaggctctttcgcccaactaacttattttgcccagctggggttgtgggggggcaccttttggggtgcacgagaccctcatctctgggtttaatgtattatatttggggataacaacctcaataaagggttggaaatgg

SEQ ID NO: 1347 - DNA, 2316 bp, Cricetulus griseus
gtttattgatcgtggaaaggactttaacttggagctggcaattaaaacacggatcatatctgatgggctaaaatactctttagccactgggaactggggagaccagaagaaagctcatcaagcccgagctggagtgtcccaggtattaaaccgcctgacatttgcatctactctttctcaccttcgtcgtttaaattctcccatcggtagagacggcaagctggcgaagccaagacagttgcataatacgctgtggggaatggtgtgtcctgctgagaccccagagggccatgctgtaggacttgtgaagaatttagccttgatggcttatatttcagtaggatcccaaccttctccaattttggaatttttagaagaatggagcatggaaaatttagaagaaatttctcctgcagcgattgctgatgcaaccaagatttttgttaatggctgctgggttggaatccacaaagatcccgaacaactcatgaatactctaaggaaattacgacgtcagatggacatcattgtatctgaagtttctatgatcagagatatcagagagcgggagattcggatctatacagatgcaggccgtatctgtagaccacttctgattgtagaaaaacaaaagctgcttttgaagaagagacacattgaccagttgaaagagagagaatataacaactacagttggcaggatctggtggccagtggggtagtagaatacattgacaccctggaagaagaaacagtgatgcttgcgatgactccagatgatttacaggagaaagaagtagcttattgttccacatacacccactgtgagattcacccatcaatgattcttggtgtctgtgcatctattattccttttcctgatcataaccagtctcctagaaacacataccagtctgctatgggcaagcaggctatgggagtttatatcaccaactttcatgttcggatggataccttggcccacgttctctactaccctcagaaaccacttgtgactacgcggtctatggagtatctgcgctttagagagctgccagcaggaatcaactcaattgtcgcgattgcttcatatacgggctataatcaagaagactctgttatcatgaatcgttcagctgtggatcgaggctttttcaggtctgttttctaccggtcatacaaagaacaggagtctaagaaagggtttgatcaagaagaagtgtttgagaagcctacacgtgaaacatgccagggtatgaggcatgccatttatgacaagttggatgatgatggcttgatagctccaggggttcgtgtgtcaggggatgatgtcatcataggcaagacagtcaccttacctgaaaatgaggatgagttggagagcactaatcgacggtacaccaagagagactgtagcactttcctcagaacaagtgagacaggcattgtggaccaggttatggtaaccctcaaccaggaaggatataagttttgtaaaataagggtacgctctgttagaattccacagattggagacaaatttgctagccgacatgggcagaagggcacttgtggtattcagtatagacaagaggatatgccttttacttgtgaaggcataactcctgatatcatcataaatccccatgccatcccttctcgaatgacaattggtcacttgattgaatgtcttcaagggaaggtctctgctaacaagggtgaaattggtgatgccactccatttaatgacgctgtcaatgtgcagaagatttctaatctcttatctgattacggctaccatctcagaggaaacgaggtactctacaatggattcactggtcgaaaaattacatcgcagatttttattggccccacttactaccagcgtttgaagcatatggtggatgacaaaattcattctcgagctaggggacctattcagatccttaatagacagcccatggagggtagatctcgtgatggtggcctacgttttggagaaatggaacgagattgtcagattgcccacggtgcagcacagtttttaagagaaaggttgtttgaggcatcagatccctatcaggtccatgtttgtaatctttgtggaataatggcaattgctaacaccagaactcatacatatgaatgcaggggctgccgaaacaaaacccagatctctttggtgcgaatgccttatgcgtgcaaactgttattccaggagcttatgtccatgagtattgcacctcgaatgatgagtgtttagttctattggaagttcacggcaagacactgtaaatatcagttcttgtttctgtg

SEQ ID NO: 1348 - DNA, 2315 bp, Cricetulus griseus
tgtgaccaggtgcatgtggaagatgtggcttctgatgacaatggccaggatttgagcaactatagtttctcaactgatggcttcagtggctcaggaggcagtggtggccacggttcatctgtgggagttcagggaggtgtggactggatgaggaagctggccttccgctatcgaaaagtgagagaaatctatgacaagcataaaagcaacgtaggaggcctcctcagccccccagaggaaggaagcactgcagagactaagagcagagatcgaagttctaacagattcctggctaggaactgcactaaagtccttagcttctcatccagtctagaaagaattgtgtgaatgttctgatcactaccacacagctggttccagccctggaatgctggcgagaacacaatcagaaccaactgcagttttgctaagagtaagccgcagcccattgccgctcccatgctttacttctgtgtcacttcaaaaaggaagaacaagaaaaggaatgttgggaacacagttgcactcttggtgcacagacagactgggagctgctcctgatcatgctgacggaaactgccctgtcccatgagaacatctcctgtatcttacctgtagaactgctctccagtgaatggggatgttatttttgtaggtgaggacctggtctctgaagcacccctccccttttctatgaagaaagcggtgtgtaaagtctccatgacagcagtaatggaaatgtctgaaatacctctctgtgacagcaacgctctttagtggccccagcactctgctctccaggaggtccttgctgtatcagggcctgggtcacttactaactttagacttcggcatctccatcttgtaagcctcagtctcctgccagtccttcttcccctgtaaccaaagtcacaaggcattatccctttaggaccaatgtgggtacctgcttaattggggtaaacttgtctagagttggggatatgtccagccttggtcctcaggaggtccttgaccaacccatagctatagtcactgtccccagagatactgcagcacaaagacaaggttcctcctaatgccaggctactgggcagcaacagaaagtgcagcacaccatcttcagaactattggacaatacttctgagagcagcagttaaggaggggactcagacaggatatgaggttcccacaaaggcttgggaaggaaaaggagctggcagcattatagctgttggtactagaaagatggctcattggttaatagcaccggctgctggtacagaggtccaaggtttgagcacccacagggctgctcccaaccatctttagctggtaatccttctcctgttggattcagtgctctcaagggttagtctggatgttttgtggtgtgggctaattctaggagtgtctgtggagttgcaggaatgttctgggatacaaggtgactttcgaatgtaaaactgactgtgccttagcatcaccctgtccagtgcccctggaacagctgatgatgtccgggagagtggatacctgctccagaattcaggttcctattgggacttttgatttgggagtgttctgtcttctctgcaagttgggtatcagagctagtatcccaagagacttggcacatcttgtttgcggttcacacaaactcagccttcacagctccaagtagaatctgataggcatactgcagctgcaagcatgtgacacttgtagacacaactttgaatgggagtcacacaattgacaagagcaccagttgcctggtgctatcctcttggagagtacaggctagcccccaagtggcaagcttgggccctccttccacacttctccccaggttgcagcttaggccttcttgagtaagcttctgttccttggtggtctccatcttcaagaagctagaaccatccagacagattcattgtagatgccaagttggaattctgagctcagatatcttaaccacagaggcaaaaatctgcttgtgtcccagcccagtctgcaagccacctttcttccctctgtcccaagtcagctctagcaagcaaggctccctggctgcctcctagcacactgagcagagccatcccattaaggaccatttcttcttggattgccactctccctctggacttcagatgctctatagcaggaaaaggcatcggttgggttggatatatttatgtgacttcgggcatttgtggctatgagtccttgatcataatgttatatgtaatgggaactatcttataaacttgaaaaaaataaaattttattttctaaaaaaaaaaaaaaaaaa

SEQ ID NO: 1349 - DNA, 2315 bp, Cricetulus griseus
ttctcccgccctgcctcagtcagtgagaatcatgatgcagggcctgacggtgacaagcgggaagatgatgctgagtcagggggacggctatcagaggctgaagaaggagaggtcaggacccccacaaagatcaaggagctgaagttcttggacaagccagaggatgtcctgttgaagcaccaggccagcatcaatgagctcaagaggaccctgaaggagcccaacagcaaactgatccaccgggatcgagattgggagcgtgagcgcaggctgccctcgtcacccgcctccccctcccccaagggcacccctgagaaagccagtgagagagcagggctgagggagggctcggaggagaaagtcaaaccaccacgtcctcgtgccccagagagtgacacaggagatgaggaccaggaccaggagagggacgcggtattcttgaaggacaaccacctggccatcgagcgcaagtgctcgtcagctccacatccagcctggaggccgaggtggacttcacggttatcggcgactaccacggcagcgccttcgaagacttctcccgaagcctccctgagctcgaccgtgataagagcgactctgagacagaaggcctggtgttctctcgggatctcaaggggccctccagccaagaggatgagtctgggggcatcgaggacagcccggatcgaggggcctgctccaccccagaaatgccccagtttgagtccgtgaaagcagagactatgaccgtcagcagtctggcaatcagaaagaagattgagccagaggccatgctgcagagcagagtctccactgcagacagcacccaggttgacgggggtgcccctgtgggaaaagacttcatgacgactcccccctgcatcaccacagagaccatctccaccaccatggagaacagtctcaagtccgggaagggggcagctgccatgatcccaggcccacagacggtggccacggaaatccgttctctttcaccgatcatcgggaaagatgtcctcaccagcacctacggcgccactgcggaaaccctctcaacatccaccaccacccatgtcaccaaaactgtgaagggagggttctctgagacaaggattgagaagcgaatcatcattactggggatgaagatgtcgatcaagaccaggccctggctttggccatcaaggaagccaaactacagcatccagacatgctggtaaccaaagccgttgtctacagagaaacagacccatccccggaggagagggacaagaagccacaagaatcctgacctccgtgaagagatgctggcgtgtctggtccaacccaagccagagaaccattaagaaggggccttcattctggattctccgacaacaccaacatcccagctgtgacatactgtcactgatgagagactgggaagggaaagcatatatatatatatatatatagatatagatatatatcaggaaacaccgcgtccttgcactgctgctggggctggcggagcagtcagctgatggcaacaaccaacatctgcaacaaccttcatttcctttgcagaccaattgaattggtgggaattttttttttcaggaagatatgtaacaatcgtaatctctcgctctcccacccctttctcctgccaaactacaaaagcagaccacaatgattgtagatgtccccttgagccctggctgcacacactccaggatggatgagtacccccgttcgttctccagcctctctgtcgcttcctctaatgcaaaggaagaaacaaaataagatcacgtagccaagcaagagaagtcacagcagcaagacacacacacagtcaactattttccaggaaggaaagaatggaagtctccaacttggaggaggagtgagaggaggaggaggaggaggaggaggaggaggaggaggagtgagaggaacacttgattgttatttctgggtcttgacactgggctgccaaaccccctctctgttcttctgcctccctgcttcccccttgacttctactcatcttgtctccattttctgtctcagctccctcctgcctctctccccgaccctcctcttctgtgtcctggtcctgctgagggccactgcagatgactctcattggaagaaaaagagactacaagagcaaaaggaagccatgggaagggaagtagacattgtatgtttccggtttctcttgacggaggtgcagctcataggagattgtatgactgtgattttaagttatgtatattacatgtaacaggaaacagatattaaaataaactgtgctggtaagtatgcagct

SEQ ID NO: 1350 - DNA, 2313 bp, Cricetulus griseus
tttgtgtagaatacctgtggagaagaacaatgattccttggatcacatgctgacagatcccctagaactgggtccctgtggagatggtcatggtactcggatcatggaagactgccttctgggtggtaccagggttagtctgcctgaagaccttctggaggatcccgagatattctttgatgtccgtcagcctctccacatggcaggaagtactaagtgactctcagcgtgaacatctccagcagtttctgcctcagtttcctacagacaatgtggagcagcagaatgagctcatccttgccctattcagtggggagaacttccgcttttggaaacccctctgcacattgcccagaagctcttccgagatggacactttaaccctgaggtggtcaagtatcgtcagctctgcttcaagtcacagtacaagcggtatctcaactcccaacacaaaggcatctccgctaccttacatgtcacttccaacccagtccatgcaactgacagccctgccaaggccccttcagccagtgttccttcatcagctccagcaggtactaccgtggtcaaagtaactcctgatctgaagccaacagaagcctccaattcagcttttcgcttgatgccagctctgggtgtgagtgtggcagatcagaagggaaagaacacagtggcctcttcagaagcaaaacctgctgccacaatccgcattgtgcagggtctgggagtgatgcctcctaaagcaggccagaccattactgttgcagcacatgcaaagcaaggagcctctgttgctggtgggtccggaactgtccattctcaacggtttccttgcccagtataagtgccactgtgtctaagactgtggctgtcagcatcgggactggagcccccactgtgcgacaggtccctgttaacactacagttgtgtccacatcccaatctgggaagctgcctacaaggatcacaggttcctcgtctctgtgattagccaaccaatgaagggcaagagtgttgtcacagcccccattatcaaaggcaaccttggagccaatctcagtgggctgggtcgcaacatcatcctcacaaccatgccagcaggtactaagctcattgctggcaataagccagtgagtttccttactgcccagcagctgcagcagcttcagcaacaaggtcaggctacacaggtgcgaatccagactgttcctgcatcccatctccaacagggcacagcttctggctcctccaaagcagtctccactgttgttgtgaccactgctccatctcctaaacaagcacctgaacaacagtgaccgagaaagagaggcagctttaagaggcctcgtgcatctcggttgatagaagggatcagggaggctgcttcgtttctctgagctctcctgcatgaggcagggtggtggagggtgttggcaactgtggcctagattctgcagccacactccagaatgaagccccgataaggttccattttagggttccagtgctgctttgtctagttccagaggagagaacatcagaatcatggaaggtcacagtcacacaagccacagttacctcctgagtgttggatgcccagggagcaggcctgtcagttggtgagcgggccagcagtgaataagcctcattctgtgtgaggattttactttttagtttttgatcctcttggtgatttgtccagatgagtttttgtgtccagaaaattttgtgtaacttatttttttaaagaacttactgtgcatcttttatcaaatagaaatccgggctttagtgcccctaaaccgatcccttactccttgggtcaggatgagagcctaacaagactcttaacaggttggtggcttacttgataatgagaggttatgtagtagggatgtgtaggccatgaggcagcatggatcccctcaagtgaaactagtttggtaccacttactaaaggtgggtgttgggaccttggttgtccctgtatcttcacttgtgggcattgtccttggcgagcctgttcacatggaagttcagagctgttggacaagagagtaggggatgctggccgagatgctgctctcacacttgcttacagcccagagattgcacattctatttgctgtataacagcaactgcaaaccagacccttggagctggccacctgattgtaacatggaagaaatggtggaggtggggatagcattaggcactacttggcaatgctagcttcaggagaagtaagcctgggtttgcagtttttattcctggccatttcacacttgtcagccaccaccagccacagacag

SEQ ID NO: 1351 - DNA, 2313 bp, Cricetulus griseus
ggcgtgcgacccggcgtggagatgccccgaagtggggtacgagcagactatcgcgccgcgccggtgcccccctacaagtcggatgcacgcacggaggcccttaacagcaagattaaagaacaaaaaattcttgtggatgaactttctaacctgaagaagaatcggaaagtatataagcagcaacagaacagcagcgtatttttccttgcagatggaacagaaatgttttccaaaagcaaaaagacattagatgaactaagaaaacaataccaagcattagaagaagaaacacagagacaaccgaagtcaagacgcagtcaccctgatttcacagaaccatgtgtggcatttgctgctctgtaggcttctctgatgaacacttcagtaaagaattgaaagaggatttgctgtgcaatcttagacgacggggccccaataacagcaagcagttgttaaaatctggtgttaactatcagtgtttgttttccggtcatgttcttcatttgagaggtgttttgactgcccagcctgtggaagatgaaagtggcaatgtgttcttatggaatggagaagtttttgatggagtgcaggttgaagcagaagacagtgacactcaagttatgttcagtagcctttctgcctgtaagaatgaatctgatattttgtcgctcttctctagagtccaaggtccatggtcttttatatattatcaagcctctagccattacttatggtttggtagggacttttttggccggcgtagcttgctttggcgttttaataatctgggcaatagtttcttcctctcttcagttggtgaccagatatctgggcttgcagacaagtggcaagaagttccagcatctggaattttccaaattgatctcaattcctctgctgtttccagacatgtgtctataaaattatatccttggaaatacgtttctaaggagaattttattgaaaaatgttctaatgacctgcctcacactgcagcagaattgccagcgtttgtatcagtggtagcaaatgaagacaagctgtacctttcaaaacctgtcgttcccttaaataagatgctgcctcaagctccattggaaactcactgtagaaacagttccggcgttccccattcaagagagacccttgcgatgtttcttacagatgaacacacaaaaaaagtagttcatcagtttattgacgtcctgagtgttgcagtcaagagacgtgtcttatgtttagttagaaaggaaaacccagtatcaaaggaagttttgaaaacttggaataaaacagcaaacattgcaatcctcttttctggaggtgttgattccatggtgatcgcagctcttgctgatcgtcatattcctttagatgagcccattgatcttctgaatgtggcttttgtgactaaacggaagactgggccgagtgttactaaggtagaaagaaaacggcaaacccatcatgagatcccttccgaagagtcctcttggggtgctactgtggcccagggtcttgatgatgtggaggtgccagaccgagtcacaggaaaagcaggactaaaggaactacagtcaatcaacccttctcgaacttggaattttgttgaaattaatgtttctcttgaagagctacaaaaactaagaagagctcgaatatgccacttagttcagcccttggacacagttctggatgatagcattggctgtgctgtctggtttgcgtctagaggagtcggttggttagtgacccaggatgctgtgagatcttacaagagcagtgcaaaggtgattctcactgggatcggtgccgatgagcagctggctggttactcccgtcatcgtgttcgcttccagtctcttggtctggaaggtctgaatgaggaaattgcaatggaactgggtcgcatctcttccaggaacctcagtcgtgatgacagagttattggtgatcatggaaaggaagccaggtttcctttcctggatgagaatgttgtgtctttcctaaactccctgccagtctgggagaaggtggacctgtctttgccacgaggggttggtgagaagctcattttacgccttgcagctgttgaacttggcctcacagcctcagccctcctgccgaagcgggccatgcagtttggatctagaattgcaaaactggagaaaactgatgagaaagcatctgataagtgtggaaggctccaaatcctaccttagaaaacctctcccaagaagattacatcacaatgtgattccaccctgtaacaacactgtgtgacagtcactgaaaataaacagctgctgcctt

SEQ ID NO: 1352 - DNA, 2312 bp, Cricetulus griseus
  modified_base (731)..(731): a, c, t, g, unknown or other
  modified_base (1241)..(1241): a, c, t, g, unknown or other
tctgcaatagatgacttaaaagtagataaaatcatcacacctttaaataaagatcatgtccctataactgactcgccggttgttgtacagcagcacatgttgcctcccaagaagtttgttctccttgcctgtgatagagaagtgtctgcttgggctacacgagcattctttaggtatggcggggaagcacagatgagatttccagctactcttcccactccgagtaatgttggtcccatcctggggtctccaatgtattctagttctcctgtccctagtggtggtgcctatccgagtccatccccattggggacaccatgccacggtgctcagcctcctatcctgtcaaccccaatgtatgccttgggaaatccagcaatgcaggctgcaagcatgagtggtttaactggaccagagattgtgtactcaaggaaaacacaatggtatttgcatttacttttctcgaatcatgggaaatatttgggatgctagcttagttgttgaaagagtattcaagagttccaacagggagatcactgcaattgaaagcagtgtgcccagccagctgctggagtctgtgctgcaggaactcaagggtttgcaggagtttctagatagaaattccagtttccggaggaccactaggaaatccaaatactactgagaatggaaacacccagcaaatgcaacaagagctgcagaggaagtttcatgaggctcaactgagtganaagggggggggatttcacttcaagcaatccagcagttggttagaaagtcctaccaggctctggctttgtggaaactcctctgtgaacatcagtttactgtcattgtaggagaacttcaaaaggagtttcaagagcagctaaagatcactacctttaaggatctagtgatcagagacaaaagagctcaccggtgcgttgattgcttctcttatcagctgctacatcagagacaatgctgctgtggatggcattagtttgcatctgcaggacatctgtccccttctgtatagcacagatgatgcagtttgttctaaggcaaatgagcttcttcagcggtcccgacaagttcaaaataagagtgaaaaagaaagaatgttaagggaatcactgaaggaatatcagaaaatcagcaaccaagtaagaccttcccagtgtctgtgctcagtataggcaagtgcgcttctatgagggtgtggtggaactttctcttactgctgcggagaaaaaggntcctcagggtcttggactccatttcataagcatggagaaccagaagatgatgttgttggtcttcagactttccaagagagattgaacagttacaagtgcattacagacactctgccacatctagtccgaatggccaaagtggatcaaaatagagttcgatatatggatttactctggagatattatgagaagaacagaagtttcagtagtgccgctcgtgtcctatccaaactggctgacatgcacagcacagaaatttcgcttcaacagcgactagaatacattgctcgagccattcttagtgctaaaagttccactgccatttcatcaatagcagcagatggtgaattccttcatggaattagaaagaaaaaaatggaagtcgctaggatccaacttcagatacaagagacactacaaaggcaatactccatcattcctcagtgcaggatgactaatttctttaaacttgcagagtgtaaacttgcaatcattcattgtgctggttattcagatcccatattggtgcatacactctggcaggatatcatagagaaagaattgaatgacagtgtaacattgagctcatcagatcgaatgcatgccctcagcctcaagcttgtcctccttggcaaaatttatgctggcacacctcgtttctttcctctagattttattgtgctgttcttagagcagcaagtttgtacattaaactgggatgtgggttttgtgatacagaccatgaatgaaattggagtgcctttacctagactactagaagtttacgatcagctcttcaagtcacgggatccattctggaacagagtgaaaaggccactgcaccttttggattgtatccatgtattactgacaagatatgttgagaatcctagccaagttttaaattgtgaaaggagaagatttacaaatctctgtctggatgctgtttgtggttatctggttgaactccagtcaatgagttcttcagtagcagtacaagccatcactgggaattttaaatctctccaagcaaagttggaacggcttcattaattattgtaatatattttc

SEQ ID NO: 1353 - DNA, 2311 bp, Cricetulus griseus
tgccaaaaacaaaggggatttggctatggaggcttttgttggaaggaataacaaaatcgggggcatagtgggggatttctgacatcctgtgaagcagaactgcaagagctcatgaaacagatcgatataatggtggctcataagaaatccgagtgggaggggcagacgcatgccctggagacttgtttggacatccgtgaccgggagctgaagaccctgaggaatcagctggacatgaagcacgaagaggttgaaatgttgcatcagcagatagaagaacatgaaaaagccaagcaagaaatggccatggagtataagcaggagttactgaaactgcaggaggagttagggagactgaagagaagctatgaaaagctgcagaaaaggcaactaagagactatagaggaaataccaaaagtctgcgggacgatcggtctgagattgagaggctaactgggaaaatagaggaattccgacagaagtctctggactgggagaagcagcgtttgatttatcagcaacaggtatcttctttggaagcacagaggaaggctctagcggaacagtcagagataatccaggctcagcttgtcaaccggaaacagaagttagagtctgtggaactgaccagccagtcagaaatccagcacctgagcagcaagctcgagcgggctaaggacaccatctgtgccaacgagctggagatagagcgccttaacatcagggtcaacgacctgatggggaccaatatgactatcctgcaggagcatcggcaaaaggaggagaaactgagggagtctgaaaagttattagaggctctgcaggaagaacagaaagagttgaaggcaagtcttcaatctcaagaaaacttcatccttgaggaaaaaatacagaaggagaaactgcaaacaaaattaaagacagttgacactcagcactcagtagacagcaagaggttactggaggactgtcaggtggagaggaagtacccctctccagggcacggagtcttcgacaatgtgctgtctcagttggacctcagccacaccagtgaggaacttctgcaggcagaggtgactcgtcttgaaggcagtttggaatctgtgagtgcaacatgtaaacagctgagccaagaactaatggaaaaatatgaagaactgaagaggatggaagggcataacaacgagtacaggaccgagattaaaaagttgaaagaacagattctgcaggctgatcagacctatagctctgcactggaaggaatgaagatggaaatctcccagctaacccgggagttacaccagcgagatatcactattgcttctgccaagtgttcttcctcagatatggaaaagcagctgaaggcagagatgcaaaaagcagaagaaaaggcagtacagcacaaggagattctgagtcagctagaatcactcaagttagaaaatcgccgtctttctgaaacagtgatgaagctggagctgggcttgcatgagtgcaaaagagatttcactaacagaccttcaggagaattatattgaggcattaaataaattagtgtctgaaaaatcaacaactacagaaagatctgatgaacaccaaatctcagctggagcatgctactgccaacccatggccagcacagacatgatggaataaagactgagcagtacaaaacaggtcaccactcgcctcgagaacaaacgttggatagcatagaacccatggccaggggccccagccccactgagtcctcacaccagccctcgacagctccaccgtgtctctgccttccaacttttcttatgctatgctcactctttgccttcaatgctagatataaatgatggcaacttttctgacatcctgtctgactgtatgaatgaccaagaagagtttgtatcttcgtgcacgctgcccgtctctcctctgggatcgatagctaccaggtttctggaggaggaggagcttcggtctcaccatattctcgagcgcctggatgcacacattgaagaattgaggagagaaagcgagaggacggtgaggcagttcacagccctcgtgtaaccctgagcggccacaagcagaagcctaagttataaagttataatgaagatgatgcttgcgagagcagcagccaagaatctgcacataggtattttcactggcttgtttgaaggacttcttccaatagtaattggtgagaataaaccactttgcagactttttctcacatggatatttattaccacaagcaatactttttctttttgacttaactgtgaatagcttgtactaattaaaataaagatt

SEQ ID NO: 1354 - DNA, 2311 bp, Cricetulus griseus
ggagagagtgaggaggctttgtcgtctggctcccgctctcacagccattgcagtacattgagctccatagagacagcgccggggcaagcgcgagccggacgggcactgggcgactctgtgcctcgcggacgaaaatcaactaaacatgggcaaaggagatcctaagaagccgagaggcaaaatgtcctcatatgcattctttgtgcaaacttgccgagaggaacacaagaagaagcacccggatgcttctgtcaacttctcagagttctcgaagaagtgctcagaaaggtggaagaccatgtctgctaaagaaaaggggaaatttgaggacatggcaaaggctgacaaagctcgttatgaaagagaaatgaaaacctacatcccccccaaaggggagaccaaaaagaagttcaaggaccccaatgcacccaagaggcctccttcggccttcttcttgttctgttctgagtatcgcccaaaaatcaaaggagaacatccaggcttgtccattggtgatgttgcaaagaaactgggagagatgtggaacaacactgctgcagatgacaagcagccctatgaaaagaaggctgccaaactgaaggagaagtatgaaaaggatattgctgcttacagagctaaaaggaaaacccgatgcagcgaaaaagggggtggttaaggcagaaaagagcaaagaaaaagaaggaagaggaagatgatgaggaggatgaagaggatgaggaagaggaggaagaagaggaagacgaagatgaagaagaagatgatgatgatgaataagttggttctagcgcagttttttttttttgttctataaagcatttaacccccctgtacacaactcactccttttaaagaaaaaaaattgaaatgtaaggctgtgtaagatttgtttttaaactgtacagtgtctttttttgtatagttaacacactaccgaatgtgtctttagatagccctgtcctggtggtattttcaatagccactaaccttgcctggtacagtctgggggttgtaaattggcatggaaatttaaagcaggttcttgttggtgcacagcacaaaattagttatatatggggacgtacgttaaggtttttttttttttttcttttttcttttggttttgctttttttttttccatcttcagttgtctttgatgcagcttatacgaaaataattgttctgttaactgaataccactctgtaattgcaaaaaaaaattgcagctgttttgttgacattctgaatgcttctaagtaaatacaatttttttattagtattgttgtccttttcataggtctgaaatttttcttctcaaggggaagctagtcctttgcttttgcccattttgggtcacatgaattattgcagtgtttcttttcgtatagttagctggagaaaagcttttatctacacaccctgcatattgtgatgggtaacattttcatccatagttgaaattccaaaatcgtgatcagttggataagagatagtacataaaccatgtgacaaaactgagagtgatcaattctatcacaccatggaataagaatcgaacaatctgaaagtctgtccttgaaggactagtagaaaattgtgttctaatccttacgtgaggactcttcttaacgtccattactgtgtaatggcagttacattctgcagttccctattaaagaaaagcgtgagcttaaaatacaagactgccatattaaactttgtgacattggtcctagcgaaggctatgataagaacgctggctgtaatgcctttgcccatctatctaaatacaggattgctcaggaaacttgactgtttaaaaaaaaagtatttttaattagttgagccagcttttcttaaaattatgccacatataaaattaagggtatattttcctacattgtgatttgtccctttataaatcagatacaaggaaagatgataaactttgcatattagtaccagttgtccaatccatttgggttttctttataaaacccaaactcattagtcatgtttaatctgcttagcagtttagggaacaatttggcaattttgtgtttttttttttgtagattatcattctcttaaagtgccagtgttttaaaatagtcgttcttgtaattttacacgcttttgtgatggagtgctgtttgttatataattttgacatgggttctttacatttgcgtttgttttatgtaatttgaggaggaatactgaacatgagtcctggatgatactaataaactaataattgcagaggttttaaaaaaataaaaaaaaaaaaa

SEQ ID NO: 1355 - DNA, 2311 bp, Cricetulus griseus
aatcgatatgggctacaatgggaataaaactccaagaagccaggtgttcaagccgttggaattgctttggcactcattagatgaatggttagttttaatagccacagagttaatgaaaaacaaaaaggactcaacggatatcacttctattttactgaaacaaaaaggccaggatcagggtgccacttctatttcaccatttgacccttcgggacctgggagctgtgaacacctgtccacaggcacaggggagtctacgccagatgtgcttgcagggagtccggaagctggtgcagactgtcaggatgttgttgctatgacagccaaccgactaagtgctgtcatccaagctttttacatgtgctgttcttgtcagatgcctccaggaatgacttctcctcgattcattgaatttgtctgcaaacacgatgaagtgttaaaatgctttgtgaatagaaatcccaaaattatatttgatcattttcactttcttcttgagtgtcctgagttgatgtcaagattcatgcatatcataaaagcacagccatttaaagatcgctgtgaatggttctatgaacatttacactcaggacagccagattcagacatggtacacaggccagtgaatgaaaacgatattctcctggttcacagagattctatttttaggagtagctgtgaaattgtgtcaaaagcaaattgtgcaaaactaaagcaggggattgctgtccgatttcatggagaggaaggcatgggtcaaggtgttgttcgtgagtggtttgatattctgtccaatgagatagtcaatcctgattatgcactatttacccagtcagcagatggaacaacttttcagcccaatagcaactcctatgtcaaccctgatcacttgaactatttccggtttgctggacagatcttgggattagctttgaatcacaggcaattggtcaatatttacttcacacgatcattctacaagcacattcttggtattcctgtaaattaccaagatgtagcatctattgatccagaatatgccaaaaatttgcaatggattttagataatgacattagtgacctgggtctagagctgactttctctgttgagactgatgtgttcggtgcaatggaagaagtgcctttgaagcctgggggtggaagtactcttgtgacacaaaataacaaagcggagtatgtccagcttgttactgaacttcgaatgacaagagctattcagcctcagatcaatgcttttttacaaggttttcatatgttcatcccaccttccctcatacaactgtttgacgagtatgagttggagctgctgctctctggcatgccagagattgatgtgaatgattggatgaaaaatacagaatacacaagtggctatgaaagagaagacccagtcattcagtggttctgggaagttgtggaagacatcactcaagaagagcgagttcttctcttgcagtttgttactggcagttccagggtcccgcatggtggttttgccaatattatgggtggaagtggtttgcaaaacttcacaattgctgctgtgccatatactccaaatcttttaccaacttccagcacatgcatcaatatgctcaagttacctgaataccccagtaaagaaatactgaaggacagactcctggtggcactgcattgtggcagctatggttacacaatggcgtgatgaagacaggagggctcacctaactactgtgcagaagcagagtggcagaagtcatttagtcttttccctgctttgttttctgtttgtgttataattagaaaatacaaaatcatagcagacttcattttaaaaaatgctaattggaagtagagactttaagtttctttaatcttacctgaaactgtgttaaggtagaatctttttttacattccccctttgatgtgaaccagtctcatttaaagggtattttctgtatattatatgagggcatccagctggtatgttctattgcatgtaaagtaccatttatattttggaaaactattgtatagaatggattaatttagattgtgtaaagccacaaaaatgtattttcccacactatacctatattcaatgggttttattttttgttgttgattagctttttagtattttgatatatgatgttaaatttagactggggtaactaacaatggctaaagtgacatctaatttatatattaaagcttatactatatgaattatttgcatctctctgtgctcagtttcatgtgtatatagtgtgtggtctctagttttttcttatgccttaatttata

SEQ ID NO: 1356 - DNA, 2310 bp, Cricetulus griseus
  modified_base (2292)..(2292): a, c, t, g, unknown or other
tgaacaactgaaacatttgagatgttagtgagtgaagctcgccagcctctgttgcggcacgggccagttcgtgaggctctgcttgccctgttggatgcctgtggccgccccgttcctagtagcccagcactggatgaaggcctggtgctacttctcagccaactgtgtgtgtgtgttgctcgggagccttcattgcttgagttcttcttgcagccacctcctgaacctggagctgctccacgtcttctcctcttttctcgccttgtcccttttgtccatcgagaaggcacccctgggccagcaggcccgtgatgctctacttctgctcatggctctctcagatgggagccccactgtgggccgctacatcgcagatcactcttacttctgcccggtgctggccacagggctcgggaagactggataggagtgccagcccttgcactcttcatgagttccttagagttctgcaatgcagtcatacaggtagctcaccccctggtgcagaagcagctggttgattatatccataatggtttcctggtgcctgtcatgggccctgccctgcacaagacctctgtggaggagatgattgccagtaccgcctatctggaacttttcctgcggagcatcctcacgagcctgccttgctccgtaccttcctgcgattcctgttgttacaccggcatgacacccacaccatccttgacacccttgttgcccgtattggcagcaactcccggctctgtcctcgatcaccagggcttactgcatccccaacttccagccctggccgacggcctagccctgcagaggagtctggtgagctagaagacaattatctggagtatcttcgtgaggcacgccgtggtgtagactgctgtgtccgagcctgccgaacctggtctgctccttatgatggcgagcggcctcctcctgagcctaacctttttggctcccggactaagaaacgtagcctactgcctgaggaggacagggacaatgtgggagaaggggaggaggaaaacccagggaatcgggggctagctgtgggtgtaggggatactcctggtcacctacccctaccccagctcaatggagtaccagggccatggccagagggagccaagaaggttcgtctggtgccacgattggtgccacaggaaggagttagagaattattagagtgtacctctgagggcatggcaggactagagagctttgggcaagagctccgggagctggaggtggcattgagcaatggtggagctggctcagagcctcccttagagcctccactacctcctgaggaggaggaggcctacgagagcttcaccagccctcctgagccccctggccccttcctcagcagccctctgcggactctccaccagctgccaagccagcccttcactggccccttcatggctgtgctctttgccaaactcgagaacatgctgcagaactccgtctatgtcaacttcctgctgacggggctggtggcccagctggcctgtcacccccagcccctgctccgctctttcctgctcaacaccaacatggtcttccagcccagtgtcaagtccctgctgcaggttctgggctctgtgaagaataagattgagagctttgcagcctcccaggaggacttccctgctctgttatccaaagccaagaagtacctcattgcccgtggcaagctggactgggctgagggtcctacagcaggatctgctccccgccgctctgattctctagtgagaagccggagaccatccttgggagagttactcctgcggcatgcacacagtccaaccagggcccggcaggcggcacaggtccttcaacctgggcgagaaggaacaggacttggactaggtgggggctctccaggggcttcaactccagttctgctcccccggggtggggtttctgaacgccaaggtgaggctctgcgagtcaagaacgctgtctactgtgcagttattttccctgagtttctcaaggagttggctgccatctcccaggcccatgccgtcacctcgcctttcttgttggatacttcagaggaggtatctatccctcccatctcaggctttgggcccctcaatccttaattttcttccatggacaatcagggccttcttgtggcctgggccgaattccaggacatgggctcctttttatgtttggaggcagtgacaaatggactttttaatttatttcagatgaatgttttatgagaacttgttgcaatatgtataaaagggaaatctctaaaaaaaaaaaaanaaaaaaaaaaaaaaaaaa

SEQ ID NO: 1357 - DNA, 2309 bp, Cricetulus griseus
attcgggagagaattgaaccctcaccatataagttcacattaataagatggaaacctgtaagcttgtttgcacgaaaacataccatacagagaaggctgaagacaaacaaaagttagacttcttgaaaaaaagtatgctactgaactatcagcatcactggattgtggataatatgcctgtaacgtggtgttatgatgtcgaagatggtcagaggttctgtaaccctggatttcccattggctgttacattacagacaaaggtcatgcaaaagatgcctgtgttatcaattcagaattccatgaaagagatactttctacatcttcaatcatgttgacatcaaaatatattatcatgttgttgaaactgggtccatgggagcaagattagtagctgctaaacttgaaccaaaaagcttcaaacatacccatatagataaaccagactgctccggaccccccatggacataagcaacaaggcttctggggagatcaaaattgcctatacttactctgttagttttgaggaagagaaaatcatcagatgggcgtctagatgggactatattttggagtccatgcctcacacccacattcagtggtttagcataatgaactccttggttattgttctgttcttatctggaatggtagctatgattatgttacgcacgctgcataaagatattgccagatataaccagatggactctacggaggatgcccaggaagaatttggctggaaactagttcacggggatatattccgtcctccaagaaaggggatgctgctgtcagtctttctaggatccgggacacagattttaattatgacttttgtaactctgttttttgcttgtctgggattcttgtctcctgccaatcgaggagccctgatgacctgtgctgtggtgttgtgggtgttgctgggcacacctgctggttatgttgctgccagattctacaaatcctttgggggcgagaagtggaaaacaaatgttttactgacatcatttctttgtcctgggattgtgtttgctgacttcttcataatgaatctaatcctctggggagaaggctcttctgcagccatccctttcggcactctggttgccatcttggccctttggttctgcatatctgtgcctttgacgtttattggtgcatactttggctttaagaagaatgccattgaacatccagttagaaccaatcagattcctcgtcagattcctgaacagtcattctacacaaagcccttgcctggtatcgtcatggggggcattttgccctttggctgcatctttatacagcttttcttcattctgaacagcatttggtcacatcagatgtattacatgtttggcttcctgtttctggtgtttatcattttggttattacatgttctgaagcaaccatacttctttgctatttccacctatgtgcggaggattatcattggcagtggcgttccttcctcaccagtggcttcactgcagtctacttcttaatatatgccatacactacttcttttcgaaactgcagatcactggaacagccagcacaatcctgtactttggttatactatgataatggttttgatcttcttcctttttacaggaacaattggcttctttgcctgcttttggtttgtcaccaaaatatacagtgtggtgaaggttgactgaagaagcccagtgtgtccagttaaaacagaaataaactaaatcttcatcaacaaagacctgttttgtgactaccttgaattttctcagacttattggcctagtaatccttcagaaacagcatacttaagaacacctcttcccatgcgcctgtacccacaagatgtatttcaacactaaagcgtttgtattgtgattggattaagtatgtattcagttgttctcagtgaagggcaaatttaaatattatgtgcatttgtaaatatgatagctataaacttttcaatacttctaatggcagattagaggaggccataatactcctgagagactggacagttgattgtaaataggattttctaggctcggtaggtggaaagaattatttttctttgaaggaaataactttttatcatggtaattttgaaggatgattcctatgacatgttcactgggggaatgtggcttttaaaatcttgtatcggttgtaattgttcatatcttcttactcttctgtgttgacttcattattcccatggtatcggccttttaaactatgtgcctctgagtctttgaatttataaatttgttatcttaataaatattataaaaatgtcttca

SEQ ID NO: 1358 - DNA, 2308 bp, Cricetulus griseus
ggcagctgaagctcggcgctcgggttacccctgcagcgacgccccctggtcccgccgctgtcgcctccgccgctcccgcccctcagctcctcggccgcgccatgggcacccgtgacgacgagtacgactacctctttaaagttgtccttattggagattctggtgttggaaagagtaacctcctgtctcgatttactcggaatgagttcaatctggaaagcaagagtaccattggagtagagtttgcaacaagaagcatccaggttgatgggaaaacaataaaggcgcagatatgggacacagcagggcaggagcggtacagggctataacatctgcatactatcgtggagcagtaggcgccttactggtttatgacattgctaagcatctcacatatgaaaatgtagagcgatggctgaaagaactgagagaccatgctgatagcaacattgttatcatgcttgtgggtaataagagtgatttacgccatctcagggcagttcctacagatgaagcaagagcttttgcagagaagaatggtttgtcgttcattgagacatctgctctagattctacaaatgttgaagctgcttttcagacaattctaacagagatataccgcattgtttctcagaagcaaatgtcagacagacgtgaaaatgacatgtctccaagcaacaatgtggttcctattcacgttccacctaccactgaaaacaagccaaaggtgcagtgctgtcagaacatctaaggcgtctctcttcccctagaaggctgtgtatagtccatttcccaggtctgagatttaaatatatttgtaattcttgtggtcactttctgtgtttattacttcctcacacttaagaatcttctcatgtcttgagtcttttgattttggctttataaaatcataaactttgtcctgaatgactgcagttctttttcatgctatggcttctctagccctagtttaataaactgaatgtttgaattcctcagttattgtttactcttcatcatggaagcctgtcactgtagaacataatagaacttgatcacttgaaactcagacctattggtcctgattgaatctaactaagacaaccttagaaataagctattattttgcacagagcagcttgtaagacactcttctcaatgcagtacatattttgacagacctaaggattgccctataaacataacagcattttgagagcttgaagatttttccattgtggaagtcaatttctaaaatgccttaataggtctatgttgtaaatttttctttagtttttgtaagcatccaagatgatggggattcttttttcctggaaaagaattatcttaataaacataaaagactgttatattttgtgtagggcatcatggttatggggtcataagttaacctgctgcctggcaggctagtggacttctgtctgaggtgtctctattgcagtgatcggcagcctgagtagtttaactagtctcgtttcccagcagtaaactgtgtggcatttttattgctcatgcaataactagcttaatgctagtattatgacattttgaagtgttaattttgtttttaaacccttctagtaagtgaaatacagcctaattttattcccatatccaccaacaagcatgggtaattattttaacaatgcttacatttcagttctgcagtgtataatggaatatagttcagttaaacatttggttttagtatgtctaaagaatacagtgaggttaatttatgctcaagtggtaccacttaaaggcatgtgttctttcagtatggaaaatgaaatagtaccttgagtttaagtagaatgcacttaggcattgtagtcctgaaatagatttttccactacataattggaattaatggagctactagtttctcattcagaaatgtgcacactaatacttagttttacttccttgtggataatattaagcacttactctgcagttttctgaaagttaactgcaaagatattgttcaggatggtgggatacctgacaaaaaaaatgtgtgggcttgcatagatgactatgtttcatggttaatcttctgttctttgcagtgctcatgatgtgtggggagcacagaaggcattgctctagtcagttattttgtttttcttttgtagctattgttattttagtgtattgattataaatatactgtctatttataaattgctactttgtattttatgcatgctctgtaatttgacttttttttttaagttattgatttggagtatattctcatcctaataaacagttataagggg

SEQ ID NO: 1359 - DNA, 2308 bp, Cricetulus griseus
ggaggctggagtccatgaatgatgtggaggagttgaccatactgcttcggagtgccggtgagtacgaggaacgtaagctgatccgagctgccatccgacgagttcgagctcaggagattgaagctgccaccttggctgggagactgtgcagtagacttcctagtagtgactcccaggaggagagcaggaggcaggcagctcacagattggaccctggtaaggtaccagagcaagaacaacagaaacagcagacagaagtgccagagccaaccccgaccccagagccctctactaccttgggccccgccagaggctcttctaacactaagagagcagatctgactgaactgcagccctgccagtgctctgtatctgtgctcagtccccgacagccagccccaaatagagagccagccccccttgcacgatcatcccagttccaacggactggctccgtcagagaccgagtccgaaagttcacatctgattctcctgtggctgccaggctcccaggatggtccccgaacagccctcacttcgctgacccccacaaagctcctgggctcttcctgcatcggcaccacccctgccctcctccagcaactcctcctctcgaggccccagtgacacttcctcccacaagaagcaaagagaacttgctcattccctggcccagcttcagagctgccctcgagaggagggccctgggggcgtggcttgactcccaggtcccttgaaacagagcaggggggcccaagccctgctcagaagagcccagtaccccactgcctgtgggcatcggaactggggagccagggggcagtatgaagactactacatttaccattgagatcaaggatggccgtggccaggcctccaccatcacccgtgtcagcagccctgggactgtgacccgactgggcagtgtcactcacgtcctcccctggtaaccgaggaggctgcaactttaagatggagccagatccagcagagccccccactgcaacagtggaagcagctaacggcaccgagcagactcgagtggacaaagccccagaggagcggggccccctgagtgccgatgagctgatggccattgaggatgaaggagttctggacaagatgctggaccagactacgaactttgaggagcggaagctcatccgggctgcactccgtgagctccgacaaagaaagagagaccagagggacagggaacgagaacagcgactacgggaggcacgggcccggccaggagagagccgaagcaatacggccacagagacaaccacaaggcacaggcagcagcagcagcaccacagtccaaaccaagaccttttcctcttcctcttcctcttcctcgtccaaaaagatgggcagcatctttgaccgagaagaccaagccagcccacgtcccggcagcctggcagcccttgagaaacgccaggcagagaaaagaaagagttaatgaaggcacagagtctgcccaagacttcagcatcccaagcacgcaaagccatgattgagaaactagagaaagaaggctctgcaggtcctggcacaccccggacagctgtacagcgttctaccagcttcggagttcccaatgccaatagcatcaagcagatgttgctggattggtgcagagctaagacccgtggctatgagcatgtggacatccagaacttctcctccagctggagtgatgggatggccttctgtgccctggtgcacaatttcttccctgaggcttttgactatgggcagcttagcccacaaaacaggcgccagaactttgaaatggccttctcatctgctgagacccatgcggactgcccgcagctcctggatacagaggacatggtgcggcttcgagagcctgactggaagtgcgtgtacacgtacatccaggaattctaccgctgtctggtccagaaggggctggtaaaaaccaaaaagtcctaacccctgcttggggccccacggatgctggtggactgtgtgcccctggtggaggtggaggacatgatgatcatgggcaaaaagcccgaccccaaatgcgtcttcacctatgtgcaatcgctgtacaaccacctgcggcgccatgagctgcgcctgcgcggcaagaatgtctagccactctgctcacaccccgcggcccgcgctgcaggctgtccccaccacagcacagcaccgccaccgcccccagtgcgcctggccactgctgcccggtctgtcgaaacaacccctcccccttgtacacacgcagcgttttgataaattattggttttcaacgaaaaacaaaaa

SEQ ID NO: 1360 - DNA, 2308 bp, Cricetulus griseus
  modified_base (2178)..(2178): a, c, t, g, unknown or other
gcggtccccggccctggtcgccgctcctgcggggcccagcgtgagcctctacctgagcgaggacgaggtgcgccggctgctcggtcttgatgcagaactttactatgtgagaaatgaccttattagtcactatgctctgtcctttaacctgctagtgcccagtgagacgaacttcctgcacttcacttggcatgcaaagtccaaggttgaatataagctgggattccaagtagacaattttgtggctatgggcatgccccaggtcaatatttctgctcaaggggaagtcccacgcactttatcagtgtttcgggttgaactttcctgtaccggcaaagtcgactctgaagttatgatactaatgcagctcaacctgacagtaaattcttcaaaaaactttacagttttaaattttaaacgaaggaaaatgtgctacaaaaaacttgaagaagtaaaaacttcagccttggacaaaaacactagcagaactatttatgatcctgtacatgcagctccaactacttccacgcgtgtgttttatatcagtgtaggggtttgttgtgcagtaatatttcttgtagcaataatattagccgttttgcaccttcatagtatgaaaaggattgaactggatgacagtatcagcgccagcagtagttcccaagggctatctcagccatccacccagacgactcagtatctgagagctgacacacccaacaatgcaactcctatcaccagttatcctaccttgaggatagagaagaacgacttgcggagtgtcactcttttggaggccaaagccaaggtgaaggatatagccatatccagggaaaggataacactgaaagatgtgcttcaagaaggtacttttgggcgtattttccatgggattttagtagatgaaaaagacccaaataaagaaaagcaaacattcgtaaaaacagttaaagatcaagcatctgaagttcaagtgacaatgatgctaacggagagctgtaagcttcgaggtctccatcacagaaaccttcttcctattactcatgtttgcatagaagaaggggaaaagcccatggtgatactgccgtacatgaactgggggaaccttaaattgtttctacggcagtgcaaattagtagaagccaataatcctcaggcaatttcccagcaagatttggtacacatggctattcagattgcctgtggaatgagctacctggcaagaagggaggtgatccataaagacctggctgctaggaactgtgtcatcgacgacactcttcaagtgaaaatcacagacaatgccctttccagagacttgtttcccatggactaccactgtttaggggacaatgagaacagaccagtgcgatggatggctctggaaagtctggttaacaatgaattctctagtgctggtgatgtgtgggcctttggagtgacactgtgggagctcatgactctgggccagacgccctacgtggacatcgacccttttgagatggctgcttacctgaaagatggctaccgaatagcccagccaatcaactgccctgatgaattgtttgctgtgatggcctgttgctgggccttggacccagaggagaggcctaagtttcaacagctggtccagtgcctgacagagttccatgccgccttgggagcctacgtctgacttctctcccagccccacagcccggaagcaagtgcctgttccagatgctttacacgtagcacagagcctgcagaagcacgtttgtctcccagaacaccgtgccttaggaatgctttcaaacctgaacttctaaagacagacttaatgtggagtattttctagataccacttttattaggttgaacggaaaggggttttgtaaattttttggccaaaaattttttaaaatatagttactttggactagggggtgcattcttaaaaaagaaataaacagttttaaaaattgtttagacacagatatttggaatagctgtcttagtgccaactgcttttatttttatgttttacttctttgaggtaatctaggtgactcacctttaaaagtgttttaacgtttttttgtcactgcttttgggaatggtttgccttcaagatatggtactcttcttaggaaaaacagcattaaaaagaaaaagaaattaagtaactagaaaaaaaanaaaaaaaaagtttttagtttaaattggcaatttttatgcttatcttcaaggctggcttaagtataaatttgtttttttaaaacacttgaaaaaattaaaggactcattttatatgatgataattacaaaa

SEQ ID NO: 1361 - DNA, 2307 bp, Cricetulus griseus
gaactttatggaaggaggagacggctgcgacgtgccttcatccatccaggcgagaggggtgaagatggatactggtagtaagaaggaagacattcttctttttggaagatgaaaaatttgacttcgatctttcctgtcttcttcagtgcaaatgaagatgatgaagtctttttggacctgttggacataaagaaagatgcattgctgccagaacagaagaggagaaagaccccatgtcacttaaaagagagacattctgcctgccatcgttcagggggacagcctctcttggggagccccagccgctgacttctccagccatgcttagttcccctatcccaactggccctgttcagacccagagcaaccaggctctgccctgctcctctcagtcactgccaggggagtcaaggacctctcaacctccaaatcaggctgggccacagaggaggaccaccagcaagctacagccaccccgagctttgccggtgagaggaagacatcttcacctggccacagagaagctcaaaaaaagaggcaccagctagtcttcagaggacgaaactgctgaatgaaaagggatctcaaagtgatgtgcccctgaacaaacccagcactgttacagatgctgccagtagagggagccgtctaagcaagcgatccctccctgttcctagcaagttggggctaaagaagaccctgttgaagccacctgcctatactgatagtctcacaaggagatcctctgcctcagggtctgcttcaaacctcatatctagtgcatgtgtgtctccaggagcaggcagagcaaactccagtgatctttcaaatattcctactagtggctctcggcctctgtcaaacaccagcaaattgggcaaagtaggccctgcccctctgcatcaggctttgaaaacagcccctaccagggcatcttgcagacaaaccagaagggctggtgctgctcagacaatggcagagcagcccaaggcctccaacctgactcctctcggccaacaaccccagactccagaacaaagaggaccaaggctggaccctgacaccctgacatcttctcagttgaataaaactggcagcataaaacggcgggactcctatctaaactgcaagacagaggctgtgtctaccactacagacccgtttaaagtcccccagttttcagttggtgagtcagctaatggtgtgaccccaaagctcttgcggacacatcagctgcagcccaggacaccagctagcagggtcctcagcagcacccctgtgagacgctcattggggcccactcaacaagggctgcccggcagtatgaggacccctgtgagcatgagacggatgtcaacactgcccacccctgccagtcggcgcctctctggccttccattaatggcacctcagtccatgcccagggctctggcatccccactctgtgtgcctgccaggcgactttcttctgagcccagaagaagatctacagtcagagtggagccgacccaggagagcaggagcaatgccaatggtgggcagggccaaggtcagtcctcagatgagagctcttctgctccatcctgtgtgcctcaagcacttgacttttctccaaacaagagtgaatctcctccttcccatggctccaccacagaggcagctcagggtgaaacagagcctcatgaagacactgagggtcttctcctggacatcaagctggaccaactcaccatcactcctgaagcaggaggcagagacctagctgaccgccctctcatagacttcagcaacacccctgagtccaacatggctttgggacccagcagctggcccctgattgaccttgtaatgaatactccagacatgggtagaaatgatgtggggaaacctccaaaggctgagcttgggcagctgattgacctgggttccccactgatccatctgagccctgaggctgacaaagaaaatgtggattcaccacttctcaagttctgagcaaagcacaactctgccctttactctgtttatttctgttgtggctttaggcccatagaagcaaattttgaaaggaactgtatttgattcgggggaggcttgtgtctggaacggtgcccgggtgggattctccactgtggatataagcaatccacctgtgtggctgtcctgctccctgcctttcctctaggcttgaacacacctctctaaaaactttgttttgattcttttgtatgtaaaatagcaaatgactgtaaacttaaatttgtttgaaaagttaaatattccagatttaaattaaagttataaagt

SEQ ID NO: 1362 - DNA, 2306 bp, Cricetulus griseus
agcagattttgttagagaaagagctacaatagaagaagcttattccagatcaatgacaaaactagcgaaatctgcaagcaattattcacagcttggaacatttgcaccagtgtgggatgtgttcaaaacatctacagagaaattagcaaattgtcatttggatcttgttagaaaattacaggaattaataaaggaagttcagaagtatggagaggagcaagtaaagtctcaataaaaagactaaagaagaagttgcagggaccctggaagcagtccaagccattcagaacataactcaggccctccagaagtctaaaggaaaattacaattccaagtgtccagtgattctgactctgaggatgaagagccaaagaggtaccggatagagatcaagcctgtacatcctaataatctgcaccacacaatggcttctttggatgaacttaaagtctccatagggaatataacactatccccagcagtatctgtacagatgaatcggaattcatctaatgaagagttaacaaaatcaaagccatcttctttacccaatgagaaagggaacaatgatttacttgcttgggaccccttcgtttggatcatctcttgattcatcttcagcttcactaacttcatcgtcatcatcatcagccagacctacaactcctctttgtataggcaccatcgttccacctccaaggcctgcttccagaccaaagcttccttcaggcaaactaagtgggattaatgaaatacccaggccattcagcccacctgtaacttccaacaccagcccaccccctacctgctcccttagcccgggcagagagttcttcttctatctcttcatctgcatcattgagtgctgccaacactccaacagtaggtgtgtcacggggtcccagcccagtcagccttggaaaccaggacaccttacctgtggcaatcgctcttacagaatccgtcaatgcctactttaaaggagcagatcctaccaagtgtattgtgaagatcactggagacgtgacaatatcatttccaagtggaattattaaagtcttcacaagcaacccctctccagctgtgctgtgctttagggtgaaaaacatcagcagactcgagcaaattcttccaaattcacagcttgtgttcagtgatccatcacagtgtgattccaacacaaaagatttttggatgaacatgcaagctgttactgtctacctcaagaagctatcagagcaaaatcctgctgcttcttattataatgtagatgtattaaagtatcaggtatcatcaaatggcattcagtccactcctctaaatcttgcaacgtactggaaatgtagtgccagtaccacagatctgagagtggattataagtacaacccagaagccatggtcgcacctagtgtgctttccaacatacaggtggtggtaccagtggatggaggagtcacaaatatgcagtccctcccctgcaatatggaatgcagaacaaatgaaagccctttggaaattatctgggatttcggagaaatcagagagtggaggttctggatccctcagagcaaaatttgatctttcagaaggacccagcaaacccacaacacttgcagtgcaatttcttagtgagggaaataccctctcgggagtagatattgagctagttggcactggttatagactttctttagtaaagaagcgttttgccactggacgatacttggctgattgttgatggacctggaaagcggttttctcaagggaacagtgcaaacctgtcactgcatcacctgttctttccaaacactatttttacttgtatgatgtctttcaaactttgtctttgaaagctgactacaaacattaaattgcactttcaaagtgagtcattgaaagaaatagcactgaaatgaccttgtacacagtaatgattaatgatcaaatgcaatattcaggaagcacatgtattcaaattgtcactaaaaatgaagtttattatcttcagtgtctgtgtttgtacaaaggttagaatgtagtaacaaacctaaaatttcaggagagcaagcaacaaaattatttagctttccattaagtatttagagtcagagatagctttgaagttccataagtttgatattgaatgaatataaacaacgtaaatttttaagttttgaatgttaactcagagctcaatctaattgagttatgtgccataggtaatcagaccagagtccaagttgtatacaaaaaaaaatcctaattaaatgtaatatataatttaaaaaaaaaaaaaaaaaaaaaa

SEQ ID NO: 1363 - DNA, 2306 bp, Cricetulus griseus
cccgcgggccgcgcctaggggcgccggtagttgcttggggaggaccccggcttcctgctccatccaaggctactcgaggcaccgaccgggccctgcagaggcccgcgcagaagggaccatgaaagtgagatcagctggcagtgacagggatgtactgtgcattactgaagaggagctggctggtgaagacgaggaaatgccatccttcccatgcacccaagaaggtcggtcgggaccccgctgcagccgctgtcaaaagaacctgtctttgcacacgtcggtgaggattctgtacctcttcctggctctgctccttgtggccgtggctgtgctggcctctctggatggacacaactctgaaggaccttacccaggagtgctatgacgtcagggctgctgtacaccagatcaatttcacagtgggccagacggctgagtggatccatgggatccagcggaagacagacgaggagactctgaccctacagaagatggtcacggactggcagaactacacaaggctctttgggggtctgcgcagcacttctgccaagactggagaaatggtcaagaccattcaggccaccctgggggcctcctcgcaacgcattagccagaattctgagagcatgcatgacctggtgttgcaggtcatgggcctgcagctacagctggacaatatctcctcctttttggatgaccatgaggtagaacatgcatcgacctccaataccacacccgatatcgcccagaaccgcacagtggagaggtttgagtctctggaaggacgcatggcttcacatgagatcgaaataggcaccatcttcaccaatatcaacgccactgacaatcacgtgcatagcatgctcaagtacctggatgatgtgcggctgtcctgcaccctgggcttccatacccacgctgaggaactctactacctaaataagtccgtctccctcatgctgggcaccacagatttgctcagggagcgcttcagtctgctcagtgctcgcttggatttcaatgtccgaaacctctccatgatcatggaggagatgaaggctgtggacacacagcatggagaaattcttcgaaatgtcaccattatccgaggtgtccccgggcctccaggaccaagaggactcaaaggagatgcaggaataaaaggacctcttggtaacagaggacccaagggggattccggcagtctgggtccccccggacgtcagggtcctcaggggccgcctggggagccagggacctgtcggggagaagagggccagctggaccccgaggcttttcaggactcaaaggctcaaaggggcagctttggcactggagggccaagggggcagccaggacccaaaggagatcgtgggaccccccagggccagaggggcccccagggtctccaggaccctcagggcctcagggaaagccagggatttcaggaaagacaggggtcaccaggtcagcgggagccacagggcctaagggtgaaccaggcatccagggtccccctggattacctgggcctccaggccctccagggaactcgagcccctactgaatgatgtctttggcctgatgctgcaatgcaggttggctgacaagttcagagggtttttattcacgcgtccagaacattcctttcttcactctcacctctgcatctcaggagtggcctggaaagaacccaagctgagtttcatctgctgggagagaccctgcaggtcccagaacattctgcttgtccgctatccagcctccctggaagaccctcaggggagggaggtgggaggacagtaacagggcggctcttgcctcctactcttggttatcctattcataaatgaacattgacctcaccctaccacaacttaagaagactggagctctttcccacatgagcagcaggctggactaggcatgggaagagcctgaacacacacaaggagcctttgatgttacttcttgtctttcatgagcgtcttccatacactggcagaaagggatgctgggaaaggcctgcattgtcttgactcactttctgtaaagctgccctgctccttcagactccagcagacttagatgctcctgggcaaagggcagagctgcctcctcccttgtactgtctcagagacctgtcttcttcctgctcaaagcctctgtaccaccatcctcctcaacatcagtgtgcaactggcttgcaccacccacctaccccctgcctgtataattgtcctgtctacttatgataatatcatgtgacacagtatcactggcccagtaaagagctgtttcca

SEQ ID NO: 1364 - DNA, 2306 bp, Cricetulus griseus
  modified_base (2175)..(2175): a, c, t, g, unknown or other
  modified_base (2284)..(2284): a, c, t, g, unknown or other
  modified_base (2288)..(2288): a, c, t, g, unknown or other
ggaagccttctgtgcacgttgaggtgaccaggtggcgggggtgcagagtagatgtcctcggaggtgatcagggcgaccgcagggatggtactagcagagctgtatgtctctgatcgagaaggaaatgatgcaacaggagatggaactaaggagaaaccatttaaaacaggcctaaaggctttgatgacagttggaaaagagccatttcccaccatttatgtggattcacaaaaggaaaatgagaggtgggatgtcatttctaagtcccagatgaagaacattaaaaagatgtggcacagagagcagatgaagaatgattctcgggagaagaaagaggcagaagataacttacggagagaaaagaacctggaggaagcaaagaaaattatcattaaaaacgacccaagcctcccagagccagcatgtgtaaagatttgtgcattagaaggatatagaggtcaaagagtgaaggtgtttggctgggtccacaggttacgcaggcaaggaaagaatttgatgtttctggtgttgcgagatggtacaggctatcttcagtgtgtcttgtcagatgacttgtgtcagtgttacaatggagtagtcttgtccaccgagagcagtgtggcagtatatggaacactaaacctaactccaaaaggcaaacaggctccgggaggccatgagctgagctgtgacttctgggagctggtggggctggccccagctgggggggctgataacctgatcaatgaggagtctgacgtagacgtccagctcaacaaccggcacatgatgatccgaggagagaacatgtccaaaatcttgaaagcacgctccatgatcaccaggtgcttcagggatcacttcttcgacagaggctactgtgaagttactactccaacactggtgcagacgcaggtggaaggtggggccacactcttcaagcttgactattttggagaagaagcgtttttaacccagtcctcgcagctgtacctggagacctgccttccggccctgggggatgttttctgtattgcccagtcatacagggctgaacagtccagaacacgaaggcacctggctgaattcactcatgtggaagctgagtgtcccttcctgacctttgaggacctcctgaaccgtttagaggacctagtgtgtgatgtggtggacagagtcttgaagtcaccagtggcaagcatagtgtatgacctcaacccgaactttaaaccccctaaacggcctttcaggcggatgaactattcagatgctatcgagtggctgagggagcacgatgtaaagaaagaagacgggacactctatgaatttggagatgatattcccgaagctcctgaaagactgatgacagacaccattaatgaaccaatcctgctgtgtcggtttcctgtggagatcaagtccttctatatgcagcgatgtcctgaggatcctcgacttactgaatctgttgacgtgttgatgcccaatgttggtgagattgtgggtggctctatgcgctcttgggatagtgaagaaattctagaaggctataaaagggaaggaattgaccctgctccttattattggtatacagatcagagaaaatatggtacatgtcctcatggaggctatggcttgggcttggaaagattcctaagttggattctgaacaggtatcatatccgagatgtgtgcttgtaccctcgattcgtccagcgctgcaggccataaccaagtgccctgaagcatgaaggaagggaaaatgttaagactgcctctgcaaaagaacaaaaaccgaaaccatctcttgatgtccctttgggtgtagtagctttttcccattactataaaaagcagtaggtgtgacttgaacatcaagtgacatcgatgcccctttaacaaaaatactcataacaaaatttgaagaaaatacatggcatgtcactctttagttggggagacattttatcgtactgtaggttacaatcactgtattaaataaatgataaatgcttatatagtttttacttatggtctgattttccatcaactttatgtttttgtccttttaaatgtcactggaattatacatagtcctttacattcgctattaatcttttctaaatccacaccgtgcttctgattctaggtgtatgaattgataaagaaaatttntgaaggggaattgggttaaaatttgcagtgaacatgattcagttcttctccaaatgcatgccttgtgttctgatgggctgtattcccactaaccaataaatgaaaaaanaaanccaaaacaaaaaaaaaaa

SEQ ID NO: 1365 - DNA, 2304 bp, Cricetulus griseus
agaccacaggatggctccaaaggttgacatcagagctgcttcggcagctgcgacaagctatgaggaatgttgagtacgtggcagagccgatccaggcctatatcatcccgtccggagatgcccaccagagtgaatacattgcaccctgcgactgtcggagggcgtttgtgtctggatttgatggctctgcaggcacagccatcatcacagaagaacacgcggccatgtggaccgatgggcgctactttctccaagccgccaagcagatggacaacaactggaccctcatgaagatgggcttgaaagacacaccaactcaggaggactggctggtgagtgtgcttccagagggatccagggtcggtgtggacccactcatcattcccacagattactggaagaagatggccaaggtacttcgaagtgctggtcaccaccttgtccctgtgaaggagaaccttgtggacaaaatctggacagaccggccagagcgcccctgcaagcccctcctcacactgggcctggattatacaggcatctcctggaaggagaaggttgcagaccttcggttgaaaatggctgagaggaacatcgtgtggtttgtggtcactgccctagatgagattgcatggctgttcaatctccgaggctcagacgtggagcacaatcctgtgtttttctcctatgcgattgtaggactagaggctatcatgctcttcattgatggggaccgaatcgatgcccccagtgtgaagcagcacctactccttgacttgggcctggaggccgaatatagaatccaggtcctcccttacaagtccatcctgagtgagctcaagaccctctgctcggacctctccccaagggagaaagtgtgggtcagcgacaaagccagctatgctgtgagcgaggccatccccaaggaacaccgctgctgcatgccctacacacccatctgcattgccaaagccgtgaagaacttggctgagtcggaaggcatgaggcgggctcacattaaggatgccgttgccctctgcgaactcttcaactggctggagaaagaggttcccaaaggtggtgtaactgagatttcagctgctgacaaagcggaggaatttcgaaggcaacaggctgactttgtggacctgagcttccccaccatctccagtacaggacccaacggcgccatcattcactacgcgccggtccctgagacgaataggaccctgtccctggatgaagtgtacctcattgactccggtgctcagtacaaggatggaaccacagacgtgacccggactatgcacttcgggacccctacggcttatgagaaggaatgcttcacatatgtcctcaaaggccacatagctgtgagtgcagccattttcccgactggaaccaaaggtcacctcttagactcctttgcccggtcagctctgtgggattctggcctggattacctgcatgggacgggacatggtgttggatcttttctgaatgttcacgagggtccttgcggcatcagttataagacgttctctgacgagcccttggaagctggcatgattgtcactgatgaaccagggtattatgaggacggggccttcgggatccgcatcgagaacgttgttctggtggttcctgtgaagaccaagtataatttcaataaccgaggaagcctgacctttgaacctctaactttggttcccatccagaccaaaatgatagatgtggattctcttacagataaagagtgtgactggctcaacagttaccaccagacctgcagggatgtgattgggaaggaactgcagatacaaggccgccaggaagctctcgagtggctcctcagagagacagagcctatctccaagcagcattgaccctgccctgcagctgttctgtaggctgctgtgagggggaagaaacacggcagaccccgacttctttctccttacctcttcttccttcccgactccctttttacttttagactctaagaagaaccgaaactcttcttacccactttgatattttcttgcaaacagtcttttatgaatttttaattgttgagaatgagccaagaataaaactgctacaccagaaggaggaggccccacaaagctgaagacttgacaagggggaggcatcccgaggcctctggccagtgatggcgaacaccgagtgctccatgatggtctcgttccaggtgctagtacatcagtcatggtcaccttgatgttcatgagaccctcttcccatcagtgaataaaaacatcaaaactaaaaaaaaaaaaaaaaaaa

SEQ ID NO: 1366 - DNA, 2303 bp, Cricetulus griseus
  modified_base (1802)..(1802): a, c, t, g, unknown or other
cccgccgccggccctccttcttctcgtcccagtgccaccgagccggagcccgagccgccgccgccgccgcagcctcagccgcggacactatggcatctggagttacagtgaatgatgaagtcatcaaagtttttaatgatatgaaagtaagaaaatcttctacacaagaggagatcaaaaaaagaaagaaagcagttctcttctgtttaagcgatgacaaaagacaaataattgtagaggaagcaaagcagatcttggtgggtgacattggtgatactgtagaggacccctacacatcttttgtgaagttgctacctctgaatgattgccgatatgctttgtacgatgccacatacgaaacaaaagagtctaagaaagaagacctagtatttatattctgggctcctgaaagtgcaccgttaaaaagcaagatgatttatgctagctctaaagatgccattaaaaagaaatttacaggcattaaacatgagtggcaagtaaatggattggacgacattaaggaccgctcgacactgggagagaaactgggcggcagtgttgtagtttcccttgaaggaaagccactataaaatagtagccaagtgccatctgatcttaaggggcttccatttctccagttcagtccactggaatcgtattgggttttgtttttttttgtttattcccctttccactgggccctttcaacacaatgaatgaatgagtgaattaagaagcctgtcagtgattgccattaggctgttgaatacggttacttttatgtagaacccaaggaatgccttccctgtcttattttagccaaaacaactggttacatgccttccttgcagtgagcactacaatggatgtgattgtcaatgtgaatagcttagagtactacaaagggtaagctaattgaatgccttgaaagtattatccactggtcatatggtaaactttttttcagtattatttatagttgcacttgattacagttctgaggcgctggagcatttgtgcacctcacctgccttggcaagcctatttttgtgacatggcagcacagatttaacactatgcgttaaaagcactttttttttaatgtgtttaatcccttaaaaagaatgccaattaagtttcattacctgtcattgatttatctagtacctcagtgttcattcctcttacctgaatatcttcttcaaataaactgctgtgttgacatctttggtttcccattgagtatacactactgaataaatgtaggagttttatgtttaccgtatgagtcttgaaacactacagatattttgagtaccagtcatgatggcagtttctgtataaaagagccttaaatggaacattgttttgagatcaaattccctaccctcacaaaagtggccacgttgcaataaaaattgtggcatattacagaacgttgccttgttttccttggaaattttgcaaattgtcatgtgaaattttagggtaaacatcgattaatctctacactggtatttgagattttctttttgagaagtagaaataggatgttttattacttgatcataatgaaaataagttgtgaaatgtcatccaaaggtttaataatgattctgatgtttaggaatgttcatttcagctatgattccttaatatattttctaaattgaattggaaaaaaattggtatagcagtcttaaacattagcaatgggatttggctgtggtccagagtgctctccttatagagaatttgatctcctccgtgtgcgcactttgctattagccagagctatttanggcaaacacatgcttttgtatcttgtcatagtcatccacagatggcaaaactggatttttttcagatgagaacattaaaacatagctgttaaatgtctaggcttccatttaaaactttatgagtgattggaatcttttttagcactaagcaattttatttcagccttccagctgtccctgtgagttgttccagacctttccgtggctttttggtaaggctgctaataagcaaagcatgaaaatggtaatgtgtactaaacaatatgtttaactgatctttgcaccaaaggactttttcaccgagttattttattcttccaaaaattaagagatttctaaaaagtaaaggaatgaccttttgttttatagctgatttctcaatttccttatatggttctttagaataatttcagaaattaaatactgctttaaattatgatactttgacttttttagattggcaaatatattaatgtagttaaattcatctttaaagtgcac

SEQ ID NO: 1367 - DNA, 2303 bp, Cricetulus griseus
gtgaagtatatagtggaaaggaccatgctggacttccctcagcacgtgtcatctgacagagaagtacgggctgcgagcacagaggcagacaaaagactttctcgttttgatatcgagatgagcatgagagaagatatatttcagagaattgtccatttatacgaaaactgtgatttggagaagataaagccggaagccaaggcgatacttggaaaagtcaaattaaaataatggactccatctttcggaacaaagtaagaaaatgaaatcaaatcaatagaagaaaagaatgagtgaactgtgcattgacttcaacaaaaacctcaatgaggatgacactttccttgtgttttccaaggctgaacttggtactcttcctgatgacttcattgacagtttagaaaaacagatgatgacaagtacaaggttaccttaaagtatccccactattttcctgtcatgaagaaatgttgtatccctgaaacaagaaggaagatggaaacagcttttcatacaaggtgcaaacaggaaaacactgtaattctgcagcagctcctcccgcttcgagcacaagtggccagacttctcggttataacacccatgccgactttgtccttgaactaaacactgcaaagagcacgagccatgtggcagcctttctagatgatttaagccagaaattaaaacccttgggtgaggcagaacgggagtttattttgagcttgaagaagaaggaatgtgaagagcgaggctttgaatatgatggaaaaatcaatgcatgggacctccattactacatgacacagacagaggagctcaagtactcagtggaccaggagttcctcaaggaatactttcccatcgaggtggtcaccgaaggcttgctgagcatctaccaggagttgttgggactttcatttgagcaagtggcagatgctcatgtttggaataagagtgtttcactttatactgtgaaggataaggctaccggagaagtgctgggacaattctacctggacctttatccaagggaaggaaaatacaaccatgcagcctgctttggtctccagccaggctgccttctccctgatggcagccggatgatgtctgtggccgccctggtggttaacttctcacagccggtagcaggcaggccctctctcctgagacacgatgaagtgcggactttcttccatgagttcggtcatgtcatgcatcaggtttgtgcacagactgactttgcacgatttagtggaacaaatgtagaaactgactttgtagaggtaccatcacaaatgctggagaattgggtgtgggatactgaatcgctgcggaaactgtcaaaacattataaagatggaagtgctatctcagatgacctgcttgagaagctggttgcttccagactggtcaacacaggtctcctgacgcttcgccaaattgttttgagcaaagttgatcagtctctccataccaatgcgtcgctggatgctgcgagtgaatacgctaaatactgcacagaaattttaggagttgcagctacaccaggcacaaatatgccagctacttttggacatttggcaggaggctatgatggccaatattatggatatctttggagtgaagtcttttccatggacatgtttcacagctgttttaaaaaagaagggatcatgaatccagaggttggaatgaagtacagaaacctaatcctgaaacctgggggatctctggacggcatggacatgctccagaatttcttgcaacgtgagccaaaccaaaaagcattcctaatgagtcggggcctgaatgcttcctagaccagggatcctgggagccatccatgtctggaggacaaatcaacaccgccatgtggtgctggcctggagactgaagggagttttacaaatgaaaacttagatttctattgatttgcttttgtttttttaattttaaaaattatacagatgtaaatggaattataaatactgtgacctaagaaaaaacccactaaaaataactgtactataaaatttcataaaaatggatttgatttcttttgataaaagtttcatatgaatgtaatttgatttttttactattataatctagataatataatgtaagagggctaagaatttttaattgaatcacaaacatgatataatttgatccttcttatatcttgaagttttatacttgagatttctggactgataatgaatcatcacattctctctggtaaatattctctcggcgcccttcttcaactttgaccctgtgcctcacagctaagtgtcag

SEQ ID NO: 1368 - DNA, 2303 bp, Cricetulus griseus
  modified_base (702)..(702): a, c, t, g, unknown or other
  modified_base (764)..(764): a, c, t, g, unknown or other
atcccaggcaccaaccaagccatcatcaccccctcatcatccggccataagcctgtccccatcaagccagctcctgtccagaagtcaaatacgactaccactccggtacagagtggggccaatgtggtgaagctgacaggtggggtggcaacgtgacactcactctcccggtcaacaacctggtgaacaccagtgatgctggggcccccgctcagctcctcactgagacgccccccgagacggtgctgatcgagaccacagcagacaacatcatccaggcaggaaacaacctgctaattgtccagagccctggtgggggccagccagctgtggttcagcaagtccaagtggtgccccctaaggccgagcaacagcaggtggtgcagatcccccagcaggcactgcgggtggtacaggctgcctctagccacccttcccaccgttccccagaagccttcccagaactttcagatccagacaactgaatcagcaccaacccaggtttatattcgtacaccttctggtgaggtacagacagtcctcgtccaggacagccccccagcaacagctgcagccacctcaaccaccacctgtaacagtcctgcaccccgagctccccatcctgagtggtaccagcaaaaagcattcagctgcaatccttcggaaagaaagacccctgccaaagattgcacctgcagggancatcatcagcctgaatgctgcacagctggccgcagctgctcaggccatgcagaccatcaacntcaatggagtccaagtgcagggtgtgcctgtcaccatcacgaacactggcgggcagcagcagctcacagtgcagaacgtgtctggaaacaacctgaccatcagtgggctgagccccacgcagatccagctgcagatggagcaggccctcgctggagaggcccagcccgggaaaagaagcgacgcatggcctgcacgtgccccaactgcaaggatggggaaaagaggtctggggagcagggcaagaagaagcacgtgtgccacatcccagactgtgggaaaactttccggaagacatccttgctccgggcccatgtccgcctgcacactggggagcgaccctttgtctgcaactggttcttctgtggaaagaggttcacacgtagcgatgagctccaacgacacgctcgaacccacacaggggacaagcgctttgagtgcgcccagtgtcagaaacgcttcatgaggagtgaccatctcaccaagcattacaagacccacctagtcacgaagaacttgtaaggccaactgaggcaggaggccctgaagatggactcccccatctgattggcctgggtccatggtggacaggtgcccacaactgccctgggtggccctcaccccactcctgttctgtggctgtgtccccacagggaggggctcttctcctccttccaaaggccctcccttctcatcatgagctcctggcctgcccaggctatggacactggccatgcccaatgagacgttctaaaccaggacgcgtggggacccttattccaaggaaaacatgcatttcactccgtcgaggagcaaagtgagccccctatccgaacccattccctgccccaacactgccggagtcccattgtgccatgcccctccaatcctgtgcctccttgtccccctcaaacgacccctctccacacaccccagggccctgtactcagcctccctctggcacccacccctgtggaggcttgggaggctgcctccactccactgcccagccctgccacggctctcctccagacattccagcttcctcttgaaaggtcagacgccggcggactcctcccactcctttttcatggagaatgttgccttacactcagacttcagatgatgaacactgtgtatgtgtgtgctttaaagcattttatttaattgatcccttcttcctttctctactaggcgccctcccctcacctgtgttcagtttagggttttgggggcaatgctgagcatctcatcgccctacctgcccaagctctattgtgtacagtgtatattgtataatagacgattgtgtctacgacatgttttaaaaaacatattgcttgttatttttgaggcttttaaattaaacaaaaatccaaactttatttttcgttgtaactgcttgaggatgttttattaattaagtgacagatttgttatcctttattaacaatgtattttgttggtcagtgatgggctgacaaaaattttcttgctaataaatttagttgcctgaggcaaagtctagaaaaaaaaaaaaa

SEQ ID NO: 1369 - DNA, 2302 bp, Cricetulus griseus
ttgttcttctcgtggttccagtggcgagaggaggaggaagccgggagcggggcggggcggctgggggggggacccgccgcggctgctgctgccaccgccgccgccaccaccgctcgtggggctcgtggcgtgaggaaggaggacgtgtgaggcccgggccgcgagccggcggcggcgccgctgctgcgggagggtcggcggcaggacggcgatggcggatatcgataaactcaacatcgacagcatcatccaacggctgctggaagtgagggggtccaagccaggcaagaatgtccagctacaggagaacgaaatccgaggactctgcttgaagtctcgggagatcttcctcagtcagcctatccttctggaacttgaagcaccactcaagatatgtggtgacatccatgggcagtactatgatttgctccggctatttgaatacggtggcttcccgccagaaagcaactatttgtttcttggggactatgtggacaggggcaagcagtcactggagacaatctgcctcttgctggcctacaaaatcaagtatccggagaactttttccttctcagagggaaccatgagtgtgccagcatcaatagaatctacggattttacgatgaatgcaaaagaagatacaacattaagctgtggaaaacgttcacagactgttttaactgcttaccgatagcagccatcgtggatgagaagattttctgctgtcatggaggtttatcaccagatcttcaatctatggagcagattcggcgaattatgagaccaactgatgtaccagatcaaggtcttctttgtgatcttttgtggtctgaccccgataaagatgtcttaggctggggtgaaaatgacagaggagtgtccttcacatttggtgcagaagtggttgcaaaatttctccataagcatgatttggatcttatatgtagagcccatcaggtggttgaagatgggtatgagttttttgcaaagaggcagttagtcactctgttttctgcacccaactactgtggcgagtttgacaatgcaggcgccatgatgagtgtggatgaaaccctcatgtgctccttccagattttaaagcctgcagagaagaagaagcccaacgccacgagacccgtcacaccgccaaggggtatgatcacaaagcaagcaaagaaatagatgtcacttgacactgcctggttgggacttgtaacatagcgtacataaccttcatttttaaactgtaatgtgtgctggtcagcttgcccaggtcgacctgccgggccctcctccattttggttaccgctggcactcactggttatagcagcgagtggaagcgcgtcattctcaagaaagcgtttttgtttttaacctctgttccctttgcagacaactctgatgatggtgttaagctatacacctcggcaggttatcctgtcgaggggcaagtgtactattggtctttttttaatttagtataaatcatgaataatgtaaatgcttgttttctttaggatatacagaaagccctagggtgcgtgagtctgtacatgtcattgtcataaatgcattctgttgatatgaaccactgtgaacaatttttttaagtttgtttgaaagggactgcttttcctctttgtcttgttatgtacaaatagtgtctgcggcgacagcagcaggcatgacctgctgcctgccctgcccagactgtctgaagcacactccctcccaccgcacacttaatgacgattaaagccattcttttcaatgtttgtgattccttcctaaagccaaagtttctgttggactgtattggcacgccctggacatgaggtggccagggcattgaggctgcgtgcacaggccgcctccgtggggactcagaagcaggtttttattttaaatagcaatagtgatttagtgctgggtaagctattaatgatggaagttaatgacactttgtacaattcccagatagtctattcactgagtaatctttttacagttggatcaggcctgaacccgtccattcagaaagcttcaaattatagaaacaacactgtcctatacgagtgaccgatagcgctttctttggctacattctttattctgcggtgatgctgaggcttataaatcaaaaggaactaacttgccgtccacccgtttatacagaactcacagtatctatgacttttttaatctacgacctgttaaaatgaatctgtttccacagatgcccgtgtacaatgccatgtgctgagaatgacttcagacttattaaatgcgagcttgttaa

SEQ ID NO: 1370 - DNA, 2302 bp, Cricetulus griseus
ctggctggcaagaatggagtagaagtgccgttcatgcgggagatggcaggggcctggcacatgacagtggagcagaagtctggcctcttttctgctgaaacaaaggaagcagaccccctggcggcatcagaagcaagtcagcctagaccttgtccccccgaagtaactccccactacatctggatcgatttcctggtacagcgctttgagatcgccaagtactgtagctctgaccaggtggagatcttctcaagcctgctacagcgctccatgtccctgaatattggtggagccaaagggggagcatgaacaggcacgtggcagccatcggaccacgtttcaaattgctgaccctgggctgtccctcctacatgctgatgtggttccaaatgcaaccattcgaaacgtgcttcgagagaagatctactcaacaagcttcacaagtactacatgaaacgcaggacgctactgttgtcactgttggccactgaaatcgagcgcctcatcacttggtacaacccgctgtcagccccagaactagagctggaccaggcaggagagagcagtgtggccaattggaggtccaagtacatcagcctgagtgagaagcaatggaaggacaatgtgaaccttgcctggagcatctccccctacctcgctgtgcagctgccagccaggttcaaaaacacagaagccattggaaatgaagtgacccgtctcgttcggttggacccaggagctgttagtgatgtccctgaagccatcaagttccttgtcacctggcacaccatcgatgctgacgctccggagctcagccatgttctatgttgggcacccacggacccacccacaggcctctcctacttctccagcatgtacccaccacaccctctcactgcacagtatggagtgaaagtcctgcggtccttccctccggatgccattctgttctacatcccccagattgtgcaggccctcagatatgacaagatgggctatgtgcgtgagtacattctctgggcggcagccaagtcccagcttctggcacaccagtttatctggaatatgaaaactaacatctacctcgatgaagaagggcaccagaaagaccctgacattggtgaccttctggagcagttagtagaagagatcacagggtccctatcaggtccagctaaagatttctatcaacgggaatttgatttctttaacaagatcaccaacgtgtcagccatcatcaagcccttccctaaaggtgatgaaagaaagaaggcgtgtctgtcagctctgtctgaagtgaaggtgcagcctggctgctacttgcccagcaaccctgaagcaatcgtgctagacattgactacaagtcagggacaccaatgcagagtgccgcaaaagcgccgtatctagccaagtttaaggtgaagcgatgtggagtgagcgaacttgaaaaagaaggtctgcagtgccgctccgatgctgaggacgagtgtcgagggcaggaggctgatggcaagaagatctgctggcaagcagccatcttcaaagtgggggatgactgccgacaggacatgttagccctgcagatcatcgacctcttcaagaacatcttccagctggttggcctggacctcttcgtttttccctaccgggtggtggctactgcccctgggtgtggagtgattgagtgcataccggactgcacctcccgagaccagctgggccgccaaactgactttggcatgtatgactacttcacacgccagtatggggatgagtctaccctggcctttcagcaggcacgctacaactttatccgaagcatggccgcctacagcctcctgctgttcctgctgcagatcaaggacaggcacaatggcaacatcatgctggacaagaagggccacatcatccacatcgactttggcttcatgtttgagagctcaccgggtggtaaccttggctgggaaccagacatcaagctgacagatgagatggtgatgattatggggggcaagatggaagccacacccttcaaatggttcatggagatgtgtgtccgaggttatctggctgtgcgaccctatatggatgcagtcgtctccctagttacactcatgttggacacgggcctgccctgtttccgaggccagaccatcaagcttttgaaacacaggttcagccctaacatgacagagcgagaggcggcaaattttatcatgaaggtcatccagagctgtttcctcagcaacaggagccggacctatgacatgatccagtactaccagaatgacatcccctact

SEQ ID NO: 1371 - DNA, 2301 bp, Cricetulus griseus
atcctgggggctggggacaccatgcccaacctcctggtccgtgcctgtaaccagctgggccagttcctgcagcaccgggagacgaacctgcgatacctggccctggagagcatgtgcacactggccagctctgagttctcccatgaagctgtcaagactcacattgataccgtcattaatgccctcaagacggagcgggatgtcagtgtgaggcagagagcagctgacctctcgtatgcatgtgtgaccggagcaatgccaagcaaattgtgtcagaaatgctgcggtacctggagactgctgactatgccatccgagaggagatcgtgctgaaggtggccatcctggctgagaagtacgcagtggactatagctggtatgtggacaccatcctcaacctcatccgcatcgcaggcgactatgtgagcgaggaggtgtggtaccgagtgctgcagattgtcaccaaccgtgatgatgtccagggttatgctgccaagacagtgtttgaggccctccaggccccagcctgtcatgaaaacatggtgaaggtcggtggctacatccttggggagtttgggaatttgattgctggggacccacgctccagcccacctgtgcagttctcactgctgcactccaagttccacctgtgcagcgtggccactcgcgccctgctgttgtccacatatatcaagttcatcaacctcttccctgagaccaaggccactatccaaggagttctgcgtgccggctcccagctgcgcaatgccgatgtggagctacagcagcgggcagtggagtacctcaccctcagctctgtagccagcaccgatgttctggctactgtactagaagaaatgcccccatttcctgagcgcgagtcatccattctggccaagctgaagcgcaagaagggccctggggcagccagtgccctggatgacagccgtagggacaccagcaacagtgacatcaatgggggtgtggagcccacccccagtaccgtgtcgacaccctcaccctccgcggacctcttggggctgcgggcagcccctccccctgctgcacctccagtccctgtaggtgggaacctcctggtggatgtcttctctgatggtcccacggcacagcccagcctgggacccacccctgaggaggccttcctcagcccaggtcctgaagacataggccctcccatcccagaagcagatgaactgctgaataagttcgtgtgtaagaacagtggggtcttgtttgagaaccagctgctgcagattggagtcaagtccgagttccgacagaacctgggccgaatgtatctcttctatggcaacaagacttctgtgcagttccagagcttctcgcctaccgtggtccaccccggagacctccaaaatcagctggcggtgcagacgaagcgtgtagctgcacaagtggacggtggtgcacaggtgcagcaggtgctcaacattgagtgtctgcgagacttcttgacgccaccgttactgtcggtgcgcttccggtacggtggcactgcccagtccctcactctgaagctcccagtgaccatcaacaaattcttccagcctacagagatggccgcccaagactttttccagcgctggaagcagctgagcctaccgctgcaggaagcacagaaaatcttcaaagccaaccaccccatggatgctgaagttactaaggccaagcttctggggtttggctctgctcttctggacaatgtggaccccaaccctgagaacttcgtgggtgctggaatcatccagacgaaagccctgcaggtggggtgtctgcttcggctggagcccaatgtccaggcccaaatgtaccgcctgaccctgcgcaccagcaaagagcctgtctcccgtcacttgtgtgagctgctggcccagcagttctgagccctggacttgccctgggatgtggccagtgccaggcagccctgggatggaggcagctgtggtggagggggcagcgaggagacctccagtggtgacagcaaagaccccagggatgggggcatgcctgggagcttcctctggccttttgtatttttattttgttcatctgctgctgtttacattctgggggggccaagggaagcaccctccctcccttgtcccccagagcacagaggggagagggtccggggaagtcggtacctcctcccctcccccccttcgtcgccctccctccctttccccatcctggggccgtgtattattgtgagcgaataaacagagagacgctaatattaccccatcataacaaaaaaaaaaa

SEQ ID NO: 1372 - DNA, 2299 bp, Cricetulus griseus
gttaatgcgtcaaatgaaagaggatgctgaaaagtttagacagtggaaacaacaaaaagacaaaagaagtaatccagttaaaagaaagagatcgtaagaggcaatacgagttgctcaaacttgaaaggaactttcagaaacagtctaatgtgctcagacgtaaaactgaggaggcagcagctgccaacaaacgtcttaaggatgctctccaaaagcaaaaggaggttgcagataaacggaaagagactcaaagccgtgggatggaaggcactgcagctcgagtgaagaattggcttggaaatgaaattgaggttatggtcagtactgaggaagccaaacggcatctgaatgaccttcttgaagataggaagatccttgctcaggatgtggcacaactcaaagaaaaaagagaatctggagagaatccacctcctaaactccgaaggcgcacattctcacgtgatgaagtacgaggttcagattcagaagcaggggattgtattgcaaagcagattgaaagcctagagactgaactggagctcaggagtgctcagattgcggacctacagcaaaagctccttgatgctgaaagtgaagacaggcagaaacaacgctgggagactattgccacaattctggaagccaaatgtgccataaaatatttaattggagagctggtctcctccaaaatacagatgagcaagcttgaaagcagcctgaaggagagtaaggccagctgtgttgacatggaaaagatgctgtttgaggagcaaaatcatcttactgagagagagagagagttacaagctgagctggtcaaagtgaagcaacaggaacaagaaaaggtactgtaccttctcagccagctgcaacaatgccaaatggcagggaagccgccggaggagtcagttagtgaaaaggaaaagcagctgctgagcactctgaaatgtcaggatgaagaacttaagaagatgcaagaaatatgtgagcaaaatcagcagcttctccaagaaaacaatgccatcaagcagaaactggccctcctccaagtagccagcacacagaaaacccatcttatgaaaaatatccttcagtctccagactcttcctttgaatatattccacctaagcccagaccttgtcgaattaaagaaaaatgcccagaggaaagcttggacatcgaggcgctacagtgttattccgagcattcagtgactgaacaagagaatgatgacagtgatgattgtgctgatgaggagtggataccaccaaaattagtcaaggtgtccaagaagaacaaccaagggtgttcctgcaaaggctggtgtgggaacaagcaatgtgggtgcagaaagcaaaggtcagactgtaatgtggcctgcagctgtgaccccacaaagtgtcgcaacagacagcagagccaggataacgcagatgctattgagcaaacccaggattctgaaagctccttcaaactggaagatcccacagagatgacctcagaactaagcttcttcaaccctgtctgtgcaactcccaatagcaagatcctaaagatgtctgatgcagatcaggtgctgccaaggaggcctgttttagttccttcctctgaccacccagaactgaaatctatcttcagaatcccaagaaaataaagccatggggaagaagaagaagcgagctctagccagcaacaccagcttcttctctggctgctctcctatccaagaagagtcccactaaggctgtgtcatcatctctttcttctgtctgccatggacacactctcaggctgcagctcagagagaaagggcgctaatgacttctgtagttataggtcttgctatcgagagaagaagaaaagtgtcactgaaagaaagaggacctttgctgaatgttggcctttactgtctaagccctccaaccccaaacaactacttctccaaaaggtgctaagccatctatcggagagaaccaactgaccctcctggtgactcataaggcaccagtcctcagcacagtctagctctttctttgtgagcagttgaattgtctcctcatggagctgaggccaagatgttcctctcttatgggcatagcaacttaatggagaagcctcatgcaggatttaaacctggcccaactccctctctgcatctcaggaatggggctgggagttttcttgctccaatccaactctggattttaacagaacttttggatgtctgtcatgttactgaagtgaatagaaactaattttaaaaagttaagaaaataaataaaccttagctcatctact

SEQ ID NO: 1373 - DNA, 2299 bp, Cricetulus griseus
gctcctgtcgtgcctacgatctccgtgccgacgccagctacagcccagctgccactgaatatggactccgccagccaagatatcaacctgaattctcctaacaaaggtgtgctgtctgatttcatgactgatgtccctgttggcccaggtgtggcctcccgagctcaagctgtagagggcctgacagaggtggaggaagaagagctacgggctgagcttgctaaggtggaagaagaaatcatcactctgcgccaggtcctggcagctaaagagaggcactgtggagagctgaaaaggaggctgggcctctctactttaggggagctgaagcagaacctgtctaggagctggcatgatgtgcaggtctctactgcctatgtgaaaacgtctgagaaacttggagagtggaatgagaaagtgacccagtctgacctttacaagaagactcaagaaaccctttcacaggcaggacagaagacatctgctgcattgtccaccatgggctctgccatcagtaggaagctgggagacatgagcatgaggaactctgcaaccttcaagtcatttgaagaccgagtggggaccataaagtctaaggttgtgggtagcagagagaatggcagcgataacctcccttcctcacctggaagtggtgaccagccattatcggatcatgcccctttctaagcttgttatagcttatcagccacagaatacagaagcacaccctcatcatcacagctgcaactctgcatgacagagcaaccagccagggccagtgaagagctggttttgaagacagtcatacccatctacatgcagatgtggctgctgccttggcatgaattagagaacagtcttgtacataaatgttttacactaaagttcatagatgaagcagatcactgtgccatcctttccagggccacaggaagtggacagggtggaggggctcgaggagtattgaacaggagcaatgttccctttgctggtctcaccagaatgctgaggggaagaattgtcaggggtaataattgtcagcatttccttgcctgccctcctcaagcaatatactcaccgaggaatacatcccacagaggtatagtcctgcatgataatagtttttcagatagatttgagaaatgagagagttctctattttctgagaccctagaaaggaaacataagcaactgcttcattcttagaaaacaaccttgctttggcagaagcagatccactattttttaagtgtgatggacttttcaaaaattaaatagaaaaaaagtgaggcaaaacaactttagcctcattattgaaaaaatatttctttgaattcaagcttacatcaagccttacattgccttatgctttatttgtttatagtcttttttaatatccctataaatgagggttcttaaatgagttatgagtactatgtagagttttacctctggcccatctcatactctgccagtaccagttagtgcgttttatttctctaacactatctcctggtgtgcaaaacttggttcttttgaagaatggcatttcccagtagctttccactctggcacaaggctcttgtgctgtgtgtcaggagcattgagagaaggaaaaaagcctcagtctttggcatcttaatgggatatgccctgcacagtgttgctttactgacagtgagcagggctatggttcatagttcctgcctacctgtccattacacaaaaactaaatgaaaagcagaaccagccctgcaggtcagataggggatgtggttttggttcagccagaactctgctgtcatcttttctcaggagctacaaagatttctaagttcccttctcctgcctccaattgccacattctgcatcctctcaatgccagggccctgagtgttgggaggcatggtctggagggaggggcagcactgtgccttagtggctcttagcagggcaaatactttgtcttttgtgcacatttctgcactcctggagggggatggggtctgtccatttaagtgtctggtttgatccggtgtgatgtatcctttgattatcaagttccttggtttctttggatacccttagaatactgtaccacacaaagcaaggaacagtgaggaactggggagctgaagaagagatatcttggtgtcttctctttcaggattaaaaacaatagtgtgaggaggcaggctacaggagtgcaggtcactgatgtatcttcctacaaagaataacaggcaacttgtcaataaagcattcctttggaggaaaatccaaaaaaaaaaaaaaaaaa

SEQ ID NO: 1374 - DNA, 2299 bp, Cricetulus griseus
ctctggtgggctgcctggaatgcctggtatagaattggttctgaaagcacaaagccacctattacttttgataagctaacctttattcctagccagccttttctcacagctttaattcagattttcccagctctctaccagcacataaaagctggcttcaacatggatgacttacacaagttgggagtcatattgcacagtgctgtttcggtcccgataagttcagatgcatcccccttcatccttccatcttatactgaagcagttctaacaagtttacaggaagctgtactcacagctttagatgttctccaaaaggccatctgtgtgggaccagaaaacatgcagataatgtacccagctatatttgacctagttactggcatttgtcgagttctcgtgtaaacctccacagtatggacagctggaaacaaagcacattgcaaatgccataaagcagtggtgaatgagaaagtcctccagaacattattaagactctcagggttcctctcagtttgaagtattcctgcccttctgaaagcacatggaaactggcggtagcatctctcctcaaagtcctttccatcgggctgcctgttgcccgacagcatgcttcttctgggaaatttgacagcatgtggccagaattagccagcactcttgaagacttcctctttactaaaagcatacctccagataatctttctattcaagaatttcaaagaaatgaaagtattgatgttgaagtggtccagcttatcagtgcagagatactcccatacgccaatcttatccctagagcctttgtgggccagatgatgaccatgctcaacaggggctccatacactcccagtcctcctcattcacagaagcagagattgacatccgtttgagagaagaattttctaaaatgtgttttgaaacgttgctgcagttttccttcagtaacaaagtcaccacaccccaagaaggctacatctcacgaatggcgctgtctgtgctcttaaagaggtctcaggatgtcctgcatcgctacatagaggatgaaaggctaagtggaaagtgccctctgccaaggcaacaagtaacagaaatcatattgttttaaaagcagtcagtactctcattgattcacttaagaaaactcagcctgagaatgttgatggaaatacctgggcacaggtaattgccttatatccgactttggtagaatgtatcacgtgctcatcctcagaagtctgttgtgctcttaaggaggcactggttccctttaaggatttcatgcagccaccagcatccaaagttcaaaacggagagtcgtgaccagctggaaggacgctccttactgaagtcattctcggcagctcttgtttgccttctttaaattaaagtgtaattacctgggttcagtaattcatatagaagcatacatgtcaaccaaggctcctggaggaatcagagccttgtaatggtgatagcaatgggagggatagtgagctcgacatcatacctgctaccatatcttcagttggtgatttacaagtgagcttatgtacagtgtgtggtgtgtctgtcaatgatgtgctttttaaaaagcaagaagagatttccattcagatttttaaggctggtgttttgcaccctttttcaagtacagaattgtactaaagttttatgcaaggtggtactgtaacattccatattatctacagccagcctttgtgaacacaaagggaactgatatactgtgtgtataataaatggtacagttctgtataaaatagttgcatttatttaaaattttaaaatattgatgttaaatgcttgaagctgtatttattattaatacaaaattgtttgcttacatttttacttctgatttgccttcttatggggcagataagcttattgtgtaaccacacagttagctcatgctttttacgtccgttgttagtgtccagaggatcatgggaagaagcaggtgttaggatctgctgactttgcaccttggaaacacaggttgtaacgtaatatgctgagatacattgtagcacgatgacccaaatcatacctcatttctttaagcctctctggttaaggtaaaacaatggcatttcatagactgtgctatcagtgtttcttaaaggtgtaaaaaaaaaaaaataatagactcaagccgtgtattttttatattttgatatatttacttgtggatttaaacatagggatatcacggataaagtatcaaaataacaagggtgacattttcaaaatattgccatgagtttatataaagt

SEQ ID NO: 1375 - DNA, 2298 bp, Cricetulus griseus
tgctcggatccctgcagtttggctataacactggcgtcatcaatgccccccagaaggtaattgaggagttctacaaccagacatgggtccaccgctatggagagcccattgtgcccaccacactcaccacgctctggtccctctcggtggccatcttctccgtcgggggcatgattggttccttttctgtgggcctctttgttaatcgctttggcaggcggaactccatgctgatgatgaacctattggcctttgtgtctgctgtgctcatgggcttctccaaactgggcaagtcttttgagatgctgatcctgggccgcttcatcattggagtgtactgtggcctgaccactggctttgtgcccatgtatgtgggagaggtgtcacccacagctcttcgtggagccctaggcacgctgcaccagctgggcatcgtcgttggcatccttattgcccaggtgttcggcctggactccattatgggcaatgcagacttgtggcctctgctgctcagtatcatcttcgtcccagccctgctacagtgcatcctgttgcccttctgccccgagagcccccgcttcctgctcatcaatcgcaacgaggaaaaccgggccaagagtgtgctgaagaagcttcgagggacagccgatgtgacccgagacctgcaggagatgaaagaagagggtcggcagatgatgagggagaagaaggtcaccatcctggagctgttccgctcagccgcctaccgccagcccatcctcattgctgtggtgctgcagctgtcccagcagctgtcgggcatcaatgctgtgttctattactcaacgagcatcttcgagaaggcaggcgtgcagcagcctgtgtatgccaccatcggctcgggtatcgtcaacacagccttcactgtggtgtcgctgttcgtggtagagcgagctggacgacggactctgcacctcattggcctggctggcatggcaggctgtgctgtactcatgaccatcgcactggccctgctggaacagctgccctggatgtcctatctgagcatcgtggccatctttggctttgtggccttctttgaagtaggccctggtcccatcccatggttcattgtggccgagctgttcagccaggggcctcgtcctgctgctattgctgtggctggcttctccaactggacctcaaatttcatcgtgggcatgtgcttccagtatgtggagcaactgtgtggcccctatgtcttcatcatcttcacggtgctcctggtgctgttcttcatcttcacctacttcaaagttcctgagaccaaaggccggaccttcgatgagatcgcttctggcttccggcaggggggtgcaagccaaagtgacaagacacctgaggagctgttccaccctctgggggctgactcccaagtgtgaggagccccacacccagcccggcctactcccagcagccccaagaatctctggagcaaaggcagctagatgagacctcttccaaactgacagatctcaggcgagccgggcttgggagcctttcttcagccagcgatgatgtccggaagaatattcaggacttggatggctccagaattttaatgaaagcaagactgttgctcaaatctgttcagataagcaacaggttttataatttttttattactgattttgttattttttttttttatcagccactctcctatcttcacaccctagtcttcaccttgaatggctcagtgcctgagggtggggacaaagccctgtccagacacatgccttcttcaccaagctaatctgtagggctggacctatgaccaaggacacactaatcgaactatgaactatgaggctttaccccaggaggtggttgctgccacccccttccgcaggcctggatctccccaccataggggtcgggctccattttaggattcgcccattcctatctcttccttcccaaccactgaattaatctttccttgcctgagaccagttggaagcactggaatgcagggaggagaggggaagggccagactgggctgccaggttctagtctcctgtgcactgagggccagacatcaccatgagaagggcctcggaggctgagaactcactgctgaagacacggacactcctgccctgctgtgtatagatggaagatatttatatattttttggttgtcaatattaaatacagacactaagttatagtatatctggacaaacccacttgtaaatacaccaacatactcctgtaactttacctaagcaatataaatggctggtttttagaaa

SEQ ID NO: 1376 - DNA, 2298 bp, Cricetulus griseus
gacctctgcttgccccgctctgcaacgggatccacaactcctacgaggacaaaagcaacgacttcgtctgccccatctgctttgatatgattgaggaggcgtacatgacaaaatgtggccacagcttttgctacaagtgtattcatcagagtttggaggacaataataatagatgtcccaagtgtaattatgttgtggacaatattgaccatctctatcctaatttcttggtgaatgagctcattctcaaacagaagcaaagatttgaggaaaagaggttcaaattggaccactcagtgagtagcaccaatgggcataggtggcaaatatttcaagatttgctaggaactgatcaggataaccttgatttggccaatgtcaaccttatgttggaattactagtgcagaagaagaaacaactggaagcagaatcacatgcagctcagcttcagatccttatggaattcctcaaggttgcaaggagaaataagagagagcaattggaacagatccagaaggaactaaaatgttttggaagaggatattaaaagagtggaagaaatgagtggtttgtactctcctgtcagtgaagatagcacagtgcctcagtttgaagctccttctccatcacacagtagtattattgattctacagaatacagccaaccttcaggtttcagtgggacttctcagacaaagaaacaaccttggtataacagcacattagcatccagacgaaagcgactcactgctcattttgaagacttagagcagtgttatttttctacaaggatgtctcgtatctcagatgacagtagaactgcaagccagttagatgaatttcaggaatgtctgtccaagtttactcggtacaactctgtaagaccattggccacattgtcatatgctagtgatctctataatggttccagcatagtttctagtattgaatttgaccgggattgtgactattttgcaattgctggggttacaaagaagattaaagtctatgaatatggcacagtcatccaggatgcagtggatattcattaccctgagaatgaaatgacctgcaattccaaaatcagctgtatcagttggagtagttaccataagaacctgctagccagcagtgattatgaaggcactgttatactatgggatggattcacaggacagagatcaaaggtctatcaggaacatgaaaagagatgttggagtgttgactttaatttgatggatcctaaacttttggcctcaggttctgatgatgcaaaagtgaagctgtggtctaccaatttagacaattccgtggcaagcattgaggcaaaggctaatgtatgctgtgtgaaattcagcccctcctccagataccatttggcttttggctgtgcagatcactgtgttcactactatgatctccgtaacactaagcagccaataatggtattcaagggacacagaaaagcagtctcttatgccaagtttgttagtggtgaagaaattgtctctgcctcaacagacagccaactaaaactgtggaatgtggggaaaccatattgtttgcgttccttcaagggtcatattaatgaaaaaaacttcgtaggacttgcttccaatggagattatatagcttgtggaagtgagaacaactccctctacctgtactataaaggactttctaagactttgctgacttttaagtttgatacagttaagagcgttctggacaaagaccggaaagaagatgatacaaatgaatttgtcagtgcagtgtgttggcgggcactatcagacggggagtccaatgtgctgattgctgctaacagccagggtacaattaaggtgctagaattggtgtaaagggtttcctgaagtcaaatcgtgtttgctcctcctgaaaaccacctagagctgatgagaaaagaaaggaaatggcaagtgatgtctttccagagtcatcctgggttttggatttgttctgagtaccttttcctccttttatgccattgggacattgggaatacccagagaattctccgccatcagtgtatctatgaactttgctgttggctgtgtggctaatttttgtgatagggaaacaaattcttttaaataaaaataaataaaaaataataaaagtttattgagccacaactgagctgggaatgcctttgtcaggcgtggtgagagtcttttgaagaagtagcacatgtgggctttagagaatgttctggctggggttaaggaaaggaggctcgagtgaacaagagcactggctgctccgtacaaaggatc

SEQ ID NO: 1377 - DNA, 2298 bp, Cricetulus griseus
attgggaacaacaaagtacagctacattgctgattgttggccttccgggggctttccagtttaaagactttggatctgaaaataatgaaatctcatggaccattgaagacatgaatggagccttctctgggctggacaaattgaggcgtctaatactccagggaaaccgcattcgatctgttaccaaaaaggccttcactggtttggacgcattggaacatctagacctgagtgacaacgccatcatgtctctgcaaagcaatgcgttttcccaaatgaagaaacttcagcaactgcatttaaatacatcaagccttttgtgtgattgccagctaaaatggctcccacagtgggtgttggagaataacttccagagcttcataaatgccagttgcgcccaccctcagatgctaaaagggagaagtatttttactgtcagcccagacggctttgtgtgtgatgatttgccggggccatggcccgcctggagtgtgctgccgtaggacaccctgcaccacagatagcctggcagaaggatggaggcacagacttcccagctgcccgggagcggcgtatgcacgtgatgcctgaggatgacgtcttcttcatagtggatgtgaagatcgaagacatcggggtatacagctgcactgctcagaacagtgcgggcagtgtttccgcgaatgcgaccctgactgtgctagagacaccatcatttttgcggcctctgttggacagaactgtcaccaagggagaaacagcggtcctgcagtgcatcgctggtgggagcccaccgcccaggctgaactggacaaaagatgacagcccattggtggtgaccgagaggcacttttttgcagcaggcaatcagctgctgatcatcgtggactcggatgtcagcgatgccggaaagtacacgtgtgaaatgtccaataccctgggcaccgagagaggcaacatgcgtctcagtgtgattccctctcccacctgcgactcccctcacatgaccgccccgtccttagacgatgacggatgggccaccgtgggcgtcgtgatcatagccgtggtttgctgtgtggtaggcacatccctcgtgtgggtggtcatcatataccacacaaggcggaggaatgaagactgcagtattaccaacacagatgagaccaatttgccggccgatatccctagttatttgtcatctcagggaacattagctgagagacaggatgggtacatctcctcagaaagcggaagtcaccaccagttcgttacttcttcaggaggtggatttttctcaccgcaacatgacggtgctgggacctgccacatggacaacagcagtgaaaccgacatggaagccacccctgatccatttctctgcccatttgcgggctccacaggtcccgtgtacttgaagggaagtatatacagcccagatccgtttgacgtttatctcccaggttgcagttccgacccaaggatagctctaatggaccactatgagccctgctacatgaagaaagactgcttcccatgtgctcacccctcagacgagccctgtgaacggagcctcaacagcatcccgtggccacactcaagaaagctcgtgaactccatgtactctcagaatgagggagctgcggttcagactccatgtttaaacaagtcctctttggattttagcgcaagtcaggagccagcattggttacttcaagtaactctttcatgggtacctttggaaaacctctgaggagacctcacctggatgccttttcaagctttgcaaagccaccagactgtcagccgagcccctttcgtgtgacaacactttcctctccagagtcggactctgagtcagaggaagctgagaaaaaaggacagatccccgggaggaaaatcacagatgtacttaccaacagatattagacactcacaggactccagactgccagccttgtgacttgaacacatagactggatgggtccagaggaaatcttctacacactacctcatctgggcttctatttaaaagagacagaatgctatgttttaaatggacttacaaagtttaaaaaggaaaaaaaatgctttatttatacagaggaacaaaaattacaaaaagttataaaaattttttataccgggaataactttcatataaaaaatgcgtttttaaaaagtattttataactttgttttatatgaaaatatcttatgtaaattaatggtataagtccatgattattttatgtatttttataaagccagatttctttttattgaaaaaaaaaaaaaa

SEQ ID NO: 1378 - DNA, 2296 bp, Cricetulus griseus
caaagttgtgactcctttggaagctcggaatcggatctttttgtttcagccaaggaagttctcaactcccgaaagcataaagcccaggggatgccagaaggtggcggggcacttgcggaaggatttcaggcaagattacaagagtttcagaattttgaaaaaacttttgaggagtgtatctcgcagtcagcagtgaaaacaaagtttgaacagcacactatcagagctaaacagatactagacactgtgaaaaacatactggactcagtaaacgtggcagcagcagagaagagggtttattcaatggaagagagggaagaccagattgatagactggattttatccgaaaccagatgaacctcttaacactggatgttaagaagaaaatacaagcaggtcacagaggaggtggacaaacaaggttcttgtgcaatgacagatgaaattttgtcgacttgtctgttttggttgatgagtttttgttctgagtttcatcctacccccagtgtactgaaagtgtataagagtgaattaaataagcatatagaagatggtatgggaagaaatttggctgatcggtgtaccaatgaagtcaatgcctccatgcttcagtctcaacaagaaattatcgaaaacttgaagccattacttccagctggtatacagaataaacttcatgcactaatcccttgcaaaaagtttgatctcagctatgatctcaatttccacaagttgtgttcggattttcaagaggacattgtgtttagattttccctgggctggtcttccctggtgcatcgattcctgggctcctcaaatgcacagagggtgctgcttgggctctcagagcctgtctttcagctccctagatctctagcttcaactcccactgctcctcctaatccagcagcaccagataatgcagcccaggaagagctcatgatcaccttgatcacaggattggcatccctcacatctcggacctccatgggcatcatcgttgttgggggcgtgatctggaaaacagtgggctggaaactcatctctgtgtccttaagtatgtatggagctttgtatctttatgaaaggctgacctggactaaccgtgctaaagagagagcatttaagcagcagtttgtgaactatgcaaccgaaaagctgcagatgattgtgagcttcacaagtgcaaactgcagctaccaagtacagcaagaaatggctaccacttttgctcgactgtgccaacaagttgatgtgactcagaaacatctggaagaagaaattgctagattatccaaagaaatagatcagctggagaaaatacaaaacaactcaaagctcttaagaaataaagccgttcaacttgaaagtgagctggagaacttctcgaagcagtttttacacccaagcaatgaagaatcttaactgtagaaggaagcggacttggaagatgggagagctatttttatgaaatgacctcagtatgaattactaactctgaatatcgatgccttgctgagactgtggtaatgacctgtctcaagggatttgcactttttgaagtgacatgatacgtcattagctgtagcctggagtaaagactgaactgtttgggttgaatgatggattcctttagaaacagtggaacacactgtgtagcccctgagggtgggtcctgcagctcctaaccagggctttctgtctttgattctgagtaactgcttcctggcatccaggagttacagatcttttcatcttccttcaccagttcttgatgccctttctttagtgggaatactgaatttgtttataagctgatttgttcaaaccagggagtgtgggctgctcctgagtgtcctacggtcactttgccctcatagcaaggatgtaaccactactaaacacagtttttaccctttcttttattcccattaaaactgatgtgaaatagtagttttcgagacagggtttctctgtgtagctttggagcctatcctggcactcgctctggagaccaggctggccttgaactcacagagatccgcctgcctctgttgagaacagagtgttgaaatactgggagccagcatctctaccatgcaagagtgcacctgtgctggctgggctcaggcattgcacagaatgtaatcatgactgttactgctcagttactacgcacatacttgatgatttactgtgtatgtttacagtatcatttataaactttgtatgatcttaactttttataaaacatttttataagtatgcaaacttacaagatgaaaataaacctat

SEQ ID NO: 1379 - DNA, 2296 bp, Cricetulus griseus
gggatggccgcggagccgggtggaagtgctccgaggctccgggagccggctctcggggccgagacatggcccggggccccggacagctaagcgggccgcattcggacactgtcgccatgcccaagagaggaaagcggctcaagttccgggcccacgacgcctgctcgggccgagtgaccgtggccgattatgccaactcggatccggcggtggtgaggtctggacgggtcaagaaagccgtggccaacgctgttcagcaggaagtaaaatctctttgtggcttggaagcctcccaggttcctgcagaggaggctctttctggggtgggtgagccgtctgacgtcatggacagcagtgatgagatggatgctcaggaggaaagcactcatgaaagatcagtctccaagaaaaaagaaaagcaagagacacaaagaggacctggatggggctggagaagagtatcctatggatatttggctgttgctggcttcctatatccgtcctgaggacattgtgaattttccctgatttgtaagaatgcttggactgtcacttgcactgcagccttttggaccaggttgtaccgaaggcactacacgctggatgcttctctgcctttgcggcttcgaccagagtccatggagaagctgcgctgtctccgggcatgtgtgatccggtctctataccatatgtatgaaccatttgctgctcgaatctccaagaatccagccattccagaaagcactcccagcacactaaagaattccaaatgcttacttttctggtgcagaaagattgttgggagcagacaagaaccaatgtgggagttcaacttcaagttcaaaaagcagtcccctagattaaagagcaagtgtatggaacggttgcaaccacccattcaatatgaggatgttcataccaacccggaccaggactgctgcctgctgcaggtcaccaccctcaatttcatctttattcctattgtcatggggatgatatttaccttgtttactattaacgtgagtacagacatgcggcatcatcgagtgaggttggtgttccaagactctcctgtccgtggtggtcagaatctgcgcagtgaacagggtgtgcaagtcgtcctggacccagtacacagtgttcggctctttgactggtggcatccacagtatccattctccctaagagcatagttactgctgcccattccatgggacagcttccggtctagtctgttagtaatcagattctgtttggaggggcagctggattgtatacctgattagtgatgcacatgctgtttgggttcctggagctcctattactggaggtggaaaggttgaatcaagaggaaaaacaagtatgatttttaaacattttaatgtaaagtttgcatatttcaaaggagaaacctggcctcattttctgtgttaaaccccaactggtgctgttgagtttgttctttattcttttatctcaacaaagatggatgatcttgcactagggaaaaattagattcttacttttcaagcaaggaagttttcccttatggatcagaggaacccagaggtttaaaatggttgctccattgttgctgctcctcaaattcaagtgaattattttttttcttttccctctacccttctccagaaataaagcaggtgatagggttgtcagaatcttataagattgacttgtgcattactttttaaaaaagcttttcggatatttattacatgaatattgattggtttgctgtattttgtatttgggggtttttgtttaaattgcagtgatggcaatgattatgtgcccctggtactgttctaagaacttaatatattgtgtctctaacccttgtgtctttcaaggtagttgaaacctttctcattttatggttgagaagctgaatcattgacttaccaaggccagaactgctggtccatgcagggcgaggattctgacccatgtcttcttttgctataccacaacttcaaagggcagtcatttttcttgtggtacatagtagtaaaaaggagtaggcagaacatgaataaaaaaaaaaagagagatagaatgagttagtttgaatctttcacatagacatgtattaactgaaaaggtaaaacagttgaggaagaattgtgtttgcattaaattgttagaaaacctttattatgctaaaggtcattttcaaaaaaagcaattagtggcttttctctgccctgtcctgtactttgcagcctttgtttttcgtttaaaaatcatcctgtgtggtttaagaagcctggtcttc

SEQ ID NO: 1380 - DNA, 2294 bp, Cricetulus griseus
ggctgctctggataaggctagagaaggccggactaccattgtgatagcccaccgcttgtctacagttcgaaatgctgacatcatagctgggtttgatggtggtgtcattgtggagcaaggaaatcatgaagagctcatgagagagaagggcatttacttcaaacttgtcatgacacagacagcaggaatgaaattgaattaggaaatgaagttggtgagtctaaaaatgaaattgataatttagacatgtcttcaaaagattcagcatccagtctaatcagaaggagatcaactcgcagaagtatccgtggaccacatgaccaagacaggaagcttagtaaccaaagaggccttggaaagttgaattcatctgaatggccatattttgtggttggtatattctgtgccatagtaaatggagccttgcaaccagcattctcaataatattttctaaggttgtaggggttttcacaaggaatactgatgatgaaaccaaacgacatgatagcaacttgttttccttattgtttctgatccttggggtcatttcttttattacattttttcttcagggcttcacatttggcaaagctggagagatcctcaccaagcgactccgatacatggttttcaaatccatgctgagacaggatgtgagctggtttgataaccctaaaaacaccactggagcattgaccaccaggctcgccaacgatgccgctaatgttaaaggggctatgagttcaaggcttgctggaattacccagaatgtagcaaatcttgggacaggaatcatcatatccctaatctatggctggcagttaacacttctactcttagcaattgtccccatcattgcaatagcaggagtggttgagatgaaaatgttgtctggacaagcactaaaagataagaaggagctagaaggttctgggaagattgctactgaagcaatagagaacttccgcactgtcgtctctttgactcgggagcagaagtttgaaaatatgtatgcccagagcttgcagataccatacagaaatgctctgaagaaagcacacgtctttgggatcacattctccttcacccaggccatgatgtatttttcgtatgctgcttgtttccggtttggtgcttacttggtggcacgggaattaatgacatttgaaaatgttctattagtattctcagctattgtctttggtgccatggcagttgggcaggtcagttcatttgctcctgactatgccaaagccaaagtgtcggcatcgcatatcatcatgatcattgaaaaagtcccttccattgacagctacagcaccggaggcctgaagcctaatacattggaaggaaatgtgaaatttaatgaagtcgtgttcaactaccccacccggcctgacatcccagtgcttcaggggctgaacctggaggtgaagaagggccagacgctggccctggtgggcagcagtggctgcgggaagagcacagtggtccagctgctcgagcggttctacgaccccatggccggaacagtgtttctagatggcaaagaagtaaaccaactaaatgtccagtggctccgagcacacctaggcattgtgtcccaagagcccatcctgtttgactgcagcatcgctgagaacatcgcttatggagacaacagccgggtcgtgtcccaggatgagatcgagagggcggcgaaggaagccaacatccaccagttcattgagtcactgcctgacaaatacaacaccagagtaggagacaaagggactcagctgtcgggtgggcagaaacaacgcatcgccatagcacgcgccctcgtcagacagcctcacattttgctcctggatgaagcaacatcagccctggatacagagagtgaaaaggttgtccaggaagctctggacaaagccagagaaggccgcacctgcattgtgatcgctcaccgcctgtccaccatccagaacgcagacttgatcgtggtgattcagaatggcaaggtcaaggagcatggcacccaccagcagctgctggcacagaaaggcatctatttctccatggtcagtgtgcaggctggagcaaagcgctagtgaactgtgactgtttgaaatgctaagtgtttttatttaaattgcactataaaattatacaagaattaaaagtaaatgtttcataatatatacttttatttatactttctcatttgtaactataactgatttccttgctaaacaaatcatgtgtgtatcaaaaattaatgaaatgtttgtataaagtatatatagtgaaa

SEQ ID NO: 1381 - DNA, 2294 bp, Cricetulus griseus
  modified_base (40)..(40): a, c, t, g, unknown or other
ctggctgcctgctctatcgccctggcaaggatcagggctntacctgaaggagctgatcgagccagtactgacctgctttaacgatgcagacagtaggctgcgctactacgcttgcgaggccctctacaacatcgtcaaagtggcccgaggcgctgtgctgccacacttcaatgtgctgtttgacgggctgagtaagttggctgctgacccagaccccaatgtgaaaagtggatctgaacttctagaccgacttttaaaggacattgtgacagaaagcaacaagtttgacctggtgggcttcatcccccttttgcgggagaggatttactccaacaaccaatacgcccggcagttcatcatctcgtggatcctggttctggtgtcggtgccggacattaacctgctggattacctgccggagatcctggatgggctcttccagatcctgggtgacaatggcaaagagattcgtgtgtaaccagagcctgatgaagctggtcactcccgaggatgatgagccagatgagccaaagcccgtagcacagaggcagacagaacccaaccctgaggactccctgccaaagcaggagggacgagcgtaatggagttccaggtggttcctgtgactccagctttggaagtggcatcagtgtctttacctcagccagcactgacagggctccagtgaccctacacctggatgggattgtgcaagtcctgaactgccacctcagtgacacagccattggaatgatgaccaggattgccgttctgaagtggctttaccatctctacatcaaaactccccgcaagatgttccggcacacagacagcctcttccctatcctacttcagacattatctgatgaatccgatgaggttgtcttgaaggatctggaggtattggcagaaattgcttcctcccctgcaggccagacggatgacccaggcactcctgatggtcctgacttccgagtcagccactcggagcttcgggtgcccagctccagcagagccaacctgctaaaccctcccagtaccaaaggcttagaatgttctccttccactcccaccatgaactcctacttttacaagttcatgatcaaccttctgcagacattcagcagtgaacggaagctcctggaggccagaggcccattcatcatcaggcagctctgcctcctgctgaacgcagagaacatcttccactctatggcagacatcttgcttcgggaggaggacctcaagttcgcgtccactatggtgcacacactcaacactatcctgctcacctccactgaactcttccagctgagaaaccagctcaaggacctgaagactctggaaagccagaacctcttctgctgcctgtatcgctcctggtgccacaacccagtcaccaccgtgtcactctgtttcctcacccagaactaccgacacgcctatgacctcatccagaagtttggggacctggaagtcaccgtggacttcctcacagaggtggacaaattggtgcagctgattgagtgtcccatctttacatatctacgcctacaactgctggatgtgaagaacaacccatacctgatcaaggccctgtatggcctgcttatgctgctgccccagagcagtgccttccagctgctctctcaccggctccagtgtgtgcccaacccggagctgctgcagactgaagacagtctgaaagctgcccccaagtcccagaaaggtgactcccccagcattgactacacagagctactgcagcacttcgagaaagtccagaaacagcacctggaagtaagacaccagcgcagtgggcgtggcgatcacctggaccgcagagttgtcctctgatgtgcctgtcgtgaaaagggcccaggtggcccatgaagcacccagggtctccagcctgaggccacaagatgcctgagaacctgcctcaggcagggctggacctgaccaccagcccagtatagggagggaccgtctgctctgtcaactctagctcctcccagtggagtgcctggacccgagcactgtcagctacacctggcttgggaccaagggcttccctcctgagtcaggccatagcctcagaacccagaaggaaccttctttctagtccccctgtgagaagagcttgtccttggccccaaagcactggcatggtgtgtatgtatgtgtagatcttcgtggataatgcacacgggccagcacaaagacctctacagaatgatgtccatccctgccccaataaaagaaatgacagaatcctaaaaaaaaaaaaaaaa

SEQ ID NO: 1382 - DNA, 2293 bp, Cricetulus griseus
tcagctgcctcacaggaagatgctgtgtggatggggtggccccagtgtgggtgtgtgtatgcgcacagcactgggagtgctgtacttctgcctcacaggagctgtggaggtccaagtctctgaagaccctgtggtggcgttggtggatgctgatgccaccctccgctgctccttttctctggagcctggcttcagtctggcacagctcaacctcatctggcagctgacagacaccaaacagctggtgcacagctttactgaggggcgggaccaaggcagtgcctatgccaaccgcacagcactcttccctgagttgttggagcagggcaatgcatccttgcggctgcagcgcgtccgagtaaccgatgagggcagctacacgtgctttgtgagcatccaggactttgacagtgctgctgttagccttcaggtggcagctccctactcgaagcccagcatgactctggagcccaacaaaagaccttcgtcctgggaacatagtgaccatcacgtgctccagctaccagggctatcccgaggctgaggtgctttggaaggatgggcagggactgcccttgactggcaatgtgaccacatcccagatggccaatgagcggggcttgtttgatgttcacagcgtgctgagggtggtgctgggtgctaatggcatctatagctgcctggtacgcaacccggtgttgcagcaagatgctcatggctcagtcaccatcacagggcagcctatggcattcccccctgaggctctatgggtgaccgtggggctctctgtctgtcttgtggtactgctggtggccttggcctttgtgtgctggaggaaaatcaagcagagctgtgaggaggagaatgcaggcgctgaggaccaggatggggatggagaaggatccaagacagctctgcggcctctgaaacactctgaaaacaaagaagatgatggacaagaaatagcctgactgggagctgctgccttttcccaggtggggggcccacaccccacctgtgttgagcctcaatgtgagccctaaccccaacaaatgggttctgctatgctggtctacccattcttcaaaggaagtggtacataggccaccctcagccttatttctctgatggacttaattcccatcatcctgcagccttatttttccactgacacgatacaggaaccatcctgcggccttatatggacatgacacacagaccgatccacctcagtgttcctccagagtcatccagtagccttgtaaccctgccttatgtatctgaagctagctgcacaatcgcctcttggcttttctcatggccctgatacatctatgttaccacttctcaacctttgttctgacgagtgtggatcccgtctcttcagcatctcccaagtcttcatcccgactcccctacctttggcttggctttggttgtctccctccctggctaagtgtgatggggcacactccccatccacacacacacacatgtacattgataccggcagctgcacgtgctggaacgcgtgcagacttgtattgcatgatctcctctggctgccctgggctgtgcccattccccccacaggaagcaggtactagtttccctggttctcagggccctcagggggtcagccttcatccctgtgctttcccatgtttggaatctttgttacttttactttcttagtaaactaacatctgttctggatacctcatcctcagcccacactagccctgacctggggtaggggaagaaacctagagaaagcacagtcctttaccatacatggagaactgggtgttttctagaatctttctagatgtggactggaaggcaggtggccacagccatgcagacctggataggggcagcaacctatgacatattgggatctcaacagttggagcctggggcaggccaagagggcctgaggacaagaaaggactgcttcttaccatggtgctattctggagctggggcttgtacctggcttgtctctgacagcccggatgctggcagagcagaacttctgatgtccccctgaaggcatcctcccccaccccagtgctagagaatgtgaggataatttaaacatggactctggccaggtgtggtggtgcatacctttatttcccagcacttgggaggcaaaggcaggacagagtgagtcccagtacaactggggcgacacagaaaaaccatcttaaaaggcaaaacaaaaacgaaacatgggactctgtaaactgggtatatttggggagaaataaatgcctttgtctttcaa

SEQ ID NO: 1383 - DNA, 2293 bp, Cricetulus griseus
gaagaaagaagaggaaagaagaggaaggaaaaaaaggaaaactgatcagaagaaggaaggctgctgtttctatgcaagaagaatctgatcttgaaaagaaaagaagagaagctgaggcactgcttcaaagcatggggctaactacagattcccctattgtccctcctcctatgtctccatcctccaaatctgtgagcacaccaagtgaagctggaagccaagattctggagatggtgccgtgggatctagacgaggacctattaaacttggaatggccaaaattactcaagtggactttccccctcgagaaatcgtcacatatacaaaggagactcagaccccagttacagctcaacccaaagaagatgaggaggaggaagatgatgtaacaactcctaaacctcctgttgaacctgaagaagagaaaccatttaaaaaagatgaagagagcgataacaaagctccccctcatgaactaactgaagaagaaaaagcaacaaattttacactcagaggaatttttaagtttctttgaccattccacaagaattgtagaaagagccctttctgagcagatcaacatcttctttgactatagtggcagagatttggaagacaaagaaggagagattcaagcaggtgctaagctatcattaaatcgacaattttttgatgagcgttggtcaaagcatcgagttgttagctgtttggattggtcatcccagtatccagagttacttgtggcttcctataataacaatgaagaggctcctcatgagcctgatggtgtggcccttgtgtggaatatgaagtacaaaaagactaccccagagtatgtgttccactgccagtcagctgtaatgtctgctacatttgcaaaatttcatccaaatcttgtcgttggtggtacatattcaggccaaattgtgctttgggataaccgtagcaataaaagaactcccgtgcaaagaactccactgtcagctgctgcacacacacaccctgtctactgtgtgaatgttgttggaacacaaaatgctcataatctaattagcatctctactgatgggaaaatttgctcctggagtttggacatgctttcccacccacaggatagcatggagttggttcataaacagtcaaaggcagtagctgtaacttcaatgtccttccctgttggagatgtcaacaactttgttgtgggtagtgaagaaggttctgtatatacagcatgccgccacggcagcaaagctggaatcagtgagatgtttgagggacatcagggacccatcactggaatccactgtcatgcggctgttggagcagtagacttctcacatctgtttgtcacttcttcatttgactggacagtaaaactttggacaactaagaataacaagcctttgtactcatttgaagataattccgactatgtttatgatgttatgtggtcacccacccacccagccctgtttgcctgtgtggatggcatggggagactggatctgtggaatctcaacaatgacacagaggtaccgactgccagcatttctgtggagggaaacccggctcttaaccgtgtgagatggacccagtcaggaagagagattgccgtgggcgattctgaaggacagattatcatatatgatgtgggagagcagatcgctgttccccgaaatgatgaatgggcaagatttggccgaacacttgcagaaattaatgcaaaccgagctgatgcagaggaggaggcggctgctcgaatccctgcctagccatgaaaaaagttggcacagatgattaagtacatcctaaactatttgcatgcttctgattaaatgagtattaaaaggaaattccatggataaactgggtttaatgcaggaaacaaaacttacaatgccccttttatattatattcatttcgttttggattggtgtcatttttaataccgctgacgactttacagaatgcagccttttctgaattctaacgaataggtgtatattgttaattattcttttggattcttttcaacttgtaatactatatataattatttctaaagcacagactaaataagttctgcatatttctaaataaccacaattccttattatgcaatacagtaataattccttgttgattatgttctcgctgcctttgctgtgtagcaacattgttcttagtcccagcatgcattcaccgacccttttcaagtttcattttgatgcccttctccttctctataattctacagtagttatctataaataaaaacaaatatatgttaa

SEQ ID NO: 1384 - DNA, 2293 bp, Cricetulus griseus
ggctgtttgcggctcttgggaccgaggcatggcgcgcgagctgcgggctgtgctgctgtggggtcgcgggctgcagactacactgcgtgctcccgcgctagcgggcgtccgacgaggaaagcccgttctgcatcttcagaggaccacagtccaggttaagggccgcatacaatgcctggcttcacggatctctacaggacagttgtacagcacacaggcagcagaggacaagaaggaagaggccctgcactccatcatcaacagcactgaggctgtgcagggttctgtctccaaacatgagtttcaggcagagacaaagaaacttttggacattgtggcccgttccttgtactcagaaaaagaggtgtttattcgagagctcatctccaatgccagtgatgccttggagaaactgcggcacaagctggtgtctgaaggccaggtactgccagagatggagattcatcttcagactgatgctgagaagggcaccatcaccatccaggacactggcattgggatgacacaggaggagctggtgtctaacctaggaacaatcgccagatcggggtcaaaggccttcctggaagcactgcagaaccaggcagagaccagcagcaagatcattggccagtttggagtgggtttctattcagccttcatggtggctgacaaagttgaagtctattcccgctcggcagccccagacagcccaggttaccagtggctttcagatggttctggagtgtttgaaatcgccgaagcttcaggagttagacctgggaccaaaataatcatccacctcaagtcagactgcaaggattttgctaacgagtcccgggtacaagatgtggtgacaaagtacagtaactttgtcagcttccccttgtaccttaatggaaggcggattaacactttgcaggccatctggatgatggacccaaaagacataagcgagttgcagcatgaggaattctaccgttacgttgctcaggcttatgacaaaccccgcttcactttgcactacaagacggacgcaccactcaacatccgcagcatcttctatgtgccagagacgaaaccatccatgtttgacgtgagcagggagctgggctccagcgtggcactgtatagccgcaaggtccttatccagaccaaggctacagatatcctgcccaagtggctgcgcttcgttcgaggtgtggtggacagtgaggacattcccctgaacctcagccgagaactcctgcaggagagcgcactcatccggaaactccgggatgttctacagcagagactgatcaagttcttccttgaccagagtaaaaaagatgctgaaaaatacgccaaattttttgaagattatggcttgttcatgagggagggcattgtgaccactgcagagcaaaacatcaaggaggacattgcgaagctgctacggtatgagtcctcagccctgcctgctgggcagctgaccagtctatcagactatgccagccgaatgcaggctggcacccgcaacatctattacctgtgtgcccctaaccgtcacctggctgagcattcaccgtactacgaggccatgaagcagaaacaaacagaggtactcttctgctacgagcaatttgatgagcttactttgctgcacctgagggaattcgacaagaagaagctgatctctgtggagacagacatcgtcgttgaccactataaggaggaaaagtttgaggatacatctccagctggtgaatgcctgcctgagaaggaaacagaagagctaatggcttggatgagaaacgcactgggttctcgtgtcaccaacgtgaaggtgactttccgcctggacacccaccctgccatggtgacggtgctggagatgggggctgctcgccacttcctgcgaatgcagcagctggccaagacccaggaggaacgtgctcaactgctacaacccactctggagatcaaccccaggcacacactaataaagaagctcagtcagctgagagagcgggagccggagctggcccagctgctggtggatcagatctatgagaacgccatgatagcagcaggactcgttgatgacccccggcccatggttggccgcctgaacgaccttctggtcaaggccctagagaaacattgacagcccagagactgcgcctagtatgcaacccaggtcttctcaggtgacagatggagctgcctggggaggaaggacttgatatacagataatgccactgcttgagctcagctttatttacctcaattaaaccggatttcttagtc

SEQ ID NO: 1385 - DNA, 2293 bp, Cricetulus griseus
gcgtgagctgccacccccagcaccacctgcaggtattacgcgctccaagtccaagcatgagctgaagctgctggagaagatccctgagaatgctgaggctacagtggtccttgtgggctgtgtggagttcctttctcgccccaccatggccttcgtgcgtctgcgggaggctgtggagctggatgcagtcctggaggtgcctgtacctgtgcgtttcctcttcctcctactgggtcccagcagtgccaacatggactaccatgagattggccgctccatctccacgctcatgtctgacaagcaattccatgaggcagcttacctggcagatgaacgggacgacttgctgactgctatcaacgccttcctggactgcagtgtggtgctgccaccttcagaagtgcagggcgaggagctgctgcgttctgttagaagagagaggagcagggccgcctgctgccccctggggctgggctagagcccaagtctgcccaagataaggcgctcctgcagatggtagaggtggtaggtgcagctgaagatgatccccttcggaggacgggccggccctttgggggctgattcgtgacgtgcggcgccgatacccccactacctgagtgacttccgtgatgcacttgacccccagtgcctggctgctgttatcttcatctactttgctgcactgtctcctgccatcacttttgggggctactgggagagaagacacaggacctgataggagtatcagaactgatcatgtccacagcacttcagggtgtgatcttctgcctgctgggggctcagccattgctggtgattggcttctctggacctcttttggtctttgaggaggccttcttctcgttctgcagtagcaaccagttggagtacttggtgggccgagtgtggattggcttctggcttggttgttcctggccctgctcatggtggctctggagggaagcttcctggttacgctttgtctcccgattcaccccaggagatctttgccttcctcatatccctcatcttcatctatgagaccttctacaagctgattaagatcttccaggagcatcccccttcatggctgctcagtctccaacgactcagaggcagacagcagcagtggcaatatgacttgggcagcaaccatgctggtgccagacaacagcagcaccgtcctgccgtctgggcaggagaggctccggggccagcccaacaccgccttgctgtcactggtgctgatggccggcaccttcttcatcgccttctttctacgcaaattcaagaacagccggttcttccctggccggatccggcgggtaattggggacttcggagtgcctatcgcgatcctcatcatggtgcttgtggactatagtattgaggacacctacacccagaagctgagtgtgcccagtggattctctgtgacagccccacacaagcggggctgggtcatcaacccccttggagaaaagagccccttccctgtgtggatgatggtggccagtctgctgcctgctgttctggtgttcatcctcatcttcatggagacacagatcaccacgctgatcatctccaagaaagagcggatgctgcagaaaggctctggtttccacctggacctgctgctcattgtagccatgggtggtatctgtgccctctttggccttccttggttggctgctgccactgtccgctctgtcactcatgccaatgccctcactgtcatgagcaaggctgtggcacctggggacaaacccaagattcaagaggtcaaggaacagcgtgtgacagggctgctggtggccctgcttgtgggcctctccatggtcattggagacctactacgacaaatccccctggctgtactgtttggcattttcttatacatgggagttacttcccttaatggaatccaattctacgagcggttgcacctgctgctcatgccacccaaacaccacccagatgttacctatgtcaagaaggttcggaccatacggatgcacctgttcaccgccttgcagttgctctgcctggccctactctgggcagtcatgtccacagccgcctccctggccttccccttcatcctcatcctcacagtgcctctgcgcatggtggtacttacccgcatcttcaccgagcgagaaatgaaatgtctggatgctaatgaggcagagccagtgtttgatgagcgcgaaggtgtggatgagtacaacgagatgcccatgccagtgtagctgctgtccagaggcgtagcagtgggactaatgggtaggg

SEQ ID NO: 1386 - DNA, 2293 bp, Cricetulus griseus
ccgcccggagcggtgggtctcggccccggcgtcaccatgggggccgtgttaggcgtcttctccttggccagctgggttccatgcctctgtagtggtgcatcatgtttgctatgcagctgctgtcccatcagcaagaattccactgtaactcggctcatctatgcttttattctcatccttggcactattgtgtcttgtatcatgatgacagatggcatacaaactcagctaaagaagattcctggattctgtgaaggaggatttcaaatcaaggtgcctgatataaaggcagagaaagattgtgatgtgctggtcggttttaaagctgtatatcggatcaactttgctgtggccatctttttctttgccttctgtttgcttatgttaaaagtaaaaacaagtaaagatcccagagcagcaatacacaatgggttttggttcttcaaaattgctgccattattggtatcatggttggatctttctacatccctgggggccattttacttcagtctggtttgttgctggcatgatgggggccactttcttcatcttcatccaactggtgctcttggtagacatggctcactcttggaatgaatcatgggtaaatcgaatggaagaaggaaacccaaggctctggtatgctgctttgctgtcttttacaagcttgttttatatcctgtcaatcatctttgccgtgttgctctacatcttctacaccagaccagatggctgcacagaaaataaggttttcatcagccttaacctgattttttgtgttgcagtttctattgtatccattctctccaaaattcaggaacatcagcctcgttctggcctcctgcagtcctccatcatcactctgtacaccttgtatctcacgtggtcggccatgaccaatgaacctgaccgttcctgcaacccctctcttaggagcatcataacacatttaacctcacccactgtgtctccagcaaattcaactactcttgctcctgcctctactccgtcatcacagaatggacactctatgaatttggatgattttggggggttgactatctttgttatctgccttatatattctagcatccgtacttcaagcaatagccaagttaacaagctgaccctctctgggagtgacagtgttatccttggtgataccaccaatggagccagcgatgaagaagatggacagcctcgtcgggctgtggataatgagaaggaaggggtgcagtatagctactccttcttccactggatgctctgctgtgcttccttgtacatcatgatgaccataaccagctggtacagtcctgatgccaagttccagaaagtatccagcaattggctagctgtgtgggtcaaaatgggctccagctgggtgtgcctcctcctgtacctctggactcttgtggctccactcatcctcacaggccgggacttcagctgagcttccagtgccaaggacactgctaaagctgacagtctcctttgctgaagatgcaggtccattcaacgtttcatcaactaaactattaagtgaacgctttgcaaatttggctgtattcatgtttatatcaaaaggcaagattgaataatgcttcatgcagaatctgagctttcattctcatatatatatatatatatatatatatatatatatatatatatatatatattctatttgtaagactatagcacaaagggaacatttttgtgttttagcgtgaactacagctgtgctgtgaagagagttctttataaagacgtgtagattcctacagcttctgtttcaaatggaagttagaagattgttggatagttgaggctatctttaatatatttctattgcagtctccttaaaaaccaaaaaggaatgcaataaccccacagttcccttcttcagaggtttagcatcctgatttttggcaaggaattatgtatgtaggtccttccccagaaacatggctgctgataaggctgagagaaggctattgagttcctttacttactttttatactacactgatgctgcttgatagacgtctgtggctttgtcagatgtgtcataccagtaaatgctttgtagattggattaaaatgaaagttcacttggaaaacactgcaatgttatgtaatgaccttgctatgagtataaaagtcagaggcatgttagtttattaaatttgcactatcaaagtacttgattaaaatagatatttagtttctggtttgtttgttggtttcttagaaagggtcctttctttgtatcccagacttgcctggaa

SEQ ID NO: 1387 - DNA, 2292 bp, Cricetulus griseus
  modified_base (145)..(145): a, c, t, g, unknown or other
cttcccacttctcaccgtacccccgcgtctctgtaccgacatctctggggccagagcgcagccggagccggagccgctgagcggcggaaccatggaggcctgaggcggcgtgcacactcgggccgctgtgcgcccgcgctcccgnttccctgctgcccgccgccgcggctggaaagggcagtccgcgccgctgacacaggttgtttggtgggcatgcccatgtgaggactagttgcctgccacacagaagatgggagcgaatagcagcagcatcagcgaccttcctaaaaatgagtacttgaagaagctctcaggcacggagtccatctctgaaaacgaccccttctggaatcagctcttttccttttcttttcctgcgccaaccagcagtactgagttgaagctgttggaagaggcaaccgtttcagtttgcaagtctttggttgaaaacaaccctcgaacgggaaatcttggcgccttaactaaggtcttcctttccagaaccagagagctcaggctttcggcagagtgccagaaccacatcttcatttggcagacacataatgctttgtttattatttgctgtttgctgaaagtgttcatctgtgagatgtctgaggaggagctacagcttcattttatgtatgaagaaaagtctcctggcagttatagttctcactctgaagatcttttggaagaattgctctgcagcttggtgcagttaatcactgacactccactcttagatattacgtatgagatatcggtggaggcgatctcagcgatggttgtcttcctttcctgccagctcttccacaaggaggttttgcgacagagcatcagtcacaagtatttgatgcaaggtccctgtctcccctacaccagcaaacttgtgaaaaccttactttacaactttatcagacaagaaaagccacctccacctggaacccatgttttccctccgcagtcagatgggggaggactactgtatggactggcgtcaggagtagcgactggtctctggactgtcttcacactaggcggggcaagcagcaaagcagctacctctccagaacttacttcccctctggccaaccagagtctcctgcttctgctggtgctggtgaacctgacggatgcaccagacacaccaaatccctacagacaagctgtcacatcctttaagaacacacaagacagcagtcctttcccgtcatcgattccacatgccttccagattaactttaacagtttgtacacagccctgtgtgagcagcagacgtccgatcaagcaacactgctcttgtacactctgcttcatcagaacagcaatgtcaggacctacatgttggctcgaacagatatggagaatcttgttttaccaattcttgagattctgtatcatgttgaggaaagaaattcacatcatgtatatatggcccttataatattgttgatccttacggaagatgatggcttcaataggtccattcatgaagtgatattaaaaaacattacttggtattcagaacgagtcttaactgaaatttccctggggagtctcctaattctggtcgtaataagaaccatacaatacaatatgaccaggactagagacaagtacctgcacacaaattgtttggcagctttagcaaatatgtcagcacagtttcggtctctccatcagtacgccgcccagaggatcatcagtttgttttctttactgtctaaaaaacacaacaaagttctggaacaagccacccagtccttgagaggttccctgagttccagtgatgttcctctcccagattatgcacaggacctcagtgtcattgaggaagtgatccggatgatgttggagatcatcaactcctgcctgacaaactctcttcaccacaaccccaacttggtatatgccttgctctacaaacgggacctctttgagcaattccggactcatccttcatttcaggatataatgcagaacattgatctggtgatctccttcttcagctcgaggctgctacaagccggagctgagctgtcagtggaaagagtcttggaaatcatcaaacaaggggttgtggcactgcccaaagacagactaaagaaatttccagaactgaaattcaaatatgtggaagaggagcagcccgaggaattcttcatcccttatgtctggtctctggtctacaactcggcagtcggcctgtactggaacccacaggacatccagctgtttgccatggactctgactgaagcaggacacaccgacgcccacccccagccac

SEQ ID NO: 1388 - DNA, 2292 bp, Cricetulus griseus
  modified_base (15)..(15): a, c, t, g, unknown or other
acttttttttttttnttttttttttaaataacgcagctagccatgccaaggatgaggttgctgcctcatgtctgatgcaggacagaaaaattaaaaagaagagaagcacagtctttgggaccctgcatgttgcacatagctcctccctggatgaagtagaccacaagattctggaagccaagaaagcactctctgagctgacaacgtgtttgcgggaacggctttttcgctggcagcagattgagaagatctgtggctttcagatagctcataactctgggctccctagtcttacctcctcgctctactctgaccacagctgggtggtgatgcctagagtctccattccaccctaccctattgctggaggagtcgatgacttagatgaagacacacccccaatagtgtcacagtttccagggactgtacctaaaccttctgggtctttagcccgaagcagtagtttatgccgctctcgccgcagcatcgtgccatccttccccacacgtctcagagagctcacctcaccacccccagcatcctcagcactcattaccttccccaagataccagacattctgtctgtgtcaagttgccctgctctgtatcggaacgaagaggaggaggaggccatctacttcactgctgaaaaacaatgggaaataccagacacagcttcagagtgtgactccttaaactcttccattggaaggaaacagtctcctccttcaagccttgagatataccaaacattgtcttctcgaaagatatcaagagatgagctttccctggaggattcttccaggggggattcgccagtgaccgcagatgtctcccggggctcacctgagtgtgtgggtctgacagaaaccaagagtatgatcttcagtcctgccagcaaagtgtacaatggcatcttggagaaatcctgtagcatgaaccaactttctagtggcatcccggtacctaaacctcgacacacatcatgttcctcagctggcagtgacagcaagccagttcaggaagcttcaaatgtgtccagaataagcagcatcccacatgacctttgtcataatggcgagaaaagcaaaaagccatcaaaaatcaaaagccttttcaagaagaagtctaagtgactctcaatggcatctgtgaactttatctcccaccctccactccgtttttaaatttaattttaggaatgtaactccattggggctttccagagttgatgccatagaggaaatgtccttaagggcaactgtctactgtctgctgatttaacagactacgccatcaattttatcaagtctaacattactgaaaagtcatcaagaagagacagtttacagttatttccacctatttatttctgcattgatgttagtgatgtatacacagcattctgttgaaagccgctatggacttacaagctttaatggactgtaagccagcatgggcttgcaaaaatttcttgtttaccagaatatcttcttatctttccacagagctgtttccatcatggactaaataacttaaacaaagtaaaactaattgcactactgttttccagactggaaaaaaatctctgcaagtaaaactgtatagagtttataaaatgactgtggataggggactgttttcacttttagatcaaaatgggtttttaagtagaaactagggtttctaattgacttgctttctggaaatgaaaacccacacttttattatggggcgcttcttcagatgcatttattattataaagtttcaagtcctgctgtaaagatcatgttgttttgttttccccagggctttcactgtgatttactgcactgcaggctgtatgataaaatacaaataatgtaaagagagaaggctcttgattccttatacaagtggaagagttaaaacttgatcaaaggacttaaaacattcacatgcttaaactgaagtgggggtgggaagtcaggcacttgtttacagactttgggtaaatgcaaaggatttatggtttgaaaaaatttgtactgtggaaaagataataaattggagacattattgtgtggagttgtgctgatttttgttgataacactccactgaaaacactgttttctgaagagctatgtaagctgtcctattgcttaattgcagtataagaaatagtgatgttttggaactaacttgtcaacaaatttctttgttttatattgtttgtcatatttttatgtagtttgaaatgtttaaatgttctaatatcaagattaacaaatataaatttatggtgcattta

SEQ ID NO: 1389 - DNA, 2292 bp, Cricetulus griseus
aggcggcggcgagagcaggcgtccgaacagagccagaagaggagagcctcgcccccgacagcccggccccgcgtcccagcctgtgcctagccatgcgcgccgcctgctgagtccgggcgccgcacgccgagtcctccgcccgccgcgccgcgaggcgctgcgctccgggagtaaagacagttctgcgtggacacttgaccatgtgcctgccctgagcgaggcccaccaggtatctctattgtgggcagcagagctacgcactcatctgtgagcccccagtttgcaggctctcccagcagtggggtctgggcctcggccccaccatgtcgagcctcggcggtggctcccaggaccgccggtggcagtagcagcagcacaccaatagcagcagtggcagtggcccaaaggcaggagggacagacaaaagtaccacagtggctgcggccacaccagcctcagtggcagacgacgccccgccccctgagcgtcggaacaagagtggcatcatcagtgaacccctcaacaagagcctgcgtcggtcccgcccactctcccactactcttcctttggtagcagtggtggcagtggaagcctgatagggggagaacctgctgacaaggcagccgcagccgcagcctccctattggccaatggtcatgacctggctgcggccatggccgtggacaaaagcaaccctacctcaaagcacaaaagtggtgctgtggccagcctgctgagcaaggcagagcgggccacagagctggcagccgagggacagctgacgctgcagcagttcgcacagtccacagagatgctaaagcgcgtggtgcaggaacacctgccactgatgagtgaggcgggtgctggcctgcctgacatggaggctgtggccagtgccgaagccctcaatggccagtccgacttcccctatctgggcgctttccctatcaatccaggcctcttcatcatgaccccagctggtgtgttcctggctgagagcgcgctgcacatggctggcctggccgagtaccccatgcagggagagctggcttctgccatcagctcaggcaagaagaaacggaaacgctgcggcatgtgtgcgccctgccggaggcgcatcaactgcgagcagtgcagcagttgtaggaaccgaaagactggccatcagatttgcaaattcagaaagtgtgaggaactcaaaaagaagccttccgctgctctggagaaggtgatgcttccgacgggagccgccttccggtggtttcagtgatttcagtgacggccgggaacccaaagctgccctctccgtgcaatgtcactgctcgtgtggtctccggcaagggattcggggcgaagacaaacggatacacccgtctttagaaccaaaaatattctctcacagatttcattcctgtttttatatatatatattttttgttgtcattttaacatctccacgtccctagtataaaaagaaaaagaaaagaaaaaaaatttaactgtcttttttcaagaaagaagaaaaagaaacaacaaaagaggtaaagacaaatctataaagtaccgagacttcctgggcaaagaatggacaatcagtctccttcctgtgtcaatgtcgatgttgtctgtgcgggagatgccggttttgtgtagagaatgtaaattttctgtaaccttttgcaatctagttactaataagcactactgtaatttagcacagttttaactccactctcattttaaacttcctttgattctttccaaccatgaaatagtgcatagtttgcctggagaatccactcacgtttataaagagaatgtcgatggcaccgtatagaagcccctctgtatccatccatgtgtgcagagctacagtcagagcccactgggactgggagttcctggcccaggccccgccatgttgcaccaccgtcccctggctgggatcccccagcccaacagtgacggattttggagagatgaaaattctattcattcgttgatcactgagatctggggagcccacatctcaatcctggctacttctccccagagaaaaaataacccctttttcccctgccttgctcacagcaacagaagaaagggcttctcttcttggtcccctgcctatcatcggtagtaggtgcccagggggctccccgcctgtggccagctccctgccgaggaacatgctgtttgtattgttttaggagaccaggctgttttgtgaataaaactgaatgcatgtttgtgtcatgaaaaaaaaaaaaaaaaaaaaaaaaaaaaaaaaa

SEQ ID NO: 1390 - DNA, 2292 bp, Cricetulus griseus
agaaagaaaaggagaaagagaaggaaaggaaagagagaaagacaaagaaaaggcgacggcatctgatactgcagctgcctctgcggctgccaccactccagccacaagtcctcctgctgtcacctccccttcaggcgctaccacaaccactgccactgaggagcaagtcagtgagcccaagaaatggaatcttcgtcgaaaccggccccttttggactttgtgtccatggaagagctgaatgatatggatgattatgacagcgaagacgacaatgattggagacctactgtagtgaagagaaaggggagatcagcatctcagaaggagggcagtgacggagacaatgaggatgatgaagatgagggaagtgggagtgatgaagatgagaatgatgagggcaatgaagaagaccatagcagccctcctagtgaagtgggctgcaagaagaagaagggtaaagttcttagcagaaacagtgctgatgatgaggaactgaccaatgatagcctgaccctatctcaaagcaagagtaatgaggactcgctgattcttgagaagagtcaaaactggagttcccaaaaaatggaccatattctgatttgctgtgtttgtcttggagataatagtgaagacgcagatgaaataattcaatgtgacaattgtggaattacagttcatgaaggttgttatggagttgatggggagagtgactccattatgagttcagcttcggaaaactccactgagccttggttttgtgatgcctgtaaatgtggtgtttctcctagctgtgaactatgtcctaatcaggatggaattttcaaggagactgatgctggaagatgggtccacattgtttgtgccctgtatgttcctggagtagcctttggagatattgataagttacgaccagtaacactgacagaaatgaactattctaaatatggtgctaaggagtgtagcttttgtgaagaccctcgctttgctagaactggagtttgcattagctgtgatgcagggatgtgcagagcctattttcatgttacttgtgcccagaaggaaggcctgctttcagaggcagcagcggaagaggacatagcagatccgttttttgcttattgtaagcaacatgcagataggttagacagaaaatggaaaagaaaaaactacttggctctacaatcctattgtaaaatgtctttgcaagagagagaaaaacaactgtcccccgaagcacaggcaaggatcaatgcccgactacagcagtatcgtgccaaggcagagctggctcgatctaccagaccgcaagcctgggttccaagggaaaagttacccaggccactcacaagtagtgcttcggccattcgtaaactgatgcgcaaggcagaactaatgggaatcagtacagatatctttccagtggacaattcagatactagttctagtgtggatggaaggaggaaacataagcagccagctctcactgcagattttgtgaattactattttgagagaaatatgcgcatgattcaaattcaggaaaatatggctgaacaaaagaatataaaggataaattagagaatgagcaagaaaagcttcatgtggaatataataagctctgtgaatctttagaagaactgcaaaacctgaatgggaaacttcggagtgagggccaaggaatatgggccttacttggccgaattacggggcagaagttgaatgtaccggcaatcttacgagcaccgaaggaaagaaaaccaagtaaaaaagaaggaggcacacaaaagacatctgctcttcctacagtactttatagttgtggaatttgtaagaagaaccatgatcagcatcttcttttgctgtgtgacacctgtaagctgcattaccatctcgggtgccttgatcctcctcttacaaggatgccaagaaagaccaaaaacagttactggcagtgctcagagtgtgaccaggcagggagcagtgacatggaagcagaaatggccatggagaccttgccagatggaaccaaacgatcaaggagacagattaaggagccagtgaaatttgttccacaggacgtgccaccagaacccaagaagattccaataagaaacacgagaaccagaggacgaaagagaagctttgttcccgaggaagaaaagcatgaggaaagagttcctagagaaagaaggcagaggcagtctgtgttgcaaaagaagcccaaggctgaagacttaagaacagaatgtgcaacttgcaaaggaactggagataatgagaatcttgtcag

SEQ ID NO: 1391 - DNA, 2292 bp, Cricetulus griseus
gccaagcttgaagagcagaacaggctcctggaagccgactccaagtccatgcgctccatgaatggctcccggaggaatagcggctcctcactagtatccagctcctcagcctcctctaacctgagccacctggaggaggacacgtggattctctggggccgcattgccaacgagtgggaagagtggcggcgcaggaaggagaagctactcaaggagctgattcgaaagggcatcccacatcacttccgggccatcgtttggcagctcctgtgcagtgccacagatatgcctgtcaagaaccagtactcagagctactcaagatgtcctcaccatgcgagaagctaatccgcagggacattgcccgcacctacccagagcatgagttcttcaaaggccaggacagcctgggccaggaagtcctcttcaatgtcatgaaggcatactcagagcttccacacatctatgtatgcgtcctcctggttcctcacacttttccttaccaccttccccctgcctgttgccacccgggtctttgacatctttatgtatgagggactggagatcgtatttcgagttggcctggctctgctgcaagtgaaccagacagagctgatgcaactggacatggagggcatgtcccagtacttccagagagtcactcccccaccagtttgacagctgcccggacaagctggcagtacatccgtgagctgaaggaccagatcgaggaactgaaggccgaggtgcggctgctgaaaggcccaccaaccttcgaggacccgctggctttcgatgggcttagcctgacacggcacctagacgaagactccctaccatcttctgacgaagagctgctgggcgtgggtgtgggcgtgggcgtgggcgcagccctgcaggacccactctaccctctgtcaccccgggacgcacgcttcttccgacgtctggaaaggccagccaaagacagtgaaggtagctcagacagcgatgcagacgagctggccacgccttatagcaaccaaggcctggacaactgaggctgggggcccactctctgggagcctggaggccgcaatcaccgcttgccaggagagagcagcagtcagtgaccttgctgcttcgcagtactaaaaaagtctgtgccaccatggctcccgccaaccgtgggccaggtggaggaggcagcacagagggcagggcctactggcaggcctgccctacatagcagtgttcacccgttttggtccataccgtccaggccctcctgagttcaaggggtgcctaggccagttacctggagggtgttgctctcctaatatggacaagggccgaaagtgcagaggtcccaggacttgctaagcaggaagcttcctcctcccagttggcttccctatgggacaagggtggccctgctgggtggggcccaggagctgcagtgggtctgaggaaggaggggcaacttggactggatatttgcactccaggacaggttctctggacacagtgattttgaacagccagcccccttgccaccagggtcagatggccaggctgggcttttctgcctggtgcaggcatcacggcccctgcagcagaaaccaaagtccccccaatcctgtgtgcagggccacctggggtgtgagtagtcagtgggaaccagctcaggcctgggcagtgtctccccactctctagtgctgcagaagctgcaaagaagagacccttaccccagagcccccatcctcccctggggaatactaataccacacgtgctggctggctgtggaagagaaccccttccttaggagttctcagcctcagtccacttgtttctgtgtccctagccccacttctggccagagtttcccagtcagttacctcccttatcttcttgaagtgtttccgtggtctctgcccagtcagagttgagaatggtgccaaagtccatcgatgctcccaggctcctttatccctcatcccgcatcttgggaccctgggggctgaccccctcacagtgctcctagagcctcaggtagagtggcatcccaagctatccctgggtgcttcctgggtggcccccagctcagtctccattcctggtggtccactctttaagtgttaaaaagcctgggggccggggcagggtaccctgaggaggccctcttatgtgcccctcatgtgcccctccacactgcccaccaccattttgcacactgcctgttcacactccatgtctcccaggcaggaaagatggaaaataaagtgtatttacacagtaaaaaaaaaaaaaaaa

SEQ ID NO: 1392 - DNA, 2291 bp, Cricetulus griseus
ttacctgtgcaggagatgaaagagaaattgctgccttctgcgctcatgtgtctagaactcgatctttctgacaacaaactcgaagactggcatgaggtcagtaagattgtgtcaaatgttcctcagttggagtttctaaacctgagttccaatcctctgaatctgtcggttttagagagaacatgtgctgggtccttctcgggggttcgaaaacttgtcctcaacaacagcaaagcatcatgggaaacagtgcacacaatacttcaggagttaccagatttggaggagctcttcctgtgccttaatgactatgaaacagtgtcttgtccttctgtttgctgtcattcccttaagctcctacacataacagacaataacctccaagactgtggcattagggatggagataaaatttttgtggaatcaaaaacaaaataacctctaccagccttgtaaaaactcacataggacttcctgcagggtgtttgtttccagcgtgcttttctttaggaggaaggacatttcctttttgtttgggttttgtttagcttttggaggggttttgtatattttcttcccctagaatgggtagggattgtttttggtatttctaccacagatttcttcagctcagtcagcagaccttgctgcatctccagtctttatgaaaagtgagcagcagggatcaggctagtatagacaaggacagttattttaggtcaatggcattttcttgacagatttttggaaataagaaaacaaaaaagtgtggcgaacagtggtcacgaagatgaagactgggtgctttgtgtatgtgcgcgtgagtgcatgcggaggagtttgcgagagaaactgtgatggagactttgcttttgtcagcctgggaagcagatgcactcttatttttgaactttggagccactactgtcccatggcagaaggcaagagtgagcacttacactttggtcatgagatgctttttactcttgagacccatttcttctgttattacagaatacagtgtttatctactgcaggcccaatcctttattgcagttgcatgtaaggggaacttctcaaccaatttaactggtgtaggtatttctagggcattgtaattggtcgtttgaataattgccgaatcatttccaattaagaaaatctcaaatacagtccttgggcttttagaattacagaagtaaaggagaaaagctgtttgagcatgcgtatttacagttttatttgggtggctaagtaaagaggctgcgtttaaaataaaattggtgctgtgtagacatttataaccaaaattatttttataacagacgcagaaggcagagagaagagaccgtggacctttgagtctacacattatgcatcatgcttgtctgtattttaatattgactttatcagattgagtgggagcatattgttgacagttaggaggcaaaacgctatcctcatcactattacagagatgtgccttcaggcacagcagagagaacatgcctttctgaagtagaaattattttcagttgcggaaaaggaaaggaataatacaagaaagccaaagccaaactaagagtgctacctgtgggtagagctgctaaagctggggtccatttatccatttgtgagttctattgttcagctctcctagatttctttacaagaagcaaaggcccacagttgcctatttctgcagcccattgccataaacgcataagagaagagcaaaagcaattgcagctgggatttttagccacatcaccccaccagtcatgctgggagcagaggacactttgttatacagatttggtcaccatgggagctgtgccaccaatagcttttcctaacactcatgagcgtggctctctatactgcagcttaggcccaatggcaggtagaacatgactccagaatgctcgatagttcttacatactgtcacttctgtttatgaatttgacttttccctttatttcatgtaagactgaaatgcaaacaaactgcttccaagatgcccagaagctctgtgtccccaaacgttgttgtgaactctactgtttttcataggtgcttccttaaaatgtatgtttattgtagtgacagagggactggactctcaggccctttacaattgtctcctgcagttaatggaaatataaatataaatatatatatatatattttatttagaatataatttaaacatgaaggtctattctttgctactttttattaatatatatagagagataatctttaaaaaattaaaatccaagtccattt

SEQ ID NO: 1393 - DNA, 2291 bp, Cricetulus griseus
ccgaagtacttggagcacctctctggggatggcaaagccatcggtgtcctgaccagcggcggggatgcccaaggtatgaacgctgctgtccgtgctgtggtgcgcacgggaatatacgtgggggccaaagtatactttgtatatgagggttaccaaggcctgatggaaggaggctccaatattgtggaagccaaatgggagaatgtctccagcattctgcaaataggtggaacgataatcgggagtgcccgttgcaatgccttccgcagccgggaagggcgtctgaaagctgcctataacttggtgcgtttgggcatcaccaacttgtgtgtgatcggcgggggacggaagtctcacgggagccaacatcttccggaaggagtggaacggacttcttgaagaactggctcagaatggccagatcgaaaaagacgaagtccataagcattcctacctcaacgtggtaggcatggtgggctccattgacaatgacttctgtggcacagacatgaccattgggactgattcggctctgcaccggattattgaagttgttgatgccatcatgaccactgcccagagccaccagaggaccttcgtcctggaggtgatggggagacattgtggttacttggccttggtgagtgccttggcttgcggtgcgaggatggttggggaggaaagcatgtgcttgaaactctcagagaaccgtgcccacaaaaagaggctgaacattatcattgtggctgaaggagcaatcgatagccaaaatcaaccaatcagctctgagaaaatcaaggagcttgtggtgaatcagctgggctttgacacccgggtgaccattcttgggcatgtgcaacgaggagggaccccttctgcatttgacaggattttggccagccgcatgggggtggaagctgtcattgccttgctggagggtgatcctgaaaccccggcctgtgtggtgtcgctgagaggaaaccaggctgtgcgcctgcctctggtggaatgtgtgcaaatgacccaggctgtacaaaaggcaatggatgagaggaactttcatgaagccgtaagactccgagggaggagttttgagggaaacctgaaaacctacaaacgtcttgccataaagcagcatgatgacaagatcaccaagagcaattgcaatgttgctatcatcaatgtgggggcacctgcagctggaatgaatgcagctgtgcgctctgctgttcgagtcgggattgcagatggtcacaagatgtttgccatctatgatggattcgatggcttcgccaaaggccaaataaaagaattctcctgggaagatgtcggaggttggactggacaaggagggtccattcttgggacgaaacgcaccctacctggaaaacatttggagaagatcgccgaacagattcgttcccacagtatcaatgcgcttctgatcgttggtggatttgaggcctacctgggactcctagagctggcagctgcccgggagaaacacgaggcgttctgtatccctatggttatggttcctgctactgtctccaacaatgtgccgggttccgatttcagcatcggggcagacacggctctgaacactatcacagacacgtgtgaccgaatcaaacagtcagccagtgggaccaagcgccgggtgttcatcattgaaacgatgggtggatactgtggctacctggccaacatgagtggacttgctgcaggagcagatgctgcctacatctttgaagaaccatttgatatcagagatttacagtccaacgtgggtcacttgagagaaaaaatgaagaccactatccagaggggccttatactcagaaatgaaagctgcagtgtaaactacaccactgacttcatttgccagctctactcagaggaaggcaaaggagtgtttgactgcaggaaaaacgtgctgggccacatgcagcaggggggagcaccttctccattcgatagaaactttgggacaaaaatctctgctagagctatggagtggatcacggagaaactgaaggggtcccagggcacagggaaaaagtttgttgacgatgattccatttgtgttctgggaataagcaaaagagacctcctgtttcaaccagtggaacaactgaagaaagaagctgattttgagcaccggatccccaagaagcagtggtggctgaaactgcggcctctcatgaagatcttggccaagtacaagacgagctatgatgtgtctgattcaggcaagctggagcccttgcaccacacacacacacacactc

SEQ ID NO: 1394 - DNA, 2291 bp, Cricetulus griseus
ccatggatgaccaggaactgggcttcaaagctggggatgtcatcgaagtgatggatgccaccaacagagaatggtggtggggccgcgttgcagatggcgaggggtggttccctgccagctttgtacggctgcgggtgaaccaggatgagcccgcggacaactacgaggccccgcgggccgggctggagagaccgaagacagcattccggaagcccagagctgcaaggaccagatgcgcaccaatgtcatcaatgagatcctcagcactgagagggactacatcaagcaccttcgggacatctgtgagggcgtatgtccgccagtgccgaaagcgggaggatatgttcagtgaagagcagctgcgcaccatcttcgggaacatcgaagacatctaccgctgccagaaggcgtttgtgaaggctttggagcagaagttcaacacagagcggccacacctgagcgagctgggtgcctgctttctggaacaccaagcagacttccagatctattctgagtactgcaacaaccaccccaacgcctgtgtggagctctccaggctcaccaagctcagcaagtacgtgcacttcttcgaggcctgccggctgttgcaaaagaatgattgacatttccctggatggctttctactcaccccagtgcagaagatctgcaagtatcccctccagttggcggagctgctcaagtacacacacccccagcacagggactttaagaatgttgaagctgccttgcatgccatgaagaatgtggcccagctcatcaatgagcggaaacggagacttgagaacattgacaagattgctcagtggcagagctccatagaggactgggagggggaagatctcctggtcaggagctcggaactcatctactcgggggagctgacccgtgttacacagcctcaagccaagagtcagcagagaatgttttttctctttgaccgtcagctcatctactgtaaaaaggacctgctccgtcgggacgtgctgtactacaaaggtcggctggacatggatgatctggaggtggtggatgtggaagatggggaaggaccgagacctccatgtgagcgtcaagaacgccttccgtctgtactgtagcgctggctgaaggcctttgccagggagagggagcaggtgcggctggaccaggagacaggcttctccatcactgagctgcagaggaagcaggccatgctgaatgccagcaagcagcaggccacagggaagcctaaagctgtcggcaggccaggatacctgacccgtcacaagcatccacccttgcctgccagccggccccagcagcaggtgttggtgctagctgagcccaggcggaagccatctaacttctggcacagcatcagccgactggcacccttccgaaagtgagccagcacctaccggacaacctgacagcactttgtggacccagccttccctcaaggcctactccatcaggccctctgcctgttttgcaaactggaagtgaacaggtacagcatcacagctgtatgaagtctgggccctgcctctggcttcctccccaatgcgagtgcagtgttgcactctgcctctgcctatactttggacctgtgcagggtctccaaggctcatctgtgctggacgttctttggaaagcttatctccactcctgttttctctgggcaggagaccaaagtctgtggccatgagccacctgcaaaagcaggtgtgcacccctctgctctccacttgtcctttcaggcccccagcccacttgtaacttcagaggtcaggaaccaagaattgtgcactcctaactctacccatagctgtccttatgcctcctggctcctctagacactgctggctgccagacaccctttgtgacatgtgcaatgagaagaaaacggtacagtcaactgtgtacctggttccaggttagtgacagtcccctgtagctggggtggctgcacatatacccacgtccccattccatttcattatgattttgtcgtgttatttctctaacaatggagaattgttaatgacgcagaaagattgccttaccctagtgagtgtgagaagccataaggactgaattccgtggcctagcatggactgactcctcgtggggcacacagccaggcctgcatgtagtgcagagcccataggattcagaagcatggtcagtacctcttgcactgtaccttctctaatccagaaaccacatttaatttcataaagaaacttaaagaaaactgcatggtcaaaaaaaaaaaaaaaaaaaaaaa

SEQ ID NO: 1395 - DNA, 2291 bp, Cricetulus griseus
agagacagcctgcatcccgggagccatgaataggggagtgacagaaggagtcactctgctgatcctggcagtgcaaaccggcctcatagagcttcaggtggttcaccgagcatttctgctcagcatcatcctcttcatcgttgtggcctctatcctgcagtccatgttagagattgcggatcccattgttttggcactgggagcatccagagacaagagtttgtggaaacacttccgtgctgtgagcctctgcttgttcctccttgtgttccccgcatatatggcctacatgatttgccagttcttccacatggacttttggcttctcatcatcatctccagtagcatcctgacctctctccaggttctgggaacacttattatggttgaggaattccgaaaagagcccgtggaaaacatggacgatgtcatctactatgtgaatggtcacttaccgcctgctggagtttcttgtggccctttgtgtggtggcctacggcgtctcagagaccatcttcggagagtggaccgtgatgggctccatgatcattttcatccattcctattacaacgtgtggctccgtgcccagctgggctggaagagcttcctactccgcagggatgctgtgaataagattaagtctctccccgtcgccacgaaagagcagctggagaagcacaatgatatctgtgccatctgttaccaggacatgaaatctgctgtgatcacgccttgcagtcatttcttccatgcaggatgtcttaagaaatggctgtatgtccaggatacctgccctctgtgtcactgccacctcaaaaactcctcccagcttccgggactgggaacggaaccggctccacagcctcctgctggggctgagcagaacattgtacttcaggaaggtcccgaaccccctgaccatgagcatccgccagggaccggaacacaggagggttctcgggacagtagtgaacacatccgcagaagctcggctagccaggaaggggctgctgaccccagagaggatcttcagagtgcaaaaggtgaaacctgtcctgttgagtctgcctagaggagaagcaggcttgcagccctgctgcggagaaggccgcccaaggtcgagatcacgctcaaatctgaggagtgaatgtaggagaggattaggcaggtccctgacattccaaggatctattccaggggtactcagtggacaccacctgctttccaccccacttcgtgttgtaggagaaattttgcaatgtacactaatcaacatgtatttatatgctgatgttttgtagaggtttgccaagaaaattcaacctcagcaacttcagaagtagcccctgatttgtgaggggtaatgaaatcaggtttgagtgtttgaaaggggtccagagagaggacaaagatctggaagtcatcatgaaggtgcaggcagaggtggaactggcttttcctttcccatgggacaggattactctgattataaagtatgggtaatgaccagccctttccttcagtcgattggaaccaccaagtgattctggcattttctacaccaccacaatgaaatcaaagatgtagacacattgactgtattctaagatgcaggcacacgtccgtcaccatgtgcttcagagaagggatgggcgggcactgggcctatgggggcattcacgtcacctgagactcttgatcttgatgctggagtcttcgtattttgatgtatatgaaacttttgttaatatatcgtatactttgttggctgtgtgaagtaaactaaaactctcatgaacactttggagtccacttttaaaaaggaggccaaagtgggaggggctttagagtactgatgaaggccctgggtgtactcctgaatcctgtgtaatgtttaattctcaaagctgaatcaaaagcagtgttaaatcctggcaacatttgcactttgggaatgagtacttaatgtatgaccccaccctgcaattgccacttttaaagctgttaatagactttgcaccctttctttgacaaggatgtgtcatatttaaatttttacattcatcatggctacaggtagaactggggagggagggatgtaatttttttatgggattttgatatgaaaagaaactagtcatttatttatacaataagcttggctcaaaaaggtgtatttcagacttggtattctaacgtgggatgtggttttcttttgtttttagtttagcagatttggatgtagactgacagacaataactgaatgtcttaataaatttaaatttgaag

SEQ ID NO: 1396 - DNA, 2290 bp, Cricetulus griseus
ctgggaaggacagtagagaaaatggagagaggtccccaaagtcactggatgctctggagtcagcccagtcagaagaggaagtggatgaactgtccctcattgatcacaatgaaattatgtccaggctgacactcaagcaagagggtgatgatgggccagatgttcgtggaggttcaggagacatcttactggtccatgctactgagacagacagaaaagacctggtgctgtactgtgaggccttcctgaccacctacaggaccttcatcagccctgaggagctcatcaagaactgcaataccgatacgagaagttctctccctttgctgacacattcaagaagcgcgtcagcaagaacactttctttgtgctggtgcgagtcgtggatgagctatgcctggtggagctgaccgaggagatcctgaagctgctgatggagctagtcttccgccttgtgtgcagtggagagctcagcctggcccgcgtgctccggaagaatatactggacaaggtggaccagaagaagctgctcaggtgtgcccattccgaccagcctctggcagccaggggtgtcgcagccaggccagggaccttgatttccacagccacgagatagcagagcagctgacactgctggacgctgagcttttctacaagatagagatccctgaagttttgctttgggccaaagagcagaatgaggagaagagccccaatctgacccagttcacggagcacttcaacaacatgtcctactgggtacgctccatcatcatgctgcaggagaaggcccaggaccgggagaggctgcttctgaagttcatcaagatcatgggcagacctcagagggcctggccgagtactgcacattgattgacagctcatcctctttccgagcctaccgggctgccctctcagaggtggaacccccatgtatcccatacctaggtctgatcctgcaggacctgaccttcgttcacctgggaaacccagactatatcgatgggaaagtgaacttctccaagcggtggcaacagttcaacatcttggacagcatgcggtgcttccagcaggcgcactatgaaatccggagaaatgacgacatcataaacttcttcaatgacttcagcgaccacctggccgaggaagccctatgggaactctctctgaagatcaaacccaggaacataacaaggcggaaaacagaccgtgaagagaagacctaggagcaggctgggtgtgagaacgccgagcggcccagagaggacctggaccatcccagcttcagagcctgtcacagcttggctgtgtggcagcacctgagcctgcggggctggtttcctgcctctctccctgtggctaaagccccagggttcacaacaagtgcaggcctcaggactggcttgtgaactagcggcccctggtctggttttgttttgttttctgtcaatgctccctcctgttccctactgtgcccctccagctggggagcaacagagacctgagcagcagactagggcaatggtgggcttcaaccctcctaagactgccctagccttcttaagtggcagacgagtggaggccccaggacccttgggtgggttgccctccagggcaccctgggagccgagggggagatacggccaggagatgttcagggctcagtgctggggtctcccaggccacggcttgctccatggccaccaccatggctagttggcagggtgcggatcagaatccagacatgctgctggccctgcaccatgcctccagttcacttttgcatgaacaagcacccatttcttctggtcatggggcttggtcaagtggacaccaggatctctgtgcttcctcaacccagtcgtcacagcggaagaaaaggcagagcaacagctgctggccgggtgcaagtttgaaacaactgtcgctctgaaccctcctgggttttttttttgtgcttttatcaaaaaggaactgtgagctattctgcccccctctcctgtttatttgtgctgtaaatagagagggggcatccgtgaacagccccttggccagctccctctggcagcagccagggcaggttgtttaaggagtgtgtgtggagtcagggttgtgagcagtcgtgtgggtctttggattgtttctctgcaggtcctttcatttcagtctttgcctcctgcagtgtgaagctgtaatataaatcccccactaacctgtcggacagtggcaccttcatacagacattacaagcgcgtaacttttatatgaaaaaataaaacagacaaaagcc

SEQ ID NO: 1397 - DNA, 2290 bp, Cricetulus griseus
agttttcctctgctttgggtggtggctgctgtcgtgcttcgccttccagtccgctgaaggccaggcggcgtggacagcggtcccggcactcggcgccccgccgcccgcagcctcgcacccgctcgccccgcgcttcccgagcccgccacttcccgcctcagtgaccggccgccgccgctgcggcccacggagcggcccagatgcaggccatcaagtgtgtggtggtgggagacggagctgttggtaaaacctgcctgctgatcagttacacaaccaatgcatttcctggagaatacatccccaccgtctttgacaactattctgccaatgttatggtagatggaaagccagtgaatctgggcttatgggatacagctggacaagaagattatgacagattgcgtcccctctcctatccgcaaacagacgtgttcttaatttgcttttcccttgtgagtcctgcatcatttgaaaatgtccgtgcaaagtggtatcctgaagtgcgacaccactgtcccaacactcccatcatcctggtgggaacgaagcttgatctcagggatgataaggatacaattgagaagctgaaggagaagaagctgactcctatcacctacccgcaggggctagccatggcaaaagagatcggcgctgtcaaatacctggagtgctcagcgctcacacagcgaggcctcaagacagtgtttgatgaagctatccgagcggttctctgtccacctcctgttaagaagaggaagagaaaatgcctgttgttgtaaatgtctgagcccctcattcttggtcctgtccctggaacctttgtacgctttgctcaaaaaacggtggagccttcgcatttgatgccaagtttttgttacagattaatttttccataaaaccattttgaaccaatgaaccagtcaataattttaaggttctgttttaaatgtaagaattccaagttatggtctattaaaattcagccctaaatgacaagccttcttaaagccttatttttcaagtcccctattcttgctcagattaagaattgccaaaataccttctgaactaagttgtgttgtgctgagaacactacgcactaaactgtcgagacttttgtttttaagaagactgcaacttctggagtcggggtgcagactcttccctagtttccagactgtgtgacgcagcagcacagcctccttaacgacacgttgccatgtaatgcacctgtaacttatcagcccatgttcatgacataactttgtactgtacgccacagtgagtgagtgtaacagctcagccctttgatttcatagtgagttttctgaaaccccagttgactaacttttgcagactttgaacagaactctggttcccgtgttgcctctaatgaagtattctgttcctagtcgtgggtgtgctgggtggagtgtgcgaaacacgacatgatcaaaggataaagacagtattttgactaataatgaagtagagattactttacactacattgtacatggagtaattcaactgaataaaagtgtcacgggtaaagtttttaacggttaatttctgtcagacacagtagatgataaatggccggtcttatcagtgtctctcgagcttttcctttcccctacactgccgtccctccccagatggggtgttgaatccatatttaagctggccaccccacttccccatggttgctaactttagcaagtgcttttctttaggacccccttcttaacgagcaatatgtctgacctgtactataagatctttctgataatgcatttttttttttcttttggtagattagtagaagtgcattcctgttttcatcttactttattcaaagctaataaatgctttccttagttttctagtaactaggtgtaaaaatcatgtgttgcagctttacaggttttaaactattttagataattcttaaactatgaaccttctaaacaaccaacactgtcatgtgactaatgctgcccctctagacctcacccacgtggacacacttcctgtggtggctctgcctagagatgttcctttgggtctgtgaggttctgtcaactgctagtgctaacgctgttctgtacaacctaactcactggcaagaacacagtgttgggccttccaaccactagaacaaacttttttcaattgacagttgcagaattgtggagtgtttttacattgatcttttgctaatgcggttagcagtatgttttgcatgtatgacttaataaatccttgaatcataaaaaaaaaaaaaaaa

SEQ ID NO: 1398 - DNA, 2290 bp, Cricetulus griseus
  modified_base (538)..(538): a, c, t, g, unknown or other
tatgatagattatatgaaaaaatacacccgtacttcccaggagattcagatgaaaagaacagctatcgaagcatttaatgaaaccataaaaatatttgaagaacaatgccagacccaggagcggtacagcaaagaatacatagaaaagtttaaacgtgaaggcaacgagaaagaaattcaaaggattatgcataactatgataagctaaagtctcgaatcagtgagatcattgacagtaggaggagattagaggaagacttgaagaagcaggcagccgaataccgcgagattgacaagcgcatgaacagcattaagccagacctcattcagctgagaaagacaagagaccaatacttgatgtggctgacgcagaaaggtgttcggcagaagaagttgaacgagtggttgggaaacgaaaacactgaagaccaatactcactggtagaagatgaagaggacttgccccaccacgatgaaaagacatggaatgttggcagcagcaatcgaaacaaagctgagaatctattacgggggaancgagatggcactttttcttgtccgggagagcagtaagcagggctgctatgcctgctctgtagtggtagatggcgaagtcaagcattgcgtaatcaacaagactgccaccggctatggctttgccgagccctacaacctgtacagtccctgaaggagctggtgctactattatcaacacacctccctcgtgcagcacaatgactccctcaatgtcacactagcatacccggtatatgcacaacagaggcgatgaagcgcgcgccaccctccggatccagttcctcaccttcaagccacccaaaggcctctgggaaggcaaagggctcctctccagcccgacctgtgaactgagctgcagaaacgaagccggctgtctgcacgtgggactagagctttcttggacaaaaagaagtcggggaagacacggccgcctagggctgttgaatgactagacatttctaaccttatccttttctttcttttttctttctttcttttttaatttaaagccacaacatacaccaacacacagagaaaaagaaatgcaaaaatctctccgtgcagggacaaagaggcctttaaccatggtgcttgttaatgttttctgaagctttaccagctacaagttggaactttggagaccagaaggtagacagggctgaagagcctgggcctgggaccgcttggtccagcctggtttagcctgggtgtcgctgggtgtggtgaacccagacacgtcgcactgtgggttacttcctttttaatgaacgaatgatgtgaagcggagaggcatgtctgctctcacaggacactttgagagaacattgatgcagtatgttcggaggaaaaaaaaaacaccagaaaacgttttgcttaaaacttgtcaaatcaacaacccacaaacagaataaaggagtgtggacaagggaacttaaaatgacattcagtatataaaatatgtacatattattgggtgactaactatcaaatagatggatttgtatcaataccaaataagcttctgttttgttttgtctgaaggctaaacgtgcagcgctatgcaattcttaacctttatacgtcgttaccagttttcaaacacacctgtatatatgtgtgtgggtttttttttcctttgatgttgcttcgttttgtcttgtaaaggtgaacattgttggcaaataaagtgagaagttcatcatttgacatttttctgtttttagaagctacgccctttcagggagcaggtctgaatgtcttgcttacctgacatatatttgttttcagtgttgtcaagtcagagtgtgtttctgtgagctgtcagtgtgaggaaccaatccctttgtcacatatctggttaagagctagtaacttgtttgggaagtcctactgttgtttcttattgggagaaggttcctgctggttttcccaactgtgcttttgcaatgcatggtatctaagtcagttggaaaagtgggcgttgctgtctgtttgaatttagggtcattttaagaaaaggggcagttaaagcacaatgcctcacatgggacaaagttccaaaatgccaaattctcctgttttttttacaaaaatctatagttatatatcaaataactagtagtgagggtagggagaatgtggctcattgaacagactctccaacttcacaccgaacttgtcaccatgagatagcattggctgcccaggatgctgctatttaaagaaaaaaataaaaagcaaaacaaaacaaaa

SEQ ID NO: 1399 - DNA, 2290 bp, Cricetulus griseus
tgccggcggctgagggccgcccgccgcgcggcatcggctgtggcgttgcggtcattgtgtcgtgacggtgacgccggtagtggtttccgcaacagcgggtgaggctgctgtagcccggcctcggctccgcggctgcctggagggtctctgcagcgcccaccccttctcctccaggactccacgacagctgcgaccctgagccgacagccggagcgaccggcaatggcggcctcgacggcctcgcaccggcccatcaagggaatcctgaagaacaagacctctgcggcttccccggtggtggcctcggccgaacagccccgccggaccgtcgaagaggagctgagtaaaaagtcccagaagtgggatgaaatgaacatcctggcaacatatcatccagctgataaagactatggtttgatgaaaatagatgagccaaacactccttaccacaatatgataggtgatgatgaagatgcctttagcgactcagaagctaatgaagtcatgactccagatgtcttagctaagaaattagctgctgctgaaggtgcagagccgaagtatcggtctcgggaacatgagagcagtggagaggaagataatgacctctcccctgaagagagagaaaagaaacgacagtttgaaatgaaaaggaagcttcactacaacgaaggactgaatattaagttagctagacagttaatttcaaaagacctgcatgatgatgacgaagatgaagagatgtctgagactgcagatggagacagcatgaatattgaagagtcaaatcaaggatctaccgcaagtggccatctgcaaaacaaatcacaaagttcataaaagaaatgtgttcagcaatgcagtcgtttgtcaaatacaaaccttgttactatacaacattgcttcttgttctctacaatttgtgacttacgtaccaaaatacacaccagttatatattgccaagaattaagtgataaccatagagactgattagacagaaaatgcctaattaatgcatatattcttgtgcctcatacttcagcagaaatacagtgtaatgtcattagtccaaaactgctttacttttgtaagaacactggttaatttgtatatgatattatatagctttttatgctttagagaataaataatgtcattgggggaaactaatttatttttgtcacttctagatgatgatacctcttataaaatgtttggagggtagtttgatgttttttctcttttaatcaaaagcttattggtacagtgggatatataggtggaaaatattaagcagaaagatattttttaacatttatctttagcttgttttggctaattgagcaggagtccaagagttaactgttctttttctgattacctgtcttaacctgctctagttccctattccctctgccttacacatacaattgtaaagattgtatcacagatggcaaaggccgttggccatgaggaactggtcttccctcacatattctgtcatttgctgcagtaatgaattcttatttgacacctgctagttctaaacatgaaggaaatagatgaagtattcacgacaggaaggatagctaagcagcctgatctccctgtgcctctctgattgacagcttggtcaggaaatttgctactattactgcatttgacttcagatttaggaaacaattaactgaggctcttttgcacggtgaaagagttgtatgtaatcagaatttgatcgttcctggatgtacagagagaattatgcctgaacagttttacgtttagagattctgaggagtcattgctttaagggaatgtgataatgcacactataacaaatgaacttgattcctctaacgtgatagaaattattagttcctgtgtgtcttagtttagtgatgatttcctttgtagtcatttatttgtattgtaagtttttggtagcaccaaataaatctgttatatgacagacttttaaaataacttctgtatattatatatatgaaatggcttttattgaacagctatcttccactttaaatttatggaactatcatgatgtcaaaataaagtgggaagagcctttgctgttagaagaatgtgcttatttggaatgtcttttttttttatgggatcgaaccagagtagctctgaaatgttagtaccatattttaaccaaacattttagctagtgaaccactgatgtacacactcagcaatgtatacctcatctttgtaaattaagcccgtttgtggggtgtggaaatacagtctgtatatatgtatgtg

SEQ ID NO: 1400 - DNA, 2289 bp, Cricetulus griseus
gccctcagggaggcggaccccgcgcccgcgcctcgcgccttgcccgcggtcgggctggactgggcggtgtcagcggaggccctcgccaggcgcgtccgccgcgcgacacccgggcagccgcggcgctgacgggagcggcagcgggaggtccgccatggagacccgctacaacttgaagagcccggctgttaaacgattgatgaaagaagctgcagaattgaaagatccaacagatcattaccacgcccagcctctggaggataacttatttgaatggcacttcacagttagagggcccccagattccgattttgatggaggagtttatcatggacgaatagtgctgccaccagagtaccccatgaaaccaccaagcattattctgctaacggctaatggacgttttgaagtaggcaagaagatctgcctaagcatctcagggcatcatcctgaaacctggcagccttcgtggagcataaggacagcattgctggccatcattggatttatgccaactaaaggagaagggaagcccataggttctctagattacacacctgaggagagaagagcacttgccaaaaaatcacaagatttctgttgtgaaggctgtggctctgccatgaaggatgtcctgttgcctttaaaatctggaagtgattcaagccaggctgaccaagaagccaaagaactggcgagacaaattagttttaaggctgaagtcaattcatctggaaagactatcgccgaatcagacttaaaccactctttttcactaaatgattcacaagacgatctacctacaacattccagggtgctacagctggcacatcgtatggagcccagaatccatctggagcacccttgccacaacctacccaaccggctcctaagaatacctccatgagccctcgacagcgccgggcccagcagcagagtcagagaaggtcctccacttccccagatgtgatccaaggccagccaccaagagccaatcataccgagaacggcgggtctgccatgctcattgtcattctcactttggcattggcagctcttatattccgacggatatatctggccaatgagtacatatttgactttgagttataatgctggtttgtggcttaagagctgagactcggttgcttcattaaacattctgcattgggtataacctaagtattgtttacaaaagattattttatatttacccttcattactttttatcgttataaattcattgtgctataggcagacattcaggctgtggtccaacagtttgtcctgcttagattaagggactggaagccatagttccttgtcttactatttaatctacttcacaaacaagtaacttattgtggttgctcagacccaagctgcttttctgctcaccagcttcttgacaagtgtcatttataggagagagactgggattgtccattctgtagtctttgtattcgaaactttgttcagtgacaataattttatttcagacatttatgaagatctttgttatatatttgttttgggatattacttgaagaggaaagactttgtagccactttgatatgctgttatcaccacctcagtgtgcacacaaatgaaaagaaaacaggcctttataaccctgtcttacagaagaaaggatccataccaagaaataggttgatttttctttcacaagttgctagagcagtcttcctcccagtcagactggcagcctttggagctctgtgatcttgctgcatcttccatgggcacctgtgctgagcactaggttattgtgtgatctcatccattctcccctcactgtcgctaactggctacctccttatgtgtgttggcattttttagcatctgatagacacatcaaagtggtatattttgctttttccctcatatgctatgtaaaaattgtctccccacccacagttggagtcaatgagctcactgaagggcctctattgttaaagcctcagtttagccccttaattccagcataagacccaaatcatgtagaagctggtaggtaaagtcttaggatctccatgtctccagttctcagatttcaaaactcaaggcttcttcactgaccagcatagcatatggctacacatcaagatagttaaaatagcatgcttgaaaaatttgcctgttttgcttgtagcgatctaagctcatgagctttccaaatcttctgtacgtgggggatttatgtagcactttacatttccatgctgctgattgttttattctactgaaataaatgatttcatcaag

SEQ ID NO: 1401 - DNA, 2289 bp, Cricetulus griseus
tgctttgcctttgagggccataagctcatcacccactggttcagaggctaccttgtcattgtctcccgagaccggaaggtttctcccaagtcagagttcaccaacagggacacacagagctctgacaagcaaattctcaacatctatgacctgtgcaacaagttcatagcctacagtgctgtttttgaggatgtagtggatgtgctggctgagtggggctccctgtacgtgctgacgcgggatgggcgggcccacgcattgcaggagaaggacacacagaccaaactggagatgctatttaagaagaatctatttgagatggcaattaacttggctaagagtcaacatctggacagcgatgggctggctcaaattttcatgcagtatggagaccatctctacagcaagggcaaccatgatggggctgttcagcagtatatccgaaccattggaaggttggagccatcctatgtgatccgtaagtttctggatgcccagcgcatccacaacttgactgcctacctacagaccctgcatcggcagtctctagctaatgctgatcataccaccctgcttctgaactgctataccaagctcaaggacagctcaaagttggaagaattcatcaagacaaagagtgagagtgaagttcactttgatgtggagacagccatcaaggtcctcaggcaggccggctactactcccatgccctctatctggctgagaaccacgcacatcatgagtggtacttgaagatccagctagaggatattaagaactatcaggaagcccttcagtatattggtaagcttccttttgagcaggcagagagtaacatgaagcgctatggcaagatcctcatgcaccacataccagagcagacaacgcagctgctgaaaggactttgtactgactatcggcccagtccggaaggctggggtgatcgggaggctccatgtttccgggccaactctgaggaattcatccccatctttgcaaacaacccaagagagctgaaagctttcctggagcacatgagtgaagtgcagccagactcaccccagggcatctatgacacactcttggagctgcggctgcagaactgggcccatgagaaggatccacaggccaaggagaaacttcacgcagaggccatctccctgctgaagagtggccgattctgtgatgtgtttgataaagcactggtcctgtgccagatgcacgacttccaggatggggtcctttacctctatgagcaggggaagctgttccagcagatcatgcattaccacatgcagcacgagcagtaccggcaggtgattgctgtgtgtgagcgacatggggagcaggacccctccctgtgggaacaggctctcagctactttgcccgcaaggaggaagactgcaaggagtacgtggcagctgtccttaagcacatcgagaacaagaacctcatgccacctcttctagtggtacagaccctggcccacaactccacagctaccttgtccatcatccgagactatctggtccaaaaactgcagaaacagagccagcagattgcacaggatgagcttcgggtgaggcggtacagagaggagaccactcgcatccgccaggaaattcaagagctcaagtccagtccaaagatcttccagaagaccaagtgcagcatctgtaacagtgccttggagttgccctcagtccacttcctatgtggccactccttccaccagcactgctttgagagttactcagaaagcgatgctgactgtccaacctgcctcccagagaatcggaaggtgatggacatgatccgggcccaggaacagaaacgagatctccacgatcagttccagcatcagctcaaatgctcgaatgacagcttttccgtgatcgctgactactttggccggggggttttcaacaagttgactctcctgactgaccctcctacatccagactgacccccagcttggaggctgggctgcagcgagacctgctgatgcactccaggagggggacttagtaacagacatgaccacagttccagactctcaggactcaagatggaatctgcttttccttcctctccttctgccagcctgctgtccctcctgctgaccagcaatatagattattccacaccagtgaggaaggtcacctcagcaacctctctgtggacaatggctgctttattctctattcaagggcaccaggctgtgcttgggtccttgccctcaaagcttataaataaaggagtataatgaaacaaaaaaaaaaaaaa

SEQ ID NO: 1402 - DNA, 2289 bp, Cricetulus griseus
ctgcagatggagcatgatatccggcactacgacctggagtcggtgcccatgacctgggaccctgtggaccagaatcccaggctgctcacactggaggttcctggtgtgaccgagagccgtccctcagtgctacggggtgaccacctgtttgcccttttgtcctctgagacccaacaagaggaccctatcacctacaagggttttgtacacaaggtggaactggaccgtgtcaagctgagcttttccacaagcctcctgagccgatttgtggatgggctgaccttcaaggtgaactttaccttcaaccgccagccccttcgggttcagcaccgggccttggagttgacagagcgatggctgctatggcccatgctctttcctgtggcctcccgtggggtctccctgctgccctcagatgtgaagttcaagctgtatgatcggagtctggagtcgaaccctgagcagcttcaggccatgaagcacattgtgagtccaggtaccggcaagactgtcacatagtgaggccatcaagcaggtagtgaagctcttgcccaaagcccaccatcctggcctgcactccatccaactcaggggcttgacctcctctgtcagccggctccgggtccacctacccagctccatctaccgtcttctggcccccagcagggacatccgaatggtacctgaggacattaagacttgctgtaactgggatcctaaaaagggagagtatgtatatcctgccaagaagcatctccagcaatatcgggtcttaattaccaccctcatcactgccagccaggttggtgtcagcccagtttcccatcgatcacttcacacacatcttcatcgatgaggctggccactgcatggagcctgagagtctggtggccatagcaggactgctggatgtaaaggaaacgggcaatccaggagggcagctagtgctggcaggagacccgcggcagctggggcctgtgctgcgttcaccactggcacagaagcatgggcttggctactctctgctggagcgcctactcacctacaactccttatacaagaagggccccaatggctatgacccccagttcatcaccaaactgctccgcaactacaggtctcaccccaccatcctggacatccctaaccggctgtactatgatggagagctgcaggcctgtgcagatgtggtggaccgagaaaggttctgccgctgggaggggctgcctcaacagggcttccccatcatcttccatggtgtaatgggcaaagatgagcgagagggcaatagcccatccttcttcaaccctgaagaggccgccacagtgacatcgtacttgaaacagctcctggccccttcctccaagaagggtaaagcccgcctgagcccccggagtgtgggcatcatctccccataccggaagcaggtagaaaaaatccggtactgcatcaccaaacttgaccgggaacttcgaggactggatgacatcaaggatttgaaggtgggctctgtggaagaattccaagggcaagaacgaagcgtcatcctcatctccaccgtccgaagcagccagagctttgtacagctggacctggacttcaacctcggtttccttaagaaccccaagaggttcaacgtggctgtgacccgggccaaggctttgctcatcgtagtgggcaaccccctcctcctaggccatgacccggactggaaaacattcctggagttctgtaaagaaaacggggggtatactggatgcccctttcctgccaaactggacctgcagcagggacaggatttactccaaggcctgagcaaactcagcccctctacctcagggccccggcgtcaccaaaatctcccccaggagcgggagggtgaagggggcctgcccttacaagtggagccagagtggagaaatgagctctgaagatatagctgcccgccttctcacaccagccaagccttattgctgcctatccctgacccaaaacccagctcacctgtccctgcaagagacaggaaggctgggaagtttacagcccaaaccattccaccccttcctctgctggggaaaataacccaagctgctaaaacttggaggaaggggaggaaggaaagcttttttccctccctctcctttgcagtactggggactgaacccacaactgcgagtatgctaggcaagcaagcagtctgtcgctgagctgctttaagaaaaacaaaatgccgttctatgcaaaaaaaaaaaaaaaaaaaaaaaaaaaaaaaaaaaaaaaaaaaaaaaa

SEQ ID NO: 1403 - DNA, 2287 bp, Cricetulus griseus
aatatatcaccactagctaagcagtccctagaggaacagaagaagctggagggagaattgacagaggaagtggagatggccaagcgtcgtattgatgagatcaataaggagctgaaccaggtgatggagcaattgggggatgcgcgcattgaccggcaggagagcagtcgccagcagcgaaaggcagaaataatggagagcatcaagcgtctctaccctggttctgtgtatggccgcctgattgacctctgccagcctacacaaaagaagtatcagattgctgtgactaaggttttaggaaagaacatggatgcttctgcaatatgcttgtggcaatgcccttgtttgtgacaatgtggaggatgcccgacgcattgcctttggaggtcaccaacgccacaagacagtggcactggatggaacccttttccagaagtcaggagttatctctggtggagccagtgatctcaaggcaaaggcacggcgctgggatgagaaagcagtagacaaactgaaagaaaagaaagaacgcttgacagaggagctgaaagagcagatgaaggcgaaacggaaagaggccgaactacgtcaggtgcagtctcaggcccatgggctacaaatgaggctgaagtactcacagagtgacttagaacagaccaagacaaggcatcttgccctgaacctccaggagaagtctaagctggagagtgagctagccaacttcgggcctcgcattaatgatatcaagagaatcatccagagccgagaaagggaaatgaaagacttgaaggagaagatgaaccaggtggaagatgaggtgtttgaggagttttgtcgggagattggtgtgcgcaacatccgagaatttgaggaagaaaaggtgaagcggcagaatgaaattgccaagaagcgcttggaattcgagaatcagaagactcgcttgggcatccaattggattttgaaaagaaccagctgaaggaagaccaggacaaagtacacatgtgggagcagacagtgaaaaaggatgaaaatgagatagaaaagcttaagaaggaggagcaaagacacatgaagataatagatgagaccatggctcagctacaagaccttaagaatcagcacctggcaaaaaagtccgaagtgaacgacaagaaccatgagatggaagagattcgcaagaagcttgggggtgccaacaaagaaatgactcatttacagaaggaggtgacagccattgagaccaagcttgaacagaagcgcagtgaccgccacaacctgctacaggcctgtaagatgcaggacatcaaattgccgctgtcaaagggcaccatggatgatattagtcaggaagaaggtagctcccagggagaggaatcagtgagtggttcccagagaacatccagtatctatgctcgagaggccctcattgagattgactatggtgacctgtgtgaggatctgaaggatgcacaggcggaggaggaaatcaaacaggaaatgaacacactacagcaaaagctgaatgagcagcagagtgtacttcagcgcattgctgcccccaacatgaaggccatggaaaagctggagagtgtccgagacaagttccaggagacctcagatgagtttgaggcagcacgaaagcgagcaaagaaggccaagcaggcgtttgaacagattaagaaggagcgatttgaccgattcaatgcttgttttgaatctgtggctaccaacattgatgagatctataaggctttgtcccgaaacagcagtgcccaggcattcctgggccctgagaatcctgaagagccctatttggatggcatcaactacaattgtgtagcccctggcaaacgcttccggcctatggacaatttgtcaggcggggagaagaccgttgcagctctggccttgctttttgccatccacagctataagccggctcccttcttcgtcctggatgaaatcgatgctgccttggataacaccaacattggcaaggtggcaaattacatcaaggagcagtcaacttgcaacttccaggctattgtcatctccctcaaggaggaattctacaccaaggctgagagcctcattggagtctatcctgagcaaggggactgtgtgatcagcaaagttctgactttcgacctcaccaagtacccagatgccaaccccaaccccaatgaacaatagcaggaattctgccctcttgtctggatcctggaactgcccttctgtccatcttgcctgtgtgcatatagatttgtttgcaaaataaatattgga

SEQ ID NO: 1404 - DNA, 2287 bp, Cricetulus griseus
agccccagcagctgttggatcaagctgtagcccccgagtcatccgaaaccctgacagacagtgagacaaacggaagcactcccctagcagattcagacactccagatgtggcacagcaagatgaggtcattgaaagccaggacagtaaagccattgcaactgacaggcagtcacaggtcacagaggctgaagcagctcttgctcagaaggagggaccttcagtgccaccaatttccaccccaggaagaatatggggaaaaaccggaagagatgtctagaaccagtgaagcaagagcttgctatggaagcagcacctgttctggcaaagaccgaggtgggtcaagaggctagccactctgatggcgaaagagtcaaagacgaactctgtgtggaaggactggaggtgtcagtacacacatgggaactgatgttgagaaggagaaaatggaaacaaaaccagagcaagcgagtgaagaacctgaaaggagagcggcctctcctgagtgtgaagaagcccacccacagcctgtccagaccgttgacgcgtccatctcagagaggggagaggaaatgagcagccttgaaggaagctccactctcccagaccaagacgaggcaggttgcatacaggttcaagttcaaagcttggacccaccagtaaccccaacagctgtatccatgagggaggttgcagaaactgtcaagacttcagaaacagatggaagtctggagtgtgtgggtacacatttaataccagcagagatgtcctctgaaaagggtgaccactggacttctcagcatggagaggacattgtgcctcgggaccagagaagcaggcaggagtcggtcccagtaatagtaaggagagtgcagcaagggagggaggcctcaaggttgaagctgagatcttggagctccagagtgagagcaccaagcttgtcgagaacatcatccagacagccgtggaccagttcgctcacatcgaaacaaaccccacagtctgtgctcctgattcacagacccaggttccggtgatgcaggctgacagccagggagctctacagatgctggatgaagaagaaagctgccatcaagactccgcccaagatgaagcagtgactgctgcagcccaagatgggcttgccctttctgatatttccgaaggcaagagcaagccttcagaaaagatcaatatgcttgcaattgagagtgtcagtatcaaagaaagccccagacagaagaggacctacgggagcctgagggagacctggcagaatcctaagatgttagttactcactgtatatctgcaaggccagaatgtgaaggcaagccacggaaaaaaatgctgctgttgagaccaagattgctgagtccttgagattcagagtgggctgtccgctgacttcaaccttggagagcacccctgacaatcctgaggcttcaccgggagctagagccagctaacatttccttgtttaaagactgcctttgatttttcccttgattccatgtatttctgattgaaggtccctacattcaacctggaatcaatgttggcaatacctagttctacttctcaaactggagcatcctcctctatatatttatatgtatgttttctgtagtcctcctcatgtacctattgtatatttttttcctaatatttaagcacatgccttttgtattacacaatatatgacgggtgtgcagctgtagtgaagccttgagaagctctgagcctcaactataatctgtggcaaatagagaaataacattcctgagaggaaggtacaagtcattttaaaggtcactgagcttgggtttatgggttagtagtcctctgaaagtggtcgttttcctacgcatagggagctcagaaataaaacaccatttggaaacatctagaatgtcccaatattactgtgatgtgtttctttctaatccagttcaggttggaaagcagtctccttagtggcagattaagtcccttctcttaatgacgtggacagatgagtgtgcctaaggccgtgataggttttccatctcatgcagaaggaaatctgttgtacttttttgattgtactcttatatcctggattgaattcgtaagcagaaccaagtgagtcccattctttataaaatggtattttgatagatactggagtgtgtctgtgatatctgtgccccttttaagaacaatgttgcattatgttcatttgaacaaattgtggtttgacaactgatttaaataaaatatttgcttcacttaaaaaaaaaaaaaaaaaa

SEQ ID NO: 1405 - DNA, 2287 bp, Cricetulus griseus
tgggcttaaatcttcaggctgcggacacagtggtcatctttgacagcgactggaatcctcatcaggatctgcaggcccaagatcgagctcaccgcattggccaacagaatgaagtccgggttctgaggctctgcactgtcaacagtgtggaggaaaagattctcgcagctgcaaagtacaagctgaatgtggaccagaaggttatccaggcgggcatgtttgatcagaagtcctccagccacgagcggagagcattcctgcaggccatattggagcatgaagaggagaatgaggaagaagatgaagtaccagacgacgagaccctgaaccagatgattgctcgccgggaagaagagtttgatctttttatgcgcatggacatggaccggaggagggaggatgccagaaacccaaagcgcaagcctcgcctgatggaggaagatgagctgccctcctggattattaaggatgacgcggaagtggaaaaggcttacctgtgaagaagaggaggagaagatatttggtaggggttctcgccagcgccgggatgtggactacagcgacgccctcaccgagaagcagtggctccgggccatcgaagacggcaatttggaagaaatggaggaggaagtacggctcaagaagagaaaaagacgaagaaatgtggagaaagatcctgtgaaggaggatgtggaaaaggcgaagaaaagaagaggccgccctccagctgagaaactgtcaccaaacccccccaaactaaccaagcagatgaacgccatcatcgatactgtgataaactacaaagatagttcagggcgacagctcagtgaagtcttcattcagttaccttccaggaaagagttaccagaatactatgaattaattaggaagccagtggatttcaaaaagataaaggaaagaattcgtaatcacaagtaccggagcctgggtgacctggagaaagatgtcatgcttctctgtcacaatgcacagacattcaacttggagggatcccagatctatgaagactccattgtcctacagtcagtatttaagagtgctcggcagaaaatcgccaaagaagaggagagtgaggaagaaagcaatgaagaggaggaggaagatgatgaagaggagtctgagtcagaggccaaatctgtgaaggtgaaaatcaaactcaataaaaaagaagagaaaggccgggacacagggaaaggcaagaaaaggccaaaccgaggcaaagccaaacctgttgtgagcgattttgacagtgacgaggaacaggatgagaacgaacagtcagaggcaagtgggactgatgatgagtgagcagtgtggacttgatctgactgtggcagaactgaacactttctccccctttctcccttcacccccagtgagttcatttgccctttgggcactgggttattcctccgtcctcattgtcatctagagctagctttaggatagtgccagacaaacatatgatatcatggtgtaaaaaaaaacaaacatgcatctacacacacacacacacacacacacacacacacacacacacacacgaatatttgtaacatattgtgaccaaatgggcctcaaagattcaaagattaaaaacaaacaaaagcttttgatggaaaagacgtgggtggatagtatatttctacaggtgggtcaaatttggtagccgtttgatgtgcttgcttccatcatctatcctgatgaggagatttttatcttctacagcgctgatgaccgggagaagccattaaaagccactggttattttatttttcatcaggcaattttcaaaattttcatttgttcggtattgttttcttgtttgtttgttttttacactgtggtacatataagcaactttactaggtgacagatgtacagtagttagaaatcacctacatatacatttttccattttatgctctatgatctgaagaacaaaaaaaaaagctttttgacttgtataagatttatgtctactgtaaacattgcggaatttttttttgctcttgttttattgaccgctattgactattacagtgtctagagtgtcccgatggcttcttttgtccacctgagctcctgtgttaccaatgggtatggtctccttctccctaaagtgtacttaatctttgctttctttgcacaatgtctttggttgcaagtcataagcctgaggcaaataaaattccagtaatttcgaaggatgtggtgttggtactttcctaataaaccgataacttaccttgaaaaaaaaaaaaaa

SEQ ID NO: 1406 - DNA, 2286 bp, Cricetulus griseus
  modified_base (2266)..(2266): a, c, t, g, unknown or other
tgtgccctgaaggcaggtatggacatccagggtaccctgccctggtaacctatggctatggaggaacagttcctagttactgcccagtatatggccgggcacctcacagttgtggatcctcaaggtgaggggaagaggggtacccctggggcctggtgcccactcaccacgggctggctctgtgtccccgggaagtccaccctacttgcaatccaggaagctgggttatgagattcctgctgaggatggaagggacaagtacccactgcctgggcacctggcttcaacaggaggacccctggcatctacagagtcacctgaactgtcctggagggatggtcccagtgggcacagcacgctgcctcggtctccccgagatgcccaatgcactgcttcatcagagctgtctggtccctctacaccgctgcacaccagcagcccagtccagggcaaagaaagcacccgacggcaagacaccaggtctccccccttggcagcaactcagagactgagtcctggcgaggctttgccccctgttgtccagggaagcactgaaaaggctcctgagcttctggccagcagcaggcctgagccaccagaccctagccctttctcccagacctccccgcccagctcacccaatggctggcctcaggaaaggagcccagggggtcactccagtagtgccaattctcggggccctgtcccaaccaccctgcccggactccgccatgccccctggcggggcccccacgacagcccacgatggcgtccccaccttactcctgtgcctacccacgatgccctcggcttgtggccagcccagagccaccaccaccccagagctcacccacccctgccttcccattggctgcctcctatgatgctaatggtcccactcagccaccactttcctgaaaaacgacacctgtctgggtctgggcaacagccatcaccaccagccagaggcaccaaccaacatgtcacctttgcaactcctctcccagatgtcacccagcccccagagcatcctttacaagagaaccaaagcaatgtcaagtttgtccaggacacatccaagttctggtacaagccgcacctgtcccgtgaccaagccattgccctgctgaaagacaaggaccctggggccttcctgatcagggacagccactcattccaaggagcctatgggctagccctcaaagtggccacacccccacccagcgcccagcccttaaaaggagacccctcagagcagttggtgcgccacttcctcattgagactgggcccaaaggcgtgaagatcaagggttgtcctactgagccctattttggcagcctctctgccctggtctcgcaacactccatctctcccatttccctaccctgctgtcttcgaattcccagtaaagatcctctggaagaaaccccagaggctccagttcccaccaacatgagcacagcagcagacctcctgcgtcagggagcagcctgtagtgtgctctacctgacctccgtggagacagagtcactcactggccctcaagctgtggccagggccagttctgcagctctgagctgcagccccaacccagtaccagccattgtccacttcaaggtttcagctcaaggcatcacactgacagacaaccagagaaagctcttctttcgtcgtcattacccagtgaacagcatcaccttctctagcactgacccccaggaccgcagatggaccaacccagatggaaccacgtccaagatctttggtttcgtggccaaaaaaccaggaagcccctgggaaaatgtgtgtcacctctttgcggagcttgacccagaccaaccagcaaatgccattgtcacctttatcaccaaagttctactgggccagagaaaatgaaggaaagctgcaatctctgagcccacatcaacactgcactctcccagcacccacagctctcactgtcttggcctgccctatgaaagagagtgtggcaccagcctgggccactgttcttgcccttgcctgctaagctaagtgagtgggcccatgagatgacctggcatgtgaccagatggcagagacaggtgtaaggggtgaggcggtatcagtagtggaggcctggtggggaatggccctgccagctccacccagctggaggtcccatcatggagggaaaggggagaagggtgggagcttttgcctcccctctgaacgagaccagagtgggatcacataaacagaggaaaaaagagagtctatttttgngtactaataaagaatttcta

SEQ ID NO: 1407 - DNA, 2286 bp, Cricetulus griseus
gaggagtggagaggtgccgccacagaaacttcaggctttgcaaagagtccttcagagtgagttctgcaatgctgtgagggaggtgtatgaacatgtttatgaaactgtggacatcagtagcagccctgaagtgagggctaatgcaactgcaaaggctactgttgctgctttttgctgccagtgaagggcactcccatccccgagttgttgagttacccaaaacagaagagggccttggattcaatatcatgggaggcaaagaacaaaactcaccaatctatatctcacggataattccaggtggaattgctgacagacatgggggtctcaaacgaggagatcagctactttctgttaacggagtgagtgttgaaggagagcatcatgaaaaagctgtagagctactgaaagcagcccaagggaaggttaaattagttgtacggtatacaccaaaagtcctggaagaaatggaatcacgctttggaaaatgagatcagcaaacgcagacaacagacctaatcatttaaaactttatgttccttatctgtaatctagtggtaaatctattgctatcatggaacctttttatctttatttaaacagtgtataatgtattcatttatactgatttgtaaaagtaagtttttaaacactgaagcaatcattgctaaataggtattctttcataataataattaagcagtgaatcaagaggatgtaatttgattattaacattactgattaaatcccttatttatgtcataaattataaatgcaaacaagctcagatttcaacttttcaaatttgttaggctattcatttatatttaaatatatttctcatatttcagttcttccatgcctagagatgaggtagtttgtgctgagaaaaatgaaaataagacaaagtaataacttaaatgtggagcctgaagagcccaacataattagtgttcagcttcagttctaattcgagacaggaagaggaggcaggatttgtttaagatacagaaacaggcagcttcttaagtctcacaatgagtggggttcagagtgcttcttatctttatgattcagatagcgatgggagtctgaacaatgctttttaccatttgtccactggatgtcactattttactaaaaggcagctatcgatgtgtgattatgactaagtcttataaaagctgaaatcaaagttgattcattttcagtcacagattataagaacatttataaaaggttgaggtgatgatgttaagaaactgatgggttgaaatgcaggaaattatcataattatgactttattacctttatttttttttaaaaaaaatgggcattttgtaacattccttcaggaagaatggaagtgtgtacacggctttgcatgtttgtgagcactgtcagtcttacaaaatatctgtagctttcagagtaaaagtcagcattgttatttatcatttaggaattgaacactggattgtgcatggttgaatgtctttagtccactacaaaatgtgcttgatattgatagcatcatgttgaattgtatattttcaaaattagctgatgtgtttttaaaatgttgagaccaaagtagtatagaagagtatgacatattttaatttaattgtaagattattagaggtatttgtaaaactctatatattaaagttggtgcatatagaacagtaatattattgttgtgctcgtatccctacatcacagggcaagtacaccctggggtcttgtctcagcctagctactatggctacagttgctcctcagtacgcatcagcgttccgttacaattacagcctcctggtttcatgtttcagcgattgcagaatttcagccaagtttactttttttttttctttttttatgtttgttgagtaagctttttcttctgcagtaattcacaatctgttctttgtgtgggctgctacctatttataattcgtaaaataaaagtaacttaaaggagccaaatacatagctttgcttggtactattgagcatgattagaaatagcttgctttcattgatgaaattctcatatctcagaatttaaatattgaccataggaaaactcggtggcaagtgtacagtagtcttcttgtataataaggaagtgaaggaattttaataaatggatggtttgtgaataaaactaggcacacagtaaatatataataggtgttttatttcatttgtagcttacaaaaacaaatttccctttgtcccagcttttcatttattttcttaaatatttcaaaatgagttg

SEQ ID NO: 1408 - DNA, 2285 bp, Cricetulus griseus
gggagagcgacctgttgttcaaaggagagagcctgtgtccctggaagaatggaccaagagtgttgactctgaaggaagactcttgaacgtggagaacatgaagcagaggatcttcagagggggtcttagtcattcattaagaaagcaagcatggaaatttcttctgggttattttccttgggatagtaccaaagaggaaagaacacaattacaaaaacaaaaaacggatgagtacttcaggatgaaactacagtggaagtctgtcagcgaggagcaggagaagaggaactctaggttgagagattacagaagtctgatcgaaaaagatgttaacagaacggatcgaacaaacaagttttatgaaggccaagataacccaggactgattttgcttcacgacattttgatgacctactgtatgtatgattttgatttaggatatatacaaggaatgagcgacttactctcccctcttttatatgtgatggagaatgaagtggatgccttttggtgctttgcttcttacatggaccaaatgcatcaaaattttgaagaacaaatgcaaggcatgaagacccagttaatccagttaagcaccttactgagattattggacagtggattttgtagctacttagaatcccaggactctggatatctatatttttgcttccgatggcttttaatcagatttaaaagggaatttagttttctagatattcttcgactatgggaggtcatgtggacagaactgccttgtaagaactttcatcttcttctatgttgtgctatcctggaatcagaaaagcagcagataatggaaaagcattatggcttcaacgaaattcttaagcacatcaatgaattgtccatgaaaattgatgtggaagatatactatgtaaagcggaagcaatttccttacagatggcacaatgcaaggaattgccacaagcagtttgtgagatcctggggcttcagaacagtgacgttacaactccagattcagatactggtgaagatgaaaatgttggtactacttgttccacatctgcatttccaagtaacaccttgcccatccttgctgccagtgaagccaaagacgacagctccgcacagacattagcatccccaaatgcctgcagattaacacctgcatgatcatttgtcttatgttttttgagatactttgttgcaattcctttttagtacatgaaaggtagacatttacagtcttggtatggatcatgctttaagttttatggaaagacagtgtactgatgttcttgcattaaagctttacaaagttttaaactaattatttttgtagttacttctaccaaatagcctttccttttcaataacattccttagtatttttatagtgaagtgcattttatttgtggctgatgagctgggattggataaatactacaagtggatgctttgggaattacgcactttgaaaagcatccacagtttactccttagttggctatggacttgatgaaattaaatggtgagcctttataacgcattctaagatgaggagattgttagtgatgagatctaaaaatacacacagatttggcttttctattgtttacaacaatattcagcttaagtatttattctggctgagtgtgatttaaattagacatttcaccagtgtagtttactgtgtggataaagaactacttcagccttagcaagtggatttggcagtatgttttttacaaagaacttttcttctcttgtacatagactatatataagtactatttatgagtataagaaagcatagtcctattttctgtaactgaataaacttgactattgatttatataagctgattcaacaaagttaatacatgcttcaatataagatctttttcaaaactattttcttaactggacatttatttaatgagactacatcaatcctatctatatctggtataaatcactgtaacctcactttactaataatgtttattatcttttcctaataatgcattaattggttaatcagatctttaaatttttattaaaatattctttgcagatagcttatgtcaaagatttccaggcactgtcatgagtctcaaagtaatattttttgtatatgaatgaagctgtttttaccatgcagtattgcatgattttaagttatgtggaattaacataactggttccgttttaattgtaatttgttaaactcttgtacatatcattaaaataaattgaaagctgaaatagtgttttcaagttaaattacacctaaaaa

SEQ ID NO: 1409 - DNA, 2285 bp, Cricetulus griseus
agtgatagcctggtcaccgaaggatgaacggggaggaagaattctttgacgccgtcacaggctttgattctgataactctacaggggaattttcagaggcaaaataaaagtcagtgggatgattgattttgataccagcaaaagtaccaggagtgggagaagcggggagagaccgccacaggagaatggcgttcaaaagcacaggacagcccttcctgcccccatgttcaccagaaagtgatttcagcgtgtggagtatcctgaaaaaagtgcattggtttggagctgtccaagatcacgatgccaattgccttcaaacttgacgcccctgagcttcctgcagcggacccaggccctggagaggatgcagtctgtagctgcctttgcagtctcggctgtggcttcccagtgggagagaactggcaaaaccccttcaacccactcttgggagagacatatgagttgatcagggaagacttagggttcagatttatatctgaacaggttagtcatcaccctcctattagcgcattttactcagaaggtctcaaccaagacttcatgttccatggttccatctacccaaagctgaagttttggggcaagagtgtcgaggcagagccccgggggaccatcacactggagcttctcaaacataatgaagcctacacgtggaccaaccccacctgctgtgtgcacaatgtcatccttgggcagctatggatcgaacagtatggaatagtggagatcctaaatcacagaactggagataagtgtatacttcacttcaagccatgtggactgttcgggaaggagcttcacagagtagaaggttacattcaagacagaaacaggaagaagctctttataatttacggcaagtggacagaatgcttgtggggcatcgaccctgtttcatacgagtcctttaagaaacacgaaaggagaggtgaccaccccaggaaagccaagatggatgacagccctgagaaagctaacagtgatgtgcctggcgatatgacagacgacgttcctgtggctcaggagactgtgcaagtcatccctggcagtaagctactctggaggatcaacagccggccccccaattcagctcagatgtacaacttcaccagcttcactgtgagcctcaatgaattggagtcaggcatggagaagaccctgccacccacagactgccgcctccgccctgacatccgtggcatggagaatggcaacatggatctggccagccaggagaaagagcgactagaggaaaagcagagagaggccagaaaggaacgtgccaaagaggaagcagagtggcggaccaggtggttctatccaggcactaacccctacacaggggctcccgactggttgtatgcaggggattactttgagcgcaacttctcagactgcccagacatctactaagtgaagctccacttgggtcttcacgttcactgaggcctcaggagagctccccagttcttttcacacgtgacagaagtgcacaaggccagctgagctggcagcacactccgttacaaaatgtgtaatcgaggaagaaccagtagagcctgtgtgctcctctaaaggctgtgatgtgggtttctggaagagtttcaagcccagacccaaaggaggaggggagcatgggtcttgaaagtagcctgtaggccagagtccacttcattgtggagggcacccacggaatgaagtgacaagttgccagactcttctaccaatctgaataaggcaaagattactttagaaaatatttaaattgaaactacttgaatgtagcaaacacattaatcaccactgtgtactgtccaaaaaatgtccctgtgacaagccagagtggcaggaacactgtgacttggatgagaaaccccccagggctgttcccggcctcccaggaggccctgcctctggcctcagcactcccacagcctcactgtcactgtggacctctcctgtctctgaggggtcatttcttcactcacctcacctgtgtgttccttccccctctcctgcagtcttgtgtttggtttccccagcatgcatgttctagtccaggcaaatcccatctggttgtgtgcattgggaggtcagaagcagcatctactcatgtggtgtcattaaaatggtttaaacacaagcaggtgtgtccatctctgcattcctgtcaagtgatggactttatgtagaaatggtggcaccaaggatcacagtggagctctttgcatcaaagacaatctactgtgtgtacatacctgtgc

SEQ ID NO: 1410 - DNA, 2285 bp, Cricetulus griseus
agcggaggctgatgaagcagctgatgaggaggcaccagattcaacccggggggtagaaaaaggacaagggataaaagaaaaggaaccagaaggatcttaaaaaacttacgctcaatgaaaggatccaagattcttcagagcagaagaaaactaagaaaaacttgaagaagtttcttacccgacgccccacattacaagctgttcgtgagaaaggttatatcaaagatcaggtatttggatgtaatcttgccagtctgtgtcagagagagaatgggacagtgccaaaatttgtgaagttatgcattgagcacgtcgaagaacatggtttagtatgttgatggtatctacagagtaagcggcaaccttgcagtgattcagaagctgagatttgccgtcaatcacgatgagaaactggatttgaatgacagtaaatgggaagacattcatgttgtcactggagcactcaaaatgttttttcgagaattaccagaacccctttttacatttaaccatttcaatgattttgttaatgcaattaaacaagacccgaggcagcgtgtcactgccgttaaggacctaatcagacagttgccaaagccaaatcaagatacaatgcagattctgtttagacatctcaaaagggttatagaaaatggagaaaaaaaccgaatgacctatcagagtatagcaattgtttttggccccactctgctgaaaccagaaagggaaactggaaatatagcagttcatactgtgtaccaaaaccagattgtagagctgatcctcctggaattaagcactatctttgagcaaacagcaagctatgactgtgtaattttggattcattttatcctggatgcttgcgtttcatactctcaataccagtaaaaaccaaaactcagaattgtaaccagtcacatacactggataactgggtaaggaaaactatgtgggtcccctgtgttgtcacccttgctgtccccaaactggatgatgttgatcccttctcaagctctgtgagtctttacttggtacaatgatagtcactgtcagttatttcaaaaagcgctctcgggcgtttaaaacaaatgaagttgatccatttgagatctgtgtactgcctttttcagggtttcctgcatgagtggcagtcctaagtgctgaagctcatgactcagatagagtccctgggtgaaggtttgctgtctaatttactgtctcacagcaaccttgctggataccttagttgtttgttgggacagcacactgacagtacttaaacactgtgatatactggagttctggttagtctaaatcaaatcagggtatttggtacctgtcttgctgtactgaattatagctaacaatcctgattatatttagtgccatattgagttcttggtatgaccctgtggaaatataatttagcttatgtatatacctgtgttgtataggttcagagtacatctaacccaatgtttctaatcatgacattggtaaacgtttccatgaatattaggcttcctccagaaataggccattatttgggaaagttaaaccatgcacttttaggttttaattacattcactggcagatcactgcaatgagaatggtactgggaaatgctgaatagacttgctaaatagtgaacacactacaagaggagctttttaggttatttaatatgtacagaagacattagaaaaatcattatagaattctaacccccacttgaatggtggaaacctgtgtaaattaggtggatgttggatagaaaatgacactgcgaaatttgagtattttctttttacattactaatgtagattgatttgtataataaaacagggtttggaaggttttgttacagggaggcatggtctgttggagatttttaaatgtattttctagattaactgctgtatatgaaatgtctaatctaataaaggaaactataatatgcttacaggtttttttttcccctttggagatgtgcattttggttctttaattttttttgttttgtttttatttactggcatacttttatacctcattttagaaaatcaaccaaatccatgtttctcttggtggtcatgaactatgtcaaaagggtgaaaattgtctcgtgtttgtttcaaagtacatgtgtgtatacagagtctttaatgttgtattggtctaccactaataattgtattgtaatagtgtattacaatgagatcagtgtcttgtgttttcatcctttgtgaagtaaaagttatcaattgttttgtaataacaaa

SEQ ID NO: 1411 - DNA, 2284 bp, Cricetulus griseus
ttaggcgcgcacgccggcctagtgttgcaggtctttaaaacatttgatcacatggctcgccaggatgatgagaaaaggaagaaggaacttgaagagaaaatcagaaaaaggaagaagaggccaaggctgtggcagctgctgcagctgagaaggaagccgtgccagttccagtgcaggaggtagagattgatgctactgcagaattgagcgggcctcgggaagtagaaaagttggagtccccaggcccacagggccctgaccacaaggtggcccatggcttggaggaggcagaagctccaggaactgttagcagtgctgctgaaggccctaaggaacccccagtgctccccaggattcaagagcagttccagaaaaatccggacagttacaatggtgccatccgtgagaactacacctggtcgcaagactatactgacctggaggtcagggtaccagtgcccaagcatgtggtgaaaggggggattgctgaaggctctcccttccgaggccaacgattcgacccggccatgttcaacatctcccccggggctgtgcagttttaatgaccagaaggaaaggaaaccctcatcatctgggaggtggagaccttgtccccctcactccctgcatgccagggactcactcctgatcaatcctcactattttttctttcatgatgaaccaggccttccatgctgaccttgcaccttcagactatttttagagaaggtacagggccagctgctgcctggcagtctcaatggccaacactaaatgaaggtgtttgaaattagggagggacatgtcccagcaaactgggagcacatgctctgtctccacagcaaccagccactgcaggcaacatttccttcctcccctgttctctctgcttgctgttgttttgacgctgttctgcttgcttgtcttctgactggggataaggaatggctgggctctcaggcacagctaagttgaagagtgtggggccaggcacttgcatgagggcagatggagcatggcttgtgtgtgtgtgtgtgtgtgtgtgtgcagtcttgctcatctctttgtgaatacacctggccagcctcagcttcatgggcagagcagcagaaactgggtctatttgcctgttggagatgatgggagaaagtctgaggttctggcccctggcccagatgtggcaaggatgctgtctgccttctgactgcagctaccttactttggttcttgaaacgagcctggccaccactacttgctccctacaagacctcctcttggatacgttgcattgaagccttggtaccttcaagagaagatcacagcatgttagtagttcattggcagattgtgtctatcacactccctaagcagccttgaccttgaaggatgcctcaggaaggaaaacttacccactggcttgaaggcaactacaaatgagtccaagaaaatgaagattcccctgtgccaatcaccagattgcttcctggagctcagcgcctctgtggctgcagaccaccttcagccagggtatgaagacctgatcaagggacagggacccaggtgtcccaaccctttacagggctctgtctgtgcctgttgcttcctgccatctcagtttgcctcacatgtttggaaggagccactggaagagcacatgcaagctgtcccacctaatgaaggaaaatctctatggtgtgtctcgctctcaaccctcatcctgtgggtagtcttccagaaggaataatgtagtgggtgagccctgcatctttttatttgggacagtatttcacttctgtggcaacttatctccctttggcatggttttattttctgcattgcatttctcatttgtccctgccctgtttcaacaaacaagccagtgtagaaaaagcagcctggggaatagtattagatgtaggccatatggcaggaacctgtcctctgtgtgtgatccctgtggcatgttatggtacacggtgtggtagtggctaccatatccacatgtcttcatcacagtggggctcaatcccagccagccaagtagatagttctttgccctgaggaactgccctggctcacccacccactgaagctggcgtgttgcctgttctctctttttagacatgacagccacaagttggtctctaaatcccacctgctgaggtctgaggaaagcagggtgatttcatcccctttgtccaaagacccaggagagttgtgtgtccggcctacaaagctgctctggctcctcggtgttggtttgcaataaatctgtatttaagca

SEQ ID NO: 1412 - DNA, 2284 bp, Cricetulus griseus
  modified_base (2269)..(2269): a, c, t, g, unknown or other
tccgcagtctcacatggctgagatgacaggttcaactcaagctgtcagcaggaaggacatatggtgcagcaagcgggtcctttttcttacacctcaggtcatggtaaacgaccttactagagaagcttgtcctgctgcccgaataaagtgtcttgtggttgatgaagctcataaggctcttgggaactatgcttactgccaggttgtaagggaactggtcaaatacacaactcactttcgaatcttggctcttagtgccacaccaggtagtgatatcaaggctgtacaacaggtgattaccaacctactaattgggaagatagagcttcgttctgaagatctccggatattttgccctattctcatgaaagacgagttgagaagcttgttgttccctggggaagaacttggagccatccaaaagacatacatccagagatgcttcaagctttacaagaaaggaaataaagagaaaaattttttctatagtcatccaaagttaaagaaactggaagaagtcataattgaacacttcaggtcatggaatgctaaaaacaccactggaaagaaatgccttgagaccagagtaatgatcttctcctcattccgagatagtgtggaagaaattgcagaaatgcttttacagcatcagcccattattcgagtgatgacatttgttggccatgcttcagggaagaatacaaagggttttacccagaaggaacaactagaggtggtgagacagttccgtgacggcgggtataacacgctggtttctacctgtgttggtgaagaaggtttggatataggagaagtcgatcttataatatgctttgatgggaagacttcaaggatcacgacaggaaagccagaaaaggcttcaaagttcgaaagaaacagaattatgtaaagaatatagctcggatgtttctagatgatgaagcagagatttctgaagaggatgcaggatgtgtctcatcagatgaagatgatgggccagaaaatgaacaggattcatcacttcttgactttgtaaatgaccagacccagctttcacaggctctgaatgattccgaaatgagagctatttacatgaaatctgtacgtagtccactgatgagcactaagtacaaaatggtccgtgagaaacatagcaacatgaacattttctcacagattcctgagcaagatgaagactatttggaggacagtttctgtgttgatgaagaggagtcttgcaaaagccaatcatgtgaagaagaaatttgtgttgattttaacttaactaaagattcctttacagatgagaatgtaagatataaaacccgatatgcagaaaagctaaagcaaatgagcatgaaacaaagaaagaaaaaaagaaactctctagaattatcttaccagatgatgattctgatgaggaggaaaaatacagtccctagacttccacaagaaggacacagagcttgcattcttgtagacagtcgggaaatcacttctggtttagaagtcatttcttcgctaagaacagttcatggcttacaagtagaggtttgtcctcttcatggctgtgactacatcataagtaaccgcatggtggtagaaaggaagtctcagtctgaaatgttaaataatggcagtaagaacaagttcatcgagcagatccagcgcctgcagagcatgttccaaagaatatgtgtgattgtggaaaaagacagagaaaaagcaggagacacctcaagaatgtttagaagaacgaagtgctatgacagtctgctaacctccttagttggggctggaatccgaatccttttcagctctggacaagaagaaactgcatatctcctaaaggagctgtcattggtggaacaaagaaagaatgttggcattcactcagcagtgctgaatcctagtaaatgtgaggcacttcagttctatttaagtattcccagcacaagttatataactgccttaaacatgtgtcactggtttccatctgtgaaaaagatggctaacagctcacctgaagaaatctctgcgtgtgctcaagtaactcatcaaaaggctgaggagatctacagatatattcactatacatttgacatacaaatgctaccaagtgatctgaatcaggagagtctaaaatctgatgcatgctcagcaacttaaagtatgattatgaaagaactctcactatactaatatacttaataatcattgtagtttgtaattaccagtataaatatatgtaaatattcatgtgtaagtntcttatatattatat

SEQ ID NO: 1413 - DNA, 2283 bp, Cricetulus griseus
gccaccaacggatcccttgctccgagtccaggaggtgctaaacggcaccgaggtgaatctccagcacctcacggccctggtggactgccgcagcttgcacctggactacgtgcaggcactgacaggcttctgctacgatggtgtcgagggcctcatctacctggccctcttttccttcatcacagccctcatgttcagctccattgtctgcagcgttccgcatacctggcaacagaaaagaggcccagatgaggatggagaagaggaggctgctccagggccacggcaggcacatgacagcctttaccgagtgcacatgcccagtttgtacagttgcggtagcagctacggcagtgaggccagcatcccagccgccgcccacaccgtcagcaatgccccagtttcccatcatcccgaagagtggcagcttcgtcccatttgttttttgtcactgaccacatttgtcatctccagggcagtctgggacataggcgaagcaggacactgcccacttcccttccttctcagttggatttttgcccaggacaagcggcacgtgcccctctggagccttgggggctgaacctgagatggctgtgaaagtgccccccagcctcagaatgccgctgttgggactaaccactaacctcactctcagctgccacgggcactcttggccgaccctgagccagcaagcatgaccctaagtctagcccgaagccatggctagagtggtcattcctttgcggggtgctgccagggaggggccaggcccacaggcaactgaaagggcctagagaccccccccccaggcaggtgctgccccaggaggagcatgtcccagggactgtggactggagtccatgtggcctcagtccctaccccagaacactgctccactaaggtgcttttggctttagtgtgtgatgtttgctgtgcttcctgctgtgaggggccaaatcagctcccaaatcaggacccagagcctctaccctggcccagccagccagtgtgagctctggcctgtggaatgggcagctacattgctgtggagtagcatgttgtgctggtgtctgggaccaaaaggagtaggcagaggactcactgggccgaggggcccgagtctgggcaactgtagttcctgagcataaccaatcctcagtggaggggaccctgcctttggcgccaactgatctggcgccaggaacctacagggccatggaggcccagctgtggccagtctgcctactatgggtgtgttcctggcctcaggttcagagggaggcatggggcacccccgcctgggtgcctggatgtgccctggggcctctcagaagcacaaatgctgccccctggccgtgagctggccacaaggtgaatgtatatagcatgagaggcgggcactgcccggatgtggctgtgaacttgtgctgtcttgggagtcctgaccgtcgtgtgcgtgcgtgcccccatctgtgacttcactcaccgaggctgaagaaaggaaacaaggggaaatgaaaagagggttcttaccctgacctctacggaggaaacggctcctgccactgttgtttttttgttgttgttttctgatttttggggtgacacttgtctcctccatcccagtagtccctccacctctccagggggtgagcagttcagtgccagctgtctgtgattggttccccactccctctaactcaggggaccctacagctctggtgggtaacaaataaggcttagccaccaaaccagacccaggtccctagccaaaccagggaggagggatctggctgggacagcaatgttgataggactggtggccaccatcccccacaacacacactctggcttatgtcaatgcctgccctacccaggtctcagctctgcccagcccagaaggtggttagctcctgggccaaaggtgaccagggtctcttgtttttattcataatgatggtgtgccatgccctttcccatatatatgattttgtgagatttgcctcccagttactgtccccctgcctgcatctgcccccagtggacaatgtcatctggtttgagccagccccaagttcccctccagcctctgtagggccatggctgtgtgttactgttgctgtgtttttgttttttaaactgggtttggggtttgtatttttatttctttggggtaactttattttcttggtctaaattaacttaaagtttacttgttcctattgttaatttctgtgatctttattcaattttaagtaacaaaaaaaaaaaaaaaaaaaa

SEQ ID NO: 1414 - DNA, 2283 bp, Cricetulus griseus
atgacatgaagcgtcaagcaagagcatgccgcccgcctgcaggaagtacagcggcggctaggtggctggactggaccggagctcagcgcctttggagagctggtgctggaaggcaccttccgtgggggcggcgggggaggcccgcggctgcgaggggtgagcgcctgctcttcctgttctcacggatgctgcttgtggccaaacgccggggcatgaatacacctacaagggccacatcttttgctgtaatctgagcgtcactgagactcctcgagaccctttaggatttaaggtgtccgatctgaccatccccaagcacagacatctgctccaggcaaagaaccaagaagagaaacggctgtggattcactgtctccagcgcctcttctttgagaaccacccggcttccatccctgccaaggcaaagcaagttctttggaaaacagcctgcactgtgctcaccccttccttccccctcgtggttcctggcttcctggacccctgcaggagcctgcccagcctctagctaccaggagggaactgttgactgggaacaatcccggaggaggaggactgggcgagcaccctcagaaagcagagtggggcagcaggaagacgaagaaggcgtggtgttcccagctgtgcagacccaggatggcgcccaagtccaaggattcccggaggaactggaataccgctcttgttcagaaatccggagcgcctggcaagcgttggagcaggggcagctggcccggcctggcttccctgaaccgctgctgatcctggaggattccgaccttagtggaggcagcaccagcgggaaggcaggaatgccacattccgagcggtcagcatcccgggtgcgagagctggctcgactctacagcgagcggattcagcagatgcagcgagctgagactagggcatccaccaatgccccccgacgccgacctcgtgtcctggcccaaccccagccatccccctgcccaccccaggaggaggctgagccagggcctctgcctgcttttggacatgtgcttgtatgtgagctggccttcccactgaactgtgcccaggagtctgtccctctgggccctgctgctctagttcaaactgccatacctttgtctaagcaaggagatcatctgaatgcccagggtctaaatgttagctgctgttggtggccgagctgtcagccctctactagtgtgcacaagcaaccccgaccttcagatcccagccaccaccccactgccattggcgcctgaccccccagacattgagggtcctagtgccttacctctgtctgcacacggaggtcgtccagactgctgtgtcccgtgcagccctctaccttccttgtcccaagacattcagatgccagcaaccgtacccatgtcccagccacaaatccttacagacatcagggccgaagctcccccatcgttccccaagcaggagggagccccagattctctgggtccagagccccgcctcacagacacaccggcccccagactttcacccttactgggccagcagaaccccacggctggccgtgtctcagctgtcactcctctcactgaacaaggatgctctcgggaccttcaaggcctaataccatggagttatctaaaccaagaggccatttggtttctcctgttgccaagtccgagtcctcagacgtcaccccactgcagaacccctccctctccactcgccagctcctgggccccagtgcagctgccctctcaaggtacctggcagcgtcatacatcagccagagcctggctcgccgtcagggacctggcggagatggcctggtggcctcccagggtccctggtcctcctctgcccctacgtcacgggcaccttcaccaccacctcaaccccagccgccagcccctcctgccaggaggctcagctatgccaccacagttagtatccaggtaggaggtggtgggcgcctacggccagccaaagcccaggtccggctgaaccaccctgctctcatggcagccccccacccaggagcctgtgggccttcccaaggcccagggggctcctgatgccctgtcccaaatataagcctggacattatcttcctaagcttccagaactttcaccaggtgacacccaccattgggacatctagagtcaggacacaggtccggagatggctgcagctttccatgccttgggaatctgtgttcacagatggccctcatggggtcatggttatttgttaattaattttatgtaaatgaactaaaaaaaaaaaaa

SEQ ID NO: 1415 - DNA, 2282 bp, Cricetulus griseus
tggaggcttgggcgggacgcacgcggtacggtgcaagatggcggatgcacaagtaattactgtcccaaagaagcataagaagaaaaaagaccggaagccattacaagaagaagatgtagctgaaattcagcatgctgaagaatttcttatcaagccagaatctaaagtggctcaattagacacttctcagtggcccttgttactaaagaattttgataagctgaatgtaaggacaacacactacacacctattccttgtggttcaaatcctttgaagagggagattggggactatatcaggacaggtttcattaatcttgacaagccctctaacccctcttcccatgaggtggtagcctggatccgacgaatacttcgggtagagaagacaggccacagtggcacactagatcctaaagtgaccggttgtttaattgtgtgcattgaacgagccactcgtttggttaaatcacaacagagtgcaggcaaagagtatgtgggaattgtccggctgcacaatgctattgaagggggtactcagctttctagggccctagaaactctgacaggtgccctgtttcagcgacccccacttattgctgcagtaaagaggcagcttcgggtgaggactatctacgagagcaaaatgatagaatatgatcctgaaagaagattaggaatcttttgggtgagctgtgaagctggcacctacattcggacactatgtgtgcaccttggcttgctactgggagttggtggtcagatgcaggaacttcggagggtgcgttctggagtcatgagtgaaaaggaccacatggtgacaatgcatgatgtacttgatgctcaatggctgtatgataaccataaggatgagagttacttgcggcgtgttgtttaccctttggaaaagctgttgacatctcataaacgtctggttatgaaagatagtgcagtgaatgcaatctgctatggggccaagatcatgcttcctggtgttctccgatatgaggatggcattgaggtcaaccaggaaattgtggtcattaccaccaaaggagaagccatctgcatggctattgcattgatgactacagcagtgatttctacctgcgaccatggtatagtagccaagataaagagggtgatcatggagagagacacttatcctcggaagtggggtttaggtccaaaggcaagtcagaagaagatgatgatcaagcagggccttctggacaagcatgggaaacccacaggcaacactcctcccacctggaaacaggactacattgactacagtgattctggcaagaaagcactggttgctgaagcattacaagtccctcagttagctgctgaagcagtaaaagtcataaaaaggaagcgagagagtgaaagtgaatgtgatgagacccctccagtagtcccccaattgatgaagaaggaaaagaagaagaataagaagcctaaaactgtgctagaaagtgggggcgaggctggagatggggacagtgacaccaccaaaaagaaaagaagaagaaagtaaaagtggtagaagaaatgtctgaatagtaaaagccacttgaagaattatgtccagctgggaggagaaatgaaagccttattgagaaaacattttgttgagggagtagaacagaggtcccaaacagagtacagagttctggtacactttagctgccacttgtgacctcagtgattaaggtgtggccatctcatcctgtcctgtcctgttttaaggatatgagagatgaaaagcaggtttttgcctctgacccctctgcttgcttgagtggggaagcacactttcagacatggcactgcctaattaactgtctgcagctgtttactaatggccattttaatgccatagatagtcctctcctagtttgctttttttaaggtttgtgaaaattaaatctgctaaataaaatggtatagaaccttctgtgattaaaagaagaatgtaattgaacatgttcagtggggaaatcttatctccagtatcctgtgagggctgttctattctggtattagtggtggcccatgcctttaatcccagcactcaggaggcagaggcaggtggatatctgagtgtcagaagccagcctggcctacagatggagttccaggacaggctccaaaagcaatacagagaaaccctgtctctaaataaataaaaaaaaaacaaaaaacaaaacaaaaaaaccaaaaaacaaaaaaaacaaaaaaaaaaacaaaaaaacaaaaaaagaaaaaaaaaagaa

SEQ ID NO: 1416 - DNA, 2281 bp, Cricetulus griseus
  modified_base (831)..(831): a, c, t, g, unknown or other
  modified_base (835)..(835): a, c, t, g, unknown or other
ccggagctcctggtcgcgagcgtcctagccgagctccatcccgcggtcctcgctcctcccgggatccagaacctccactcgcgagctggctcgcagcccagaataataatatatttagttcctctgaagatgatattgttgcccaatcacccatgtgtccgtcacattagatgggattcctgaagtgatggaaactcagcaagtgcaagagatgaatgcagacttccccaggagcctcactccccagagtttaaagaaatgccaaaagatcttatatacatagacgatgaggatccaagttccagcatagagtcttcggatccatccttatcttcaacaaccacatcaagtcggaatcaagcaaaccgatcaagagtatcttcaagtccaggaataaaaggaggggccactgcagttctgaaaccagggaattctaaagctccaaaacccaaagatcctgtggaagccacacaggcatcagaagttttgaggacagtgcaaccctcacaggccccctatcctacccagctcttccagactgttcatgtagtacagccagtacaagctgtctcagaaggagacacaaccataaccagcaccatgcaggaagaaacagcaaattcttcagttcagagtattaggacgatacaggcttcaacccaggttccagtagtcgtgtcacctggcaaccagcagttgcatacagtctcacaactgtgatagccagcaccagacccatcgtcaagtgccagctcacagaatttatcctacaagccattccatcatcacagcccatgacagtactgaaagaaacgtcatgctacaatcacngaanccgggctctcctccttccattgtctttagcccacccaagtacagcaggtccttacaagcaatgttcaatccatctgcaatggagctgtcagtttggattcatctccatccttcagtgccactacacctgtggtgaccttctctcgaagttcacagctggttgcacacccacctggcactgtgatcacctctgttatcaaagctcaggaaacaaaaactcttaaacacgaagcagataaaaaggctgaagatcatttgaatgaagacactgagaaaactgaacagcagccacagccttacttgatggtagtatccagttcaaatgggtttccctctcaggtagccatcaaacagaatgaactgctagagcccaactctttttaattgacacaccaaaggaattatgggtggttgtttttttaattgaactatgttttggttgtctggaaataacctgattttttccctaagataaatctatacaagttctaattgttaaaatagttacttttgactttcctagatgaggatgaaaaaccaagtatttctcatatctatgtttcagaactcagttgtgaaggagcaggaattttatactatgaagaaattcttcttgagactttttttagttgctataagtatttttaaagttacttttctaacttgacactgtattagcttcctgaattgtttgtaaatactacttatataaatataagtcaacatgaaatttatataggaaatattttcattccacttgtataatttaagtcttgactcagatgcaagaaacttattttatactattaaaattttatgatgtcacttagcttgactttagttggctgcactgttgtggtggtccacacctttaatcccagcatttgggaggcagaagcaggtggatctctgtgagttagaagccagccttgttaacatagttctggacagccagaactacataatgagatcttgtctcaaaacaaacaaaaaatgctgagtgctaaatgacaaactgctgttctgagagagacagggcttcaaagggccaagggaacaaccagagtcctgagctagtagtggagtcagttattacaaaagcataactgctttttatttggattattttttactgtgggtgaaggggaaggaaattgcatacaaagataacatatatccaagtttctgaagtagagttcttagattactttttcaattgtaaaataatgtacatttaatgtcacaaagaaaattagttgtctgcaaattttctagtacagaaaacctttgtagaagaaaaatcattatggttagagggctaatattatatgttttcatattataaaatagaaatttgtatttaaacaaaaaatttaaaattttaggaatcctctaaacgtttttgtatctttaattgtttattattaaatcatgtaaagttctacaa

SEQ ID NO: 1417 - DNA, 2281 bp, Cricetulus griseus
gaatttaagaagtgcaacatggccaggggctgcctgtgctgcttgaagtacatgatgttcctgttcaatttgatattctggctatgtggctgtggactgcttggagtgggcatctggctctccgtgtcccaaggcaacttcgccaccttcgtcccccagtttcccctcgctgtctgcagccaaccttgtcatcgccataggcaccattgtcatggtgacaggcttcctgggctgccttgggccatcaaggaaacaagtgtttgctcctcagcttcttcatcgtgctgttggtcatcctcctggcagagctgatcctgctcatcctcttctttgtctacatggacaaggtgaacgagaatgccaagaaggacctgacagaagggctgctgctctacaacaccgagaacaacgtggggctcaagaacgcctggaatatcatccaggctgagatgcggtgctgtggagtcactgactacacagactggtacccagtgctgggagagaacatagtgcctgaccgctgctgcatggagaactctcagggatgtgggcgcaacaccaccacccccttgtggagaacgggctgctatgagaaggtcaaactgtggtttgatgacaacaagcacgtgctgggcacagtgggaatgtgcatcctggtcatgcagatcctgggaatggccttttccatgactctgttccagcacatccaccggacgggtaaaaagtatgatgcctgagcgtttggcggcgcctggccccaccgggacactgtatgtgccaggggagaggacctaagtctgtgtctcctgtctgccctccgatggccaccctgccccacctgccagcctgccctctcctgcccacatccttggccttggaccttttggagggtagaggcccagggaggaggcatcgtgcagagacctcagggcttgggcgcctggattcctgcacctgcatatttgccaaagacgccagggtgggcagggtgtcaaggaggaagccctggcattgatgggtttctgcccctgcccttcctcacactgacacttgtccctgtgtggggtggagagtctgcctcaccaaggccactgccgtccatgtgcccagccagagagcgggccagggtgcagggtggcaccaccaggtcaggccccctggagcaccctgcccaggtttttatactatagtgtaacttttttattttactctgattatggttattcaggaatattatctctcagataagtttagggttagccttctgatttataactttttactgtgttgatttccataaccagatcacgaagtcccaaatgccttcttgctttttagcggtgtgtggctgtgtagtcatctacagagtctgcatggggcagaggtctccatgcacagggtgggtgtcctgaaccccgtgcttgtctcgggaatggcccccatacactagatggccacaccgagtgaggccatgggaggtggctcagctatcctctgaccctcttggctgtgagctcactttggacaatcctgccttgagacctctctcacctgcgcttcccttgcctaaggcagagctgtttcctccaggtcccacacaagcgatctgcagacctgactgggaatgtcctcttggtttgcacgtggcttcaaggaaatgcctgacatggctatggcatttctccacagcgacaggtgtcagggtgcaagtctccttgtgcgtctacactctctgagctggcacagtgtcaccctgtctctacgccagcctgggccagcacctcagctctcccccttgcacatgttctggcctgacttagaattgagtgtctaagcctccagggtcttcaagtggatggaattgttgtccccttctctctgaccccctgcccacccgctggtggaggtgctaactagcagggacatggcacaggacagggagctgggtgccaggtgcttgggtatctgctctttgcccctcagccccttggtctggtgtcccctctcatgttcctgttctctcatttcccttccctcctccattatgatggggtcctggcctcctctccctgcgtgggcactccgaggagtcaggctttcggacctccacttgccttgctgtccctgggtggctggagagccaggagtgcacgcttattggtttcgaatgcactttctgcttgcaatgccttgtctgcatctcctccatcccaggccctgctttaacaaacaccatgtttttagcatgtttttaaataaaaaccaataatgtgtcaaaagc

SEQ ID NO: 1418 - DNA, 2281 bp, Cricetulus griseus
atgtggagtacgaagacgagagtggacaccgttaccgtttgtatcttgatgagttagaaggaggcggtaaccctggtgctagctgcaaagacagtggtggcgaaatgaaagtgttacaagggtataagaagacagtgagtgacacgcatgagaatggggacatgggggcttcaggtgaaagccccctggatgacagcacagcaagagcagccgatctgcacagcctgcatcaataaaaaggcttaactaatccatccccagacgctcgtcagactcttgaagttgggggcacgtagggaagatggtaccaagattgcacaagatcaaagggaggctgtgtgttgacctaaagacaaggcgggaacctcagggcttcgtgtgaacaattctaagtgcagaaacccctattttctgtggtagaccttaattagctattgcatggaaggccattttgattttcctggactctaagcaccaaagcatgtgtttcccaaggggtattactaggctcttcagggccaagtggatgctagttcatgactccttttcatatgtaacaggacaatgctaactggattttctaagtaccctttaaatagagcagaatagaggaatccacaacacatattccctaaggataaactagaatttcagatgacagagctcgactcagtgaattgcaatacattttgagttgttcataagctttggcttgtgatagtcaggacacattactgtcatgaattacattgtgttcaaactgcagtttgctttaagtacctgacttgccaatcatttaaaaaaccaggagccaaggtgggcaagacaaggtaaagacattttggtacagtgaccgtattggttttcatatcagtatatgtttgactaaagcaatactaatatgtaaactctgtaatgtgttagttctcctgtatcagaactaagcacagagtgcctactccctccttcctgacccacagaccattgcaccttgctgggcaaagtcaaatactgtctttaaagaggtggtgaattttgctatgtcactgtcttaaaggatttacacctaagggaatagtaagcgggagaagcctccatataaggctttcaggatattatcatttaggataaacctttcttgggatgcttgtttttccctagatgcattatatatttgttcaaagttaaatctataaaatgtatatactttattttgtgattttttgctatttataaatttagtttgtaactgttactcatttatggtctgtgtgggtggtttcattcttcagagtatcaccatggtaactggtcactagaagtgcacttggtctgtatattgttactaatgctgagctactttgtagtgtaacattgcctgtaagcaaggttagtattttaattgtacaaatgaataaaaagttacatattatcagttgctcctgacagactaggcctcttaaaagagagattgttttttcctcatgtactccttccatgccaaacacataccccactgcatgacttgagatcttcaaagtaggtggtagtcagtgtattcagtttaaagaaaaaatatccttggtaacagatctgaaaacatttttgctatgacatgaaaccatgttgttcctatattctttcagcattacattgcctgggaatgacaatggctttttttttttccctaaagaatatgccttatatgtatgactgaatatttaggaaatgtaagctataatcctttggatttttttcaagatctgcacaccaaagcactaagtaaaaggtagtttttatatttcacgttaataggaaagatgcccatataacactgaagcttcttggacaaagccaaaagaggtgtgtgtgcagatatgttcaccttagcgtgcaaaattgtcttctgcagctctctgttctgaccatgatggaaatgccacatttggcttagggattattgttgaactaaattgaagagagatgaagcctgttgattagaattgaacaattacaagttaacacgacctgtccatggtgctggagtagtccccacggcagtgggcttacattgttttcatatgttaaaacaaaaatatattggttcacatgtaagatgatttatgataaatgtattatatctagttaagttgagtgtcattctcaattagcctgtaaataaaaatgtcttcttctacattaaagtggtattgatcaaatatgaaggaaaaaaaaaaaaaaaaaaaaaaaaaaaaaaaaaaaaaaaaaaaaaaaaaaaaaa

SEQ ID NO: 1419 - DNA, 2280 bp, Cricetulus griseus
tgggtgacgcccggggagcgggagcctgccgtgacgccggacttcgtgcccttcgtgcagctgcgcccgctgaatgtgctggcgggagggccggggaggccgtgctgctgctgcgggagggcctgctgcgccgagtgcgctgcctgcagctgggaccccgggctcgggccccgccgctggcgtcgccgggccggcctcggcctccgggctctcggcgggcgcgggccgtgactgcgtgctgctgcaggaggacttcctggcgcaccgaggccgaccccatgtctatgtgcagcgcatccagatcaacaaccccacggagcgggtggccgcgctgcagactgtggggcccaccgcgggcccaatccccaaggccttcgccagcactctggagaaggtcggagatcatcagtttctcctctactcgggccggtccacgcccctcccgtcggggctcgtgcacctggtggtggtggcctctaagaagttagtgaaccggctccaagtggctcccaagacgcagctggatgagacggtgctgtgggtggtgcacgtgtctggtcccatccacccccaggtgctcaaaagcaaaggaaccaaggagctcaaggcgctgcaggacttggcaaggaaggagatgctggaactgttggagatgcccgcctcggagctgctgcaagatcaccagcgcctctgggcccagctgttcagcccgggtgtggagatgaagaagatcacagatgcccacacgccgtccggcctgaccgtgaacttgacgctgtactacatgctctcctgctcaccggccccctgcttagcccttctctgagccacagggaacgagagcaaatggaagcaacgctcaactatgaagaccactgtttcagtggccatgccaccatgcatgctgagaacctgtggccaggccaggtctcctcagtgcagcagatcctgcagctggctgacctgtggaagctgaccctccagaagcgaggctgcaaggggctggtgaaggttggcgctccgggaatcctgcaaggcatggtgctcagcttcggcgggctccagttcacagagaaccacctgcagttccaggccgaccccgaggtgctccacaacagctatgcactgcacggaatccgctacaagaacgaccacatcaacctggctgtgctggtggatgccgagggcaagccctacctgcacgtgtctgtggagtcccgaggccaacctgtgaagatctacgcctgtgaggcaggctgcctccatgaccctgtggacctgacctcagagcctgggggccataccttctctgtcatggtgacacagcccattacaccactgctgtacatctccactgacctcacacacctgcaggacctgcggcacacgctgcacctgaaggccatcctggcccacgacgagcacatggcccagcaggaccccggcctgcccttcctcttctggttcagcgtggcctccctgatcactctcttccacctgttcctcttcaagctcatctacaatgagtactgcgggcctggagccaagcccctcttcaggagcaaggaagatcccagtgtctgagtgaacctcgagtcccactctcggccaccgtttgcacaagacacccagcactgagcatcctgctgctgcatgaacagggagcctttggaagcaccaaccctttgtgccttgtgggggacagtgactcagaagcgcttgtgggtacaagagtttgcactggaggggaaagagggccgaggacttctctaagatttccagtcaatacaacaccccgtagggagaatacttgaagttgagcgcactcctcccactccccccttttcatcccaggaaatagatcctctttaaagacttgctgagggaaaattgtgttcttttcctaatttaatgtgttctttcttgaatggatttctaatttatttttgttgaagttttgctgggtggcttttcatccaccttagatcaggactgttggtggcaaccaccgatccctgccacctggttggcacccggaggccccacacagtctggaggctggacctgagctccaggcggccaccctgcctggagaaggtgtgcgtcccctgccctccgctggtttgcacattgcctcttccttaccttgagccagtgggatctgtccttttgtacttcgggtccctgggaaaggtgtttaactttctagtgatggatggttgttggcttttgaaataccaaagcttttttgttctttttaaaataaatatcttttaaact

SEQ ID NO: 1420 - DNA, 2279 bp, Cricetulus griseus
cttccctcatgctgctcaacacagcgcatgagtacttgggcgaggaggtcctggtgctgcaattcagatgggcgctgctgcgattctacgtgcaagtccttcaaaaggagcttgctgcatctgcctctgaggacactcacccctacaaggaggagctggagactgccttggagcagtgcttctattgcctgtacagctttcccagcaagaagagcaaggccagatacctggaggaacactcggctcagcaggtggatcttatatgggaggatgccctatttatgtttgagtattttaagcccaagaccctacctgaatttgatagctacaagaccagcactgtttctgctgacttggccaatctgctgaaaagaattgctaccatcgtgccccgcacagagaagccagccctgagcatggacaaagtctctgcctacattgagggaacctcagctgaggtaccctgccttccagatggggcagaccccacccctcctgtggtgagtgagctctactacctcctggctgactatcatttcaaaaacaaggagcagtccaaagccatcaagttctacatgcacgacatttgcatctgccccaacaggtttgattcctgggcaggcatggctctggcccgggccagtcgaattcaggacaagctgaactcaaatgagctgaagagcgatggacccatctggaaacatgccacacctgttctgaactgcttccggagggctcttgagattgacagctctaatttgtccttgtggattgaatatggcaccatgtcctatgccttacactcgtttgcttcccgccaactgaagcagtggagagctgagctgcctcctgagcttatacagcagctagccgatggctcaggaccagggcctgaacccagggggcaaagtgggccctctcaaccaattgccaatggccacagacacaagggacagcacagaccagggtggggagcggaaagacaaagagaacccccaggcagggcccactgaactcatggataccagtgaggttgctgttcgccacccagactcagaacagacatcacctctgcttccaggccgccctccaagggaccggccccccgagagccggtctgctgagctttccctagaggagctgagcatcagctcccgacaacaacccactccgcttacaccaagcccagtaacgctcaccaccactactccccccaccatgggagcccggggaggtggccaccctgaggaggcacctccaaggcctaatcgcaaaaggaaactcctggaggacacagagtctggcaagactctcctgctggatgcctaccgcgtgtggcaacagggccagaagggcatggcctatgacctgggccgcattgagaagatcatgtcagagacttacatgctcattaagcaggtggacgaggagactgcactggagcaggctgtgaagttctgtcaggtccaccttggggctgctgcccagagacaggcctcaggggatgcacccaccacccccaagcaccccaaagacagcagagagaacttcttccctgcaacggtggcccccacagcacctgaccccttgccagctgatgcgctccagaggcccagtgactcccacgtcaagcctctgtcatcagttgccctccctcatcatcaacctctaccacagacttgtccacagatcccggaattccccggccacacaggccagaggctaccaccagcatgacctctctgagtcctgagggtgaagagcaatcaggagcgacagaaggtaccagcttcccaccccaagaaccacggcacagtcaccagatgaaaatggctgccacagggcccctggctgagcagcactgctggtcagtggaggctgctggccagactggtgccgagcccacctgtagccaagccaccagcactaaggtccccagcatcggaagtacccagacacccgagagccatcaaggcaaggctgagtccagcaggaccaaatcccgcctcctgtccaacatgccaaagctggtgatcccctcggccaccaccaagttcccccctgagatcaccgtcacaccacctaccccgaccctgctttcccccaaaggcagcatctccgaggagaccaagcagaagctgaagtcagccatcctgtccgcccagtcagctgccaatgtgaggaaggagagcctgtgccagccagccctggaggttctggagacatccagccaggagtcttcactggagagtgagacagacgaggatgacgactacatg

SEQ ID NO: 1421 - DNA, 2278 bp, Cricetulus griseus
gctagtatgttcaacacaccaggaatgcaaagcttgttgcagcaaataactgagaacccgcagcttatgcagaacatgctgtctgccccctacatgaggagcatgatgcagtcactaagccagaaccctgacctcgctgcgcagatgatgctgaataatcccctatttgctggaaatcctcagcttcaagaacaaatgagacaacagctcccaactttcctccaacaaatgcagagccctgacacgctctcagcgatgtcaaaccctagagctatgcaggcattgttgcagatccagcagggcttgcagacattggcaacagaagcccccggcctcatcccagggctttctcctggtgttggggcagcaggcaattctggaggctcttcagcaaacaatgcacccaacactgcacctagtgaaaacacgagccccccagggggcactactgagccgggccaccagcagtttatccagcaaatgctgcaggctcttgctggggtgaaccctcagctgcagagcccagaagtcaggttccagcaacaactggaacagctcagtgccatgggatttttgaaccgtgaagcaaacttgcaagcactgatagcaacagggggtgacatcaacgcagcaattgaacggttgctgggctcccagccatcatagcagcatttctgtatcctgggggaaaaaatgtaatttattttgataacggctcttaaatctttaaaataacctgctttatttcatgggaactctgtgctgttataaaagagaccggtaggaagcacctgaggtggagtgcagtaagacttctgtgctgggttctgaatctctgtgaaacagtgggaatcaatgttttcagttaaggctgctgcatgcatcaaacacttggcatttattgtaattttttttaaaatatcaccttttctaattgggtgaacaaatttttgtcctgcatctgtccaactaacttgctttttaaacataaccccatggtagtaatttatgtagaataaaggcattaaaagcagatcatttgcgctccatggtttgtggtacaatattgcttactgtgactttggcatgtatttttgcaaataatgctgtaaggtttgtactactgacaattttgcttatttgtatacagtacaaattactgcacatttctaggtcatctaagcaaaattcctgtaaccaaaaaagtaaaacaaggattcctaattgtgtagaatcttacagcttctttgataaacacctctcagcagaaataaagaaaaactgactctggttatctctttagggacatttaattgtacagacaatataatgtaacaatatctcagcattcacataatagctgtaaattacctatattttgttcagactgaggagcactgtaacagactccagtgcattttccggggcttcctgctccccataggtgtccaggcagcattgagtgggattgaaatgttgtcttccctgaaagtgctgacgtttccgtcttaattgccatataaaagtagagctgtctcttgggtttatcagctctctcattcataggcaatacccggatttaaaatgattagtgagtgagccacttgtttctgaagtgtttgcctagttctattacgaagaagtagttgaatgtcgtgctgttcagagcctcagaagggggtgggggtgggatgagacagaatctattctggattgggccagcctgaactaagtgatactgacaaccaaggtctgtgaagagtttatgcatacagtagtgtcagtctggtgaacacaaagagccgttttcacagttgagtaagtttggctatgctatagcctcttccttccttcccaaagaagttctgtttgcctaactctcacactgttggggtgatacattccttcgggaccaattaaaatataactttagggtcagtgacatacttggctgactctggttcagtattctcttaggtcattgtattctctcttgtacagttacccaaagttataatgttaaaataatctgaagtgacttcagacaaacaaatcaagggaagtagatggtgaactctttaactctgtaagttgcttgctattaaaaggttgagaggtcaggttgaccccagactgtgcactgctctgacattgtccccaagaagaaagcatgtacaaaagtcggggtggaggcctggctgtgaaggtagtgctcgtgtgtctctctgctctctctgccttatgtctgggttagagacttttgtactggtgaatggca

SEQ ID NO: 1422 - DNA, 2278 bp, Cricetulus griseus
atgtcagcaggaacaagagaggtcaggtggtggggaccgagaggttggctttcgtggtttgcacagttttggctgacaggaccggtctggggcagggaagacgaccgtgagcatggcactggaggagtacctggtttgccatggcattccctgctacactttggatggtgacaacatccgtcaaggtctcaataaaaaccttggcttcagtcctgaggacagagaagagaatgtccgacgcattgcggaggttgcgaagctgtttgcagatgccggcctggtgtgcatcacaagctttatttctccttacacgcaggatcgcaacaatgccaggcagattcacgagggtgcaagcttacctttctttgaagtttttgtggatgctcctctgcatgtctgtgaacagagggatgttaaggggctctacaagaaagcacgggcaggagaaataaaaggcttcactgggatcgattctgagtatgaaaaaccagaggctccggagctggtgctgaaaacggactcctgtgatgtcaacgactgtgtccagcaagttgtggagcttctccaggaacgggacatcgtccccgtggatgcctcgtatgaagtgaaggaattgtatgtgccagagaataaactgcatttggcaaaaactgatgccgaagcattaccagcactgaaaatcaataaagtggatatgcagtgggtgcaggttttggcagaaggttgggcgactcctttgaacggcttcatgagagagagggagtacttgcagtgccttcattttgattgtcttctggatggaggtgtcatcaacttgtcagtgcctatagttctgacagctacacatgaggacaaagagaggctggacggctgtacagccttcgctctgatgtatgagggccgccgggtagccattcttcgaaatcccgaatttttcgagcaccggaaagaggagcgttgtgccagacagtggggaacaacatgcaagaaccacccctacattaagatggttatggaacaaggggattggctgattggaggagatcttcaagtcctggaccgaatttactggaatgatggtcttgaccagtaccgccttactcctgccgagctgaagcagaggtttaaagatatgaatgctgatgctgtctttgcatttcagttgcgaaacccagtccacaacggacatgctctgctaatgcaggacacccacaagcagcttctagagaggggctaccggcgccccgtcctgctcctccatcctcttggtggctggacgaaggatgatgatgtccctttgatgtggcgaatgaagcagcatgctgcagtgctggaggagggtgtcttgaaccctgaaacaacagtggtggccatctttccatctcctatgatgtatgctgggccaaccgaggtccagtggcattgcagagcacggatggtggcaggagccaatttttatattgttggacgagacccggctggcatgcctcatccggagacagggaaggatctctatgagccaacccatggagccaaagtgctgacgatggcccctggcctgatcaccttggaaatagttcccttccgagttgccgcttacaacaagaaaaagcagcggatggattactatgactctgagcaccacgaagattttgaattcatttcaggaacacggatgcgcaaactggcacgtgaaggtcagaagcctccagaaggcttcatggctcccaaggcctggactgtgttggtggagtactacaaatccttagagaaagtctgcctgggacacaagactgagtgacagaggggaccacgcagtcaccgacagcatttctctgtggttgtgtccatctgaacataattcctgaaaacagaccatgtttctccgtgtacatcagttttggtctgcctttgaattctgtttcaaactagtgtaacacatctctggtcttaatgtgtcttttccacttactgttaatattcttataatacgattttaaaaatcttgcctttttatattgtatttatgcttctgtcttaggatttttccaagctgatttattagttataaccagtaatacatcatctagcttttaattctttaagaagcaggagtggggggatcactaaacttggctagaccttgtttggggaattttgcaaattttactattaaaagtataaactgctccctcccttgcaacccaacatgttgaggtattcttgcaatctgtgttaagtgctgaatgaatgccttgattcaataaaactgattttt

SEQ ID NO: 1423 - DNA, 2276 bp, Cricetulus griseus
  modified_base (13)..(13): a, c, t, g, unknown or other
cagtcgtggctgngcccactgctcagaagcagtcggtggaagtactgccgctgcaatggtggctcgacacaatgccactcggtgcctgtcagaagttgcagtgagccaagatgcttcaatgggggtgcatgtcagcaggccctgtatttctccgactttgtctgccagtgtcctgatggatttgttgggaaacgctgtgacatagataccagagcaacatgcttttcgggccagggcatcacctataggggcacatggagctcagcagaaaatggggctgagtgcatcaactggaatagcagtgttctgtccctgaagacctacaatgcaaggaggccagatgccatcaagctgggcctggggaatcataattactgcagaaacccagaccgagactccaagccctggtgctatgtctttaaggcagggaagtatatcccagagttctgcagcatgccagcttgtcctaaggaaaaagtgaggactgttatgttggaaaagggttaacctatcgtggcacccacagcctcaccacttctagggcctcctgcctcccgtggaattccatgatcctgataggcaagagttacacagcatggaggaccaactcacaggcactcggcctgggtagacagtaattattgccggaatccagatggggatgccaagccctggtgccatgtgatgaaggacggaaagctgacatgggaatactgtgatgtgtccccgtgctccacctgcggcctgaggcaatacaaacagccacagttttcgaattaaaggaggacttttcacagacatcacttcgcacccgtggcaggctgccatctttgtcaagaacagaaggtctcctggagagagattcctatgtggaggggtgctgatcagtccctgctgggtgctgtctgccgcccactgctttgtggaaaggtttcctccccagcatcttaaagtggtcttgggcagaacatacagggtggtgcctggagaggaggagcagacatttgagatcgaaaaatacatagtccatgatgaatttgattatgacacttacaacaatgacattgcattactgcagctgaggtcagatacccaacagtgtgcccaggagagcagctctgtcagcaccgcttgccttcctgaccccaagctgcagcttcctgactggacagagtgcgagctgtctggctatggcaagcatgaggaatcatctcctttcttctctgatcggctgaaggaagcccatgttaggctgtacccaccgagccgctgtacttcacagaatttgtttaataaaaccatcacaaacaatatgctgtgtgctggagacacccgaagtggaggcaaccaaaatgtccatgatgcatgccagggtgactcgggaggaccactggtgtgtatggtcaataaacacatgaccttggttggcatcatcagctggggcattggctgtgggcagaaggatgtccctggagtatataccaaggttactaattacctagactggattcaagacaacatgaagcaatgacaaagacaacccagctccttggatctggaggaggccctgccttcctcttctatagaagacacacccaaaaggccaagtgtcctttacactatcatctttagatactgctcctcagcagagggttggagagtctgtaggagaggatatagcatttatttgtgacaggtacttcacaatttgcatgttttcagggacgaaggtctgatttttagaataaaatctgtctgatgagaagatgggaaaatgccaaccctcccacaactctgggatttaaaagaagggtagaccaaagtccaccctcctgggccaccattttgtactctggaccacaagatcatgtctcaacagtaaagcccaggttaatctttcagaagagaaagtttgcattagggataagaatgtatatttatagttacaggagggcccagcagggcctttaagagacataaatgttggctggctagatcatagccccataagacctttgaaatcaaatattctccacccgcttcccactcctcaactcttgggaggtattcctttgtatacagtgtaaatcttctttttttctttataaactttatagatagttgagagaactatttgattttaataattgaagtagcattagcatatttatatattaatctattttagtttttaccataactctgtattatatatactgtacttaaataataaatccagaggtatttttcacacttttaaaaaaaaaaaaaaaaaa

SEQ ID NO: 1424 - DNA, 2276 bp, Cricetulus griseus
tccagctccagctccgaccccaggagaccgacctcctccagacggcagccgccccagccgacagctccagacgccaccgcctggagcgtccagacaccaacctccgcccagagtccgtgtccaggctccggccgcgcccctcctcgcctctgcaccccgctgctgtgcgtcctcccgtcgcgccccgacatgatcgcctccgtcgcgggtcccctccgccacgctttggtgctcctcctcgtcctctgcagccggcccgccaccggccaggactgcagcgcgcagtgccagtgcaccgagccggcgcagcgctgccccgccggtgtgagcctggtgctggacggatggcggttgctgccgcgtctgcgccaagcagctgggagaactgtgcacggagcgtgacccctgcgacccacacaagggcctctactgcgacttcggctccccggccaatcgcaagatcggtgtgtgcacagccaaagatggtgcaccctgtgtctttggtgggtcggtgtaccgcagcggcgagtccttccaaagcagctgcaaataccaatgcacttgcctcgacggagctgtgggctgcgtgccgctgtgcagcatggacgtccgcctgcccagccctgactcgccccttcccgagaagggttaagctgccagggaaatgttgtgaggagtgggtgtgtgatgagcccaaggatcgcaccgtggttggccctgccctggctgcctaccgcctggaagacacgtttggcccagaccccaactatgatgagagccaactgcctggtccagaccacagagtggagcgcctgttccaagacctgtggcatgggcatctccacccgggttagcaacgacaatgccttctgcagactggagaagcagagtcgcctctgcatggtcaggccctgcgaagttgacctggaagagaacattaagaagggcaagaagtgcatccgtacccctaaaatttccaagcctgtcaagtttgagctttctggctgcaccagtgtgaagacctaccgggctaagttctgtggggtatgcacggatggccgatgctgcacaccacacagaaccaccaccctgccagtggagttcaaatgtcctgacggcgacattatgaaaaagaacatgatgttcatcaagacctgtgcctgccattacaactgtcctggggacaatgacatctttgagtccctgtactacaggaagatgtatggagacatggcataaagccagggagtaagggccatgaacttgttagactataacttgaactgagttccatctcattttcctgtaaaaaccattacagtagcacattaatttaaatctgtgtttctaactgctgggggagaaaacttcccaccaaagtgagaacgttacaccattgtcatacaaatagtctcccagtctcagacactggtttgaggacagttcagacttgacagttggacttcattagcgcacagcgccagaatgtatacccaggtgtgtctctgagagcagtggagacacccagagaaaggctggtactatctgaggccatcttagaagcagcaatgtgcctgctgtttggagtgtgaattggggaggagaactatagcatgcttgcaaacagtcctgccctagtaacagctggactgtgtatcctcctagatgaggctgagtcccgctgttcttgaactgagaatagtggattcagctctgacattctaattcgaatgacagtggtcaggagttggaatcctgtctattagactggacagcttgtggcaagtgaatttgcctgtaacaagccagatttttttattgatattgtaaatattgtggatatatatataaatatatatatatatttgtacagttatctaagttaatttaaagttgtttgtgcctattgttttgtttaaatgctttggatattttaaagtgatagcctcaaattctgaacaccatgggtaggacataaagcttgtctgtgattcaaagcgaaggacatgctgagtggagattgtttggaggtcagagttctggtagggaatgtggcaacctcactgtcagtgaacaaacaaacggcctttattaagaagtggctggctcggggtagctggtcagatttccatgtggaagtgtttgcttcatctttgactatgactgttttttgggcagtttatttgttgagagtgtgaccaaaagttacatgtttgcacctttctagttgaaaataaagtatatataattttatatagaaaaaaaaaaaaaaaaaa

SEQ ID NO: 1425 - DNA, 2276 bp, Cricetulus griseus
cgccgaggccggtttttcccgcgaaagccggcgtcacctgggggagcggtgtttcgtgtggcgcggcggtgaggtgcagtcatgtcgggcttcgacgaccccggcattttctacagcgacagctttggcggcgaccccggcgccgacgagggccaggcacgcaagtcgcagctgcagaagcgcttcaaagagttcttacggcagtaccgagtgggcaccgaccgcacgggcttcaccttcaagtacagggatgaactcaagcggcattacaacctgggggaatactggatcgaggtggagatggaggacttggccagctttgacgaggaacctggccgactacttgtacaaacagccagccgagcacctgcagctgcttgaggaagctgccaaggagtagctgatgaggtgacccggcccgactgcggtgatgagttgctccaggacatccaggtcagtgctcaagtcagatgccagcccatccagcatgccaaagctacccgtatttccattcagtgccgcagctgccacaataccctcaccaatattgccatgcgcccaggtctagagggctatgcccttcccaggaagtgcaatatggatcaggctgggcgcccaaagtgcccattggacccatacttcatcatgcctgacaagtgcaagtgtgtggacttccagaccctgaaactgcaggagctgcctgatgcagtccctcatggagagatgcccaggcatatgcaactctactgtgacaggtacctgtgtgacaaggttgttcctgggaacagagtcaccatcatgggcatctattccatcaagaagtttggcttgaattccagcaagggccgggacagggtgggtgtgggcatccggagttcctatatccgggtcctgggcatccaggtggacacagatggctctggccgtagctttgctgggtctgtcagcccacaggaagaggaggaatttcgtcgcctggctgccctccccaacatctatgagctcatctccaagagcatttccccctccatctttgggggtatggatatgaagaaggctatagcttgcctgctctttgggggttcccggaagaggctccctgatggactcactcgccgaggtgacatcaacctgctgatgttgggggaccctggcacagccaagtcacagcttctgaagtttgtggagaagtgctctcccattggggtgtacacatctggaaaaggcagcagtgctgcaggcttgactgcctcggtgacgcgggacccctcatccagaaacttcattatggaaggtggagccatggttctggccgatggtggggttgtctgtattgatgagtttgacaagatgcgggaagatgaccgtgtggcaatccacgaagccatggagcagcagactatctccattgccaaggctgggatcactaccaccttgaactctcggtgctctgttctggctgcagccaactcggtgtttggccgatgggatgagacaaaaggggaggataatatcgatttcatgcctaccatcttgtctcgatttgacatgatcttcatcgtcaaggatgaacacaatgaggaaagggacatgatgctggccaaacatgtgatcactctacatgtgagtgcactgacacagacacaggctgtggagggggagattgaactagccaagatgaagaagttcattgcttactgccgagcgaggtgtggccctcggctgtctgcaaaggcagcagagaaactgaagaaccgctatatcatcatgcggagtggggcccgtcagcacgagagggacagtgatcgccgttccagcatccccatcacagtgcggcagctggaggctattgtgcgcattgctgaggcccttagtaagatgaaactgcaaccctttgccaccgaggctgatgtggaggaggcactcaggttattccaggtgtccacactggatgctgctttgtctggcaatctgtcaggggcggagggcttcactacccaggaggaccaagagatgctgagccgtatcgagaagcaactcaagcgccgctttgccattggctcccaggtgtctgaacacagcattgttcaggacttcaccaagcagaagtatccagagcatgccatccgaaaggtgctgcagctcatgctgcgcaggggagaggtccaacaccgcatgcagcgcaaggtgctctaccgcctcaagtgagcccactgcctgtcaaccctcaaacctgaatgcggccaccttttttttttttttttttttagtttttt

SEQ ID NO: 1426 - DNA, 2275 bp, Cricetulus griseus
ccaggaccgtggggttaataagccatgggaaagttctatctcgctgttgtactccagccaaccctgtgtacctcagcttcaaaagtgagcccctcagctgttggactcagaggcctgagtgccagggcaccattgcaagggcaacatggacacctgcctctgcaagattggttgtcacaggacctcagtaccttcctgtgcgcagctggcactcatcacctcccctaggagaggactctgtgatagagaagtcccttaagtccttaaaggacaaaaataagaagctggaagagggtggccctgtgtacagcccaccagctcaggtggtagtaaagaagtcccttggacagaaggtactggatgagctgaaacactactaccatggcttccgcctgctctggatcgacaccaagatagctgcccgcatgctgtggcgaatcctcaatggtcatacactgactcgccgggagcgcaggcagtttctccggatttgtgcagacctcttccgcctagtgcccttcctggtatttgtggtggtgcccttcatggaattcctgctgcctgtagttgtaaagctcttccccaacatgctgccatccacatttgaaacccagtccatcaaggaggaaaggctgaagaaagaacttcgggtaaagctggagctagccaagtttctccaggacacgatagaggaaatggccctgaagaacaaggcagccaaggggaatgccaccaaagatttttctgcatttttccagaagatccgggagacaggggagagacccagcaatgaggaaattatgcgtttttccaaattatttgaggatgaactgacgctggataacctcacgaggcctcagctggtagcactgtgcaagctgctagaacttcagtccattggcaccaacaactttctgcgtttccagcttaccatgcggctgaggtccataaaggctgatgacaaactgatttctgaggaaggagtgagcagtctgaatgtcaaggaattgcaggcagcatgtcgagcacgaggcatgagagcacttggagtcacagaagaccgtctgaaggaccaactgaatcagtggctcgacttgcacctgcatcacgagatccccacatcattgctcatcctgtctcgggccatgtacctcccagacaccctctcgcctgctgaccagctcaagtccaccttacagaccctaccagatattgtgacaaaggaagctcaggtgaaagtggcagaagtggaaggcgaggaagtagacaacaaggcaaagctggaggctacactgcaggaagaggctgccatccaacaagaacacctggaagaactgcagcgggctgccaaggctgtgaaggacatccagccagaagtattggaagccactattcctgggaagccaggggctgagctgcagctaaaggtacctgatgtgatcctgtcctcagaagcactgaaggatacggcacctgtgctggagggtttgaagggagaagagataactaaggaggaaattgacatcctcagtgacgcctgctctaagctaaaggaacagaagaagtccctgaccaaggagaaggaggagctggagctgctgaaagaggatgtccaggactacagtgaggacttacaggagatcaaaaaggaactttcaaagacgggtgatgagaaatacatcgaagaatccaaagctagcaagaggctgacaaagcgagtccaacagatgatcgggcagatcgatggcctaattgcacagctggagaccagtcaacagaatggcaagctgggcccccatgagagctctccagcgggggagagtgtcatcagtgtcagtgagctcatcagcgccatgaagcaaatcaagcacattccagaacacaagctgatcagtttggcctcagccctggatgaaaataaggacggcactatcaacatcgatgaccttgttaaggtaatcgacttggtggacaaagaagatgttcagatctctaccacccaggtagccgaaattgtggccacactagagaaggaagaaaaggtcgaagagaaggaaaaggccaaggaaaaggctgagaaagaagccgcagaagtgaagaattagaactgcctggcttttggccccacggggtctgccttcatcatgctacaccaaccacagtggtgatgacacaaaagtgattgctttgaggtgattcttattagtggcaaatctaatattttgtctggaataaatcagaaacttccataatttttcatcattccacaaagatt

SEQ ID NO: 1427 - DNA, 2275 bp, Cricetulus griseus
ccgggatctcttccagctggtcagacagttcagctaactggacaaccaaacataactccatcttcttcaccatcacctgtcccagctactaataaccaagtacctactgccatgtcatcttcttccaccatgcaatcgcagggaccacctcctactgtcagtcaaatgctatctgtgaaaaggcagcaacagcagcagcattcaccagcacctcccacacagcaggtacaggtacaagttcaacagccacagcaagtacagatgcaagttcagcctcagcaaaacaaaatgcaggggttgctcagcctgcttccaatgagtctagtttgatcaaaacagctgctgcttccaaaagcgggggtccttcaaccccaaaagagtttctaatggacctgtattaactttgggtgggtcaccgtccacaagcagcatgcaggaagcttcaagtgtggtaacacaacaattcagtggtactgacttgtctaacggacctctagcttcaagtttgaattcagatgtgcctcagcaacgcccaagtgtagttgtttcaccacattctacaacccctgttatacaggggcatcaaatcctagcagttccccactcaggatctagagtgtcccattctgccctatcaactgatgttcggtctacaaatggcacagctgaatgcaaaactgtaaagaggccagcagaggataatgatagggaagcagtcccaggaattccaaataaagtaggagttagaattgttacaatcagtgaccccaacaatgctggctgcagtgcaacaatggttgctgtaccagcaggagcggatccaagcactgtagctaaagtagcaatagaaagtgctgttcagcaaaagcagcagcatccaccaacctacatacagagtgtggtcccacagaacactcctgtgccaccatcaccagctgtacaagtgcagggccagcctaacagttctcagccttctccactcagtgcatcgagtcagcatgcagatccagtgagaaaacctgggcagaacttcatgtgtctatggcagtcttgtaaaaagtggtttcagacaccctcacaggttttctaccatgcagctactgaacatggagggaaagatgtctatccagggcagtgtctttgggaaggctgtgagccttttcagcggcagaggttttctttcattacccacttacaggataagcactgttcaaaggacgctctgctcgcaggattaaaacaagatgaaccaggacaaatggcaaatcaaagatcctctaccaagcagccagctgtaaggggcacaggctcagctcctagagcacagaaggccattgcgagtcaccccagtgctgcactcatggctcttaggagaggttcgaggaaccttgtcttccgggacttcacagatgaaaaagagggaccaataactaaacacatccgactaacagctgccttaatattaaaaaatattggtaaatactcagagtgtgggcgcagattgttaaagagacatgaaaacaacttatcagtactagccattagtaacatggaagcttcctccacccttgccaaatgcctttatgaacttaattttacagttcagagtaaagaacaagaaaaagactcggaaatgctgtagtgaatcctataccacttacacagcggggactcaaagtcagatacatttcacatactgttactgaagaaagcaccaagtcttaatggagcagagaccatagaatgaattattttgtgtcgtcccatgatgccgagaggaagctttgtattctgatctctgaacgaatccctttaatattttttgtaacatcactgtttgcttgtcttcaaggtacctttttcttttcaaagcaggaaattaccatggtggttaatgtttcctagcagaggacaggtttaagaaaatgacttccatagtcctcatcctgtcacctcactggattgcatcctgtagttgcagactttgtgttaaaatgcataaatgtgtctttagtgcttttaagcaatggtctcagcagaattttcaaatgtatttgacctaaggaaaccaatttatagcgtccctcttaggattttccctcttacagctttatctgactgatggaataacatggacttggtgaggaatggaattgaagtgctcttgcactctaggttctgcttaaccctgcagtcatgaaaggtgctccttgctagacagaacttgctgacttccagttattgtttatttttgtacttaagttctagtaaatac

SEQ ID NO: 1428 - DNA, 2275 bp, Cricetulus griseus
atcggtcatagttacgggtcaacatttgaagtaagcaatggaggaagtcttcagctcaaaaagaagaaggaagagcctacctcagagactaaagaagccggcactgataatcgaaatatagttgatgatggaaagtcccagaaacttactcaggatgatataaaagctctgaaagacaagggcattaaaggagaggaaatagttcagcagctaattgaaaatagtacaacattccgagacaagacagaatttgcccaagataaatatattaaaaagaagaagaaaaaataatgaagccatcgttactattttgaagccatctacccgtattctttcaattatgtattatgcaagagaacctggaaaaattaaccacatgagatatgatacactagcccagatgttgacgttgggaaatatccgtgctggcaataaaatgattgtcatggaaacgtgttcaggcttggtgctaggtgccatgatggaacgaatgggaggttttggctccattattcagctgtaccctggagatgggcctgttcgggcagcaacagcttgttttggatttcccaaatctttcctcagtggtcttcatgaattccccctcaacaaagtaaacagtcttctagatggaacattttctgctgagatgctgtcctcagagcctaaggacagcactctggttgaagaaagtaacggtgaacatgaggaaagacagatatctgaacaagctgatgaggacagcatggcagaagccccagaaagcaacccagaagaacagagaacaatggaaattattcctcaggacccagagaataaagagcctaaagaaaaaggaaacaaaagagactatattcaggaaaaacaaagaagacaagaagagcagaggaaaagacatttagaggctgctgctctgctgagagaaagaaatgcagatggtttgatcgtggccagtcgtttccaccccactccactgctactgtctttgctagactttgtggccccatcaaggccgtttgtggtctactgtcagtataaagagcctttgttggaatgctacacaaaacttcgggagaggggaggggtcatcaacctgagactgtccgaaacctggctcagaaattaccaggttttgccagatcgaagtcatcccaaattgctgatgagtggaggtggaggattccttctgtctggcttcactgttgtctcagacagccttcgagcagaccccagtctcaagtcttgtgcaagcactttagactcacacgagcctgaggagccagcagctaaaaaacagaaatgcgtgggatctggctcttaagaaattactatttgttctaaggcattctgcagctggaaactacactttaaatgacatcactaaaatttaaagtactctgcaaataccttggggatgtcagcatcttaaaaatgttgatatgtaagacttagtttgtattttaaacgaagatgaataatacaagctagataaaacatgatgagcagtgaaaggaaattccctctcatccattctcttcaacctaagcaatatggatgtgtgagcctgtgagatttagagtaccaaaaatgtctgcctgtgccctgcaatggaataagttttttaaatactagaatttattattttaatagttaactgcctgaggaagatccaggtatttattttattgcctctcccctttttggtgcatagaaaggtttagtaggtgcttttttgcagtggttcatccatcttcttctaaataaagttattagaacttctgggtactatcaaacaattgggttttcctctcttgtgtcagtgttgctatatatacatacacatagatgtatctgtatatatcaacacagacagaatgtactacctgtagtgggggagaaaagaatgaatacacagtttatttgaactgtggtaaagacttgtgcaagacagaccagctctcagtgtgttggtatcactccttgtcaagtgtttcaagtgcctttttctgggattactcaggctggtctcggaaggtctgctggagtgaggttggtggcctttgttagctctgaaaaatataatcaaattactttaccatctccattgtgtgccgtgttcgttcatcatggatgcctatccagcaaggagcatctcagatgactgttttcctaatagcatgtgctgttctgatcatggctgctgtgattaccaactgtggtttttgttccttttcctctaaataatggcttttaaagaataaaatttcctactctg

SEQ ID NO: 1429 - DNA, 2274 bp, Cricetulus griseus
  modified_base (343)..(343): a, c, t, g, unknown or other
gaacactcccaagaagtgggcactgtgctgaccaggaccatagaagaggggaaaagcacagtgtttgcccacccctcacccacctggccctctgtatccattagcaccccagtgatgaacccctagaggggactgaagacagtgaggacaagtctggcaaggagcccagtgtacctgagaagaaagaagatgccctgatgcccccaagcttcgattgaagaggcggtggaatgatgaccctgaagcccgggagctaagtaagaccggcaagttcctctggaatggggcaggaccccaaggcctggctacagcggccactgctgctgctgatgcttaaaaaccncagtgggaaggaagctgttcatattacaatcagatacacgtattatgtagcaagattctggggtgggaggcggggttaagctggttgttaattctgggcatggacttgtacttttctgttggggatgggacgagtatcttgtgttagtaaaaattttttctttttccattgttggtttgggaaaccataccaagtatgactgagcaagttttatggggagcaggatagcgccgttgaagatgtttttctgttgtgtctggttgtcttactgtttcttaagtcaagccttaactatgaacatgctttaagataatacgggtctgtcagcataaacctgtaaagggcatggccactgttcagataacccaggaatgttgaggcatagttgaattcctagctgatagttctctcctctgatgttaccaggctgggtggtgaagggcaggattgtgggaatgaaagacagatgaacctgtaaacacagaagctgggaacaagtgttagaaacgaaagaagaggtaggaaggtggtgaccggatgacttgagaccatcattgctatttcttgatgagtgtcctgtcacttggtccatattccatacataagggactgtctttccccaggaaagggactgagtggtctctggtgacccaggctttggttggaccacaaaggactcaccactcctgctgcccttggtggctatgtctgatcagttcccttctcttaccctgacttacctctgaatctaaagcaagcccagcagctagaggagggctctctgcttggtgttgcccatcaaaccagggaggccagctggccaccagtgtctgctagaggggccggccacaagtgtcggtgtgaactcaggaatagaaacacggggcctttaaaatgagaaaaagaaaaaaaatccatgatgcttacccataaccccaaaaacccaagtgccggaattaattcctagatgctgcttccatttggataaagtcatggcttttacacttgaaatgaattccatgaaaaatgcttttggacttttacgaaactatgctgtttgtttcctttgatcgccattccaccagtaatgtgttggttggttggtactgcacacagttggagtttggatctggggaagggtctgtctacggagcagaacttgggcttgctcagaagtagaccaggaaatatagcaatcattgatacttcctagggcaaagggatgagaattttgttccttcccaaaccccttcttggcagttcctgcctccagcctggtcaggctgcattgcattaaacccaactcagtaatacagggaaccctagtgacccatagaccaagaaacttccagaagcattaaaaaaaaaaaaaaaagttatattccactgccaagtgggtagtcatttagctgtttgtcccttgtttttatttattccataattatgtttgtgctttttcttatgtaaacaatagtgaggcgtatgtttttatgtggctctatagaaaacttcagtcttcaaagaactgttccaattagttccttcttggaaaaagttacgcgttaatttgtttcaaaatatttaggcattctttgaattataaacttgtgatgcagggatttgtgaatgagacattcacatgtgaagatgacttcactagacatctgtgtaagcagaataagatgtgtatatgtacataagttataaggaacccgaacaccattgtgcagtgcctttagatgttctgctttctaaagtcttcaaattttttgcatatatattatatatatgatgtaatgttatagaaatatatgtataatatacatatttttccaggggtatctgatagctctgtattttgttatggaagtacgaaaaagaaaaaaaaaaagtattttaacctactaaaaattaaagttaaaattttaaaa

SEQ ID NO: 1430 - DNA, 2274 bp, Cricetulus griseus
gaccctgggccagctttccctctgccaggatctcagcaggccaatttggagaacatgtggggacaagaagctgctcaagtagatcaagaactcgttacactattagtaaaagaaacagaagcaagatttccagatgtagcaaagggttatgttaaagagataattcatttgaagaattactatgatttgaatgtactttgtaattttcttctggaaaacccagattatccaaagagagaagaccgaattattatccaccccagcagcagcctgcttgcaagccaggatgatatgaagttgcctaaagttgacttttttgactattccaaactgactccacttgaccagcgatgcttcatccaagctgctgacctcttgatggctgatttcaagatgctcagcagccaagacatcaagtgggccctacatgagctcaaaggacactatgcaatcacccgaaaggtcctctccctccagctgtgaaacaagagcaggaattctatgatcagaaagtcaaagagatggcagagcatgaagactttttgcttgccctgcagatgaatgaagaacagtatcaaaaggatggacagctgattgagtgtcgatgttgctatggggagtttccatttgaggagctgacacagtgtgctgatgctcacttgttctgcaaagaatgtctcatcagatatgcccaagaggcagtgtttggggctggaaagtcagaactgagctgcatggaaggcagctgcacgtgttccttcccaaccagtgaactggagaaggtgctcccccagaccattctgtacaaatactatgaacggaaagctgaagaagaagtcactgcagcctatgctgatgagcttgtccggtgccccttcgtgtagcttcccctgctctgttggacagtgataaaaatgactgctgctcgaattgaaaatgccacaagtgtgggactggcctcatcaaatctgaaggctgcaaccgcatgtcttgccgctgtggtgcccagatgtgctacctctgtcgagtttctatcaatggctatgaccatttctgccagcatcctcgctctcctacggtagccccttgccaggaatgttccaggtgctccctctggaccgacccaactgaagatgatgaaaagctgattgaggaaaatccaaaaggaggctgaagaggaacagaaaaggaagaatggagagaacacattcaaacgcatcggccccccactggagaagccagccgagaaagtacagcgtgtggaagctctgccacggcctgtcccactagaacctgcacccccacatgccaccctatgcctttgtgcacccaccttttcccctggcacctgtgcggcccgtgttcaacaacttccccatcaacataggtcctgtgccagcaccctacgtaccccctctacccaatgtgcgagtcaactacgactttggccatgtgcatgtccccctggaacataacctgcccatgcactttggcccccagccacggcatcgcttctgacacccaaagccctgtccagccacactggacccggtctgcaggaggacccagtctcaccttagtatgggtggagtcttggcttccctcttgatggtgggccggtgtccttctgttcttccctttgcaaggtccactgatccttcaggtctgataccctttgggtgctgactgactgtcactgggccaatgttagggcagctccctgtgggtggggcacacagcggtgcctcgggagctctgctgtgggtcacttgaactgtgctactagtctgaatgacagtgccttggaaagatgggccacatgctgcatgacaggatcctccaagtaccttaactattagcgtatttgtgttccctgcatttctccagaggcctcacgggtgggtggagtggccctcccagtacctgtgtgccagcagggatccccaagacagctggcacgctaacctctggggcccaggctgcttcctggtctgagaaactgcctagccactcccggtgtatttgccttaaaactggagagaatctagtatttgcacttagcaaaagatttcaaagttaaaagtgcatgatctcactttgtacaaaagaagaaaaaaaaaaaaaatgaagtagatggttaagtgtttttctttaccttttggtagtaaaaatagagaaccaagtctgtttaaactactgtgtaaaaagactgtatcatatgtaacttgaattttgtgtaaataaatgtttgtgaacacttaaaaaaaaaaaaaa

SEQ ID NO: 1431 - DNA, 2274 bp, Cricetulus griseus
  modified_base (297)..(297): a, c, t, g, unknown or other
  modified_base (2217)..(2217): a, c, t, g, unknown or other
atatttacttccttggtaatgcagaagtctttgtggaatcagagaagcaaacagctgccttttgtgtgttctaagaattattggcgagtgaaccaatcactcagtgtgcacagagattttcacacgagtaagaaaagctgtaaatggagcaaaggtaaagcatgttgcagtaagcactggcactctccaagcgaccatggcttacatattggaggtttgaaacttagcacttctgctcctaagggacttacaaaggtgagcattcatatgtcccgtattaaaagtactttgaattcngtttcaaaggctatttttggcagtcaaaatgaaatggtttcacggttagttcaatttaagccaagttctcgatttttaagaaaatatcagacaggggctggttaaaacaaaacaaatgttaaacaaagccattgaatctctgaaaaagtatagtgataagtcagcagaaaagaattctattgtggaacagaaaagttacattgcagataaagaagaagatacaggtaaacggagccttttccattgcacatacaatataacgaacagagttgaagagtcattctacattttaaccaaccatattaatatatacttcaatcgcaaggaaaaaaatagccctcaaacaaaggaaattaaacatcttcaggacaaaccagactttgaagaaggggaaatccgattctcttagccccaacatcctgacaaacacatcagactcaggatctccccttgacgctggggacaaaccttctagccctagccagatgcccgaggttcttccagggtctgcaaagcaaagtattgctaacttcctttctcgtccaactgaaggcgtacaagccttagttggtggttacattggtggacttgtacccagattaaagtctgactcaaggagtcaaccagaaggacaagaagagcctactaaaactgagcaagctgtcagcaaagggctgtcaaggaaaaattattccatatttattacgacttagacaaataaaggatgaaactcttcaggctgcagttagagaaattttggccttaattggttatgtggatccagtgaaagggagaggaatccgaatccttacaattgatggtggaggaacaagaggtgtggttgcccttcagactctgaggaagttggttgaacttactcagaagccaattcatcagctctttgactacatctgtggtgtaagcacaggggccatattagcgttcatgctgggattgtttcacttgccgctggatcaatgtgaggaactctatcgaaagttgggctcagacgtgttctcacagaacgtcattgtcgggactgtcaaaatgagttggagccatgcattttatgacagtcacacatgggaaaagatccttcaggatagaatgggatctgcactaatgattgaaacagcaagagacccagcatgtcctaaggtagctgctgtaagtaccatagtaaacagaggactgacaccaaaagcttttgtgttcagaaactacagtcattttcctggcatcaactctcactatttaggaggctgtcagtataaactgtggcaagccattagagcctcatcagctgctccaggctactttgcagaatatgcactggggaatgatcttcatcaagatggaggtttgcttctgaataacccttcagccctggccatgcatgagtgtaaatgtatctggcccgatgcaccattagagtgtatagtatccctgggcacaggacggtatgagagtgatgtgaggaataccacaacgtacacaagcctgaagaccaagctgtctaatgttatcagcagtgctacagatacagaggaagtccatgtaattctggatggcctgttacctcctgacacatattttagattcaatcctgtcatgtgtgaaaacatacccctagatgaaagtcgaaatgaaaagctggaccagctgcagctggaagggatgaagtatatagaaagaaatgaacaaaagatgaaaaaagttgcaaaaaatcctgcaacaggtgatgctttgaacagcttgaatctcacaaacgatgtttcattacagaagtcatatggcaattaaagtatttaagatgttcataaccttaggcattttattactgtgctagttggttttagtatctgttggtcttaaattgtttgatgtttgaaaatttattaatatatgtgccaaaaaagntatgggaatgttgtattttgtgctttgcttttagtcatctcaatcatgtggaatttg

SEQ ID NO: 1432 - DNA, 2273 bp, Cricetulus griseus
tgacactcggcgccttaactcgaagcctcaggacctgactgatgcttatgggccgccaagtaacttcctggagatagacatctttaatccacagacggtgggcgtgggccgcgcgcgcttcaccacctatgaggttcgcatgcggacaaacttacccatcttcaagctgaaagaatcctgtgtacggcgacgctacagtgactttgagtggctgaaaaatgagctggagcgagatagtaagattgtagtaccaccattgcctgggaaagccctgaagcggcagctccctttccgaggagatgaagggatctttgaggagtctttcattgaagaaaggaggcagggcctcgaacagtttattaacaaaattgctgggcacccactggctcagaatgaacgctgtctacacatgttcctgcaggaggaggcaattgataggaactacgtccctgggaaggtgcgccagtaggagtccctctcaccacttgccctctactttacctgctgaaatgacattggtttttacactaagcctctctctctttgatctgaagttggctgcccatcccctggcctgatagaccgtcttgcattatgccccttggtatcagactacaccatgtgggcactctgctagtgtctcttctctgaagagaggtgggaaaccacaggcagatgttctttgcttggggttggggtggggagggattggactggaaggcaatttttgggcattttactcatgccagaaggctaaccttggggggagggggtttgtgctggtgaggcactgggatatattactgatgctgcaagtctaggggctttttcttattcttaggttttaccaggaacactgaatagggagaatctctgcttttcctacctgcatgaaaagtttccttttggggggaaggtggtaaagacccaaaacttgtttttttctaggcctgctcccagtttcctcagcagtcttttttttggttggtttactctcccttgttgcttttcatggcagtaatcctcctagagtttaagcagtgtgatatgtggatcagggtgtatgggttttatgggcccatcatcatggttactgcaaagtcaagaaagccatagggtagtaggctgctcttattgcctagctcctatccctttatggctccctactctggctgtctatattttgctcactagctaatgagtcattatgggccagcagttttccctcctcaacccttgtgactttatgggttagttttgtgggttttgaggaataagagcaacttaccactgccaggtgacttcctgaatggtggagggagtcatgttctaggttcctctacgtggtaaggaagagcaacatcactttcctccttccattcctccttttcccatctcatttagtgttgtcccaagggtagaagcacacacgcacgcgcgcgcacacacacacacacacacacacacacacacacacacacacacacacacacacacacacaacacagtttctgatttctcctaagcactttgagctgttgactggggctcagaggcaagagttaagagttgtttgctgccttccccagcttggtcacagggttattgaactgtctgcacttgtttcccatggaactccagtattgttcccagaaattgaaatagggctagcagctagatatagagttcccagatcttaaaggctaaaacagctttttgagggtggcaactctcctaggctattgtttggaaggtggtggtttatttgctgggacctgctgtctgtccaaatggtgggatgagagcaagttaactctggtgccaggtgaaagttgggactctttgcttagactccctatcatggaaagatttgtgttttctatgtgggtccttggggaaaaggattgctgattctggtgtgattctggtcagagagatcaggattagattttgacatgggtcttggagcccatctcagtgttgaaaatccttgagatagattagctctctagctgctgagcccatgctgggggctgagcagcccctctcccacctcaccagtgtctgtgtccttgctgccttttgatttgtatcctctgttacagattttttttttaaatatttcttctttcattgtgcacaagtgctgagactctgaggccccatttctgctgtgtatatatcctgactcggggcttttattcagcaaactgttcattcttctgtcagacaatgtcatattcaactctgttcatattaaaccactgtgaagc

SEQ ID NO: 1433 - DNA, 2273 bp, Cricetulus griseus
cagacaaattgctggtgatcaccgtggctacggcagagacagagggataccggcgttttctgcagtctgcggagttctgggcctggggcacgagtggcgaggaggtgatgttgctcgaacagttggtggaggccagaaggtcaggtggctaaagaaggaaatggagaaatatgcaaaccgggaggacatgatcattatgtttgtagatagctacgatgtgattctggccagcagcccggcagaactgctgaagaagtttgttcagagtggcagtcatctactgttctccgccgagggcttctgctgggtggaaatacaaagatgatgatgatgatcagttattctacactcgactgtacttggacccaggactgcgggagaaactcaaacttaatcttggaccataaatcccggatcttccagaacctcaatggagccttagatgaagtggtcttaaagttcgaccagaatcgtgtgcgcatccgaaatgtggcctatgacactcttcctgttgtggtccatggaaatggtcccaccaagctccagctcaactacctgggcaactatgtccccaatggctggactccccagggaggctgtggattctgcaaccagaaccagaggacactcccgggggggcagcctccccccgggtacttctggccgtgtttgtggaacagcctacccccttcctgcctcggttcctgcagcgtctactgtttctggattacccacgggacagggtctctcttttccttcataataatgaggtgtaccatgagcctcacattgccgatgtctggccacagctccaggcccacttctcagctgcaaagctagtagggccagaggaagcactgagcccaggggaggccagggacatggctatggatagctgtcggcaggaccccaagtgtgaattctacttcagcctggatgctgatgctgtccttaccaacccggagaccttgcgcatcttgattgaacaaaacaggaaggtaatagcccccatgctttcccgccatggcaagctctggtccaacttctggggtgccctgagccccgatgagtattatgcccgctctgaagactatgtggaattggtccagcggaagcgagtgggagtgtggaatgtgccctacatatcccaggcgtatgtgatccgcggggagaccctgaggacagagctgccgcagaaggaggtgttctctggcagtgacaccgacccagatatggccttctgtaagagcctacgggacaagggcatcttcctccacctcagcaatcagcatgagtttggccgactgctggccacttctcgctatgacactgaccacttacacccagacctttggcagatttttgacaaccctgtggactggaaagaacagtatattcatgagaactacagccgggccctggatgggcaggggctagtggagcagccatgcccagatgtgtactggttcccactgctgacagagcagatgtgtgatgagctggtggaggagatggagcactatggccagtggtctggaggccggcatgaggattccagattggctggaggatacgagaatgttcccactgtggatattcacatgaagcaggtggggtacgaagaccagtggcttcagctgctgaggacatatgtggggcccatgacagagtacctgttccctggctaccacaccaagacacgggcagtgatgaacttcgtggtccgctaccggccagatgagcaaccctcacttcggccacaccatgactcatccaccttcaccctcaatgttgccctcaatcacaagggcgtggactatgagggaggtggctgccgcttcctgcgttatgactgcagaatctcatccccgaggaagggctgggctctcctgcaccctggccgcctcacacactaccatgaggggctgcctaccacccggggcactcgatacatcatggtgtcctttgttgacccctgacactcaaccagtctgccaaatcttgtctgccattgtgccttgttgggcgactagggatactgttctcagaaagagagagagcatcgggctcttctcatttcctgaatgtatctgtgtgccttgcactgaatgttctgccccaacatccctcacaggaggtctctggggtcaccttccactgaccccatggacccaagggaaagtggacttctgagggttccctgcctgataaattattgagcttccagcttcacttacaataaaagaatagtttagtaaaaaaaaaaaaaaaaa

SEQ ID NO: 1434 - DNA, 2273 bp, Cricetulus griseus
tgtaattgctaccagagctggagaacaactggtctccttttcttgcctcaactcattccttcgactttatcgttaccagtttgatcccaatcttggaattcgacaggctatgacaagtatttggaatgcattggtcactgacaagtcaatggtggataagtatttgaaggaaattcttcaagatgtgattaaaaaccttaccagcaacatgtggcgagttcgagaatccagctgtttagctttgaatgatttattgagaggaagacctttagatgacgtcattgacaaacttccagaaatgtgggaaacactttttagagtacaagatgatattaaggaatctgtacggaaaacagcagaattagttctgaaaactctgagcaaggtttgtgtgaaaatgtgtgaccctgccaaaggagcagctggccagagaaccattgctgtcctcctgccctgccttctggacaaaggaatgatgagtcccgtgacggaagttcgagccctcagcattaacacccttgtgaagatcagcaaaagtgcaggagccatgttgaaaccacatgcccctaaactcatcccagcacttcttgagtccttaagtgtgttggagcctcaagttctcaattatttgagtctccgagctacagaacaagaaaaggctgcaatggacagtgctcgactcagtgctgccaagtcttctcccatgatggagacaatcaacatgtgcctgcaatatcttgatgtttcggtgctgggcgaactagttcctaggttatgtgaactgatcagaagtggtgtaggccttggaactaagggaggctgtgccagtgtcatcgtatccttaactactcagtgtccccaggacttaacaccttactcaggtaaacttatgagcgctttgcttagtggtctgacagatcgaaacagtgtaattcagaaatcctgtgcattcgccatgggccatttagttcggacttcacgggatagcagcactgaaaaactgctacagaagctcaatggctggtacatggaaaaagaagaacctatctacaagaccgcttgtgctttgactattcatgcaattggaagatacagccctgatgtattgaagaaccatgccaaagaagttctgcccttggccttcctaggcatgcatgaaattgctgatgaggagaaacctgaaaaagaagaatgtaatttgtggactgaagtgtggcaggaaaatgtacctggctcctttggaggtattcgattataccttcaggagttgattgctattacccagaaggctttacaatcgcagtcttggaaaatgaaagcccagggtgcaattgctatggcatcaattgcaaaacaaacaagttctcttgtacctccatatctgggaatgatactgagtgctttggtgcaaggcctggctggaagaacatgggcaggaaaggaagaactactaaaagccattgcctgtgtggtgacagcttgcagtacggagttagaaaagtctgtgcccaaccagcccaccacaaatgaaattcttcaggctgtcttgaaggagtgttgcaaagagaatctcaaatataagattgtagccatcagctgtgcagctgatgttttgaaagccaccaaagaagacagattccaggagttttctgatattgtcatacccctcatcaagaagaactcacttgaaagcatgggagttcggagcaccaaagctgaagatgaaaacgataaggaaagagagctgcagctggagtctctgctgggtgcctttgagagcttgggcaaagcctggcccaggaacccagaaacccaacgttgttatcgccaggagctgtgcaaactgatgtgtgaacggctaagactcagcacatggaaagtgcagctaggtgtcctccagtcaatgaacgcctttttccaggggttaatgcttttggaagaagaacatgcagattctgaagctctggctgaaattcttcttgaaacttgtaaatcaattacttattctttagaaaataagacctactcatctgtgagaacagaagctttatctgtggtagaattgctgcttaaaaaacttgaagaagctaaacagtgggaaagtttgacagcagaatgcagaagacttttggttgagtctttagctactatggagacagacaacagacctgaactgcaggagaaagcctcagtattgaagaaaacacttgaaagtctggaatgaatgagaatgggagaaaacaaacaagtgccatgttcttttgggattggaa

SEQ ID NO: 1435 - DNA, 2271 bp, Cricetulus griseus
gcagaacagtgtcggttctgtcgtcaggatggtgaagcccaagtacaaaggacggagcaccatcaaccggtcggcagccagcaccaacccggatcgagtacagggagctggaggccaaaacatgagggaccgggccacaattcggcgcctgaatatgtacaggcaaaaggagcgcaggaacaatcgtggtaaagtgattaagccactgcagtatcagtccgactgtggcttctggcacagtggcacgagtggagccaaatattaaaatggttttggaaacactcgagtgatcaagcaggcatcattacaaaaatttcaagaggaaatggataaagttatgaaggatccatacaaagttgtcatgaaacagagcaagttaccgaatgtctcttctacatgatcgagtccagcctcataatgcaaaggtccacattcttgatactgaaagttttgaaagtacatttggcccaaagtcacagagaaagcggccaaaacttagtttgcaagtgatatgcagtcccttctagaaaatgctgaaatgtctactgagagctatgaccagggcaaggaccgtgatttggtgacggaagacactggtgtaagaaatgaagctcaagaagagatatataagaaggggcagtcaaaaagaatttggggagagctctacaaggtgatagactcatcagatgttgtggttcaagttcttgacgctagagacccaatgggcactcgttcccctcacatcgaagcttacttgaaaaaggaaaaaccctggaaacacctcatttttgtactcaataagtgtgatcttgttccaacttgggcaacaaaacgatgggttgctgtgctttcccgggactatcctacacttgctttccatgcgagcctcaccaacccctttggaaaaggagcattcattcagctgctgcgccagtttgggaagttgcacacagacaagaaacaaatcagtgttgggttcattggctatccaaatgtaggcaagagctctgtgataaacacattacgatccaagaaagtttgcaatgtggcccccattgcaggagaaacaaaggtctggcagtatattaccttgatgcgtcgtatattcctgattgactgccctggtgtggtttacccctctgaggactcagagaccgacatagtgctcaaaggagtggttcaagttgaaaaaattaaggctcctcaagaccatattggtgctgtccttgaacgagcaaaaccagaatatatcagcaaaacatacaagattgactcctgggagaatgctgaggactttcttgagaagctagctttccgcactgggaagttactgaagggcggagagcctgatttacagactgtgggtaagatggttctcaatgactggcagaggggccggatccctttctttgtcaagccgcccaatgcagagccaccaacagctccccagcttccaccttcctcaccattggaagttcccacagaaataactgagaacaacccagaagaagagatctcggaaaccatagttgaaaagtcagactctgtcattgaaaaggagccagaagcagaccatccccaggactcaaactcagagatgcaacaaatccttgcacgcgttcgacagaacttcggcaaaatcaatgtggggcctcagttttctgcggatgacctggttcctgtggagctgtcagacatggaggaagacctggaaagcctttcagcagaagaggaggagcaggatcaggagcagccgggagaggatgctgaggaggcgccttcccaggactctcaggaagaaccagtggaaaaggacaccaaagctgtgattagagccttagatgaaaagatcgccaagtaccagaagtttctaaataaagccaaagctaagaagttctcagccatcagaatatccaaggacttaagtgaaaaggtttttgcaaaatatgaagaagagaagaaaagatctgtagaagtcagtgatgcagcacccaccaaaaagggaaggaagcgtagtgcacacatggaagaagaaccttcaagtaaagctcagaggatgctgacgtgtaaggaacggaggagagctgcacggcagcaacaatccaaaaaagttggtgtgcgctactatgaaacacacaatgtgaaaaatagaaacaggaacaaaaagaagacaaacgactcagagggacagaagcacagacacaagaaactcagacagaagcagtaacatctagaaagttgtttattaaattatacaaaaataggcaatta

SEQ ID NO: 1436 - DNA, 2271 bp, Cricetulus griseus
cgatgtgtggagctttggagtgctgctgtgggaactgttgactggggaggtgccctaccgtggtatagactgtctcgcagtagcctatggtgtggctgtcaacaagctaacattacccatccccatctacctgccctgagccctttgcacaactcatggccgactgctgggcacaggaccctcaccgcaggcccgacttcgcctccatcctgcagcagttggaggcgctagaggcgcaggtcctacgagagatgccacgggactccttccattccatgcaggaaggctggaaacgcgagatccaaggcctctttgacgaactacgggccaaggaaaaggaactactgagccgcgaggaggagctgactcgcgcggcacgcgagcagcggtccccaggcagagcagctctggcccagtgggagctggaggtgtttgagcgcgagctgacgctgctactgcagcaggtggaccgagaacggccgcacgtgcgtcgccgccgcggcacctttaagcggagcaagctcagggcgcgcgacggcggagaacgcatcagcatgcccctggatttcaaacaccgaatcactgtgcaggcctctcctggccttgaccggaggagaaacgtctttgaggttggggctggggactcgcccactttccctcgcttccgagcaatccagttggaacctgcagagtcaggccagacttggggtcgccagtcccctagacgtttagaagattcaagcaatggagagaagcgtgcttgctgggcctggggtcccagttcccccaagcctggggaggcccagaatgggagaagaaggtcccgcatggatgaagccacgtggtacctggattctgatgactcatccccactaggatctccttccactcccccgacacttaacggtaaccctccacggcctagcccagagccagaggagccacggcgttctgggcccacagaacgcggcaacagctcggggactcccaaactgatccaacgtgcactgctgcggggcaccgctctgttagcttccctgggtctcggacgtgacctgcagcctccaggaggcctgagccgtgaacgtggggagctcccaccagcaccaccccctgcacagatgccctcacccagcccagccgagctgccctccaccccgctcattcgcctttcacccacaacacccgatgcccgtggcccacccaacccgacacccttattgctggacctaggtgttccctctggccagccgtcagccaagagccctcggcgggaagagacacgaggaagaactgtctcacccccaccaggaatatcacgctcagctcccggcacccctggaacccctcgatcaccacccttgggcctcatcagccgacctcggccctcaccactccgtagccgtattgacccatggagctttgtgtcagctgggccacggccttcacccctgccctctccacagcctgcaccccgacgggcaccttggactttattcccggactcagatcccttctgggactccccacctgccaaccccttccggggaggctcccaggactgccggacacagaccaaagacataggtgctcaggccccatgggcaccagaagcagggccttgagtgggccaggccacacccccacgctcccgctgccttagaggaggcatagcatacactggaagaggagccaggcaggcctcttggtgtggctgccttggtttcccccagggaccccgaccccttggggggtcaggaacactacactgcacagaaaagccttcacactggatgggggctacaccccacatacctacaacctgtaggtctcctgacttacctgccccgctggggcctgacactgtacctagctggttgggaggaccagagcctgtctcagggaattgcccccaggagtggtgcagagaggagggggaggtacaggggagaggggccgacctcaggtgtcaccagcacttttgaccaagtcctgttactgtggcccctgtccccaaggcctagttcctggaccttctaccctggaggttatcagagctgggactctctgggtgcctttctactgccccagccaaggttggggccttggcttggggagccaattaagccaaataaactcgtaagctgtctccccaaaaaaaaaaaaaaaaaaaaaaaaaaaaaaaaaaaaaaaaaaaaaaaaaaaaaaaaaaaaaaaaaaaaaaaaaaaaaaaaaaaaaaaaaaaaaaaaaaaaaaaaaaaaaaaaaaaaa

SEQ ID NO: 1437 - DNA, 2271 bp, Cricetulus griseus
gttgagagactaagaatactagtctttttgttatcacccactacctgaagacagactaaaagatacatcagcctccagatggaaacggctcctacatcagcagcaaccccttcacccagaatgggctgtactggccaaaaagcagctgaaaggcaaaaacccagaggacctaatatggcgcaccccagaagggatctctataaagcccttgtattccagggcagatactatggacttacctgaagaacttccaggagtgaagcccttcacacgtggaccgtatcccaccatgtatacctatagaccctggaccatccgtcagtatgcaggctttagtactgtagaagaaagcaataaaattctataaggacaatattaaggctggtcagcagggattgtccgttgcctttgacctggcaacacatcgtggttacgattcggacaaccctcgagttcgtggagatgtgggaatggctggagttgctattgatactgtagaagacaccaaaatcctatttgatggcatccctttagaaaaaatgtctgtttccatgaccatgaatggagcagttatcccaatcctggcaacatttatagtaactggggaagagcaaggtgtgcccaaagagaagctcacgggcacaattcagaacgatatcctaaaagaatttatggtcagaaatacttacattttcccaccagaaccatccatgaaaattatcgctgacattttccagtacacagcacagcacatgccaaaatttaattccatttcgattagtgggtaccatatgcaggaagcaggagctgatgccattctagagctggcctataccatcgcagatgggttagaatactgcagaactggactccaggctggactcacaattgatgaatttgcaccaaggttgtctttcttttggggaattgggatgaacttctacatggaaatagcgaagatgcgagctgggagaagactttgggctcacttaatagaaaaaatgttccagcctaaaaactccaaatctcttcttctgcgagcacattgccagacgtcagggtggtcactgactgagcaggatccctacaataacattgtccgcactgcgatcgaagccatggcagctgtgtttggagggacacagtctttgcatacaaattcttttgatgaagctctgggcttgcctactgtgaaaagtgctcgaattgcccgaaacacacaaatcatcattcaggaagaatctggcatccccaaagtggctgatccttggggaggatcatacatgatggaatccctcacaaatgatgtttatgaagctgctctgaagctcataaatgaagttgaagaaatgggtggaatggccaaagctgtagctgaaggaatacctaagcttcgcattgaagaatgcgctgccagaagacaggctagaatagattctggttctgaagtcattgttggagtaaataagtatcagttggagaaagaagactctgtagaagtcctggccattgacaatacttcagtgcgtaagaagcagattgaaaaacttaagaagatcaagtccagcagggatcaagttttggctcagcggtctcttgaggcacttacccagtgtgctgccactggagatggcaatatcttggctcttgctgtggatgcagcccgtgcaagatgtacagttggagaaatcacagatgctttgaagaagatttttggtgagcataaagctaatgatcgtatggtgagtggagcatatcggcaggagtttggagaaagtaaagagataacatctgccatcaagagagttagtaaattcatggaatgtgaaggtcgcagaccccgtcttcttgtagcaaaaatgggacaagatggccatgatagaggagccaaggtcattgctacaggatttgctgatcttggttttgatgtggatataggccctctttttcagactccccgggaagtggctcagcaggccgtggatgcagatgtacatgctgtgggcgtcagcacgcttgctgctggtcacaaaacccttgtccctgagcttatcaaagaacttactgccctgggacggccagatatccttgtcatgtgtggaggcgtgattccaccacaggattatgaatttctatatgaagctggtgtttccaatatatttggtcctggcacccggattcccaaagctgccgttcaagtgcttgatgatattgagaagtgtttggcagagaaacagcaatctatgtaacatctggatctttagttatgac

SEQ ID NO: 1438 - DNA, 2270 bp, Cricetulus griseus
  modified_base (325)..(325): a, c, t, g, unknown or other
gcgagtccgcggccgggagcgggaatgtcgaggagttcgaaggcggtgctgggcctctcggtgctgctgacggcggccacggtggccggcgtgcatctgaagcagcggcaggaccggcagaggcttcgtgacggagtgatcagagacattgagaggcagaatcagaaaaaagaaacattcgtctttttgggagaaacagattattttgactaagcaacttgaagcagaaaagagagaagatgttggaaaagaggatctcaaaaacacttgactgtgaaaattgatggggcagtgctgggtgtatgtgtgtgtgtgtatgtgggtntgtgttgatagagaatagctagtgaaagccgtcccctccccatcactgtccatttaaaccagcttaggtgtgcttgtgagcagggaatgatggagagtaacatccacctgagtggtctgctcagtcggcatgatgatgaagccacaagaacatccacctcagaagggctggaggaaggtgaggtggagggagaaactctcctaattgttgaatcagaggatcaggcgtcagtggacttatctcacgaccagagtggggactcgcttaacagcgatgaaggagatgtatcatggatggaggagcagctgtcttacttctgtgactaagtgcaagaagtggatcccagccagtgatgatgatgagctggaaggagacggagttatagacccagggatggagtacatcccacccccagctgggtcagcagcttctgggctggttgggagcaggaagaaggtcagagctcccgaacagataaaacaggaggaggacagtgatgaggagaagccagacaggatggatggagatagcgaagacacagattcaaacacttctttgcacactagggctagagaaaagaggaagccacccctggagaaggatgtgaagcccaaggggcccaggtatgctcctgtgagcatctatgaggagaagctgctgcttaagaggctggaagcgtgccccagtgctgtggccatgactccggaagcccggaggctaaagcggaaactgatcatcaggcaagctaagagggataggggtttaccactttttgacttggatgaggttgtgaacgctgcacttctgttagtcgatgggatttatggagccaaagacggaggagcttcccggcttccggctggacaagctacataccggaccacctgccaggacttcaggatccttgaccggtaccagactgccttgccaaccaggaaaggattccggcaccagaccaccaggttttgtatcgtttggtgggatcagaagatctggctgtggaccaaagtatcgtcagcccttatacttctcggatcttaaagccttatatcaggcgtgattatgagacaaagccacccaaactacagctcctgtcacagattcgttcccacctgcacaggagtgaccctcactggacacctgagcctgatgcacctcttgattactgctatgtccgaccaaatcacatcccaacgatcaactccatgtgtcaggagtttttctggcctggcattgacctgtctgagtgtctgcagtatccagacttcagtgttgtagtcctttataaaaaagtcattgttgcctttggcttcatggttccggacgtgaagtacaacgaagcttacatttcatttctccttgtccatcctgaatggagaagagcggggattgccacattcatgatctatcatctgatccagacgtgcatgggcaaggatgtgactcttcacgtctcagcaagcaaccctgccatgctgctgtatcagaagtttggcttcaagactgaggagtatgttctggatttttatgataagtactacccactggagagtacagagtgtaaacatgccttcttcctgaggctccgacgctgaggggaacctgttcttcccagagaacagtgggtgctgtcagagagctgtcctgggataagagattataaggtgtcaggaatgattctgaccctgttcctagccttcagtgtgctgtcattgaatcccagagaactcatggggaactgaagtcctgttgtctcttgctgacttaggtctcagtcaggaagaataaattcaatgtctgtctccatgctgctttacctgatctacctgttatcatctccttattgggacactgacctggtataaggaattcactcatggcgtgtcttgggaaaatagcttgagaggaacatccaataaaaaaaaaaaaaaaaaaaaaaaaaaaa

SEQ ID NO: 1439 - DNA, 2270 bp, Cricetulus griseus
gatgccatcatatgatttgatgctgcccaaaccttccaaaggccaaaaacgctacctttcagcctacgatggtcaaaatcctcctaaaaagcaagctggttccaaattccatgtgagacctcgttttgagcctgtacattttgtagctagtagttcaaaagctgaaagacaggaagatccttatggccctcaaacaaaagaggtaaatggacgaacacattttgtcagcatgccaagaaacttctaccaagattatactcaagactctttcaatatacaagatgggaattctcagtattgtaattcatcaggatttattttcacaaaacaagatcactgcttagctgaaggttttggaaaccaagaaaacaagcaacatgcagctgctgacgaggctttgaaagttacttcaaaaacacaacccacctacccatctgtcaaaagttcccagggcaactcaggctcttcacctagaggatctggaaagaagaaagatataaaagatcttgtagtttacgagaattcttccaatcctgtgtgtacattgaatgatacagctcagttcaaccgaatgacagttgaatacgtctatgaaaggatgacaggactccgctggaaatgcaaggtgattctagaaagcgaagtcattgcagaagcagttggggtgaagaaaagtgtcaaatatgaagctgctggagaagccgtgaaaaccctcaaaaagacccagccaactgtcattaacaacctgaagaaagggactgttgaagatgtgatttcaagaaatgaaattcagggtcgctcagcagaagaagcttacaaacagaaaatcaaagaagataacataggaaatcaactgctgagaaagatgggttggacaggtggtggtttaggtaaatctggtgagggcatacgggagcctatctcagtcaaagagcagcataaacgagaaggacttggactagatgtagagagggtcaataaaattgctaagagagatatagaacagatcatcagaaactatgcccgctctgagagccactcagatttgaccttctccacagagctgaccaatgatgagcggaagcaaatacatcagattgctcagaagtatggcctgaagagtaagtctcatggggtgggccatgataggtacctggtggtgggtagaaaacggcggaaggaagacctactagatcaactcaaacaggaaggacaagtgggacattatgagcttgtcatgccccaagcaaattaagagtttactaagttatcttgtaaatgccacgtgaggcagatctacaaaataaaaaaaaagctacatactctggttgaagagtattcattcttaagatgtttcaccttattcatttcatatagtgctttattaggtattggagcctggagaattctgtccacttgtattaacttaacccagcagatgaattgtgcagttactgtttgtgtctttcataatgctctgttacctcagattttagtagtttgtataagcaaaacacccatctaagtgcaatttcatcctgaggaaataattcacattataaagggcatagcacagcaatctgcgacaatatataaagtcaatgctgactcttaattaaattacagctaattccagatttacttcaaatgtcaggtcattttgtattaccaattttcatctttgtgtgaagccagttatagaacatttaacaataaattgtgctgtacatgtaaattccttaccaactaaatgatgtaaaactttcttaaaagtaattttagcgtgtgtttatttataacttctaccctgtaatttccaggatattagaagtgatttactgtatcttgtgatatatgacttttaacaaatcctagtcttcatgctgagagagcattacttgagagagatgtcaaaaagttcccaaaaaaccttgattcaatcagaagaaaggaagacttgaactgtttgttcttggtgccttgcagagagactcagagcaactctccattgtagctttcacacagtctgtgcaccacatccaaggcaaccacagctgtggtagagcctggtaaaagactgaagatacattggtgctttgatgaaaaggttagttggctggtccctctctcagaaagcttattgctccccaaagccaactttgtaacatacttaaaactgctattttcacttatttctggaatgtaaaaatgtataaaaataagagttagtgtatgcttcctgaataaaaaggagccaaagttgatgaaaa

SEQ ID NO: 1440 - DNA, 2270 bp, Cricetulus griseus
  modified_base (1797)..(1797): a, c, t, g, unknown or other
cagtccgtgtacaagctcacagacttcggtgccgccagagagctggaggatgacgagcagtttgtgtctctgtacggcacagaagagtatttgcaccctgacatgtatgagagagcagtactaagaaaagatcatcagaagaaatacggggctacagttgacctttggagtattggagtgacattttaccatgcagctactggatccctgccatttagaccctttgaagggcctcgtaggaataaagaagtgatgtataaaattatcactggaaagccttctggtgcaatatctggagtacaagaaagcaagaaaatggaccgattgactggagtggagatatgcctgtttctgtagtctttcgtcggggtccttcccatgtgttctcactgcaacagatgacagcacataagatttacatccatagctacaatacggctgctgtgttccatgaactggtctataagcaaaccaaaattatctcttcaaatcaagaacttatctacgaaggacgacgcttagtactagaagttggaagactagcccagcattttcctaaaaccacagaggaaaatccaatctttgtcataagcagggaacccctaagtaccataggattgatatatgaaaaaatttccctacctaaagtacatccacgttacgatttagatggtgatgctagcatggccaaggcagtgacgggggttgtgtgttacgcctgtagaattgccagtaccttgctgctctatcaagaattaatgcgaaaggggattcggtggctgattgaattggttaaggatgattacaatgaaactgttcacaagaagacagaagttgtgatcacgttggatttctgcatcagaaacattgaaaagactatgaaagtatatgaaaaattgatggaaatcaacttagaagcagcagagttggatgaaatttcagacatacataccaaattgttgagactttccagctctcagggaaccatagaaagcagtcttcaggacatcaacagcaggttgtctccagggggtctgctggctgatacctgggcacatcaggaaggcactcatccaagagacagaaatgtggaaaaactacaagtcctgttaaattgcatcacagagatttactatcagttcaaaaagacaaggcagaacgtagactagcttacaatgaagaacagatccacaaatttgataaacaaaaactttattaccatgcaacaaaagcaatgagccacttcacagaggagtgcgttaaaaagtatgaagcttttctggatactgcagacgagtggatgcgaaagatgcatcttctcagaaaacagctgttatctctaaccagtcagtgctttgacatcgaagaggaagtgtccaagtatcaagactacactaatgagttacaagaaactctgcctcagaagatgcttgcagcctccagtggtgtcaagcactccatggccccagtctaccccagttctaacactttagtggagatgactctcggtatgaagaaactgaaggaagagatggaaggcgtggttaaggagctggctgagaacaatcatattctagaacggttcggggctttaactatggacggtggtctccgcagcgtggactgtctttagtgctctagggactctggggagttgtagtttgcacaagaagataacactgaagcacgaaatgaacgctcctataggtggttcttatttctacaattcagtatttgatgaggtcatgtaaatatgtacagtttgtaaatacataagaaatatatataaattttttntttttggctgctgtgacctcagtgagctgtagaagaaagccatgaccagctgatgctttgggatgctgtccccagttcttcaagcaaggctggagaaatctattgctcggtgcctaaggaaagtgtttttaaatcagcatccttaaaaatcagaaaggactgatagttgacaccttgtgaacggtggagtgacgggattttgtggagaacagagccgaccactgttcaccagggtcagctcctgtgacaaggatgaagtggcattatttcattttacaaggtgcccagattttggttctcctcgtatgtttagtttcaggtgaattattgagcaaaaaattgaagtgaacttattgtttaaactattcatttttcctttggtcataaatgtgtaattgtcattcagattccagtatcatttcaattgttttaagctgtatatttctgtactttaattctgctatttcatgaaa

SEQ ID NO: 1441 - DNA, 2269 bp, Cricetulus griseus
cacaagctgaagttcccattccatggatcccttgggtgcaccttcccagtttgtggatgtggacaccctgctaagctggggtggactcatataaagaatgaattaaactcccacgacagcacagctgagacattccaggaggacaccatcagatcaccttttctttataatcgggacattaatggaaaagtggttctttggaaaggagatgtggcattactgaactgtacagccattgtgaacaccagcaatgaaagtctcacagataagaatcccgtgtcagaaagtatcttcatgcttgcggggccagacttgaaggaggacctacagaaacttaaaggttgccgaacaggtgaagcaaaattgacaaaaggctttaatctagctgctcggttcatcattcacacagtgggacctaaatataaaaaccgctatcgcactgccgcagagagttccctgtacagctgttacagaaatgtgcttcagctggcaaaagaacagtccatgtcttctgttggcttctgtgtcatcaattctgcaaaacgaggttatcccctagaggatgcaacacacattgcgcttcgtactgtgaggcggttcctagagatccatggagaaaccattgaaaaagtagtatttgctgtctctgaactcgaagaggctacttaccaaaagctgctacctctgtacttcccaaggtcattaagggaggagagccagtcattgccgtacctacctgcagatattggaaatgcagatggggagcctgtggtacctgagcggcagattagaataagtgagaaacctggtgcttcagaggacaaccaagaagaagatgaggatgacggcttgggagtggatttgtctttatggctctcatgcttttgctcggatggaaggagatattgacaagcaaagaaactgatcctccagggacagttgtctgaagctgccctgcagaagcagcatcaaagaaattataaccgctggttatgccaagcaagatctgaggacctgtctgatattgcttctctgaaagccttataccaaacaggtgtggacaactgtggccgcacagtgatggtggtagttggaagaaacatccctgtgacattgatagatatggataaggctctattatattttatccatgtaatggatcacatcgctgtgaaggaatatgtgttggtatattttcacacactgaccagtgaatacaatcacctggactcggacttcctaaagaaactctacgatgtcgttgatgtcaaatacaagaggaatttgaaggctgtttattttgtccatccaacattccgttcaaaggtctcaacatggtttttcaccaccttttctgtctcaggattgaaggataaaatccaccacatagatagcctacaccagctcttttctgccatatcaccagagcaaatagactttcctccttttgtccttgaatatgatgccagggaaaatgggccttattttgcatcttaccctccatcaccagatttgtgacctgccgtcttccaagtactttttggtcaaggaattccattttaccacaactcacaacccattgaagtgatattcatttttgctgtacagatccagagagcttttgtccccatctctctggtatttttttattgactatatattttctggcacataaacaatctaaaactggtaggccatactgaactgcatatgttttaaatttgtatatttgtatcaaatggaaatgtttgtttttaagagcattaatagaaactggggatcaacttttcagtgtcttcagtttcctggactctggactctatgttacaaggccaccaacgttgctcacatcatctcttacagtgcacagtttggactgtctgttacacaggccagcaacattgttcacagcatctcttaaacagtgcacgcttcctttgtgtatttaagtgtttctcaaaatatatacaaccaatgtatgctgaacagatacattgtttctctcaaacccaggatttaatatcatttacattttatacagatgatctgattataatatagaattgtccaggaccaagaatatagagatgtgtctgattgaaactaataaaaatcttcagcaaaacataggacttgcaatttggtggcacaaggtaagagtgagctgtaagtgctttctggattatatggtttgttaagatcgacactgttctgatccagtatggggaacacaaagactgtatcttcaactctttctatactcatgtga

SEQ ID NO: 1442 - DNA, 2268 bp, Cricetulus griseus
tctggatcggttatcagaagaggtaaatgataaattgcaagaaagtggtcaagtaactatctcagaactgtgtaaaacctatgaccttcctggggattttctcacacaggcactaactcagcgactgggccgaactatcaatggccatattgaccttgataacaaaggggtgattttcactgaggcctttgtagctcgccataaaagcacgcatccgtgggctcttcagcgctattaccaggcctacagcagtgaattctgtgaatttcaaaatacggattttcaggagcagcttctttactctgtgcttgaggaactcgttggcagtggccgtttacgaggcactgtagttggtgggcgacaggataaagcagtgtttgtccctgacatctactccaggacacagagtacttgggtggattcctttttcaggcagaatggctacctagagtttgatgccttgtctagacttggaatcccagatgctgtgaactatataaagaaaaggtataagaacacacaactcttgtttttgaaggcagcttgtgttggtcaaggactcgtggaccaggtggaagcatcagtagaggaagccatcagctcggggacgtgggttgatatttctcctctgctgcccagttctttgtcagttgaagatgctgccatgctgcttcagcaggtgatgagaccattcagcaagcaagcttcagctatagtctttaatgacacagtagtggtcagtgagaaatttataaatgagtgtacagtactgttcagtgaacggatgcaccaaaaagccgaaaaggaaatgaaaaataatccggtgcatttaatcactgaagaagatctgaaacaagtttccattttagaaagtgttaatacaaataaaaaggacaaaaaagaatgagcgcaggaagaaagcaacagagggcactggaagtgtgagaggaggaggagggggcaatgccagagaatacaaaattaaaaaaatcaagaagaaaggaagaaaagatgatgagagtgatgaggaatctcagtcatctcatgctggaaagaagaagccagacatcatgttcatgttccaagatgaaattgaagattacttaaagaaacatgtgcaagatgcgcctgaggagtttatttccgaacttgcagaatacttaataaaacctcttaataaaatgtatcttgaggtggtacgttcagtgttcatgtcttcaacttctgcttctgggactggcagaaagcgtacaatcaaggacttacaagaagaggtttcaaacctgtacaacaacatcagattatttgaaaaggggatgaagttttttgcagatgacacacagactgctctgaccaagcacctcctgaagacagtgtgtactgatatcactaacctcatgttcaacttcctagcttctgatttaatgatggccctggaggaccctgcagccattactagtgaaataagaaaaaagattttaagtaaattgacagaagaaaccaaagtagctctcaccaaactccacaactccctggaatgaaaaaagcatagaagacttcctttcttgtctggactctgcaacagaagcttgtgacattatggtgaaaaagggagacaaaaaagggaaaggcaaatactattccagcatcggcaggcgctggctgagcagctgaaggtcacagaagaccctgctcttgtcctgcacctcacgtcagtcctgttatttcagttctccacccacactatgctgcatgctcccggaagatgtgtaccacagatcattgcttttcttcacaacaaaatcccagaggaccagcattctctcctggtaaagtaccaaggtttggttgtaaagcagttagtcaatcaaaataagaagagtggaccaagggaggacctgtcaactgatgagttagacaaggaacagcatgacgtcaccaacactactcggaaggagcttcaggaactgtctctatctgttaaggatcttgttctgaagtccaggaaatcatctgtgacagaggagtaatacccttaagagtgatcacaaagttagtcactcaacacacccacccacccctgttaatcctccctacacaattcaaataaaatagtggtgttgcattagatgcaaatctacagaaaattttacaagttgagtaccccataaaacattttcttcttacataatcctatgtataattttaatgtaataaaatttcttcaaagagttctgaatctagaacatattacatgctttcatttct

SEQ ID NO: 1443 - DNA, 2268 bp, Cricetulus griseus
ggcgagacggggcgagacggggccggtaggtggcaggagggggccgggccggagccggcggaagggccaggccccgaggcccccgccctggctagcccgccccggccgcggaggagaaaacggaggatgatctccagatacactcggaaggccgtgccacagtgtgtggagctgaaaggaagaacaaagcacgcgcttaaccatcatccccttccagagcaactggatgacatttcctctaccaatgacagccacgaaaaagatacgagtactcaaagtgagtctgacatcacccaggaatcaccttttacatcaaccgacaccgggaattcgcattctgcttttccaagctatgcaggcacggggatctctacagaaggcagctctgacttctcctggggatatggtgaacttgaccagaatgccactgagaaggtgcaggcaatgttcacagccattgacgaactcctgtatgagcagaagctgagtgtgcacacacagagtcttcagagagagtgccagcagtgggcgtcgagctttcctcacctcaggattctaggtaggcagatgatcactccctgtgaaggctatggattgtaccctagatcaccttctgctgtgtcagcttcacatgactcaaccttgtctcaagagagagactctaccatatttggtataaggggaaagaagttacatttttcatcttatgctcataaagcatgtctctccatcaaaccctctggcttgtctgctgtggaaggggaagaggtggactgtataatcttttctgaaggaataatcgaggagtacctagctttcgaccacacggatatggaagagggatttcatggaaacaaatcagaagcagctacagagaaacagaaattagggtaccctcccattgctccattttactgcatgaaagaggatgtccttgcttatgtttttgacaacgtgtggagcaaggttgtgggctgtatggagcagttgacacgtagtcactgggagggatttgcttctgatgatgagagtaacattgaaattgccagaatggattctggaagtccctgtatgctgaacgaacagcatcctttggtcttacctcgagtgccacagtccaaggtgctgtccatcacctcaaatccgatgagtttctgtcaagcaagtggtcaccagccgaacgtgaatggcctcttggttcatgggatgcctctgcagccaaggaacctctccctgatggataagctcctagatattgatgacaagctacttatgaggcctggctccagttccgtgctttcaaaccgaaattggccaaaccgagccctggagcttagtacgtcatctttgtcatatacagcacagtccgccaggagacgcaacgcccccaccccgcacccttcacccgatcagcacaagccactcacgagccgggacgccatggcctgcagaagaaatcctcagaggatcccgaggtccagtgactgcagacacactctcttctccctcactcaatcgccctgggtcggaacaatctgctgccacctattggaacagctgaagtggaacatctgagccaccgttggggccacaacggccatcaaacgtcccacggtgactccagcagagctcgaagtttttgccagacacacagtaccgaaactcctgtgcatctgagtttcctcaccaggcccgacctggcaggggttctgcaggtcctcagttacatgggtctacaaaacctcaaagcagaggtggacccatctctagaagcaggcagtgaccatggggcaggtgagaacccgcaaggctgcagcagactgcaaattcacggagggtttcatgcaccagcgctcaggcaccaaatgatgcaaagctcctacaaacagcagcttggtccatcttcaagagttatctcggtacaactgtctgagatacactagagtatctgccaaagactgcgtgggcaactgttctatgtccagttactgtcttctttcagctgggcagtaaagattgtacccaaaagatgtgacaatgaaaaacaccccaaatcactgctcatgttgtctataaccaatcaccagttcgattcttgtacaattcagcgagattacatacatacacacagatgattgagatcactggcttcagaatatttctgcttatataatttctggagaactgcactgttttaacatatttttagaagaaagtgctgaccaaaaatctagagatactcatcaaaataaaatgtcattacctaaa

SEQ ID NO: 1444 - DNA, 2268 bp, Cricetulus griseus
atctataaccagatcacattccttcaacagagctgtagaccttacaaagccttatcagaaccaacagctacccgttcgagtgcccctccggtcaggtatgctaacaagaaattctcggcagtcagaagtactcaatgggaatgagcacttggggtttggttttaataggccttatgctgctggtggaaaaaaattggccttatccaatggcccaggtgtgtcttccacgttgggttataggatggttcatccctctctactgaaatctggccgacctccatttcctgggactatgacagttgatagtaataaaaattcacctgctgacatgtgtgtagaagaagaagctggtagttttggcaaaggatgactctactggtaaggaccaagaactagttagaaaatagaaagttatcgaacagacaatgatcagaccaatgaagacatgagtactaaaattaggtatactgagtgatgagggcctggaacccattggaactgtccatcctgttggcagctatgactcctctgaaatgaacagcatagatattctgaataatcttgaatcatgtgaccttgaggatgatgatcttatgctggatgtggatttgccggaggatgcacctcttgaaaatgtggagtgtgacaatatgaaccgctttgaccgagcagacagaaatgtacgacagtcacaggacggattttggaaaagagcaccccagaggtggagtggacaggagcattaccaccttagccacccctgatcactatcatcaccatgggaaaagtgacttgagcagaggctctccttatagagaaacacctttgggtcattttgaaagctatggagggaccccctttttccaggctcagaagatgtttgtagatgtgccagacaacacagtgatactggatgagatgaccctccggcacatggtccaggactgcacagctgtaaaaacgcagttactcaaactcaaacgtctgttgcatcagcatgatggaagtggatctttgaatgatgttgagctatcattgccatccagtccagagccagaagatgatgaccagatatataagaatgaagatttattaaatgaaataaaacaacttaaagaggaaataaagaaaaaagatgagaaaatccaactattagagcatcggcttgcaacccggtgtaactgccaccagaaatctaaagaggaaaagtgtacatatgctgataaatacacccagacaccctggagaagaatccctggtgggtattctgctccctccttctctccttggcagggctccttccaggggatgccacggactgttccaccgcatcgcagacagacctcaagtactacagccttccagcagccttcccagacctacagaccacgcccagggaaaactaataaagccacaacatatagaggcccacagtgaaaacacagtccaaggcatgtgtcagagtgatgcacacccagatggaagctttacacatggcttgcaacaagaaaatagctatggtttgaaagactgtcctttttcatcaagcccacagttcccaatggatgtggtgaaggacgtaccttcagaaacaaacctgagcatgactatgaatgctcaagagcctcatcatttggcaaagaatcaacctagtgacatggagtttgtaactactcctcctcagacaccttccaagtcaagtacagtgaaccagactaagaaggttagaagaagccagtctcctcagcccaagtccttgcagccttcaaagccatccatcttgagttctgtggcacatcccccagattctgattcatcaccaagtaggacttccacatctaagaaggcaccagtaatcacaccatgtaattcaaaacatcagccaacgtctaatcaaaacaatcttgcaaataatttgaattctgaaaggaatctaaaactccgtcccccttctggctctttcaaacaaaacaaataagcaatccccaaccagagcctcaaaatttccaagccaagacaagcatcccaaggccattagcacgatcaaaagaactgcagaattcacttagcaatttgcattctggggattatgtggcctctaatcgatattctcgtcttcctaaaccaaagataaattaagtgcatagccatcacctgccactttgtcttttgaaaacaatctgctctgtaatagctttatgtgcagtttattactatattggaggttccattacagcaaatcttaaaattaaaacacaaaagcttcta

SEQ ID NO: 1445 - DNA, 2268 bp, Cricetulus griseus
ccatgatccagtttgcaatcaacagcactgagagaaagcgtatgaccttgaaggatatctacacttggatcgaggatcatttcccttattttaagcacattgccaagccaggctggaagaactctattcgtcacaacctttctctccacgatatgtttgttcgggagacatctgccaatggcaaggtctctttctggaccatccacccaagtgccaatcgctacttgacgttggaccaggtgtttaagccactggaaccagggtctccacaatcgcccgagcacttggaatcacagcagaaacgacccaatcctgagctccgtaaaaatgtgaccatcaaaagtgaactcccactgggctcacggcgaaagatgaagccactgctcccacgggtcagctcgtacctggtacccatccagttcccagtgaaccagtctttggtgttacagccctcggtgaaggtgccattgcctctggcagcttcgcttatgagctcagagctcgcccgtcatagcaagcgagtccgaattgcacccaaggtactgctagccaatgaaggggtagccccacttcccgctgaagggccggtgaaggaggagaaacccctgcttgaagaaggactattacctttgctccccattcagtctatcaaggaggaagaaatccagcctggggaggacttggcacacttagagaggcctagcagagtggagagccctcccttggaagagtggccctcaccgtgtgcatcactgaaagaggaactatccaattcctgggaagattcttcctgctctcccaccccaaagcccaagaagtcctcctattatgggcttaagtccccaacccggcgtgtctcagaaatgctggtgactaagcgaagagagaagagggaggtgagccggtctcggaggaaacagcaccttcggtccccgtgtctagatgagcctgaactgctcttctcagaggatcccggcacactgcgaccagccatggagcccctactcctggcagagtcttcagagcccgcatcccagctcagctgccctcaggaagagggaggacccttcaagacccctgtcaaggagacactgcctatctcttccactcctagcaagtctgcgctctccagaacccctgaggcctggaggcttacaccccaaccaaagttggggggttagatttcagcccagtacgaaccccccagggcgcctttggccccttgcctgactccctggggctgatggagctgaatagcacacctctgaaaagtgttcccctttttgactcaccccgggagctcctcaactcagaaccctttgaccttgcctctgacccctttagcagctctccacccccacatctggaggtccccaagccaggctcccctgagccacaggtccccagtctttcagccaaccgttctctcacagaaggcctggtcctggacacaatgaatgacagcctcagtaagatccttctggacatcagcttccctggcctggaggaggaccctctgggccccgacaacatcaactggtctcagttcatccctgagctgcgatagaggccaggcctggctcagtgtaccccaagccctctgagggaagctagcaggcaagggccgagctgtgccccttacctaattatgccaaaatgatagtcacatctaacccactgctgggacctatgcatgcggtagggtctcccagagagtctgagcccactctctctgctggtaactgaagggtgggtgacaaaagcagtgatgaccaggaagtgcccagtagtcatctgctgctcccccgtgtaaatggtgtaagttccccaaattgtcctctaattataaatgtaagcttatttccttagggtcattatctagagactgccaggggtgggtgggggtgacaaggggttgcactttgcttctgcttgtggcctgtgagggagggacctgcggtgcagtttcttccacactttgtgggttctgctgtgggcacctagacatacaggtcggcttgccaggatcccacttactgccttttcctgacatccccatgtttccaagccagtggtcctgcaagaagctagcattgagagctcaggctgaggcctgagcaggaagatgtgaccctgaactgcctggcttccttagcttgcacctgagctttgcaaagagccaccctaggctccaatacacaagctgacactactgtaactacctactgaatatttgttcatttgtaaaaaaaaaaaaaaaaaaaaaaa

SEQ ID NO: 1446 - DNA, 2268 bp, Cricetulus griseus
agcgccgcgaagcgcgacccgggtctctgctcgttgtcgatgtcctacggtcccttagacatgtatcggaatcccgggccctcggggccccagctccgggacttcaacagcatcatccagacgtgcagtggcaacatccagcggatcagtcaagccactgctcagataaagaatttgatgagccaacttggaaccaagcaggactcaagcaagctccaggaaaatttgcaacagttacagcactccacaaatcagctcgccaaggagacaaatgagttgctaaaggaattagggtctttgcccctacccttgtctgcatcagagcagcgccagcagaggcttcagaaggagcgtctcatgaatgacttctcgtcggccttgaacaacttccaggctgtgcagagaagagtgtctgagaaggagaaagaaagtatagccagagcaagagctgggtctcgtctgtctgcagaagacaggcagagagaggagcagctcgtctcatttgacagccatgaggagtggaaccagatgcagagccaggaggatgaggcggccatcactgagcaagacctggaacttattaaagagagggaaacggcgattcggcagctagaggctgacattttggatgtcaatcagatatttaaagatttagccatgatgatccatgaccaaggtgacctgatagatagcatagaagccaatgtggaaagctcagaggtgcatgtggaaagagccactgatcagctgcaaagagctgcttattatcagaaaaagtctcgcaagaagatgtgtatcctcgcgcttgtcctgtctgtgattcttacagtcttgggagtggttatctggtttgcttctaaatgaggtgcggttgcctcagagccttctcctgctgagttgttttcaagggcaagtgcttgatggagtcttgccagaacaaactgaccacagaagagagcgtgtaccagagtgtcctgtgataatttagctagaaactaactactaactagtccttggaattagcgacccatggagacagtatttatccatttatgcatacattctattgatttctcagataaggaattaacttatgtgtatttccctttctcttgtattttgattgccctttatcccaagtgtttattgacagttccattgcggatgttctttttgacaggtgacactacagtcataatattgttttttgtatatatacaaactctaactttttatgagcatctgagataaatttacttctggagccagcccattgaagtctgagaaactgtacaatatgccagcaatttttatttaaacatttcaatttgagtttccaaggggtctgttctctgttttgcaagattttggcactgtatgtaagtggggaataagaacactgcacccatgacttcagatgaaatgagaagggcctgtctgtgagagtggccccattgccagggtgtgtatgaaagtctgggtttaagttaaactgactttattgtctgctggtatcgtttatagagtccatccccgcacactaagtcatcctgctcctgttttaaagaggtttgcttcattgacaatgttacaatcagatgggcccctcttccacctgtctgcatagaaagggagaattaggcacagcatgattttggaaagcaaatagggatcgtttggaatggttctcttgttgttcatttgtggcttacattcctggtgaatgataaatgttgctgtcaaaggctgttcccgagccttataagtgttgcctggctttgatggcaagattttaaaatttagactgaagtggggtttgaaacttaggtctgtgaacatattgataaagcaaaggttcctttttgtaaataatactggtttagtgatgttagacttagcctaatttatgaacaagagatcaaactcagcgtagtgttagacaaaaacagttttaataaaagattgttgtcttgtaatataaacgttgtccactgccctttttcacaggcctagaacaggtagagtgtaattggtttaggcattcagataaatgtgaatcgaggctgaaaatgtcagctcatccttcactgaattggaggatttggctactgttggtatatttatgtttatttcttctattcctcttaatgttacttaatcttgttctatactaatgtgatcggtagggaaataagggcccaaatgcataagtttctttgcacttttgcaccatccctcctacttaatacaaataaacatttaaaagct

SEQ ID NO: 1447 - DNA, 2268 bp, Cricetulus griseus
cacttcacggcactaggaagctttatttctacacgaatccttaaaaacatctaccagtttgactttaaagctaagaagtataagaaagtcactggcaaggagatctattcggacactttggagagcacgcccatgctggagtaaggagaagttcccacaagactactttcctgagtgcaaatggtcaagaaaaggcttcatcaggacgcggtggtgcattgctgactgtgccttcgacttggtgaacattcatctttttcatgatgcatccaacttggtggcctgggagacaagcccctcagtgtactcgggtgtcaggcacaaggctcttggctatgtgctcgacagaatcatcgaccagcgatttgaaaaagtttcctactttgtttttggtgatttcaacttccgcctggattccaaatctgttgtagagacactctgcacaaaggccacgatgcagacagtccgggctgctgataccaatgaagttgtaaagttgatatttcgggagtcagacaatgaccggaaggttgtgctccagttggaaaagaagctctttgactacttcaaccaggatgtcttccgggacaacaacggcactgcgctcttggaatttgacaaggagttgtctgtctttaaggacagactatatgaactggacatctcattccccccagctatccctacagtgaggactccagccagggagagcagtatatgaacacaagatgccctgcatggtgtgatcgaatcctcatgtccctgtctgccaaggagctggttcttaagtcagagagcgaggagaaagttgccacctatgaccacatcgggcctaatgtctgcatgggagaccacaagccggtgttcctggccttccgaatcgcacctggggcaggtaaacctcacgcccatgtgcacaagtgttgtgtcgtgcagtgacgtggtgggaagaggtgccagcgccttgagaggatcctcgagaggcctccctgtagcagtgtatccaactcatcctcctaacagctgcatcggaacccgcccaagcatcacctgctagacggctggccccacacttcgcttcagcctccggacctccggaaaagcctcacatacctcactgtcgtgtctgtcacgtgacattgtagacatattgggtttaatcaagccacagtcctattgccaaaactctaacagacagccgagcgcctgtattttagacttcacagttttccatttttaacgattgtctgtgggggaagcttctccatttagagccccaggtgtccagcgtccctctctgccaggaggagtgtgccgggcactagcccaggcagcaaggctgccatgtgcgctcaagcccgaggccccgaggtctgactctactgccatgttacatggcgtctgaatcacactgcagctgctttccatttttatatatataaatacatataaatatatactttttaaaaataatttataaatcttaccaaaacttatgctgaatattctttccagtatgagtgcacgagtgtcctaagcaggcagaaccgcagtctgcttgaatggggagtccatcagcagtcagcacaggttcccaagacaagacctagcaagtgcccaggggagaggggcccctaaggcatgcctgtactagcagcttgtcactcttctgcctttttctgtgtaatattaagaactgaatgtgaagtttatagctagcctgggtgtaccttttaagaattttgtaaaccgttttgtctgtcttttgttaccgttttatggtgccaagtatcctacattaaaaccataatctcgtgggagaattagaagtagcctcgtacacttcccacagatcgcttctagcatgggctgtgtgtaaacgtggcagagaagcgatgggtgatgctgggcacagcctgttgcccttactcacacccagcactgagtaccacggaaggcgcccgcggagcctgctgaggagacacagcgtgcttttattgatttacttctgaacactacagttcctggatggggcggaggcgcgagttaatgtcggtttccctagaattcaccgaaggccggcctgtgtccttgatgccggggtcgggtctgtgactgccatggtcgctgcttgccaatgtgccatgtccgcagcggttgtctgtgggttccacctgtgggtccttcctctgaaggcctctggaagtgactgctcggttcctaagcaataaaattgatcatggtgaaaaaaaaaaaaaaaaaaaaaaa

SEQ ID NO: 1448 - DNA, 2267 bp, Cricetulus griseus
cgccgcgtccgcgtctcagcggctcctcagcgttcccgcgcagcccgccgcctcccggagcagcatggacagcgccgaggagctgctcgccccactgcggctagccgtgcgccagcagggagacctcgtgcgcaagttgaaggaagataaagcccctcaggtggatgtggacgagggcggtagctgaactcaaggcccggaagagggttctggaagcaaaggagctggcgctacagcccaaagatgacatcgtagatagagcaaaaatggaggatactttgaagaggaggtttttctacgatcaagcttttgctatttatggaggtgtcagtggtctctacgacttcgggccagtaggatgtgctttgaagaacaatatcatccagacctggaggcagcactttatccaagaggagcagatcctggagatcgactgcaccatgctcacccctgagccagttctaaagacctctggccatgtagacaaatttgctgacttcatggtaaaagatgtgaagaacggggagtgtttccgcgctgaccacctgctgaaagctcatttacagaaattgatgtcagataagaagtgttctgctgagaagaaatcagagatggaaagtgtcttggcccagcttgataactatggacaacaagaacttggggatctttttgtgaactataatgtaaagtctcccactactggcaatgacctgtctcctccggtaccttttaatttaatgttcaagaccttcattgggcctggaggaaatatgcctggatatctgagaccagaaactgcacagggaattttcctgaatttcaagcgacttttggaattcaaccaagggaaattgccttttgctgctgcccaaattggaaactcttttagaaatgagatctctcctcggtctggattgatccgagtcagggaattcacaatggcagagattgagcactttgtagatcccactgagaaagatcatcccaagttccagagtgtggccgatctctgcctttgtctgtactcagcaaaagcccaggtcagcgggcagtctgctcggaagatgcgcctgggagatgctgtggagcagggtgtgattaacaactcagtattaggctatttcattggccgcatctacctctacctcatgaaggttggaatatctcctgataaacttcgcttccgacagcacatggagaatgagatggcccattatgcctgcgactgctgggatgcagagtccaaaacgtcctatggctggattgagattgttggatgtgcggatcgttcctgctacgacctgtcctgtcatgctcgagtcaccaaagtcccactagtagctgagaaacctctgaaagaacccaaaatagttaatgttgtacagtttgagcccaataagggagcagtgggcaaagcgtacaagaaggatgcaaagctggtgatggagtacctcagctcctgtgacgaatgctacatcacagagatggaacagctgctgaacgagaaaggggaattcactattgaaaccgaagggaagacatttcagttaacgaaagacatggtcagtgtgaagagattccagaaaacactacacgtggaagaagttgttccgagtgtaattgagccctcctttggcctgggcaggatcatgtataccatattggagcacacattccatgtccgagagggagatgagcagagaacgttcttcagtttcccagctgtggttgctccattcaaatgttctgtccttccactgagccaaaaccaagagttcatgccatttgtcaaggaattatctgaagctctgaccaggaatggcgtgtctcataaagtagatgattcctctgggtccattggaaggcgctatgcaagaacagatgagattggtgtggcttttggcatcaccattgactttgatacagtgaacaagaccccccatactgcaacgctgagggacagagactccatgcgacagataagggcagaggtctctgaattgcctggtgtggtccgtgacctggccaatggcagcatcacttgggctgatgtggagtccaggtatcccctctttgaagggcaagagactggcaaaaaagagacagtagaggaatgagaagctggcaacttgtgacaacttgtgctaatgaatgaatcatgtccactacacacagaatcgtgattgcttccagggactgtatttttcctcagtgactgcctgattttaccctcacaattaaagttgaaggaattctgaacaaattta

SEQ ID NO: 1449 - DNA, 2267 bp, Cricetulus griseus
ggctgctgtggtggaggaggaggaggagccgagcgggcgttggtaccaaggcctgaccatggacgaggaatacgatgtgatagtactggggacaggtcttaccgaatgcatcttgtctggcatcatgtctgtgaatggaaagaaggtgctgcacatggaccggaacccttactatgggggtgagagctcttccatcacacccctggaagagctatataaacgttttcagttgctggaagggccccctgagtcaatgggccggggccgagactggaatgttgacttgatccccaaatttctcatggccaatggtcagctggtaaagatgctgctgtatacagaagtgactcgttatctggacttcaaggtggttgagggcagctttgtatacaagggaggcaagatctacaaagtaccatccactgagactgaggccttggcttctaatctgatgggcatgtttgaaaaacgacgcttccggaaattcttggtgtttgtggcaaactttgatgagaatgaccccaaaacctttgagggtgtcgacccccagaccaccagcatgcgtgatgtctacaggaagtttgatctgggccaagatgtcattgatttcactggccatgccttggcgctctaccgcactgatgactacctggatcagccctgtcttgagactattaaccgtatcaagttgtacagtgagtccttggcccggtatggcaagagcccatatttgtacccactctatggcctgggcgagctgccccagggctttgcaagattgagtgccatatatgggggaacatatatgctgaacaaacctgtggatgaaatcatcatggagaatggcaaggtggtgggtgtgaaatctgagggagaggtggcccgctgtaagcagctgatctgtgaccctagctacatcccagaccgtgtacggaaggctggccaggttattcgtatcatctgtatcctcagccaccccatcaagaacaccaatgatgccaattcttgccaaattatcatccctcagaaccaggtcaacaggaagtcagacatctatgtgtgcatgatctcctatgcacacaacgtggcagcacagggcaaatacatcgccattgccagcaccaccgtggagactgcagaaccggaaaaggaggttgagcctgcattggagctgttggaacccattgaccagaagtttgtggctatcagtgatttgtatgagcctattgatgatggttctgagagtcaggtgttttgttcgtgctcctatgatgccaccacacactttgagactacttgcaatgacatcaaagatatctacaaacgcatggctgggtctgcctttgattttgagaacatgaagcgcaaacagaatgatgtctttggagaggctgatcagtgattgctgactcccctcctccagcccctgctcccctttccccaacctgtatgtcctttggggcagggaagatggtatggctgggtatccctgtttccagcatcttctgtttcccccaccacattctgatcacttaccttgttgatttgattcactgaccaaatccttaaccttagtgatggtttgggagatgggggttgggtagtatcctctttcttggtaagagaacttttaatgtgtgtgtgtgtgtgtgtgtgtgtgtgtgtagtgtgtgtgtgtgtgtgtgtgtgtgtgtgtgtgtgtgtgtgtgtgtgtatacacgtgtacaccctaattctgctgtttgggaaggagtggaggaaaagctgactctgcccccactgttcttactcctaatgtagtggcctttggagataccccatctccacccccaactcttatgtgttggagagaaggggccctcccagcacaaaattgcattcctcttcccccttataatttattctaatttattaactttgacctatctgtctgagccttcagcctttctgtgcagcctggggctgtagagttagctgccctggcctttcccatccctggcaaagtctgggttgggtgaaggtttatgtgtggccccctttgggagttgatctatttttaatttcttgtctttgtgttgtgttctttgagaaaacgtaaatgtgagcaaagcagaaggaggtgggaaagtggatccaaaccccagtgtgccctgcccaatgccttttcctttagtggttggaaacccttatcttgcaaagtgaatgtgtccccttcccaacctctagtgtatttcaaaataaaacccctccaataaaactgttgaaac

SEQ ID NO: 1450 - DNA, 2267 bp, Cricetulus griseus
  modified_base (32)..(32): a, c, t, g, unknown or other
aagcccaccccacctctcctcgaagttcctgngaaagactcgctgaccctgtcacctactggtccagagactgacatggacaccctgctccagagtcccactttgcaaaaggacactcctttccatacctcttctgcagccgagaaggaacagccactgcccaccgcagagatcactcgcttggctgtgtgggctgctgtccaggcagtggagaggaagctggaagcccaggccatgcggctactgaccctggagggcaggacggggaccaatgagaagaagatagcagactgtgagagaacggctgtggagtttgcaaaccatctggagagcaagtgggttgtgctggggaccctgctgcaggagtatggactgctgcaggcggaggctggagaacatggagaacctgctagaaaaacccatgcaggagcaagaggactctgaggagggtgagacacccacagaccccagtgctgcacacgatggcatcgtgatcaagattgaggtgcagaccaatgatgagggctcagaaggtctggagacaccagagccactgatgggacgaagtggaggaacacggctttcaggactcagagctgggtgacccctgtggagagcagccagacctggacatgcaggaacaagagaacacactagaggaggtccacccgaaagggctccagtgaattcagcgagctcaagcagatgctggtgcagcagagaaactgcacagaggggatcgtgataaagactgaggagcaggaggaggatgaagaagaggaagaggaggacgagctgccccagcacttgcaatcccttgggcagctgtccgggagatatgaggccagtatgtatcagacccccctgcctggggagatgtcccctgagggcgaggagagccccccacccctgcagttaggcaacccagcagtgaagaggctggcgcccagcattcatgggcattcccacgggcatggcacgggcatggtgagcggcacctgggtgagaaccgtgggacctccagccagcagcagaggaaccggcgtggcgagcggcccttcacttgcatggagtgcggcaagagctttcggctgaagattaacctcatcatccaccagcgcaaccacatcaaggaggggccctatgaatgtgccgagtgcgaggtcagcttccgccacaagcagcaactcacactacaccagcgtatccaccgggtgcgcagtggctacgcctccccagagcgtggctcagcctttactcccaaacactcgctcaagccacggcccaaatcacccagctcaggcagtggtggcggccccaagccctacaagtgcccagagtgtgacagcagcttcagccacaaatcaagcctgaccaagcaccagatcacacacacgggcgagaggccctacacgtgcccggaatgtaagaagagcttccgcctgcacatcagcctggttatccaccagcgtgtacatgctggcaagcacgaggtctccttcatttgcagcctgtgtggcaagagcttcagccgcccgtcgcacctgctgcgccaccagcggactcataccggcgaaaggcccttcaagtgcccagagtgcgagaagagcttcagcgaaaagtctaagctcaccaaccactgccgcgtgcactcgcgcgaacggccgcatgcatgccccgagtgcggcaagagcttcatccgcaagcaccatctgctggaacaccgacgaatccacacgggtgagcggccctatcactgcgctgagtgtggcaagcgcttcacacagaagcaccacctgctggagcaccaacgagctcacacgggcgagcgaccctacccttgcacgcactgcgccaagtgcttccgctacaagcagtcactcaagtaccacctgaggacccacacgggcgagtgagcatgcgccccgcccctgccccagccagatgagcagccaggtgcaagggtctaaggcccctgggacgggtgcctcggctgcccccaggctgagcccagtgggcgggagcggggcgccccaaccccttctgctgtgaaccctcctcccctcccgtcccttctccccaggacggtagtgagaccagccaggtcgcttgttgcctgcttccccagggcccccagggggggagtgcttgggcctggggaaccccttcaggctgttaattccttgacaataaatggatgaaaacaatctgcacgggggcagtgatttggctgccagccattcgcaggtaggcgcgatgcagggcca

SEQ ID NO: 1451 - DNA, 2266 bp, Cricetulus griseus
ctcttctctgcacatacatgccaagggccctcagggtgaaggcaattcagtatcactggatttttcagaactcctatatgtccaaaccagacccacccccggctcagagtaagccagcagtgtttaggccgccagcccgggaagactctgctcagactttctatccccagaagggcttcccagagaagactccagttaatggagctgaacagcttccgaaaactgtcactccagcctacaaccgattcacaccaaagccctatacaagtgctcgcccgaccatttgaacgcaaatttgacagtcccaagttcaaccataatcttttgccaagtgaaactgtacataaacctgaattaccttcaaaaactcccacttctccaaagactcttatgaaagcccatagttcagcacagcctcctgagtttgacagtggagttgaaactttctctgtccacgcagataagcctaaatatcaaataaataatatcagcaccgtgcctaaggcagttcccgtgagtccttcagctgtggaagaagatgaagatgaggatggtcatactgtggtggctacagcccgaggcatatttaacagtaatggtggtgtgttgagttccatagaaactggtgttagtataattatcccacaaggagccattcctgaaggaatcgagcaagaaatctatttcaaagtctgcagagacaatagcatcctcccacctttagataaagagaaaggtgaaactctgctgagccccctagtgatgtgtgggccccatggcctcaagttcctgaagcccgtggagcttcgcttaccacactgtgaccctaaaacttggacaaaaacaagtgtcttcctggagatccaaattaccttgttggagccaactgtgtttctgttctgattgacctacttttaggaaccactctgctgagtattatattttcttagaatttatactgcaattattagtattaagcatttgttggagctgatgaagattagtgagcatgcccctgaaccacggtcagaaaacatgctacaagctacatgtcattgagtgaagaactgtctagcattgactagagagtttcaaagatattttgctttgtaatgatttttgtacttttttatggtcactgcttaacttcacatactgatttccgttaaaaataccagccagtaaatgggggtgcatttgagttctgttctttccaaagtacactcaaactttattatgaccttggcctagcttacacattttattttattatgcatgaggtaatgtgcacacattttttttacaaatgcacctggaatatataaccagtgtagtggatttaacagaaatgtacagctgggggatttataacttggggagggagggtcaaatgaagacaatgacttactgtatatgaaaacacatttctcttagggaaggacaccaaagcatgtgagcctggttccgtggcctctgaatctataaattaacatatcaccacagacatctaaccagcaggaatgccttaccctcatatttttaattcttagatcatttcgctgtgtactactaagtttttatgagttttgtgcatatctagatactgtatcatgaaaaagattgagtaaattgtggatgtgatggtttccgaaatgtgtaatcacctggaagaaaatgatggtgtgacttaaaatacttttttggacaagggggcgtgatggtcttttgttctttaggctatgcatctgaaatgttggatgttttcaggacgcatgtacatagtgcgtgcataccacttttgttcttggtttgtaaattaacttttataaactctacctttttatacataaacagaaccaagtttctaaggctacctttgtattctctcctgtacctcttgagccttgaactttgacctctgcagcaataaagcagcatttctacacatacaaggtcatttttttaagaaaaagaatgcacagagttgttacatttttaagtgctgcatttaaaagatacagttactctagtttgattaaattcttgcaaagtatcccttctgtaaaatttgtgatacaatgctgtgccctaaagtgtattttttactaatagacagtttattatggcacatcagcacgatttctgtttagataatacaccactacattctgttaataatcattaggtgtgaaagaattccttttgtggttattaaaaaaaaatctcaaatttctaaatctgcaagaataaaactttttaaaataca

SEQ ID NO: 1452 - DNA, 2266 bp, Cricetulus griseus
acaagagcagctctgacttggaaaaagtgagccagagttctgcagaaagcctcagcccgtccttcagaggggcccacgtcagtttcaccacgggctccacggacagccttgcctcagactccaggacctgcagcgatggaggtccatcatatgaatccgcccactcacccaccacgggaaaaaactctttgctcctgtcccttttccatcaggctccacggaggatgtgtcccccagtggtcctgcgcagcctccccctctgccccagaaaaagatagtgagccgtgcagcctcatcccctgatggcttcttctggacccaaggcctcccctaagccaccgacagcaagccctaagcctgaacgtaagccactcagaaaccaatgtctgtgtccacgatgagcttcctttagctattccttaaactctgtgggagccccggtctcccagggcagaacggccacttcctcttcatcttccccagctcagcgtgtccagccaggcctcctccagcagcacccagcttcagctgcacagcctgttgagtagcatcagcagcaaggagggcacctatgccaagctggggggcctctacacgcagtcgctggcccgcctggtgaccaaatgcgaagacctcttcatgggtggccagaagaaagagctgcgcttcaatgagaataactggtcgctcttcaagctgacgtgcaacaaaccttgttgtgactcgggggatgcgatttactactgtgccacctgctctgaagaccctggcagcacctatgctgtgaaaatctgcaaaaccccagaacccaaatcagcctcctactgcagcccgtctgtgcccgtgcacttcaacatccagcaagactgtggccacttttgttcgcctctgtgccctcccagcatgctcgcttccccagacacatccagcaaggacaatgtgcagcctgcaccctcacattccccttcccaggagcaggactgtgtggtggtcatcacccgggaggtgccgcaccagaccgcctccgactttgtgcgggactcaactgccagccatcgcgcagagcctgaggtttatgagaggcgggtgtgcttcctgcttctgcagctctgcaatggactggagcacctgaaggagcacgggatcatccaccgggacctatgtctggagaacctgctgttggcgcattgcagccctcagggctcccccggaccctctgccactcccactgcgcccaccaccacatcccggtgcccctcagccacgcccacagccaccgctgcctgccagggagggcctggtgagaagcacctgcccaggctcatcatcagcaacttcctgaaggccaagcagaagccaggcggtaccaccaacttgcaacagaagaagagccaggcccggctggcccccgagatcgtctcggcctcccagtaccgtaaatttgatgagttccagaccggcatcctcatctatgagctactccaccagcccaacccattcgaggtgcgggcccaactgagggagcgcgattaccggcgggaggacctacccccgatacccacactgtccctctactctcctggcctgcagcagctggctcacctgctgctggaggccgatcccatcaagcgcatccgaataggtgaggctaaagcgggtgctgcagtgcctgctatgggggccccggcgggagctggtagagcagccatgcacctcggaagaggttttgtgtaacactctgaacaactggatcgacatgaagcgagccctgatgatgatgaagtttgcagagaaggcggtggaccgaaggcggggtgtggagctggaggactggctctgctgccagtacctggcctcggcagagcctggggccctcttacagtccctgaagctcctgcaacttctctgagccagtcaggcacttctgccgccgccttccacgcctgtcccatgccctttccttgcctgcatccgggttaccctgggaaatggtacaaatgactgttgtccttggatgtaatattttatatatacatatataatataaatatgaaagaccgagggtgtcatttcacacacgccagccccctctcacagaccccaaacccccaccaccatcacctgtgtaattatgtacagttgcagcttcatgtaaggtcctgagaacagttctgccgacagaatgaagctttgacgcctgcctcactaacccacaatggagtctcctcgcccttttgtcaaattgttaattaaaaaacaacctcca

SEQ ID NO: 1453 - DNA, 2263 bp, Cricetulus griseus
acgggcagatgccaacatggcagcggttggggttggcggatctgccgcggcggccgggccaggggccgtatccgctggcgcgctggagcctgggtccgctacagcggctcaccggcgcctcaagtacatatccttagctgtgctggtggtccagaacgcctccctcatccttagcatccgatatgctcgtacactgcctggtgatcgcttctttgccaccaccgctgtggtcatggctgaagtgcttaaaggtgtcacctgtctcctgctgctcttcgcccagaagaggggtaatgtgaagcacctggttctcttcctccacgaggctgtcctggtgcaatatgtggacacactcaagctcgcggtgccctctctcatctatactttgcagaataacctccagtatgttgccatctccaacctgccagctgccactttccaggtgacatatcagctcaagatcctgactacagcactgttctccgtgctcatgttgaaccgcagcctctcacgcctgcagtgggcctccctgctgctgctcttcactggtgtggcgattgtccaggcacagcaagctggtgggggtggcccacggccactagatcagaatcccggggccggactagcagctgtggtggcctcctgtctctcctcaggctttgcaggggtatactttgagaagatcctcaaaggcagctcaggttctgtgtggctgcgtaacctccaactaggcctctttggcacagcactgggcctggtggggctctggtgggctgaaggcactgctgtggcccgtcgaggcttcttctttggatacacgcctgctgtctggggggtggtactaaaccaagcctttggtgggctactggtggctgttgtagtcaagtacgctgacaacatcctcaagggctttgccacctccctgtctattgtgctgtccactgttgcctccattcgcctctttggctttcacctggacccattatttgccctgggcgctgggctcgtcattggtgccgtctacctctacagccttccccgaagtgcagtcaaagccataacttctgcctctgcctctgggccctgcattcaccagcagcctcctgggcagccaccaccaccaccgcagctgtcttctcgaggagacctcatcacggagccctttctgccaaagtcagtgctggtgaagtgagagctggtggtggtgggagagccagggtaggggcctgggtttgcagaggttgggtttctgcaggtccaaagttatggcgagagcctgacttgtggggttggagggtttttttttttttcttcccacacttctagagggatatggagctagggctgaatgtcacatggatatggagctagggctgaatgtcacatggactcccctttcctgaaggagctgcttcctctgccccaggctaacctctttgggaacagggttggggtaccactattccaggctttcccccataaccctttgctggagatgtcctgtctctcatgcctgggacagttcatcccagccatcctgcagactggacaaaagcccagcagttcttcagtaacgactaatgaactactcgtggggttccatttcctattgtgtgaggccttctctcctgcaccatcaccctggatcatgtctgcagcttgggctctgctgtggctttggggcagtttccctggtacagatacccttgaagatcggcctgttgtaagtgcccggagtgaggagagaggcacaagctgagaatttggcatcagctcttcatgggggaagtgcaataagcaccatttactttcaatatgtcgggcatttgtgatatcaggttaatgatccagagtgttggcaaaatggggaggggaggtctttgaagtggctgagtcttgtgtaattggagagacagagatgaaggattatcttctgagacatccagagaggaaaaataaagctgccagtccactctcgcagccccattggctgttttaaaacacccttacttcatggcggtgtcagaattgatgaattgtggaacctgcacccctgcgctccccaaagcttactaactccttaactgtatcccagatgtgtgtgtgtatgtgtgtgtaaataggaccattggatctttatttttgattaatttggtctgtttttttttggggggggtgttgttttctaaggcactgtaatgaacatatgtcaggatacccaatgccaaataaagatgatgtatttatttaaaaaaaaaaaaaa

SEQ ID NO: 1454 - DNA, 2263 bp, Cricetulus griseus
agtgggggtctcggcgggcgcccatgtgacagcccccggggcgccccgggtttgcaggaaacatgggcgtgctcagggtggggctgtgcccgggcctcaccgaagagatcgtccagcttctgaagggccaaaggatcaagacagtggcggacctggcagctgctaacctggaggaggtagcccagaagtgtggcttgtcctacaaggccctggttgccctgaggagggtattgctggcgcagttctcggctttcccattaaacggagcagacctatatgaggaactgaagacttccactgccatcctgtccacaggcattggaagcctggacaaactacttgatgctggcctctatacaggggaggtgactgaaattgtaggaggtccaggtagcggaaaaacccaggtgtgcctgtgtgtggctgcaaatgtggcccatagcctgcagcagaatgtactgtatgttgattccagtggaggaatgacagcatcccgcctcctgcagctactacaggctagaacccaagatgaggagaaacaggcaggtgctctccagaggatacaggtggtgcatgtatttgacatcttccagatgctggatatgctacaggaccttcggggctccatggcccagcagtcgacatcttcttcaggcactgtgaaggttgtgattgtggattctgtcactgccgtgattgccccacttctgggaggtcagcagagggaaggcctggccttgatgatgcagctggcccgagagctcaagatcctggcccgggacctagctgtggcagtggtggtgaccaaccacttgacccgagacagggatggtaggaggttcaaacctgctctgggacgctcctggagctttgtgcccagtacccggattctcctggatgtcaccaaaggggctggaacattaggcagaggccaacgcacagtgtgtctgaccaagtctccccgccagccaacaggtctacaggaggtgatagacattgggacattggggactgaggagcagagcccagaattgcctgccaaacagacatgatgctgtttattgggaaagggacagcttcaaggccctcacagtgttctttcccagtcagctgctgtccactgccacatgggaacctggcagtgcagacatctcaggcttgtcagaagacaagctttggtctcctcagcttcactctgtgggctatcatggagccactggccagaggatgctgcagtgcttaaaaatatagaaagaggaagtcctctgagccctagagccatctgatttcccccaaggaggttgattttcaggttcttcggtgggactcccagagaataagagttcttccctgcttgccgactgggtttcacacacctgcatacatcaccctgataggtgagaacatgagctcgatgctgtcccagggatataatttaccagggagggaggatatgacctgctcccagtgaaccagacacttgtttcatatgcatggtgccctgtggggctcttcctcagtatagagtaaccagaggtgctgaaccgtggcctaacccataaacagacagaggagaatttgcacagtaaatagaaccagctgggaaaattgatgctggcataaataatacatggcaaatctagtcttttatacagaaattcattgctggtggctctaagatgcagtataattacacctctcgtcctgccagctgcaccacagcctcatgtcttagtgaataaaataacccctgtctgttaccaacactgtggccatccatctgagagtcataactctggctgagaggggaggatggtaccagggaggtggaaaataaaaggcagagtaaagaaatgatcttttatttaattattaattatttatttatttatttatttatttatttatttatttatttatttcgtgtgtgtgtgtgtgtgtgtgtgtgtgtgtgtgtgtgtgtgtgtgtgtaagagtcaaaagcccaagccagtcccaatggctttctcttcctcctgcctgtggatctagatgtagaactctggatccagcaccatgtctgcctgcacgccaccatgcttcccaccatgacgataatggactaaacctaactgtaagcccgcctcaattaaatactttcctttataagagtcaccagggtcatggtgtctcttcacaacaatagaacagtgactaagacagacgtgtgtgtgtgtgtgtgtgtgtgtgtgtgtgtgtgtgtgtgtgtgtgtgtgtgtgtgtg

SEQ ID NO: 1455 - DNA, 2263 bp, Cricetulus griseus
ggagtggtccagcgagaccatgaagttcactagaccagttgctgccctgcacgagaaccctgacataatcattgccacccctgggcggttgatgcacgtggctgtggagatgaatttgaagctacagagtgtggagtatgtggtttttgatgaagcggacaggctctttgaaatggggtttgctgaacagctacaggagatcataggccgccttcctggaggccaccaacagtgctgttctcggccacactgcccaaactgctggtggaatttgctcgggcaggtctcacagagcctgtgctcatccgtctggatgtagacaccaagctcaatgaacagctcaagacctccttcctccttgtgcgcgaggacaccaaggctgctgtgcttctctacctgctgcgtaatgttgttcggccccaggaccagacggtggtgtttgtagctacaaagcaccacgcagagtacctcatggagttgctgacagcccagggtgtgagctgcgcccacatctatagtgctttggaccagacagcccgtaaaatcaacttggcgaagttcacacacaataaatgttccaccctcatcgtgactgacctggccgcccggggcctggacatcccactgctggacaacgtcatcaactatagctttcctgccaagggcaagctcttcctgcatcgtgtgggtcgtgtggcccgagcaggccgaagtggcacagcctattccttggtggctccagatgaggttccctacctgcttgacctgcacctgttcctgggccgctccatcaccctcgcccagcctcatgaggaaccctcaggtgcagttggcagggatggcgtgctgggtcgggtgcctcagactgtggtggatgacgaggacagtggcctgcagactgccctggaggcgtcactggaccttcggggcctgcaccgtgtggccgacaacgctcagcagcagtatgtgcgctctcgtccagcgccctcacctgagtccatcaagagagccaaggagctggacctggcagggctgggcttgcacccactcttcagctcccgctttgaggagggggaacggcagcgcctgaggctgctggacagcgtcaagagctaccgcacccgcacaaccatctttgagatcaacgcctcctgccgggacccaagcagccagatgatgcgtgccaagcggcagagggaccaaaaagctatcgatagcttccagcaggggcggcaggagaggcaggagagcccagctgacccagtcccccaaaaggagctgcctcagaaggaagagggagaggaggacatggctgagagtgtggaggatgtcttcacagaggttgtgggccagaagcggtcaaagccaggacccaaccgaggagccaagaggcggagggaggaggctcgtcagcgagaccaggagttttatgtcccctaccggcccaaggattttgacagtgagcgggggctgagcatcggtgggaccgcaggggcctttgagcagcaggtggctggtgcggtccttgatctgatgggggatgaggcgcagaacatgagccgaggtcggcagcagctcaagtgggaccggaagaagaagcggtttgtggggcaatcaggccaggaggacaagaagaaaatcaagacagagagtggccggtatatcagcagctcctacaagcgtgacctctaccagaagtggaagcagaagcagaaaattgatgaccgggactctgaggatgaaggatcattcaaccagcgaggccctgggccccgcagaggtggaaagcgagggcggagtcaaggtgcctccctgccccgagcacccagtgcccccacaggccgtatgcgctcagaacttaagaccaaggaacagatcctgaaacatcgacgtcaggcccagaagcagcgcttcctgcagcgcggaggcctgaagcagctttcagcacgaaaccgtcgtagagcccaagagctgcgccagggtgcctttggccggggtgccccctccaggaagggcaagatgaggaagaggatgtaaggagccagactcagcctaggggcttcctgatagccctggtttggacatcactgacatgttctcatgtgctgttggcagagtctcctacaggagccagtgtctatgaggaacagtgctatctggccacagaaaacggaggctgcttttgatgggacattgggtgaggtcttgaaggatgcctaggcatttaccagcaaagctcggcagagcaagtcctgagcctgca

SEQ ID NO: 1456 - DNA, 2262 bp, Cricetulus griseus
aaaaagcgtaaaagatccaaaggtgattctgatgtctctgatgaagaggtggcccctcagagcaagaagaagagaggtccacgcacgccccccctggccgtcaaggaggaactgattgacatttccaccgataaggatggcatgctcgaggatccattgaagaaagaagatacagcctttagtgactggtcggatgaggatgtgcccgaccgcacagagggcatggaccctgaactgtagccactgccactcctggcagcaccccttcccctctgtcttctcttctccctcctccgcctcctgtggctgctgccaatactgcaaccactgctcttgcctcctcgccttgggagcaatcgaagtcaccgcagccacacctctggtcgcctacgctccccatctaatgattctgcccatcgaagtggggacgaccagggtagtagaaagaggaagccacagctcaagaagaagctcccctgagtcggatcggcaggtccattcacggtctgggtcatttgacagtcgagacagacttcaagagcgagataggtatgagcatgaccgggagagggaccggagagacccgaggcagagggaatgggaccggggaaccggataaaagagtggccacgaaccagagaccgagatcgacttcgggaacgagacagagaacgagacaaaaaggagagacttggacagagagagagagagactaactgccgaccctgtggacagggacagagaccgagatagaacctttgagacttctcagtcagaatctgtgaaacgcagtgaagccaaactggagagtgagcacgaaagagacctggatggcagttcccgggactcaatagccatggacaaagaaagagtggatagagacctggggtctgtgcagggatttgaagatgtgagcaaagctgagagaacagagagtctggaagcaggagatgatgagtccaagttagatgatgcacattcattaggatctggtgctggggaaggatacgagcccatcagtgatgatgaactagatgaaattctggccggggatgcagaaaagagagaggaccctcaggaagaggagaagatgccagatccattagatgtgatagatgtggattggtctggacttatgccaaagcatccaaaagaaccaagagagcctggggccgcactcttaaagttcacacctggagctgttctactgcgagttggaatttctaaaaagttggcagggtctgagctgttcactaaagtgaaagaaacgtgtcagcgacttctagaaaagcccaaagatgcagatagccttttcgaacatgaactaggggctctcaacatggctgctttactgcgaaaagaagaacgagcgagtcttcttagtgacctgggaccatgttgtaaagcattatgtttcagacgggattctgcaatccggaagcagcttgtgaagaacgaaaagggaactgtgaagcaggcatacacaaacactccaatggtagacaatgagctacttcggctgagtcttcggttatttaagaagaagaccacttgtcaagcccctggacaagaaaagactgaagacagtaaactagcaccatccagtatccagcaggagctgtgtgtatcctaggcaaaagtttgggcggccttttggttctgtcttcaacagtgcagaatctttcttgaagttcttcggtttgaaagcattgctaatacagagacagaagattcatcagccacaccaggagtgaagaactttgaacttccgagacatcagttttggttcatttaaaattttacattaattttatacagtactggacattcagccaaaataatgtgaaagcatctagatttagtaatttcatctgtgtcttcattaaaattgaagattttaggaaaccaactcatccctgttcctctagcctgtgaatactttgtatgagataaaagcgctggtttttattctggatcatcacacagaactgactagtccagagggcagcggtgatgggagccgctgcacatgctgcagcgccatgtacagaaccctgagggagtgcaagggctaaggtgtgcacctgaaggcagtctccaccatgaggaagcctcagggagggggcggttcgtgctgctttgaaaattctaaaataaatgactccatgggattttttacccatgtacattgctacattgtatattggtaagtctttgagtggggttaattgttcattatcagagactgtgtgctatttattt

SEQ ID NO: 1457 - DNA, 2262 bp, Cricetulus griseus
aggctgcgttcggctgcgctgcagagacgcggagaggagcgcgctccctggtcgctgcgtcctctgccccggcgccttcccggcttcccagtgtctcgggcaactcccagcctttccgggggataacgccccgtggccctccaggccactcacgggccccgcgcgtcctaccgcctgtagcccagccggccgcactcgtccccggagccgggcctagggcgcgcggcggccgggctgggctcggggcgtcccgatggccgcggccggctggcgcgacggctccggccaggagaagtaccggctcgtggtggtcggcggcggcggcgtgggcaagtcggcgctcaccatccagttcatccagtcctattttgtgacggactatgatccaaccattgaagactcatacacaaagcagtgtgtgatcgatgacagagcggcccggctggacattttggatacagctggacaagaggagtttggagccatgagagagcagtacatgaggacaggagagggcttcttgctcgtcttttcagtcacggatagaggcagttttgaagaaatctataagtttcaaagacagattctccgagtaaaggaccgtgatgagtttcccatgattttaattggcaataaagctgacctggatcaccagagacaggtaacacaggaagaagggcagcaattagcaaggcagctcaaggtcacgtacatggaggcatcggctaagatcaggatgaatgtagatcaagctttccatgaacttgtccgggttataaggaaatttcaagagcaagaatgccctccgtcgccagaacccacccggaaggaaaaagacaagaaaggctgccactgtgtcatttcctaaaagttccttgagttttagctgacaactgccagggaagccctcatctctgttaccgtttacatcatgccggtacctttgtagccttagactgatgatcaccgtgttagccttacaccaagaagctggctaatctttctgtgaagctaattctaacggtctttcccagaccggtgtaaaggaaacactaaggctgcttcagacatgacctgattcctttaaaacacacgactacacacacacagatgcattctttaagggcttaaattttaatcgggatgaaccaagtttggaacctaagctgtttgctaagctgaagtcataggttgtgaagtaatttttaacttctggaatcatgttgcctactgttactctaaatagaaacatagggacttttttttttttttttttaaatgtgaatttttgcctatctttaaaacttttgatgtcaactcccattaaccttaaatacactgaatggaatctacaaacgtgagacatctcagaccttttctgatgctacggcttttgttttccagtggccagaataccaaaatgcctgttgtatttatggattaaaaactgctgatcaagcctttgttattatgcctccttcaagatgacaatattctctgtggccaaatgtttggactcgctctgcacttaggtgtttcaatgagcttgacttcttttcccagcagtggtaagggtaagagtgaacagttcctgtttgtcttccttttcaagtattcctggttatgggatttaaaaaaaaaaatccacacaaactaaaactgtttctctttgatgtaatataaaatatggaattgatctttccagagtcagagatgattaatgttttttgctatatacttttatacgttattttcttatcaaactagttaacaagtatttttatatgtttgtaagcgaatatgctttcacagcgtaccttgtgtatatgtaaagatgagtatttaattctcactgttcactgttaactgacaaagaaaaagtggaaacccttggtccttgtcacatctaccagtggccagtaatcagtaaaacttcccaacagaacacacgaggacgagactgtgaagtcacgttcaatgtccctgctagatattgacgttatatcaagtattctgtgtaaaacctctacctgacaattagtgtaactgtggatggcttctgattttgtttttaactctgtggattgtgtttaagcaattcaaagtgtgttcctggttttgcgactctcagtggtattgcacagtggtcactttattaaatgtgtacaacagtcccatgaagtttataaagtggacccttgtatagcttcaggtgctagaattaaaattgatctgttatcaaccaaaaaaaaaaaaaataaa

SEQ ID NO: 1458 - DNA, 2262 bp, Cricetulus griseus
  modified_base (2251)..(2251): a, c, t, g, unknown or other
cttctcatggcaaagacggtcagccagtactgttgccttataagccatctggtagttcgaagatgtactatgttccacaactaaaaacacttccttcatgtctggattccagatcagataccactattgagagctcacattcagggtccaatgatgcgattgccccagactttccagctgaaatgctaggcacaagagatgatgacctctcaaccactgtgaacattaagcatacagaaggatctatagtaagagggccgtgacaaaggtctgaatgtcattcagcatttgaaaataccactcactctgtcttcaggtcagccaagttttacttccatcatccagtacacctgccacacgagcaagatttctgccatgagtctttgggaaggagtgtattcatgaagcattcttggaaggatttctttcaccatcattcagaaaaggcaaaagacaagacaaatagaccaaaaaaaggaatacagaaggtcactccagagctaacaacacagtgcaccatgagtttgaatgaactttggaataagtttcaggagcgacagaaacagcagaaatcacctggcaattgtgataagaaagaactctctttggtggaacgacttgatcgtttggctaaactgcttcagaatcccatcacacattcactgcaggcctcagaaagtacccaggatgatagcagagggggccgaggggtgagggggtggaggaccgggaagaggcagcatcaacagagaggcaagttgcagaggaagcaatgtaagagcctagagaggggtcacaatacaggtgactttaggaaaagcagggtgctttctcattgtggtgggaagtccaataagattaagattgagcaggttaaattagataaatacatcctgagaaaacagccggattttgattatgccagcaatacctcctcggattctagactctcagaggaaagtgagctcctcacagatagtcccaacattttttccagcactaattctcttatggactctgatgtattgacccagactgacagggatgtgactttgaatgaaaggagtagctccatatccaccattgacacagcccggttgatccaagcttttggccaggaaagactgtatgtgtcacccaggcgaattaaattatacagcagtgttgctaatcaacagaggagatatctggagaagcggtgcaagtacagcaagagtgcacctgggcacaggctatcctcaaatgacttctgagcacaccagaaggaggcacatccaggaggcaaatcatatttcttctgactccatttcatctgctggtagtttcttgaccttggactctactctttacaacggggaaactgtgcacatgttgaacaagggtgtacaagctggtaacttggagattgtgactggacaaccaaaaaatacactcgggatggtggggtgactttcccaactcccagttctagtgaggccagactggaagaagacagtgatgtgacttcttggtcagaaagaaaaaaaaaaagagaaaaaggttcttttccaattatctgcagaaaaaaaaaacttaaggaagatcaaagccaaaactcctgtgaaggcgtctcatggtttgttcctgtggaaagtaggaagtctggatctaagaaggaaaacctgcctaagatttacagccctggtatcgcctggtttgaaccagtaaccaaaaacaaaccctggagggagccactgagggagcaaaactggcagaagcaatgcatgagccgtgggcgcctgggaggcccaggcggagacggtggccgggttcctcttaggccgtttgtgagagcaaccctgcaggaagctcttcagcttcacagacctgatttcatctctcgctctggggagcgggtaaagcgcctgaagttactggttcaggagaggaagctgcagagcatattccagagtgagcgggaggctctgttcaacactgtgcggcccctgcccagaagagtcgtcctgactgtccagagcaacacgcctattggaaagaaggaaatgatccagagaaccaaacggatttatgagcagcttccggaagtaaagaagaagagagaagaggagaagaggaaatcagactataagtcctaccggctgcgagctcagcactataaatcgaaagtgaccaaccgactcctggggagaaaagtgccttgggactgacataagactgctttcctcaaagcctaggaattactttttttttntttttttatga

SEQ ID NO: 1459 - DNA, 2262 bp, Cricetulus griseus
ctgtgctaccacaactttgcccagcagaccgactgctctgccttggatgctatccaggaagcccttcagcttctggagtctgtgaggcctaaggcacaggagcaggattgccttctggaccaagaaggtggcatcaagacattgtgaagaagagaattctaagacagccttctgtgtccgggccagtctgggacctgagatcatgagaactattcctgaagaggagctaatggacaaccagctggaaatgagctttgaagttctcaggggttccgatggggaagactcagcctcagctgagaaggcatcagctgcaagccctcacctacccataggagaatgtgaagtgttgagacgggactcctgcaaggcagaacttcctatcctgtaccctgacaaggaggccagtagtgaccctagtccttggctcccgcctctctcagcccctgtacccattgatctttctaccttggattccatctcggactcactgagcattgctttccatggtgtcagccactgccctccaagtgggctctatgcccatctctgccgcttcttggctttgtgtctgggccaccgggatccctatgccactgcattccttgttgctgagtctgtctccatcacttgtcgtcaccagctgctcacccatctgcaccgacagcttagcaaggcccagaagcaccaagggtcacctgaactagcagagcatctacaagggctgaacctgaaggagaggcctagagatgtccccctggcccgcatccagcgcctcttttccttcagggctttgggatctggcaacttcccccaggcagagaagaacagtttccaggagcacctggctctgatccccagtggagtgattgtctgtgtgttggccctggctaccctccagcctggaaccttgagtaatactctcctactgacccgactggaaaaggacaaccctccagttactgtgaagattcccactgcccaaagcaagttcccactaagctccatgctgaaagagtttgatgccatccagaaggaccagaaagaaaacagcagctgcactgagaaacgagcatggtggacagggaggctggcactagatcaaaggatggaggaactcatcacctccttagaggagcatgtcctgggctgctggcgggggctgctactgccatctagtgcagaccctggccctgcccaggaggcctcccacttacaagagttgctgcaggaatgtggctgggaatatcctgattccactctcctaaaagtcattcttagtggtgctagaaccctcaccagccaggatgttcaggccttggcatatgggctgtgcccatcccagccagagcgtgcccgagtgctcttgagcgaggctgtaggacgggtgcagggccaggtggctcctcgaagtcagcatcttgtgttggtcctagacaaggacctgcagaagctgccatgggaaagcatgtccagcctgcgagcactgcctgtcacccggctgccctccttccacttcctcctcagctattccatcactaaagaggctggggcctcatcagttctgaaccaaggtgtggatccacggaataccttctatgtcctaaaccctcacaataacctgtcaagcacagaggagagatttcgagccagtttcagcagtgaagctggctggaaaggagtgattggggaagtgccaagccttgagcaggtgcaggctgccttgacagagcgtgacttatatatctatgcagggcatggagctggtgcccgattccttgatgggcaggctgtcatgcggctgagctgcagggcagtggccctgctgtttggctgtagcagtgcagccctcgctgtgcatggaaacctggagggagctggtatcgtgctcaagtacatcatggctggctgccccttgtttctaggtaatctctgggatgtgactgaccgtgacattgaccgttatacagaagctttgctgcagggctggctaggagcaggcccaggggccccccttctctactatgtcagccaggcccgccaggctcctcgactcaagtatcttattggtgctgcacctgtagcctatggcctacctgtctctctacaaacaccctgaagctgttgtatttatggtagaagctatgtgtctacctaccaacttagttttaactatttagaatttttaaagtgattttccctggtgttttgtatgaaatgtttccttttaatgtgaccttaataaaagatataccaagcctc

SEQ ID NO: 1460 - DNA, 2261 bp, Cricetulus griseus
cggtaaaaagatgccacgaagaaagaaaaaaattaaagaagcctctgaaagccagaacttggagaaggatccagaaactaccagttctgtcagtatgaagaagaagcgtagacttgaggacttactcatagtgatatctgatagtgatggggaggaagcaaaagaagagaatggattgcagaaaatgaagacaaaacagtcgaacagatcaaagtgtttggctaaaagaaaaattgcacagatgtctgaagaagaacaatttgctttggctctcaaaatgagtgagcaggaagccagggaggtgaacagccaggaggagaaagaagaggagctcttgaggaaagccattgctagaaagcctgaatagttgctggtcttctgatgcttctgctaccagctgaaggcgtatggcagctggtaccttcatcactgtttaaaggctcacatgtcagtcagggaaacgaggctgagggaagaaaggagccctgggaccacaatgaaaacactgaagaggagccggtctctggcagctcaggaagctgggatcagtcaagccagccagtgtttgagaatgagaacgttaaatgttttgacagatgtactggccacttggctgagcacacacagtgtgggaagctgcaggaaagtactgggagtggttgtgtcttttcccaaagctgtccagggtagggggacacgtctaggcaatgtcttcctacccagcagacacgggggcactgtgcactacttctggggtattccattctgccctgctggagtagatcctaaccaatacaccaatgtcattctctgccagttggaggtttatcagaagagcctgaaaatggctcagaggcagctttttaaaaaagagagtttggggaaccagtgttacctagacctccttttctgatccagaatgaatgtggccaagaagatgagactagtgaaagaaatgaaggcatctcagaagatacaggagatgaagccagagaggaaaggcaggaatctagggcatctgtctggccctcaaaaaccaaggattttcaaaaaagcccaattaaaagcttgaaacagaaacttttgttggaggaagaaccaacaaccagtcatggtcagtcttcccaaggtctgtttgttgaagaaacttctgaagaagttctgaagagttctgaagaaggaaactctgtgtctgcctcacaaagcattgccgctttgaccagtaagagaagcttagtccttatgccagagagttctgcagaagaaatcactgtttgtcctgaaacacaattaagttcccctgagctccttgacgtcaatagagaagactctccggatagcagcaacatccccattggagtcagaatgacagtgagcgataagcgggttgataatagagatgggaagaaagcaaaatcccactcctgcattctcatctagtgcccgggtgtcctgcccactgtgtggccaagactttcctcccacaaagattgaacagcatgccatgtattgcaatggccagatggagcaggaaacagtaatgactcggagacaaagagaagccaggaacaagcgtgatggtaggacacaacaagaaggagaagtgttacctatgtaagtccctggtcccgcttggagagtatcagtgtcatgtagaggcctgtctccagctcgcaaggcgcgacagaggggctgggactgaagggagtaagaggacaagagtgtgcgcaactgtggaggggaagcagcagcaacggctgaggaagccaaaggaaaaggccaaggtcgaggtcgactgctcagtctcctggaacagtctgagcacaagagcacaggtgtagagaaaaaaccaagtcttcagaagcaagaaccttcaggataccttcaccagaggtggaagaggctagctgcagtggagagacgcagagttccctctcacagctcaacttaaatgagtctcccatcaagtcttttgttcctgtttcagaagccacaaattgcttagtggattttaaagaccaatttactttccggtcacggaccaaatcaggcagaggaaggaggagaaaatcttgaatttcttgggactggaggatgaccagaaccattattgctgggttggtcgtgttcattaattataatggtctctagtttgttgtgagagttttgaccctgttgttgtcaccagcagcacccactcagcatcctgatttttatgttgtataaaatctattcagacgattgtgaatagtattctgttt

SEQ ID NO: 1461 - DNA, 2261 bp, Cricetulus griseus
ggaggccggcccgcgccccctgagcgacgaacaccagggtgctcatcatggccccgccactcctattgctgctgctggccagtggagccgccgcttgcccgctgccctgcgtgtgccagaacttgtcggagtcgctcagcaccctttgtgcccaccgaggcctgctgtttgtgccacccaacgtggaccggcgcacagttgaattgcgcctggctgacaacttcatccaggccctgggaccgcctgatttccgcaacatgacaggtctggtggacctaacgttgtctcgaaacgctatcacccgcattggggcccgctcctttggggacctggagagcctgcgctccctgcatttggatggcaacaggctggtggagctgggcagcagcagcctacggggccctgtcaacctgcagcacctcattctcagtggcaatcagctgggacgcattgcgccaggggcctttgatgacttcctcgacagtctcgaggacctggatgtatcctataacaatctccggcaggtcccctgggctggcataggtgccatgcctgccctgcatacccttaacctggaccataacctcatcgatgcgctgcccccaggtgtctttgcccaacttagccagctttcccgccttgacctcacctctaaccgcctggccacactggcacctgacccactcttctcccgaggacgggatgctgaagcttcaccttcccccctggtgctgagcttcagtgggaacccactgcactgcaactgtgagctgctgtggctgcggcggctggcccggcctgatgacctggaaacctgcgcttctccaccagccctggcaggccgctacttctgggcagtgcctgagggagagttctcctgtgagcctccgctgattgcccgccacacacagcgcctatgggtgctagagggtcagcgggccactctacgatgcagggcacttggtgaccctgtgcccaccatgcactgggttggccctgatgaccggctggttggcaactcttcccgagcctgggctttccccaatgggaccctagagattggggtgacaggcgctggagatgcaggagcctatacctgcatcgccaccaaccctgctggcgaggccacagcccgagtggagctccgggtgttggccttgccccatggtgggaacaccagtgctgaggggggccgtcctgggccctcagacattgctgcctctgctagaactgctgccgaaggcgaggggactttagagtctgaaccagtcctgcaagtgacggaggtgactgccacctctggcctggtgagctggggcccggggcggccggctgacccagtgtggatgttccaaatccagtacaacagcagcgaggacgagaccctcatctaccggatcgtaccggcctccagccaccacttcctgctcaagcacctggttcctggtgctgactacgacctctgcctgctggccctgtcacctgctgctgggccttccgatcttacagccaccagactgctgggctgtgcccacttctctacgctaccagccacacccctgtgccatgccctacaggcccatgtgctgggcgggaccctgactgtagcagtggggggggtcctggtggccgccttactggtcttcactgtggccttgctggttcggggccggggagctgggaatggccgcctcccactcaaactcagccatgtccaatcccagaccaatggtggcaccagccccatgcccaagagccacccaccacggagccctccaccccgtccccagcgcagttgttccctggacctgggagacactggtgggtgctatgggtatgccaggcgcctgggaggagcctgggccaggcggagtcactctgtacatggggggctgctgggagctgggtgccggggtgtggggggcagtacagagcggctggaggagagtgtagtgtgacaggaagggcagcctcttgtgccctgaggaaggagcagtgccactgttgggcccaggtggcagcacccagcctgggtgggcagcacggccctgggccccactctgctttttatcctcagtacctcaggctccccaagtacttggtgggacagcaagccctttccttggttttggcctccagactaaagggacaggtcccaccaacaggtgctcagagccaccaaggcaggggctgcagccaccaagagggagtcttgtttctatttataataaaattgttggggacacaaaaaaaaaaaaaaa

SEQ ID NO: 1462 - DNA, 2261 bp, Cricetulus griseus
gcggcccagagcgttggcatcgtgaattgagacggctccacctgaagacagcaggagtggcggggtcgccgccgtccgaaagatgagccggaaagcctgaggcggagacacccgccttggggcccgtgtggccggcttcccccgctccggggtactggaagatgaaagagactatacaagggaccgggtcttgggggcctgagcctccgggacccggcaccacttattcaaaccccagacgagaacgtcttcgatggcctctgccccctaagccccggctcaagtcaggtggcggttttgggccggatcctgggtcagggaccacagtgccaactagacgcctccctgcccctcgtccttcttttgatgcctcagctagtgaagaagaggaagaggaggaggaagaggaagaagaggaagtagcagcttggagactaccccctacgatggggccagctaggggcctcccagcgttctcgccctctccgaccctctcatagaaaatcctgctcacagcgccggcgccgagccatgagagccttccagatgctgctctactcaaaaagcacctcgttgacattccactggaagctttgggggcgccaccgaggccggcggcggaacctcacacacaccaagaaccatctctcaccccaggaagggggtgcaacgccacaggtgccatcaccctgctgtcgttttgattccccccggggaccacctcctccccggctgggtctgctaggtgctctcatggggatgagaaggtcaccacctgtgccctctgggccccccatggaggaagatggactaaggtggaccccaaagtctcctctggatcccgactctggcctcctttcatgtactctgcctaatggttttgggggactgactggtcctgaaggggagcgcagcctggcaccccctgatgccagcatactcatcagcaatgtgtgcagcattggggaccatgtggctcaggaactttttcagagctctgacttgggcacttcagaagaggcagagcggactggggagaaagctggccaacacagccccctgcgggaggaacatgtgacctgcgtgcagagtatcttagatgaattccttcaaacttacggtagcctcatccccctcagtactgatgaagttgtagagaaattggaggacattttccaacaggagttctctacaccctccaggaagagcctggtgctgcagctgatccagtcctaccagcgcatgccaggcaatgccatggtaaggggcttccgggtgtcctataaacgacatgtgctcaccatggatgatttggggaccttatatggacagaactggctcaatgaccaggtgatgaacatgtatggagatctagtcatggacacagtcccagaaaaggtgcatttcttcaacagtttcttctatgataaacttcgtaccaagggttatgatggggtgaaaaggtggaccaaaaatgtggacatcttcaataaggaactactgctaatccccatccacctggaggtgcactggtcccttatctctgttgatgtgaggcgacgcaccatcacctattttgactcacagcgcactctaaaccgccgctgccctaagcatattgccaagtatctacaggcagaggcagtaaaaaaagatcgattggatttccaccagggctggacaggttacttcaaaatgaatgtggccaggcagaataatgacagtgactgtggtgcctttgtgttacagtactgcaagcacctggccctgtctcagccattcagcttcacccagcaggacatgcccaaacttcgacggcagatctacaaggaactgtgtcactgcaaactcactgtgtgagcctcataccccagacccttagcccattaatgggcaggggaacaaaggagacccttcctaagaaactccagttccttttgtctccccacccaattccctttggattttcatatttaaatgttttgatttctgtattttgttttcttttgcgagaatgttggtttctgatgggaagggattggccacatacgacccattttctccctccctaggggaatgttgccttgtggccaagtggagcatccattcctccttccatgttcagggggcaggaaaactgtgggggtggtgggcgggcaaagggattgctgcctgccagatcttcagacttttttttatatatatatatatatataaaaatgccacggtcctgctctggtcaataaaggatcctttgaaga

SEQ ID NO: 1463 - DNA, 2260 bp, Cricetulus griseus
  modified_base (724)..(724): a, c, t, g, unknown or other
ccaccagtgcctcagcaccaggagccaccctctgaaaggctgtctcctgcccccgcctccgaagaagcaagaggagaaggagaagaggggaaaaggaaaaccccaggaggatgagctaaaggacactctggctgatgacgacagctcctccaccaccacagagacctccaaccccgacacagaaccactcctcagggaggatacagaaaagcaaaagggaaacaagccatgccagaaaaacacgaaggcgaaatgtctcaagtgaagcaaaaaagcaaaaagcttttaaaatagttaagaaagaaatcccagcagatgtgaaaggcagttcctttgaactaccatatactccctcactggaaaataaacagcgtagaaatctcccaaccaagattcctcttccagctacactaacaagtggatccaaatcacgaaattcccagaaaacaaaaggtacaaataagttagtggacagcaggccagttgccctctctaaattccttcccagcagtcaagaactaggaaataccagtagctcagagggtgaaaaagactctcctccaccagagtgggatgctgtgccagttcacaagcccagcagctctactgacagtctttataaactgtctctgcaaaccctgaatgcagacattttcctaaaacaacgccagacctcaccaacaccggcctctccatctccgcccaccgctccctgcccattcanaacccgaggctgttacagcagtattgtcaacagctccagcagtgacacgaaagcaaagcagcccaatggaagcaaaagcaagttgacaaaggccgcctctctccccgggcaagaatggcaaccccaccttcgccgcagtcaccgcaggctatgacaagagcccaggagggaatggctttgctaaaatttcttccagcaaatcagatttttccagcagccttggcatttcacacattcctgttgacagcgatggctcagacagctcgggcttgtggagtcctatcagcaatccaagcagccctgacttcacccctctcaattcgttctcagcctttggaaattcttttaatctaacaggtgttttcagcaaactcgggctgccgagatcctgcagtcagtcatcccagagaagttggaatgagttcagcagcggcccctcctacctttgggactctccagcaacagaccccagcccttcctggccagccaattccagctcaccaacccacacagccacatctgtccttggcagcgccagtggcctgtggtccaccactcccttcagcagttccatctggtccagcaatctcaacagtgcccttccgttcaccactccaacaaacacactggcaagcatcggcctcatgggcacggagaactccaccactgcccacgctccttccgcctctagtccagccgacgacttgggacagacctacaacccctggcggatatggagtcccacaatcggaagaagaagctctgacccttggtctaattcacacttccctcatgaaaattaaaattaagcaaaaaaacaaaaacggggcccctcatctagatcatgatatgccagtttctgagacatcttctgaaggcccttactgctgtcgcttccctctccctcctctttgcagggcaggcttgttccactcgcttctttcagatctttcttgcaattatgatactctgagatttgctgttgtgcttgtagacaaaagtctggactcgaccacaaactactacaacctgtccatctgaaatcttgactcgcccagtccccccctccccatctctcccctgctttctttatctgtaagaacacaaatttggcattacagttaagggagtaatttgagttgattgacaagtcctggcatgtgacaattttactaaattaccaagtttggtttttaataatttcacaatattatgcgccaagatctaattttaaaaatgtatgaggactttgtgctgaaaatacagagtattttttaaagtaaggctatcttggtttaaaagcagattacagaaatgtaaaccagcctaagaacagtggctgaatgtaagcatccagtgaagaccacacattttccgtgctgtttgtacttgaggtatgtaccatttgtacacctgaatttattttaaagatgaactgaaatgcacacagccaagtcttgacattacaagattgtgtatttcttaaatacaactttgtgttgtactttgaaataaatgatgtcttttttaacaaaa

SEQ ID NO: 1464 - DNA, 2260 bp, Cricetulus griseus
gaaatacctaccacctgtcctcaaccattccccacccgtcagtcatctcttctccccttcttaagtccctacattctgctgggcccccactcctcgctgtatcagcagctcctccttctcagccccttgccaagaaaaaaggcgttaaacggaaagcagacaccaccacccctacacctacagccatgctggctcctggctccccagctagtccccctgggagtcttgagccaaaggcagcccggcttcctcctatgcgtagagagagtggccgtccaatcaaacccccacggaaagacttgcctgactcacagcagcaacatcagagctctaagaaaggcaagctgtcggaacagctgaagcactgcaacggtatcttgaaggagctgctctctaagaagcacgctgcctatgcctggcccttctataaacccgtggacgcttctgccctcggcctccacgactaccacgacatcattaagcaccccatggacctcagcactgtcaagcggaagatggagaatcgtgattaccgggacgcacaggagttcgctgctgacgtgcggctcatgttctccaactgctataagtacaatcctcctgaccatgatgttgtggtcatggcacggaagctacaggatgtgtttgagtttcgctatgccaagatgccagatgagccgctggaaccggggcctttacctgtgtctaccgccttgcctcctgggttggccaagtcatcctcagagtcttcgagtgaggagagcagtagtgagagctcctctgaggaggaggaagaggaggatgaagatgatgaggaggagagcgaaagctcggactctgaggaagaaagggcccatcgcctggcagagctgcaggagcagcttcgggcagtccatgaacaactggctgccctatcccagggcccaatatctaagcctaagcgcaagagggagaaaaaggagaagaagaagaaacggaaggcagagaaacatcggggccgagttgggatggatgaagatgaggggcctcgggcgcctcgcgcacttcagcccaagaaacctaagaaagcagggggtggcgggggtggcggtgctgctgcgctaggccaccctggctttgggacttctggaggcagtagcaacaagctgcctaaaaaggcccaaaagacagccccacctgtcctgccagctggttatgattcggaggaggaggaagaaagcaggcccatgagttacgatgaaaagaggcagttaagcctggatatcaataagttacccggggagaagctaggtcgagttgtacatatcatccaagccagggagccctctttacgtgattcaaacccagaagaaattgagattgactttgaaacactcaagccatccacacttagggagcttgagcgatacgttttatcctgccttcgaaagaaaccccggaagccctacaccattaagaaacctgtggggaagacaaaggaggagctagccctggagaagaagcgggaactagaaaagcggttgcaagacgtcagtggacagcttaactccaccaaaaaacctcccaagaaagcgaacgagaaaacagagacgtcgtctacgcagcaagtggcagtgtcccggctcagcgcttccagctccagctcagattccagctcctcgtcctcgtcttcatcttcttcagacaccagcgattcggactcgggctaaggggccaggccagatgggaaaggaaggctcggcaggaccggacccctgtaccacccttccccaccacttccccttgctgtgacacttctgcatctcatccctccataggagagctggctctgcaggggggaggaaagcagggacatggacaaaactgacttgaagccctactgggaaccacccgagggtggagtgtccctgttcaggatgatgggggtggggcaagggtatgggtgggagtgggcataggcctggcacaaggcctcctgaggccgcagctgtcctgttcacttctaagggccctgttttgaggttttaatttattgaagctaggtgaggctgagggggagcaccacggccctccctccagcctccatgggagggaaggagagggagctcctttttcttttttacgttgactttcttttctactcttccctttcccttcactccatctggggcctggggattttagtcacctctccatttggcccctggactacctttctttctcttgattctaacttgtaaataaagaagatattattgaa

SEQ ID NO: 1465 - DNA, 2259 bp, Cricetulus griseus
ataaacagtaatggcggaggctgcggcgtcccggaaacaacagccacaacatcaggagcaggagcggcagcggcggcggtggcagcggcctccctcaccccgatccccacagtcgctgccctagctccgggggtgggcggagggggcggcggcagcgacggcagcggcggcggctggacgaaaacaggtcacctgcagatattttatgcatggggtttgtaaaggaaggagataactgtcgatactcccatgacctctctgacagtccatatggtgtcgtgtgcaagtattttcaaagagggtactgtgtttatggagaccgctgcagatatgaacacagcaagccactgaaacaggaagaagtgactgctacagatctgagtgcaaaaccatccctcgctgcttcctcaagtctctcttcgggagttggatcacttgctgaaatgaatccaggcgaagctgagtcaagaaccccaaactttgcaactgtaggagcaggttcagaggattgggtgaatgccattgagtttgtacctgggcagccctactgtggccgtactgccccttcctgcactgaagtacccccgcagggctcagtgaccaaggaagagtcagagaaggagccagctgtggcgcagacaaagaagcagctctgcccctatgctgcagtgggagagtgtcgctatggggaaaactgtgtgtatctccacggagactcctgtgacatgtgtggcctgcaggtcctgcacccaatggatgctgcccagaggtcacaacacatcaaatcttgcatcgaggcccatgagaaggacatggagctctcttttgctgtgcagcgtagcaaggacatggtatgtgggatctgcatggaggtggtctatgagaaagccaaccccagcgagcgccgctttgggatcctgtccaactgcaaccacacctactgtctcaagtgtatccgcaaatggagaagtgctaagcaatttgagagcaagatcataaagtcctgccccgaatgccggatcacatctaactttgtcattcccagtgagtactgggtggaggagaaggaagagaagcagagactcattcagaaatacaaggaggccatgagcaacaaggcgtgcaggtattttgatgaaggacgtgggagctgcccatttggagggaactgtttttacaagcatgcgtaccctgatggccgtagagaggagccacagagacagaaagtgggagcatcaagcagataccgggcccaacgaaggagccacttctgggagctcattgaggagagagagaacaacccctttgacaacgacgaagaggaggttgtcacctttgagctgggcgagatgttgcttatgcttttggctgcaggtggggacgacgagctgacagactctgaggacgagtgggacttgtttcacgatgagctggaggacttttatgacttggatctatagcagcttgcgtggcgtgtgaactggtctgcggagcctcagacagtagctgtcccctgtgctgtgtggcagtgcgtggctctcataggcaggcctctcaaactccaggtgctgttgtgatcactactacccagggcctgctcctctatccctcacctttccccaagagtgtgttgttttctctgtttcaaaaagttacaaaataaatcttaaagttagtttttttgtaactatgaatttaactgtcagacagtgtaggtttgttgcgccatctgttttcagccaggttgtgttcatggactttgctacacttcgttttttgggagtaccccaagttcaaaggaaaagcaccgagtgtgctttggggtccaaggataggggtaattggggaaaaagggacctaagtgtctgtctgtatgctagagaaaagggatcagccatagaggttaaatgacctgcttgtcccttatcagtacaagctgggtcttgaacatacattgttttgaatgttttatggtctagccttttcagttgaggcacttttttggacaaacctttgtcctcgtttgaggggacctattacggaggttctgtgtttggttctgtgggtgtctgcctcattccatcactgagctttgaaagtagacagatggattccaaactgaggtgtggattgtactagaggagtcatttgcagtagccatagacccctttccactacagaaaggggagggcaaagccacccacaagacaagcaaaagttaagttgctacaattccttgataggaatttcacctttgca

SEQ ID NO: 1466 - DNA, 2259 bp, Cricetulus griseus
tgggagagatccgtgagctcaaacagctcaaccggcgcctgcaggcggagaaccgggagctgcgcgacctctgctgcttcctggactcggagcgccagcggggacggcgtgcagcgcgccagtggcagctgttcgggacccaagcatcccgggcggtgcgcgaggacctgggtggctgttggcagaagctagccgagctggaaggccgccaggaggagctgctgcgggaaaacctggcgcttaaggagctttgcctggcactgggcgaagagtggggtccccgcggtggctccggcggcgcagtgggctcaggcgccgggcccactcccgagctcgccctgcccccgtgcgggccccgcgacttaggcgatggaagttccagcactggcagtgtgggcagcccagatcagttgcccctagcctgctcccccgatgactgagggcgctgcattttccacgccaacgcctgcctgaattgctccctgagcgcggagactgctgtggacctccagacctggtagctgcttcggctgagcaccagggccctggtatggactgaaaagccctggcactgaggagggcccttgctcttgctggcagggcaggtaggggaatggaggctgaaggtggagggacttggcgtgggtggttgggtggggactaagtaaactgggaagagaagaagaaaccgaattcccacccggagggactgcagactaagggctgactcctcattaccttggagtttttgggttgggattttaagacagtggtagagcaccttatccccccaatgggcgccaagacaggccgaaatccggcccctgaagtggctctagctcccttccaggctccttcctgtccgaaacaatggggcaggaagcaggtgttgggggcctcaagcccactggctgcctgttcggaaggtggaagggtatgacacggtccttcccctgcccccagtccttaagataggagcagtgtgattccccatgggaaaaactgatcatcttgtttgcttgcactccagagcattctcagtctctcgaagtacaggagatgaggcagagcagaggtagccccattcttcagatgagaatgtcaaaagtccaaaaatatatgatagtttcttcaaggtcacagctgagactggaacctagagctcctgttcgaaacagtctcctttagcttctggatccaacatgacaactcagactagagcttcaagcctttattccattttggaaggtttgtataaaaatagtctctttaggaaaataaatagcagctgcccttgatgtggaggcttggataccctggaagtagaggcttctcaaagcttgggagtgcagctcagctcatcacagaagccaccagtgcctcctgagttgtgccattcaggaggagcctgcaggatgccctgtcgctgctggcagtggagctgtgtgagttagtgttctagactagtaaaaggacacctgtctgggtgtagggctggctggatcgtatgaagaaagtgacatagcatgagagtggtctgcaaggaagggaaagggctccaaaggaccactggggatctacaaagactgggctgccaggatttctctggcctaaaggggacatattttgtctctaattttgtgcaaattatgataggccagctctagagaaacaatgagcagctttggggaccccccccaagctggctctacatcaaagcataatatgtttgttctaatctgagagataaaggacctgctggtttggagcatggttatggtccaggcctgctggatcagtggggaaaaggaggctggggtagcaccagcaaggggtgtggttgggtgtctcacaaagccaggagtgtgggagaacccagggggtcggaggaggggtcgccactgctgctgctactctttcgatgtgctgaggaacaaggttctggtgtgctagggtaggtgaaaaccagactgggagtaaagggagtcagagacggtgtggtcatgagcgtgggggtgtgcagggcttcaggttcaagtacaggccctggagaaagggagatacaaggtaccgggcggcagggggctggtgggctgcccgctggtgctgctggtaccacctgtgtccttatctccttctgggattttgcagatggggcgatgggcttccaacaccagctcaaggcgctccttctgtttctgcagctcttcaatctctcgctgcaggctcgatttctcgtcctccaatttgtcggtctcc

SEQ ID NO: 1467 - DNA, 2259 bp, Cricetulus griseus
tgctaccatcatgtcttggtttgctgatcttgctggaagggcagaagatcttttaaatcgagttgatcaaggggctgcaacagctctcagaaaggagaataccagcaacatctattatagcaaaaatcctgactatcctgaacttcaccagcaaaacacagattcaacataccagactggacctaaagctaactatatttcctcagctgctgataacatccgacatcaaaatgccactgtcttagctggcacatcaaatgtgaaagtgggatccaggacagctggggaggcctctcatgccactgaacatgcatctgtccctagaccttcgtcacagtttgtccgaaggaaaagcaggtcacatgagctgtctaatctccgcctggagaatcagctgctcagaaatgaagtccagtccctaaaccaggaaatggcctccttacttcagagatccaaagaaactcaagaagaattaaataaggcaagagcaagagttgaaaaatggaatgttgaccattcaaagagtgatcgaataactcgggaactacgagcccaagttgatgaccttactgaagcagtggctgcaaaggattcccagctggctgtcctcaaagtgcggctgcaggaggctgaccaggtgctgagttcccgcacggaagcactggaagccttacagagtgagaagtcacgaataatgcaagatcacaatgaaggcagtagcctacagaatcaagctctgcaaactcttcaggagagactgcatgaagcggatgccactctgaagagagagcaggaaagttacagacaaatgcagagtgagttcgctgcgcgccttaataaaatggaagtagaacgtcagaatttggcagaagcggttactctggcagaaagaaagtactctgaggagaagaagaaggttgatgagctccagcagcaagtcaagctacacaagtcgagcttagagtcttctaagcaggagttaattgactataagcagaaagctacacggatactccagtctaaagaaaaattgataaacagcttaaaggaaggctccagttttgaaggcctagatagcagtgctgctggcagcatggagctggaagagcttcgccatgagaaggagatgcagaaggaggagatccagaagctgatgggccaggtccatcagctgaggtctgagctacaggatatggaggctcagcaggttagtgaagcagaatcagcaagagaacagttacaagatctgcaagaccagatagctaggcagaaagcatctaagcaagagctggagacggagctggaccggatgaaacaggaattccattacgtggaggaagatctgcatagaacaaagaacacactgcaaagcagaattaaagatcgagaggaagaaatccagaaactacggaatcagctcaccaacaaaactttaagcaatagcagccagtcagagctagaaagccgactgcatcagctgacggagacactcatccagaagcagaccatgctagagagcctcagcacagaaaagaactccttggtctttcagctagagcgcctggagcagcaggtgcactctacttccactgggcccagcaacggatcctccattaacatgtctggaattgacagtggtgaagggacacgccttcgaaatgttcctgttctttttaatgacacagaaactaatctggcaggaatgtatgggaaggttcgaaaggctgctagctccattgaccagtttagtattcgcctgggaatttttctccgaagataccctatagcaagagtgtttgtaattatctatatggctttgcttcacctctgggtcatgattgtcctgctgacttactcaccagaaatgcaccatgaccaaccgtatggcaagtgaactgagccgctggttcccaagagtgcctgccattgtcctgagctgggatctgcagaaagaccagcacctaagtgctcggaacagtacacaagactgtttcgtcccgggaagcttttaatctttaagttattctctggtgtctgactctccctgatttccataagagtctctaaatgcagactgtaatttaacaaattcggctctgctttttctagtacagttgccctagatatggagagaggaaagtgtacagacctttctatattttaggtgacactgattatgggttataatcagggaaactaattgtatttaggaataaaaataaaaagatttcttttcttaataaaaaaaaaaaaaaaaaa

SEQ ID NO: 1468 - DNA, 2259 bp, Cricetulus griseus
cggaggcagcatcccaggctctggtcaggcctcttccctgcctccatcttctaccactgttgattcatcagctgaaggagctcccccaccggggccagctccaccaccagctgccagccatccacgggtcatccggatttcccaccagagcgtggagcctgtggttatgatgcacatgaacattcaagatcctggatcacagccgggtggtgtcccgagtgctcccactggtcccctgggacctccaggtcatggacagaccctgggacagcaggtgcctggcttcccaacagcaccaactcgggtggtgattgcccggcccactcctccacaggctcggccttcccatcctgggggtcctccagtctctgggactctgggctctggactgggtacaaatgcttcactggcccagatggtgagcggccttgtggggcagcttcttatgcagcctgtccttgtggctcaggggactccaggaatggctcctgctccggctccggctccagctccggctccggctccggctccagctccagctccagctcctgctccagctccagctcctgccactgcttcagctagtgctggcactacaaacacagctacaacagctggccctgctcctgggggtcctgcacagcccccacctcctcagccctctgccgctgaccttcagttctctcagctcctggggaacctgctggggcctgcagggcccggggctgctgggcctggcatggcttctcccaccatcactgttgcaatgcctggtgttcctgcttttctccagggcatgaccgatttcttgcaggcatcacagactgcccctccaccccctccacctcctccacccccaccccctgccccagagcagcaggccacacccccaccagggtccccttctggtggaacagggagtcctggaggcttaggtccggagagcctgccaccggagttcttcacctcggtggtacagggagtgctgagctctctgctgggctccctgggggcgcgggctggcagcagtgagagcattgctgccttcatccaacgcctcagtggatccagcaacatctttgagcctggggctgatggggctcttggattctttggagctctgctctctcttctgtgccagaatttctccatggtggatgtggtgatgcttctccacgggcacttccagccactgcagcggctccagccacagctgcgatctttcttccaccagcactacctgggtggtcaggagcccacacctggcaacatccggatggcaacccatacattgatcactgggctggaagaatatgtacgggagagtttttctttggtgcaggttcagccgggtgtggacatcatccggacaaatttagaattcctccaagagcagtttaacagcattgctgcgcatgtgctacactgcacagacagtggatttggagcccgcttgctggagctgtgtaaccagggcctgtttgagtgcttggccctgaacctacactgcttggggggacagcagatggagcttgctgctgtcatcaacggccgaattcgtcgcatgtctcgtggagtgaacccatccttggtgagctggctgacgactatgatgggactgaggcttcaggtggtcttggaacacatgcctgtgggccctgatgccatcctcagatacgttcgcagggttggtgatcccccccagacacttcctgaagagccaatggaagttcaaggagcagaaagaacttcccctgaacctcagcgggagaatgcttccccagcccctggaacaacagcagaagaagccatgtcccgaggtccaccccctgctcccgaaggtggttcccgagatgaacaggatggagcttcagccgatgcagaaccttgggcagctgcggtccccccagaatgggtccctattatccagcaggacattcagagccagcgaaaggtgaaacctcagccgcccctgagcgacgcctacctcagcggtatgcctgccaagagacgcaagacaatgcagggtgagggcccccagctgctactctcagaggcagtgagccgggcagctaaggcagccggagctcggccctgacaagccccgagagcctgagccgggacctggaggcaccagaggttcaggagagctacaggcagcagctccggtctgatatccaaaagcgactgcaggaagaccccaactacagcccccagcgcttccccaatgcccaccgggcatttgctgatgacccctag

SEQ ID NO: 1469 - DNA, 2258 bp, Cricetulus griseus
gctgaattattctcaagtgctttcattctctgtgcacaaggaatctgaggtccaggagtgtcagcagcaaagatgtctaatgagccaccccctccttatcctggcggtcctacagccccactactagaggaaaaaagtggagccccacctaccccaggccgcgcctccccagcagtgatgcagccgccaccaggcatgccactgccctctgctgatattgctcccccaccttatgagccacctggtcatccagtgcctcagcctggttttgtcgcccccctcaccatgagtgcagatggcgcctacatgcctgcaggtttctaccctcctccaggcccctcaccccacctatgggctattatccaccaggaccctacccaccagggccctatcctggccctgggggccacacggccacagtcttggtgccatcagggatgacttcaaggatgtgacgcacacgtgtcccagctgcaaagcctacatctacacatacaagcgcttgtgctaacggagctagacttggactcccccacctatcagtctggccccatgtgctttgctccctatgctcagtggtccacttccccccagcccccactcagggttggaagttttgccattgtcccctggaaatactgtcctcaccttgcccttccctgagcatcctacttccagcaaaaattccgttggatttaaggccaagggccaggtgggtggcatgggggtgacactgatcttgtgtgatgtttgggcatttgcaatccagaagatgagctggagagggtctcttactggggtcctcaagagttgcctggtataaggcaaagaggacactgggctagttaaaggccctggtagtcaagaagaacttgccccctttctcatctagcttcctttgagtcaatgtgcagatctcctttctggccacatctccgtgaacccctatattttctggggccagaaggaatgaccatgaccatgaccctgtctgtctacttttgtgtctgtgctatatatgggtataacttttacctggtagcttactgagagtggcagatcataacagcctccttgtaggttcatgagtctctggaataagtgccagtctttttgccatagttgacttgcttccatattggggcacttcagtagggagaactgtgacactaggctgaggaccaggaagaagtcacaagtagtgggggtatcctaagcacatgagtcttgcccagccagggtgtaaacccaaactatttcctgaatggtctgtgaatatgcccacgtggacactgtgtcctgctgctgtccctctcctggtctcacactaccactgcatggcctcctatcactgtgaactgtggcctggtcccagtttgtagtttcattaaattggccctttcacttccctgccctgggcctcctctgctgtcttgcctggcttccttcttttctgagggacagggtgggtctacaggtagtatactggcaagcaagagattgggcctgggaaacaacacatgtttaagaacccaattacaccaaaccagaatttatatatatagacttactctagggggacctagctgttctgggccagggagtgcagcctgtgcctggtgtgtacctggctggcagagaagatgctgttacgcagaggctctagtgtctggcttttattggttgcttgttttctcgaacccagcattaaaaaagtcacctgaggtggttgtttagttagaggtggagatagggatggaataggtcacttggggtaggtaggatgcaaatgacaggacaggtccttcacatgtagtaccaggccaagagtccagcagccagggccacactgacagctagaacgagctggaggctaggcttcctcagcatagccatggctgtccggaaggggcagttgctgccttccagtgtacctgcatgcagcacaacaggagacatggcatcagtggagggcaatgacaccacccactccagaatgttagctcaggacccacaacctacctttgtctggctgagcagcataaaaggggcatttacgtaccatcccccttcccatcgtgcatggggaacccgtcctcctgggtttctcttgccagcatggagccagcctggtccagttcactgaatatctgaggagcagaaatcaactgagctatccacgaactaggcagactcagaatttgcaacctactcaccacccatagagaagctacagcctagatacacctgatcaggac

SEQ ID NO: 1470 - DNA, 2258 bp, Cricetulus griseus
ggtagcccccggcgggctgcctcttctggaccccgacgtgagtccccggccatctcccccagacgtgttcgccagcttcgcgccacacccggccgccctgggcccctcgacgctgctggctgagcagttgaacgtgatcggcagtcgaaaaaagagcgtgaacatgactgagtgtgtgccggtgcccagctcggagcatgtcgcggagatcgtgggtcgtcaggggtgcaagatcaaggctttgcgcgccaagaccaatacctacatcaagactccggtgcgcggcgaggagccggtcttcatcgtgacggggcgcaaggaggacgtggagatggccaagcgggagatcctgtcggccgccgagcacttctcgcttatccgtgccactcgcagcaaggcgggcgggctgtcgggggccaccgcaggtcccccaacctgcccggccaaactaccatccaggtgcgcgtgccctaccgagtggtggggctggtggtggggcccaagggcgccaccatcaaacggatccagcaaaggacgcacacatacatcgtgacccctggccgtgacaaggagccagtgtttgcagtgaccgggatgcccgagaacgttgaccgtgcaagggaggagatcgaggcacacatcacactgcgcacaggggccttcacggacgcagggcccgacagcgacttccacgccaatggtactgacgtgtgtctggacctgctgggagccgcagccagcctctgggccaaggccccccatccgggacggaggcccccagcctccaccagcggcctgcgtggggacagtgtcttgggcgcagccagcacccctgagcccttctatgtgggcagccgtggagggccgcccctgccggacccgagtcccagcagcccctatgggggctcgggcaaccggggcttcacgtttggtggggacggacccggagcccccacggggacagccaaccccgaggactgcgactttggttttgacttccttgcgctggacctaactgtgcctgccacggctaccatttgggcaccctttgagcgagccgcacccctgccagccttcagcggctgccccgccatcaacggggcacccgcacaacccagcacaggcgcacggcgcagcagcagcggagccgccagcacgccacgccactcacccacgctgcccgagcccggaggactgagcctggagctgcccctggcacgcagaggtgtcccagatccagtgggtgctgtgccttggcgacccccgcagagcacactgccgcccttctctggcagcaccactttctccacggccccctctctgcccagcaccgccccggtgtcctccaccctggacactgttgcctcggagggcaaccacaagccatccaccacagcggcgaactcctctgcatccgcagcagcccccagcccgcctgcagcagccttggctcgtgaatgcgtggtatgcgcagagggtgaggctatggctgcgttggtgccctgcggccacaaccttttctgcatggattgtgctgtccgcatctgtgggaagagtgagccagagtgtcccgcctgccgcacaccggctacccaagccattcatatcttttcctagttgcacccctacttcacggggcggccctggcttccccaagcaggaggtccttgggcctcaggggtgggagaggggggacagggcagggcctggctcgggagaggtggagaggtggggagggagaggggcccatgcgtgtcgcaaacagctttaactcctgcagcaggcgtcgaggccatcagcttgcggcccagcggcagcgcctccgctcttgacaagtgacagtattgagtgaaccggtgacaataaaaccggagaattctctgtttgcactttttattaagacacccctccccgtttccggggtgatcttaaaacaaaaaataacacgatatttacaactctcactggatttaacagtgtggattcttgtagaaacttccagaaaaaggcaggtggcttttccccctcgacatacacactcccttttttgggggcaaatatataccgttttgtacatcagccacggggtggccagaggagggcaaggggagggtatcaaggggtgtcccatcaacaaatttatagcttttgttttattgtggttgttttggtttattttttaaattaagactcagtgttgcagtttttttgttgtttttaaaaaggtttttaaaattttttaattgttattttacttc

SEQ ID NO: 1471 - DNA, 2258 bp, Cricetulus griseus
gccggggtcccagccttcgcgggccggggcctccggctccgcggcaggacggggagaagggccatggcgtcgtgcgtggggagccggacgctgagcaaggacgacgtgaactacaggatgcatttccgcatgatcaacgagcagcaagtggaggacatcaccatagacttcttctaccggccgcacacgatcaccctgctcagcttcaccatcgtcagcctcatgtacttcgccttcaccagggatgactctgttcctgaagacaacatctggagaggcatcctctcagttattttcttctttctcatcatcagcgtgctggcgttccccaacggtccatttaccagacctcatccagccttgtggcgaatggtttttggcctcagtgtgctgtacttcctcttcttggtatttctccttttcctgaacttcgagcaggttaaatccctaatgtattggctagatcccaatcttcgatatgccaccagagaagcagatatcatggagtatgctgtgaactgccatgtgatcacctgggagaggatcgtcagccattttgatatatttgcatttgggcatttctggggctgggccatgaaggccttgttgatccgtagttatggactctgctggacaatcagcatcacctgggagctgacagagctgttcttcatgcatctgctgcccaactttgccgagtgctggtgggaccaggtcattctggacatcctgttatgcaatggtggtggcatctggctgggcatggttgtttgccgatttttggagatgaggacttaccactgggcaagcttcaaggacatccataccaccacagggaagatcaaacgtgctgtgttacagttcacccctgctagctggacttacgtcaggtggtttgaccctaagtcttcctttcagagagtggctggggtataccttttcatgatcatctggcagttgactgagctgaataccttcttcttgaagcacatctttgttttccaagccagccaccccttaagctggtgtagaattctcttcatcggctgcattacagctcctacagtgagacagtactatgcttacctcaccgacacacagtgtaagcgcgttgggacacagtgctgggtgtttggggtcattggctttctggaagctattgtttgcataaaattcggacaagatcttttctctaagacccagatactctacgttgtattttggcttctttgtgtggccttcaccacgttcctgtgtctgtacggcatggtttggtatgcagagcactatggtcaccgggaaaagacctattcagagtgtgaagatggcactccagagatctcctggcatcatgggaaaggctcaaaaggttctgaagacagccctcccaagcattcaagcaacaacgaaagccattcttccagaagaaggaaccggcattccaagtccaaagtcaccaatggagttggaaagaaatgaaggagcctcattaatttcagatgttccagagagtgcctagacctgagagggcaacagaacacattgggaccttcctatgtggagatcaaaatgtacagaaggaacagagggggctttggggatcatgattggagagtgtaagtcttgtctcccatagctctgaacatacattaggctgaccatgacttggggtcctttgccaacaggaggtgtctcctaacttcagcatgaggcctgtggtttctggtagctatacagtgtgctggaaggacaggatagctgtttgctcctggttgccagcaatggctctgtgcccatgtgtctcgtggacgctgtaggactatcttcattcagatgtcaacttcaccaactggttaatgaattgttcactgggttttatttttatgaatctgcctttccatttgactgattgttttaagttcagtttgtttttccatcttttcctttgtgttttcaagttagaatgcttaaaaacttccagaatccactgctgaaattggggttccttctagagaagaaatgggtgggggagttttttgtgtccctgcttagcatactcagtccctagccacatgacagatgaccagcagcctgagtttgaaggaggctggctgtttgcactggagcctgagcttcagactggaacctgttgtattccattccaaacgctgttttcatctgtgccatgctctcctagaacattttcccaccctggatccttgttttaaataaatcaattcacatgaaaaactcctcaa

SEQ ID NO: 1472 - DNA, 2257 bp, Cricetulus griseus
catggaaccaccacgaggccctcctgctagtggggctgagccatctcgggcagttggctgtcaaagtgtacctgcctaacaagcaacgcacagtggtgactgtccgggatggcatgagtgtctatgattcattggacaaggccctcaaggttcggggtctcaatcaggattgctgcgtggtctacagactcatcaaaggaaggaaaacagtcactgcctgggacacagccattgcacccctggatggtgaagagctcattgtggaggtcctagaagatgtgccactgaccatgcacaattttgtacggaagacattcttcagcctggccttctgtgacttctgccttaagtttctgttccatggcttccgctgccaaacctgtggctacaagttccaccagcattgttcctccaaggtccccacagtctgcgttgacatgagtaccaaccgccaacagttctaccacagcattcaggatttgtctggaggctccaggcagcaagaggttccctcaaatctccctgtgaatgagctgctaaccccccacgggtcccagcccccgcacccagccccgtgacctggagcacttctccttccctgcccctgccaatcccccactgcagcgcatccgctctacatctactcctaacgtccacatggtcagcaccacagcgcccatggactccagcctcatgcagttcactgctcagagcttcagcaccgatgctgctggtaaaggtggtgatggagcaccccgtggtagccctagcccagctagtgtgtcctcggggaggaagtccccacattccaagtcaccgtcagagcagcgagagcggaagtccttggcagaagaaaagaaaaaagtgaagaacctggggtaccgggactcaggctattactgggaggtgccacccagtgaggtacagctgttgaagaggattgggacaggctcttttggcactgtgtttcgggggcgttggcatggtgatgtagctgtgaaagtgctcaaggtggcgcaacctactgctgaacaggcccaggccttcaagaatgagatgcaagtactcaggaagacacgacatgtcaacattttgctgttcatgggtttcatgacccggccggggtttgctatcatcacacaatggtgtgagggttccagtctctaccaccacctacatgtggctgacacgcgctttgacatggtccagctcattgatgtggcccggcagactgcccagggcatggactacctccacgccaagaacatcatccaccgagatctcaagtccaacaatatcttcctacatgagggactcacagtcaagattggtgacttcggcctggccacagtgaagacacggtggagtggggcccagcccttagagcagccctcagggtctgtgttatggatggcagctgaggtgattcgtatgcaggacccgaacccctacagcttccagtcggatgtctatgcctacggtgttgtgctttatgagcttatgactggctcactgccctacagccacattggcagccgtgaccagatcatctttatggtgggccgtggctatctgtctccggacctcagcaaaatcttcagtaattgccccaaggccatgaggcgcctgctgtctgactgcctcaagttccagcgggaggagcggcccctatttccccagatcctggccacgatcgagctactgcagcggtcactccccaagattgagcggagtgcctccgaaccctccttgcaccgcacccaggctgacgagttgcctgcctgccttctcagcgcagcccgccttgtgccttaggcccgctcccagccaccagggagccaatttcagcgtgccgtgccaaggcacccctccttaccagccagtcatggttctgcctctgccttgatactgcctcaggattccctatcccacaccctgggaatttgggggaccccccaaactgagatcccctgcttcctctataatttgatttcctcttggctttgggggtacttctaacttggagagctgtttcatctccaatgggtggggttcatgtcaaggattccactcagaacctctttctaaagtttttgcctgatgtgtcttcactggattttggggttcccagcaccccatatggatttggaagtttctctttgtctcccccactattcaaggactctcctctttaccaagaagcacagaattctgctaggaaaaaaaaaaaaaaaaaaaaaaaaaaaaaaaaaaaaaa

SEQ ID NO: 1473 - DNA, 2257 bp, Cricetulus griseus
ggacgacatcttgtttgctgacattgacacatccatgtacgattttgacccttgcgcatctacatcagggacagcctcaaaataggcccctgtgtcagctgatgagctcctcaagaccctggccccctactagcggtcagcctgttgccccaagtcagcctttcaaaatggatctcacagagctagaccacatcatggaggtgcttgttggatcctaagactcgggaccccttgactgtgcctaaccaggccctacaagcatccccacccaccctgacagtttctccgcactgtgcatgtacccttgcttgcctttttcagagaaaaagacaattttacaaaaggattacactagtattttcttcgagcagagttggagtgccttcattcaagtatgaccacttttaatacactctctgagtgggcttcacagagacccactgccctggcttagacgagaagacattggaagactgtgttgataacaagtgtcattgtgcctgtccattttaagaactttcttctttcttaaagaaagcagctctacccatctctgtgttttagacctggaggaccctgacatgccacagacatctgcatacatgtgcatatacagtagtgttgactattcccaacaaaaatggcacagcgcagttgattgctgctgtcgaaaattgatctacggtaacttacaacaactgtacttttgttggattagcaaaccgtgtgtttaaacaatcccgtatgttgggcaacagttcaaaaaagctcagagaagcattgcccaaacttagttctctgactccgtgcattcataaggccgggcttcaaaatcataacacccaccccaactcagcaggcacgtgcctattctgcagacatgcatgggaaactattggcccgtcttagaaagagcaagcccatcaagagttaagactgactttgtgtcctatttatattaagtgatgtcccaacagggaagaggtggagccagcgtgagatctccaagtcccaatttgagtgtgggacgtgcttcgagatgcttcctggcagtcatggctcaccttcacaaagacagtcttgtggcatccagaggcaggcagacagcctggggtgcttgggcctgagaggcagttattgacagtgatgtgcagcagactcctgagagatttaagaggtggttttccccataagttatttattcctttttttttcctgtgtaaatatatttattttgctgtgtcgctctaacaacatctgggtggtatggtgcagaatgtatggtaggaatgtatttcttgtaggaatgtaaatgtgtattaaaagggggagccgagccagcccccactctgtcttttcatcagacacacagtccacattcattttcactctcatctccaatatgggtctatttaaaatatgcaaagggtgtggatgaggaatgttttaatacctccaaatttttaagaaaatcaagcataaaagggttgataattttttaaagttttcttagtagcactttcacttatgacagaaggggcaacacagggcacccaccttcacaccaaagggtgagaaatggccacaacctcccacactgctccagtgtctttagcagttgagctgtttattgccatagccccaaccatcctgaggtcaatcaaggaaaatttcttaaaaaagtaagctccaaagagcccaagtatcaacttatggatcatttttaaagcttaaatttattaaccacctttgcggtaaacaatgaattatgaatactgcaagggcagccttcttaagtgacagacataaaaaaaagactgcctgcgcagcgattgttgttctactttgtgtgaatcgtcttaattttgaaaccttgctcttacaaattggacctttatacatttctgaaaatagaaagaaaagagcatgtttgacttgtcctagctataaatggttaattcttgtgctgccccgcacctggatgccagcggggtgtgcatctgcctgtgtgcgattgtttccagtgcttccaagaatgaatctacatggttcttgaaaattgtcaggatcaaatgctcttgcagacaaagccaatacaaattttggacttttgggggggaatttggaagagaaacgtagtccatatgtacaactaaagtgggctgtgttctaaactaatttggacagattaaatgtacatggaaatgagcggtcttttgtagttttatattatacaataaacagttaaaggatgaaa

SEQ ID NO: 1474 - DNA, 2257 bp, Cricetulus griseus
  modified_base (264)..(264): a, c, t, g, unknown or other
  modified_base (287)..(287): a, c, t, g, unknown or other
cgacaacctgctgagcccggaggactgggacagcaccctgtacagcggcctggatgaagtggccgaggagcaggcgccgctgttccgctgcgtggagcaggatgtcccgtttgacagcaaccctctggatgtggggatggatgtcagcccccctgacgcccccctgggaccctctacctatccttcccagatcttcaggtgaagtctgagccgtcctctccatgctcttcctcctccctgagctcagagtcatcgcatctttcngcagagccctcagccaggttccnggagtaggggaggtcctcagtgtgaagatggagtccttagcacctccactctgcctgctgggagacgatccagcatccccatttgaaacggtccaaatcaccgtgggttctgtcgctgatgacccctcagatatccagaccaaggtagaacccgcctctccatcttcttctgtcaacttccgaggcctccccagactctcagcagactctcccagccaggcttttataggagaggaggttctggaagtgaagacggagtccccatctcctccggggtgcctcctgtgggatgtcccagctccttcacttggagctgtccagatcagcatgggcccatcacctgttagttcctcagggaaagctccagccactcggaagcctccactgcagcccaagcctgtggtgctaaccacagttcaggtgccacctagagctgggcctcccagcactactgtccttttgcagcccctcgtccagcagcccgcagtgtccccagttgtcctcatccaaggtgctattcgagtccagcctgaagggccagcccctgcagttccacggcccgaaaggaagagcattgtccctgctcctctgcctgggaactcctgccctcctgaagtggacgcaaagctgctgaagcgtcagcagcgaatgatcaagaacagagagtcggcctgccagtcccgccggaagaagaaagagtatctgcagggactggaggccagactgcaggctgtgctggcagacaaccagcaactgcgcagggagaatgctgccctccggcggcggctggagaccctgctgacagagaacagtgagctcaagctgggctctgggaacaggaaagttgtctgcatcatggtcttccttctcttcattgccttcaactttggacctgtgagcattagtgagccacctccagctcccatctctcctcggatgagcagggaggaagctcgacccaggagacacctgctggagttctccgagcaggggccagctcatggtgttgaacccctccagaaagctgcccggggcccagaggagcggcagcccagccctgcaggcaggcccagcttcagaaacctgacagccttccctggcggggccaaggagctgctgctgagagacctggaccagctcttcctcgcctctgactgccgccacttcaaccgcacggagtccctgaggcttgctgatgagctgagtggctgggtgcagcgtcaccagagaggtcgacggaggatgcctcacagggcccaggagagacagaagtctcagctacggaagaagtcaccgccagtgaaaccagtccccacccaacctccaggacctcctgagagggaccctgtggggcagctgcagctctaccgccacccaggccgttcgcagcctgagtttctagatgcaatcgaccggcgggaagacaccttctatgttgtctccttccgaagggaccacttgctgctcccggccatcagccacaacaagacgtccagacccaagatgtccctggtgatgccagccatggcccccaatgagaccgtgtcaggccgggggcccccaggggactatgaggagatgatgcagatcgagtgtgaggtcatggacaccagggtgattcacatcaagacctccacggtgcccccctcactccggaagcagccatccccaaccccaggcaataccacaggtggccccctgccagcttctgcagccagtcaggccagtcaggcctcccaccagcccctctacctcaaccacccctgacctctgcagctcacgttggcttagaactggtttgggggagcctggtccttgaacttgggggtaattggtaaaggaaagcagggtgtatgggatccagcacttaatgggagtagggtgggtggctcacctctccttacctcttcagaatatagggctcctctccttcctgcaaccccaggcccctctttctctgagagaacctc

SEQ ID NO: 1475 - DNA, 2256 bp, Cricetulus griseus
ggcgcctggagaagcgcaattcggacctcctgctcttggtggacacgcataagaagcagatcgaccagaaggaggccgactacggccgcctcagcagccggctgcaggccagggagggcctggggaagagatgcgaggatgacaaggttaaactacagaacaacatatcgtatcagatggcagacatacatcatttaaaagaacaactggctgagcttcgtcaggagtttcttcgacaggaagatcagcttcaagacttcaggaaaaacaacacataccttgtgaagagattagaatacgagagttttcagtgtggacagcagatcaaggaattaagagcacaacatgaagaaaatattaaaaaattagcagatcagtttttgcaggaacaaaaggagacccataggagtcaatcaaatgatggaaaagagttgggtataaatgatcatgtagcacctaaaattattccaaacgtggctgaaaatgatgcaaataagaatgaggaaccctcaagtaatcatattccacatgggaaagaacaagtcaaacgaattggtgatgcagggatgcctggagtagaagagaatgatctagcaaaagtagatgatcttcctgctgatgaagaacgagagcttcagatggatcctgcagactatggcaaacagcgcttcaatgatgtcctttaagtctaagggatgctcaaaacccaaagtgctgtgcatcgaatcatctctacttgtcaatttttgacttctgttgtaaagatcaattgtatcagttgtaaagatacattgagatagatttaaggagattttaatgaaggaatgtactagtgtacatatgtgaactttttcatattgtattatcaaagcaaatactttttttggttacaacacagctgagccaaaaacagttaatctttgcatttaaagcaaactaatgtaaatttcacattttattgaacctaattttttcacaaaaagacaaacaggaacaaatgtttgtacaggttatatgttgcacattgtgtaacagcaatgagaagttagttattcagctgaaaagtctagacactaatacatttttattactccccccataggtattctctaccaccccttgattaacactcttcatcataacaatatttataagttattccttacttagttcttgaagtggcagaatgcatggttgacaatgaattttaattttttcaagtaataccagtactgtttaactgtagtcagcactggctaaaattctttatattttcggatctcagtatggtgaatgtattcaccattcacatatcagatcctgagagtgactaagtccactttgaaatgagtctgcaatcagtacagcaaagcttttctggtagttttaatgattgtatttgattagacttttccagaactactaagtaagggattttaacaggtttttattaataaacagatgaatagaagtaccgtgaagtctacaactgttttattgaaatagctgaaaactttgtaataaaaatgaacatttgtaattaatgttagttaagaaccctccaagctcatttgctagacttacagaattatttttagtgcgttgtgtcttttgccattattccattagaatgtataagctagctaatccttgtatttttggtttcaagcacttttaatttgtgtgtgttctacacacacacacacacacacacacacacacacacacacacacacgaacatataaaaaaacttcatttagcagcctagacattttataaactggggaatcttggaccaattgataatacttttgactgtattaacattgtagtgctataaagtactatgtgatctctttacattgtgacattctatacagtctgtattagacatgtggttttgttttgtttacagtgttttacttctgccttaagaactagggttgtttgttttggtttcttttaatgtattttccatgaattaagtgttattttgacaggaacgctgcttttaaaaaaattacttactgggttctaataaaattaaaaagttaaaacttgctggagagatggctcagaggttaagagcaccgactgttcttccaaaggtcctgagttcaattcccagcaaccaaatggtggctcacaaccatcggttgtaagatctggtgccctcttctggtgtgcagatatacacagaagcagaatgttatatatacataataaataaataaaatctttaaaaaaaaaaaaaa

SEQ ID NO: 1476 - DNA, 2256 bp, Cricetulus griseus
gagtttagccctgcccagttctctggccctaagaagatcaacctgaaccacttgttgaatttcacctttgaaccccgtggccaggcaggtcactttgaaggcagtggacatggcagctggggaaaaagaaacaagtgggggcataagccttttaacaaggaactttttttacaggccaactgtcagtttgtggtgtctgaagaccaggactatgcagctcattttgctgatcctgacaccttagtcaactgggactttgtggaacaagtgcgcatctgtagccatgaagtgccatcttgcccaatatgcctctatccaccgactgcagccaagataacccgctgtggacacattttctgctgggcgtgcatcctgcactacctttcactcagtgagaaagcctggagtaaatgtcccatctgctacagttctgtgcataagaaagacctcaagagtgttgttgccacagaatcacgccagtacgttgtgggtgataccattacaatgcagctgatgaagagagagaaaggagtgttggtggccttgcctaaatccaagtggatgaatgtagaccatcccattcatctaggagatgaacagcacagccagtactccaagttgctgctggcctctaaggagcaggtgctgcaccgagtagttctagaagagaaagtagcactggagcagcagctcgcagaggagaagcacactcctgagtcctgctttattgaggccgctatccaggaggttaagattcgggaagaggctctgtctggagtagctggaggcagaggggaggtcactggtgttgtgactgctctggagcaactggtgctgatggctcccctggtgaaggagtctgttttccaacccagaaagggtgtgctagagtatctgtctgctttcgaagaagaaactgcagaagtttgttctctggactcccctcgttctcttgctctccctttggtagaagaggaggaagcagtgtctgagccagaagcctgtgaggagtcagaggtagcagatgacaatcttggggaggggaccatttgtactgagtcaagccaggaggaacccatcactaaaccaggcttcacccagctgagcagctctccttgttactacttctaccaagcggaggatggacaacacatgttcctgcacccagtcaatgtgcgctgccttgttcgggagtatggcagcctggagcagagcccagagaagatctctgcaacagtggtagagattgctgggtattccatgtctgaggatgttcgacagcgccataggtatctctctcacttgccactcacctgtgaattcagcatctgtgaactggctctgcagcctcctgtggtctctaaggaaaccctagagatgttctcagatgacattgagaaaaggaagcgtcagcgccaaaagaaggctcgagaggagcgtcgccgagagcgcagaattgaaatggaggagaacaagagacagggcaggtatcctgaagtccacattcccctggagaaccttcagcagtttcctgccttcaattcctacacctgctcctctggttctgctgtgggtcccaccagcaccgagggccatggggccctctccctttctcctcttagcagaagtcccagttctcatgcagactttctgctgacccctttgtcacccactgccagtcagggcagtccctccttctgcgttggaagcctggaagaagactctcccttcctttcctttgctcagatgctgagggttgggaaggcaaaagcagacgtgtggcccaaaactgctccaaagaaagatgagaacagcttggttcctccggcccctgtggacagcgatggggagagtgataactctgaccgtgttcctgtgcccagtttccagaattccttcagccaagctattgaagcagccttcatgaaattggacacaccagctacttcagatgccctctctgaagacagaggaggaaagaaacggaagaagcagaaacagaagctcctgttcagcacctcggtcgtccacaccaagtgacactactcgctcacccaggcaccttctccatctggtttcttttctgtgcttttgttttgctgctgtaatttttaagtatttgagtttgaacagattgattagcttggggcggggggagggggtttccacaatgtgagggggaaccaagaaaattttaaatacagtgtattttccagcttcccgtctttacaccaaaataaagtattgacactcaac

SEQ ID NO: 1477 - DNA, 2254 bp, Cricetulus griseus
tcagacactcatggttgggacgtaccctggtggcctggacggcgggataatctggttgagccaccagcgagccccactgtagagtcaacagggctagcctgcccctacagagccatcgaggccctgtacaggaagcactgtcttgaacaggggaagcagcagttgaagacccaggagacagaggtggctgaggagttcttagtcaccgacaatagttccatgtggcaaacggcagaagaactgggctgcttagacgtggaagctgaggccaagatggagaactcattactgggtcagcccctagctctgcctgctgcttgtgtcccccaaaccagccagcccacttaccaccatggcaatggaccttataatgatgtggatatccctggttgctggtttttcaagctgcctcacaaggatggtaacaactacaatgtgggaagtccctttgccaaagacttcctgcccaagatggaggatggcactctgcaggctggcccaggaggtggaccccgtgccctggaaataaataaaatgatttctttttggaggaatgctcataaacgtatcagctcccagatggtggtatggcttcccaggtcagcccttccccgtgccatgaccaggcaccctacctttgatgaggaaggccgctatggggccatcctgccccaggtggtgactgctggcaccatcacccgccgagctgtggagcccacatggctcactgccagtaatgctcggcctgaccgagtaggcagtgagttgaaagccatggtgcaggctccacctggctacgtcctggtgggtgctgatgtggactcacaggagctgtggattgcagctgtacttggagatgctcattttgctggtatgcatggctgcacagcctttggctggatgactctgcagggcaggaagagcaggggcactgatctacacagtaagacagccagcactgtaggcatcagccgagagcatgctaaagtcttcaactacggccgtatctatggggctgggcagtcctttgctgagcgcctactgatgcagttcaaccacaggctcacaagacaggaggcagctgagaaggcccagcagatgtatgcggtcacgaagggcctccgccggtatcggctgtcagacgagggtgaatggctggtgagacagttggacctccctgtggacaggacagaggatggctgggtttccctacaggatcttcgaaagatccagagagaagcttcaaggaaatcacgctggaagaagtgggaggtgtttacagagcgagcatggacagggggcacagagtcagaaatgtttaacaagctggagagcattgccatgtctgacacaccacgtaccccagtgcttggctgctgcatcagcagagccctggagcccacggttgttcagggagagtttataaccagccgtgtgaactgggtggtacagagctctgctgtggactacttacacctcatgcttgtggccatgaggtggctgtttgaggagtttgccattgatggacgcttctgcatcagcatccatgatgaggttcgttacctggtgctggaggaggaccgctaccgtgctgccctggcactgcagatcaccaacctcctgaccaggtgcatgtttgcctacaagctgggtctgaatgatctgccccagtcagtcgcctttttcagtgcagtagatattgaccagtgcctcaggaaggaagtgaccatggactgtaaaactccttctaacccaactgggatggaaaggagatacgggattccccagggtgaagcactggatatttaccagataattgaactcaccaaaggctccttggaaaaacgaagccagcctggaccctagctccatctggaggctctgtatttgctcctgtggagcttcattgaagtggtgcaggttcctaaactcaggctttcagatgtgctttttgcaaaaggcagccatttttctgtagcaggacctgcccagaagagtccttctaactgaaggcacagtttggtgggttcagaaccaggatgccaacatcagtgcaggctgtatgagaaggggtactgtcggcacaaaacaaagcagatgccccacaggtcacattaactcaggcatatctttcttttctttgtggctggttctctgtcctgctctctgtgtgctggtgcagcgccctagaaggggagagtagaagctctggtgaccctgccctaaggtgatgggaataaaaacaaacaccaaa

SEQ ID NO: 1478 - DNA, 2254 bp, Cricetulus griseus
gtgtgctgcttgacaagacgggtaccttgacaagtgatagcctggtggttcgtggtgtggcagggctgagagatgggaaagaggtgaccccagtgtccagcattcccatagaaacacaccgggccctggcctcctgccactcgctcatgcagctggatgatggcaccctagtgggtgatcccctggagaaggccatgcttacagctgtagactggacactgaccaaagatgagaaagtattcccccgaagtattaaaactcaggggctgaaaattcaccagcgctttcattttgccagtgccctaaagcgaatgtccgtgctcgcctcctacgagaagctcggctccactgacctctgctacatcgcggctgtgaagggggcccctgaaaccctgcactccatgttttcccagtgcccacctgactaccaccacatccacactgagatctctcgggaaggagcccgtgtcctggctctggggtacaaggagctagggcatctcacgcatcagcaggcccgggaggtgaagcgagaggcgctggaatgcagcctcaagttcgtgggcttcattgtggtctcctgtccgctcaaggctgactcaaaggctgtgatccgagagattcagaacgcatcccaccgggtggtcatgatcacaggggacaacccactcactgcctgccatgtggctcaggagctgcacttcattgacaaggcccacacgctcatcttacatcctccctcagagaaaggccggccgtgtgagtggcgctccattgatagcagcattgtgctgcctctcaccctgggctctcccaaggccctggccctggagcacgcactatgcctcacaggtgatggcttggctcacctgcaggctgtggacccccagcagctgctccgcctcatccctcatgtacaggtgtttgcccgtgtggcccccaagcagaaggaatttgtcatcactagcctgaaagagctgggctatgtgaccctcatgtgtggagatggcaccaatgacgtgggcgcactgaagcacgctgatgtgggggtagcactcctggccaatgcccctgagaggattgtagaacggcgacggcgaccaagggacaaccaggtcttgagcaacagtggccccagagtctcttccaggtcaaccaaacaaaggtcggcactcctgtcccctgaggagccaccagcctcccacagggaccgcctgaaccaggtgctgcgggacctcgaggacgagagcacccccattgtgaagctgggggatgccagcattgcagcacctttcacctctaagctgtcctccatccaatgcatctgccacgtgatcaagcagggccgttgcacattggtgacgacgctgcagatgttcaagatcctggccctcaatgccctcatcctggcatatagccaaagtgtcctctacctggagggtgtcaagttcagcgacttccaggccaccctgcaggggctgctgctggccggctgcttcctcttcatctcccgctccaagcctctcaagactctctcccgagagcggcccttgcccaacatcttcaacctgtacaccatcctcacagtgatgctgcagttctctgtccactttctgagcctcgtctacctgtaccaggaggcccaggcacgcagccctgagaagcaggaacagtttgtagacctatacaaggagtttgagccgagcctggtcaacagcactgtgtacatcatggccatggccatgcagatggctacctttgccatcaactacaagggcccacccttcatggagagcctgcctgagaacaagccattggtgtggagtctggtggtgtcactgctggccatcattggcttgctccttggttcctcaccggatttcaacagccagtttggcctcgtagacatccctgtggagttcaagctggtcattggccaggtcctggccctggacttctgcctggcgctcctggctgaccgtgtcctacagttctttttggggactccgaagctgaaagtgccttcctgagatgatggtgctggtatccaccgcctatcctggttgctgctgggcaggagtaccgccccccattgccccagaagggaacactgctcccatctccccagtgaggcagccctgtcttgcccttggaagactgagctgggacccttgtgggcaaccattggccaggctagtggaaacagccctggctgcgccttgggtaaataaatcggcatctgcaattttagaaa

SEQ ID NO: 1479 - DNA, 2253 bp, Cricetulus griseus
gtggatgtggctcggcagcgggagctcaaatggctggaaatgttcagtaactgggataagtggttgtcacggcgtttccagaaggtaaaactgcgctgccggaaagggatcccctcctctctcagagccaaggcctggcagtacctgtctaatagcaaggaactcctggagcagaacccgggcaagtttgaggagctggaacgggcctctggggaccccaagtggctggatgtgattgagaaggacctgcatcgccagttccctttccatgaaatgtttgctgctcgaggagggcatgggcaacaggacctgtaccgaatcctgaaggcctataccatctacaggcctgacgagggctactgtcaggcccaggccccagtggctgcagtgctgctcatgcacatgcctgctgagcaagccttttggtgcctggtacagatctgcgacaagtacctcccaggttactacagtgcagggctggaggccattcagttggatggagaaatcttttttgcgctcctgcgtcgggcttcccctctggcgcatcggcaccttcggcggcagcgcattgaccccgtgctctacatgacagaatggttcatgtgcatctttgcccgcaccctcccctgggcttcagtgctgcgtgtctgggacatgtttttctgtgaaggagttaagatcatcttccgagtggctctggtcttgctgcgacacacgttgggttctgtggaaaagctgcgctcctgtcaaggcatgtatgaaaccatggagcagcttcgaaacctaccacaacagtgtatgcaggaggacttcctggtgcatgaggtaaccaacctcccagtgacagaagcattgattgagagggagaatgcaacccagctaaagaagtggcgggaaactaggggagagctgcagtatcggccctcacggcgactacatggctcccgagctatccatgaggagcgcaggcggcagcagccacccctgggcccgtcctccagccttctcagcctccctagtcttaagagcagaggccctcgggcagctggaagcgctccttccccaccacctcctgttcgcagggctagtgctggccctgttgtccctggagctgtagtcactgctgagggactgcatccatcccttccttcacctactggcaacagcaccccactaggcaccagcaaggagacccggagacaggagaaagagcggcagaaacaggagaaagagcgagagaaggagcggcagagacaggagaaggaacggcaaagacaggagaaggaacggcaaaaatgggaaaaagagcaagagaaggagcagcagaagcaggagaaggagcgacagaagcaggagaaaaagggccaaggccggaaactttccttgcgtcgaaaggcagatgggcctccagcaccccatgatggcgaggacaggtcagctgctgaagcccggcaagatgcttacttctgacctcttgctgggtctagatgacatggccctcttccttttccctcagtcaggagcaggcctggcaggggtattcttcccagctcccttggcaggcttcccttttctgaggaaagtggcttgattcccctgactccttgccagctgctgatccctacatggccaggacagccacagtgcatgggacagctgtatttcctagggtagcagtgaccaagtctggagactcttttgtccaattaggcccagcttgggtctctgtcactcctacgaattccttctggggtgctgtcttacactccagtgggcttcccttagatggtggagctaggttccttttcttgtcttggggccctgcctgtcaccccactgtctttctgggggccaaggctgttttttctctcctggatatccttgtgttgtaattatgtacagaaggtcaggttggcctgggtggggtgctctgttctgtgtttcacagtgctcctgtactccagtttatttaaggggacatgcaaggaaatgccctccatttccttcccatctatgtcctgctctccctcctaacacacttgctttgtatgctcaggcctctctgctgcctcatcagaaagcctgtctttcattttgttcctttccagccatcaagcccctctctgagtaagggtcttcccttgagtccgggggtggaacccaatgtttacattctcttctgtcatggtcccatcccagtggtggttttttggcgctttgaggaaccagaaaaagaacctgctgttatatctg

SEQ ID NO: 1480 - DNA, 2253 bp, Cricetulus griseus
gcgaagatggctgcggcggcgctgctggctgtggtagataggaaccagttgcggcgggtccctatcctgctgctgcagccgagggaatgggcttggaaaacagagaaccatgaagtatggaacaaccccaggaagaggcattgccaaggtcctcattgcaaacagaggagaaattgcttgcagggtgatacgaacagccaaagaatgggcatacagtctgtggctgtttacagtgaggccgacaggaacaccatgcatgtagatatggcagatgaagcatattccatcggccctgctccatctcagcagagctacctggcaatggagaaaatcattcaagtggccaagagctctgcagcacaggccatccatccaggatatggttttctttcagaaaacatggaatttgctgaactttgtaagcaagaaggaattatttttataggccctccttcatctgcaattagagatatgggtataaagagcacatccaagtccatcatggctgctgctggagttcctgttgtggaaggttaccatggagaggaccagtctgaccagtgcctgaaagaacatgctgggaaaattgggtaccctgttatgatcaaagccgtgcgtggtggaggaggaaaaggcatgaggatcattagatcagaaaaagaattccaagagcagttagaatcagctcgcagggaagctaagaaatctttcaatgatgatgctatgctgatcgagaagtttgtggacacaccaaggcatgtggaagttcaggtgtttggtgatcaccatggcaatgcagtgtacttgtttgaaagagactgtagtgtgcagaggagacatcagaagatcattgaggaggccccagcgcctggtattaatcctgaagtaagaagaaagctgggggaggccgcagtcagggctgctcaggctgtcaagtatgtgggagctggaactgtggaattcattatggactcaaagcacaaattttagttcagtggagatgaatacaagactacaagtggaacatcctgtcactgaaatgatcactggaactgacttggtggaatggcagttcaggattgcagcaggagagaagattcccttgagccaggaagaaatccctctgcagggccatgcctttgaggcgagaatatatgcagaggaccctgacaataacttcatgccaggggccggaccattggttcacctctctacccctcaggcagatgtgtccacaaggattgaaactggagtacggcaaggagatgaagtctcagtgcattatgaccccatgattgcaaagcttgttgtatgggccgcagatcgcccgtcagccctgtcgaaactgaggtacagccttcatcagtacaatattgttggcttacgaaccaatgtggacttcctgctccggctgtctggccacccagagttcgaagctgggaatgtgcacactgactttattcctcagcaccacgaggaacttctgcccacccacagcgtcatagccaaggaggctgtgtgccaggcagctctggggctcatcctcaaagagagagacatgaccagcgctttcagacttcacacacaagatcaattctctccgttttcattcagcagtgggagaagactgaatatctcttacaccaggaacatgactctgagaagtggtaaaagtgatgtagtcgtagctgtgacgtataaccatgatgggtcatatgacatgcagattggaaatgagaccttccgagtccttggtgatctttgcagtgagggaggctgtacctacctgaagtcttctgttaatggagtagccagtaaatccaagttcatcattctggacaacaccatctacctgttttccatggaaggcagtactgaaattggcattccagtacccaagtacttatcttcagtgagctcagaaggaacccagggaggtactatcgcacctatgactggaaccattgaaaaggtgtttgtgaaagctggagacagagtaaaaaccggagactctctgatggttatgatcgccatgaagatggagcataccataaaagctccaaaggatggcaagattaaaaaggtgctcttcagagaagggcccaggccaacagacatgcgcctttagtggagttcgaggaggaggaggaatctgactaatgcaagtcataatgaactgtgcccatcaaagaaggctgacagcacaacatcttacctgcccaatacagcaagtgcctcctgaatctctagatc

SEQ ID NO: 1481 - DNA, 2253 bp, Cricetulus griseus
gccgggtgctgctgaacactaccgtggctccgctgttctttgctgaccagttcctgcagctgtccacatcactgccctccccgcacatcactggcctcgctgagcacctgagcccactcatgctcagcactgaatggactcgggtcaccctctggaaccgggacgtgccaccctcgccaggtaccaacctctatgggtcacaccctttctacctggtgctggaggatggtggcttggctcatggtgtcttcctgctgaacagcaatgccatggatgtggtcctgcagcccagcccagccctaacctggaggtcaacaggtgggatcttggatgtgtacgtgttcctaggcccagagcccaagagcgttgtgcagcagtaccttgaagttgtgggataccccttcatgccgccatactggggcctgggtttccacctctgccgctggggctactcctccactgctattgtccgccaggtggtggagaacatgaccagggcacacttccccctggatgtgcagtggaacgacctggactacatggacacccgcaaggacttcaccttcacccaggacgggtttgcagacttcccagacatggttcgagagctccaccaaggtggccggcggtacataatgatattggaccctgccatcagcagttcaggccctgctgggagttacaggccctatgacgaaggtcttcggaggggcgtgttcatcaccaactcgactgggcagccgctaattgggaaggcatggcctggatctagcaccttccccgatttcaccaaccctgagacccttgtctggtggaaggacatggtgtctgagttccacgcccaggtgcccttcgatggaatatggattgacatgaacgagccatccagcttcattagaggctcccagtggggctgccctgacaacgaactggagaacccaccctatgtgcccgcggtggttggcggggccttgcaggcagccaccatctgtgcctccagccgccagttcctctccacacactacaacctccacaacctgtatggcttgacccaagccatcgcctccaacagggccctagtgaagacccggggaacacgaccctttgtgatctcccgttcaaccttcgctggccatggccaatatgctggtcactggacaggggatgtgtcgagctcctgggagcatctttcttactctgtgccagatatcctgcagtttaacctggtaggcgtgccgctgattggggcagacatctgtggcttcctgggagacacatctgaggagttgtgtgtacgctggacccaattggggaccttctaccccttcatgcggaatcacaatgactacaaaagcaagcctcaggagccatacaggttcagcgagaccgcacagcaggccatgaggaaggccttcactttgcgttatgcccttctgccctacctgtacactctcttccatggagcccatatcagaggggacacagtggcccggcccctcttcctggagttccctgaggatcccaacacctggtctgtggaccgccagctcttgtggggatcagccctgctcatcacacctgtgcttgagcctgggaaaactgaagtgactggctacttccccgagggcacgtggtacaacctgcagatggtgccaatggagggccttggcagcctcccatctcctccatcatctctgccatcacccctcaggtctgttgtgcacagcaaggggcagtggctgacgctcgaagcccctctggataccatcaatgtgcacctgagggcaggatacatcataccactgcagggccccagcctcacaaccacagaatcccgaaagcagcccatggccctggctgtggcgttaacagcaagcggcgaggcctatggggagctgttctgggatgacggggagagcctagatgctctggagcgtggggcctacacacaagtcaccttcttggccaagaacgataccattgtgaatgagttagtacacgtggccaaggagggagctgacctacagctgaggaaggtgaccgtcttgggagtagccacagcccctacacaagtcctttccaatggtgtccctgtctccaatttcacctacagccctgaaagcaagatcctggccatccctgtctcactgctcatgggagagcagtttcagattgactggtcctagcagagcacacctgtgtttacagaggcctctcggtgaggccctcccaagtgctggaattaaaggtgtg

SEQ ID NO: 1482 - DNA, 2252 bp, Cricetulus griseus
  modified_base (1429)..(1429): a, c, t, g, unknown or other
  modified_base (1601)..(1601): a, c, t, g, unknown or other
ggagtcctcgctgaggtgcaaaaccctggagcagcaggagaacttcgaggaggtggccaggagcaaagacattgaggttctggaaggaaagcccatattcgttgattgctatggaaacctggcccctcttaccaaaggagctcagcagcttgttttaacttctattctttcaaagaaaacagacttccattttccatcaaggttagagaccccagccaagagccctgtggccgtctgtctttcctgaaagagccgaagacaacaaagggattaccccaaacagctgtttgcaacttaaatattactctacctgcacataaaaaggctgagaaagcggacagacgtcagagctttgcatctttagctttacgtaagcgctacagctacttgactgagcctggcatgagtccacagagtccttgtgagcggacagatatcaggatggcaatagtagccgatcaccctgggacttagttgggacagagttggcaagggtaactccaatttttcagtggatgaaatcaatctagatacgtgtggaaaatccccaattccttaatatcccaaagcttcatgttattaaaaaagttgccacaactgatgccttaacttcggtcttgacaaaaattaaatcgaatagacatagtgactctgctagaaggaccaatttttgattatgggaatatttcaggcaccagaaagctttgcagatgaaaaacaaaaatgttttaccatgacccagttgatggttggcagaacgagacatcaagtggaagcctagagtccccggcacaagcccgaagaataactggtgggttactagaccgcctggatgacagctctgatcaggttcgagattccattacctcatatctcaaaggagaacctgggaaatttgaagcaaatggaagccatgcagaaggcactctggaagcaaaggcaaagtcctattttccggaatcccaaaatgacgtaggaaaacagagcattaaggagaatctgaaaccaaaaacacacggatctggtcgcactgaggaaccagcatcacccctcgcagcctatcagaaatctctggaagaaaccaacaagtttgtcatagaagatgcacctaaaccctgtgtgcctgtcagcatgaaaaagatgactaggacttctgctgatggcaaggccaggctcaacctccacgaagaagaagggtccagcgggtcagagcctaagcagggagaaggctataaagtgaagatgaaaaaagaaattcggaacgtggagaaaaagacccactagtgacagtgacgtccgtccaggatcatatgttccgtactgccagtattgagaaattcaccagagatcagccagaaggaaaatatttaccaagaagggagtttggagctgctgcctctacacattaatgacgtgatttttttttaangctaaaaaggaaaaaagaaaaactactacacagtttttattagcatgagccaatttacagagcatggaaatccactctcattcccaggattgacacgtgtgcactgagcaatgccgtataagatacaagaagccatgttgtcagacttgatctcaagtcttttttttttttntttttttttaaagaaaaataaggaattctgtagttctgtgaaaaaattttttacttcagaatactaatattttgatgcatgcgtatcacccttattttgattaaatcttttccaattttgcaaacactacagtctcctgcaacacaggagattttatctgtaaacacaaagcccttcatctaatatttgttgctattgccaatttttcaatgaaatgaccaaaaatggaaaaaaaaaaactatacagtagttgcttgggggtgggagggggtgctgttagtgcttacagggggaaatgcttgccactgtagaggtggatggtgctcacaagaggccccagtcatgggtatttaaaaatggactgaccagaaacccatatctaggagaatggcagcacactgtaaaaaaaaaaaaaaagacaaaaaaaaaaaaaaaaaagtacactgttattgtgtactggctctgagatgtagacccttttcagtaagccaatcacttgtaaccaccctcacagtgtcatattaggttagcaaaggctgcattttatagggcattttttctttgggtttcggtgaggttcctttattcactatcttcacttgaaatcagcctccatggacacctagctctagatgacatgtatgagagaag

SEQ ID NO: 1483 - DNA, 2252 bp, Cricetulus griseus
ttgcactcaaagacaaaaacaaaagtggcatgatctcaggtctggatttcagtgacgtcatggtcaccattcggtcccacatgctcactccttttgtggaagagaacttagtcctgctggaggaagtacctcacaccaagttagcttctcctacttcaatgcatttaactccttactcaacaacatggagcttgttcgtaagatctatagcactttagcaggcacaaggaaagatattgaagtcacaaaggaggaatttgcccagagtgccatacgctatggacaagttactccgctagaaattgatatcctgtaccagcttgcagacctatataacgcttcggggcgcttgactctggccgacatcgagagaatagctccgctggctgagggggccttgccttacaacctggcagagcttcagagacagcaatctcctggcttgggcaggcctatctggctccagattgcggagtctgcttacaggttcaccctgggctcagttgctggagctgtgggggccactgcggtgtatcccatagatctggtgaagacccggatgcaaaaccagcgtggcaccggctctgtggtcggggagctgatgtacaaaaacagctttgactgttttaagaaagtgttgcgttatgagggcttttttggactctaccgaggtctgataccccagctgataggagttgcaccagaaaaagccattaagctgacagttaatgattttgtccgggacaaatttaccaaaagagatggctccatccccctgcctgcagaaatccttgctggaggttgtgctggtggctcgcaggtcatctttaccaacccgctggagattgtgaagattcgcctgcaggtggcgggagaaatcaccacagggcccagagtcagtgctctgaatgtgcttcaggacctgggactttttgggctatacaagggtgccaaagcgtgtttcctccgagacattcccttctccgcaatctactttcctgtgtatgctcactgcaaactccttctggctgatgagaacggacgtgtgggaggcatcaatctcctggccgctggagccatagcaggtgtgcctgctgcttctctggtgacccctgctgatgttatcaagacaagactgcaagtggctgcccgggctggccagacaacatacagcggggtcatcgactgtttccggaagattctccgggaagaagggccttcggcgttctggaaagggactgcagctcgagtgttccggtcctctcctcagtttggtgtcactctggtcacctatgaacttctgcagcggtggttttacattgattttggaggcctcaaaccttctggctcagacccaacaccgaagtcacgaatcgcagacctccctcctgccaaccccgatcacattggtggctacagacttgccacagccactttcgctggcattgaaaacaagttcggcctttacctccccaagtttaaatctcccagcgtagctgtggctcaacccaaggcagtggcggcggcagcggctcaatgacatggcaactgcagaccaaggcccaggagaatggccagtaccgtgtccagtcagctgcacggtacggtctgtgctggggtcaaccactttctatgcgacctatacatgtattgtttataaagtgatcacatgcccagggagaaccacagtgcagtttcaagctttagtcttatttgttgaaatgttttctgagccttggcatgaattatgtgttctagactctgcttcgcacagcttgtacctacagtgactgtacatattgtacatctttgtacagagacaccttggcaccccatcccaacaaatcacatttatagaaatgtaatgcagttctgagtggcttgaactgtacagaatgttttgaaagtgttttattaagaatcatgtaagaataaatgtactaaagttaaattccttctcctcttggtgacttatggaagtcaagcttcagtgttgaacgtatccaacttcagtttgctttccatcctggaacaggagggtatttgctgataaaagcagagtgagacgatgctcatggcactgagtaagaaatgccctgaaaagttgtatgcccgtggatgccggaggatcagccggtggcttgtgtgtgctgatgagtttccagttgtttgtagcagagtgcaatcttcctgtcaaccggaagcagctgctcatgacacacacacacacacacacacacacacacacacac

SEQ ID NO: 1484 - DNA, 2252 bp, Cricetulus griseus
cagggtcaaaggataattccttaagacacatacctgaagtggattttctgtcaaaggccacattgaaattgcgttgagccaagcttgccaccaagagcccaacagtcaccatgatgctgagcacagagggcagggaggggttcgtggtgaaggtcaggggcctaccctggtcctgctcagctgaggaagtgatgcgcttcttctctgattgcaaaatccaaaatggtacatcaggtgttcgtttcatctacaccagagaaggcagaccaagtggtgaagcatttgtcgaacttgaatctgaagatgaagtaaaattggctttaaagaaagacagagaaaccatgggacacagatatgttgaagtattcaagtccaacagtgttgaaatggattgggtgttaaagcatacaggtccaaatagtcctgatactgccaatgatggttttgtacggcttagaggactcccatttggctgtagcaaggaagaaattgttcagttcttttcagggttggaaattgtgccaaatgggatgacactgccagtggactttcaggggagaagcacaggggaggctttcgtgcagtttgcttcacaggagatagctgaaaaggccttaaagaaacacaaggaaagaatagggcacaggtacattgaaatcttcaagagtagcagagctgaagtccgaactcactatgatccccctcgaaagcttatgactatgcagcgcccgggtccttatgataggccaggggctggaagagggtataatagcattggtagaggagctggatttgaaagaatgaggcggggtgcctatggtggaggctatggaggctatgatgactatggaggctataatgacgggtatggctttgggtctgatagatttgggagagacctaaactactgtttctcaggaatgtctgatcatagatatggagatggtgggtccagtttccagagcaccacagggcactgtgtacacatgagggggttaccatacagagccactgagaatgatatttacaattttttctcacctcttaatcccatgagagtacacattgaaataggacccgatggcagagttacaggtgaggcagatgtcgagtttgctactcatgaagatgctgtggcagctatggcaaaagataaagctaatatgcagcatagatatgtggagctcttcttgaattctactgcagggacaagtggaggagcttacgatcatagctacgtagaactgtttttgaattctacagcaggggcaagcggtggtgcttatggcagccagatgatgggagggatgggtttatctaaccagtctagttatggaggtcctgccagccagcagctgagtggtggttatggtggtggttatggtggtcagagcagtatgagtggatatgaccaagttcttcaggaaaactcaagtgactatcagtcaaaccttgcttagggaaagaaggaacaccaaacagctccaggaataaaagctgtgcatttataggaactggatagagtaggaaggataccaagcatatccagtatgattggtaaatgggaaataaagttgcttctgatcactatcggtcagctttctttctttttttttcttcttttttttttatttttaagaacaaaatttaagtttaacagttttgcattacaagcttgtgattcatgcttactgtaaagtaaaagttaagattgttttcaaactttaagctcagcagttttgaacactgaaatattcatctaggatgtaataacaagttcagtattgaccataactgttaaatccactttcagctttcctcaagttagttatgttgtaggagtgtacttaagcagtaagcatatttaggtttaaagcagtttcacttacgttaaatgttgctcttataccacaatacatcaaagccttcagatgcatgttgagaaacatgcttttctgtaaaaatcaaatataggagctgtgtctatgattcaaagtgacaacatttggcatgtttgttaattctagctttttggtttaatattctgtaaggcacgtgagtgtacactttcacttttttttttaaagatctgggataattttgagatgtagtaccaatactttaggagtttggtcatgttgtttgtatggaattctgaggctttgatttaaatcttaccttgtattgtgaattccatttagatgtattgtactaagtgaaacttgttaaataaatcttccttttaaaaactg

SEQ ID NO: 1485 - DNA, 2251 bp, Cricetulus griseus
agaccatcaccctggaggtcgagcccagtgacaccatcgagaatgtcaaggcaaagatccaggacaaggagggcatcccccctgaccagcagaggttgatctttgccggcaagcagctggaagatggccgcaccctgtccgactacaacatccagaaggagtccaccctgcacctggtcctccgcctcaggggtggcatgcagatctttgtgaagaccctgacaggcaagaccatcaccctggaggtcgagcccagtgacaccatcgagaatgtcaaggcaaagatccaggacaaggagggcatcccccctgaccagcagaggttgatctttgccggcaagcagctggaagatggccgcaccctgtccgactacaacatccagaaggagtccaccctgcacctggtcctccgcctcaggggtgggatgcagatctttgtgaagaccctgacaggcaagaccatcaccctggaggtcgagcccagtgacaccatcgagaatgtcaaggcaaagatccaggacaaggagggcatcccccctgaccagcagaggttgatctttgccggcaagcagctggaagatggccgcaccctgtccgactacaacatccagaaggagtccaccctgcacctggtcctccgcctcaggggtggcatgcagatctttgtgaagaccctgacaggcaagaccatcaccctggaggtcgagcccagtgacaccatcgagaatgtcaaggcaaagatccaggacaaggagggcatcccccctgaccagcagaggttgatctttgccggcaagcagctggaagatggccgcaccctgtccgactacaacatccagaaggagtccaccctgtcctccgcctcaggggtgggatgcagatctttgtgaagaccctgacaggcaaaaccatcaccctggaggtcgagcccagtgacaccatcgagaatgtcaaggcaaagatccaggacaaggagggcatcccccctgaccagcagaggttgatctttgccggcaagcagctggaagatggccgcaccctgtccgactacaacatccagaaggagtccaccctgcacctggtcctccgcctcaggggtgggatgcagatctttgtgaagaccctgacaggcaagaccatcaccctggaggtcgagcccagtgacaccatcgagaatgtcaaggcaaagatccaggacaaggagggcatcccccctgaccagcagaggttgatctttgccggcaagcagctggaagatggccgcaccctgtccgactacaacatccagaaggagtccaccctgcacctggtcctccgcctcaggggtggcatgcagatctttgtgaagaccctgacaggcaagaccatcaccctggaggtcgagcccagtgacaccatcgagaatgtcaaggcaaagatccaggacaaggagggcatcccccctgaccagcagaggttgatctttgccggcaagcagctggaagatggccgcaccctgtccgactacaacatccagaaggagtccaccctgcacctggtcctccgcctcaggggtgggatgcagatctttgtgaagaccctgacaggcaagaccatcaccctggaggtcgagcccagtgacaccatcgagaatgtcaaggcaaagatccaggacaaggagggcatcccccctgaccagcagaggttgatctttgccggcaagcagctggaagatggccgcaccctgtccgactacaacatccagaaggagtccaccctgcacctggtcctccgcctcaggggtggatgcagatctttgtgaagaccctgacaggcaagaccatcaccctggaggtcgagcccagtgacaccatcgagaatgtcaaggcaaagatccaggacaaggagggcatcccccctgaccagcagaggttgatctttgccggcaagcagctggaagatggccgcaccctgtccgactacaacatccagaaggagtccaccctgcacctggtcctccgcctcaggggtgggatgcagatctttgtgaagaccctgacaggcaagaccatcaccctggaggttgagcccagtaacaccatcaagaaaagcaaacaggaagatggacgcacctttctcactacactgtctagaaagagcacaccttgtgcttgttcttgggcttgaggggaggtgttttaatttaccccatcttttaagttgttaacaagtttcattgcactttgaataaagttcttgcattaccaaaaaa

SEQ ID NO: 1486 - DNA, 2251 bp, Cricetulus griseus
cagctagcagtcgccactatgttgacaggctatttgaccctgatccccagaaagttctccaaggtgtcatagacatgaaaaatgctgtaattggaaacaataaacaaaaagccaacctcattgttttaggagctgttccaagattattgtatttgcttcaacaagaaacctcaagcacagagctgaaaactgaatgtgccgtggtgttagggagtcttgcgatgggcacagaaaacaatgtcaagtctcttctagactgccatattatccctgccttactacaaggactgctatccccagacctgaagttcattgaagcctgccgtttaaccatggggcagtacagaacattgctcacctactaacctcaccctcttacaaagttcgaatgcaagcactgaaatgcttctcagttttagcttttgaaaatccccaggtatcgatgacccttgtaaatgttttggttgatggggaattgttaccacagatatttgtgaagatgttacaaagggataagcctattgagatgcaacttacgtcagcaaaatgtttaacttacatgtgcagagctggagccattcgtacagatgacagctgcatttgtattaaaaactttgccttgtctgttcgaatgtgcagtaaagaaagattactagaggagagagttgaagctatgcctctcttggagcaaatgaatgaagacatccggaagaagatcattgagactgaaatatgatggaccggattgtgactggcttgtctgagtctagtgtcaaggtgcggttagctgctgtcagatgtttgcacagtttatccagatctgtacagcagcttcgaaccagtttccaggatcatgcggtgtggaaacctttaatgaaggttttacaaaatgcacccgatgaaatcctagtagtagcgtcttccatgttatgtaaccttcttcttgaattttctccaagtaaagagccaattttggaatcaggagctgtagagctgctttgtggattgacacagagtgaaaaccctgctctacgagtgaatgggatttgggctttaatgaatatggcatttcaggctgaacaaaaaataaaagcagatattttacgaagcttgagtactgaacagctcttccggttattgtcagattccgatttgaatgtgctgatgaagacattgggacttcttagaaatctcctctccactcggcctcatatagataaaataatgagtactcacggaaagcagattatgcaagctgtcactctgatactggaaggggagcatagcattgaagttaaagagcagacactgtgcatcctagccaacatagcagatgggacaacagcaaaagatcttattatgaccaatgatgatatcctgcagaaaatcaaatattatatgggtcattctcatgtcaaactgcagcttgccgctatgttttgtatatcaaacctcatatggaatgaagaggaaggttcccaggaacgccaggataagttacgagacatgggcattgtagatattctacacaaactgagtcagtcgccagactcaaacctttgtgacaaggcaaagacggcgttgcagcagtacctggcatgatgggagaaccccgggcacctgcaagcaccccacacctttgtttaaggaagtacaggagctagcctcatttgactccttctatttgcacacgtcaccttggactgcagggagctgttttacaaagcagtttagtaggcttagatctcaaattcatcttgagagcaattttttgaggtagtaatttcctcagaggattattgtgttttgttttgttttgtttctgagctacctggactctttattagaacaatcaatcattttcctttggacctacaattttttgcctatgctgcagccactttgtgagcaagaatggagtgtgtgtgtgtgtgtgtgtgtgtgtgtgtgtgtgtgtgtgtgtgtgtgcgcacacaaaagagtgtgcacgcatgagagttagaatgaatggctgtgtgggtgagggatacctcagatttttccttttttattttgtgtgaaaatctcttttctacagattttccagggtttaagcattgcttgctgtaaaaaaaactttactgaattatatacagtttgaatgaaatgttattttaaaagcaaaacaattgtttagtgttccataaaagttatgttgaattttggtcagatgaatatttgtaagtaaaaaatatatgcatttctgaacctc

SEQ ID NO: 1487 - DNA, 2250 bp, Cricetulus griseus
  modified_base (1442)..(1442): a, c, t, g, unknown or other
tgcagctgaacctgaaggagtacaatctggtctaactgtgcctcccagaaaccattcttcccttccctgtgggctgttgaagataaccaagaaggactgtgtttctgtggaaaacaatttgcataatactaatttattgccgttctggactctgtgagagtgtccacagagctgtagtaaatattatgattttatttaaactattcagaggaaacagaatgctgaagtacagtcccagcacatttcctctctctctctctctctctctctctctctctctctctctctctctctctctcccaatctttccttaattaacagactgcctgtaggttatagtgcaattatgaatgttctgatcgttgtacatacatctctcttgatattgcagcatccatactggctttgtaatcattaattttttggcaggttgaatgtgctgtatcgatatgtatctatgtaattgtattgtatgtcttgtagctaattcacattttgaataatgttattttatttacttttttaagagaggagaatgtaaatttgtcagtttatttctgactagggatatttttttccacttagaaaagaagaaaaaaaaaaaaacccttactatctatcgtacagagcggtactagcattgtgctgtctaaaatcatttgcacattcctgagtagaggtgtgctgacctaagacccaaaggtaatttcatagcaaatacacaacatccgtcggagcttttatacaaacacagagaccaactttgtagaccttttgccatttgacctggggttggaatatgagcttttatacgattcatattcttatttggcaaatgcacagtttagcattacctctctggtggcctttattagaaaggcagttttagaagctattgtgatccactaaggagatgttttatcagctagcaaccactgcttgcctgaaagggcaaccttaaatttggtgcagacaaaaaacaaaaaaacaaaaaaaacaaaaacaaaaaaaaaaaaaaaaaaacaaaaaaaaaaaaaaaaaaaagttaaaagaaaaaagtaacatttgatggcctacagtgtatagaaaaaaacctcatcacaggatcataagtgttgacagtcctaggggaccatgctaatctatttaacagagccgtagtagatgtcgttgagtcatcctgatctcaagctcagagccgctgagcaaagcagggaaaggtttgtctttgtgaattggagatggaacttgctatgcagaattgaagtttgtgacttcactgctcatcctagggtgcatgacagaatcccttcttttaagaaaggaaaacattgatcaccctagccggagtgatgcctagacacataattgtatccacactagtcaatgaagctaaaaataatttctgttgttgtttcttgtttgggtttattgaaggggtnaggggcgggaagggcttctcagttttgtacaaaaacaagtttactcatgctctctcttctattgtgattgcaaggcttgtggtgagttttatggtgacttgggcatgtcttattcagaagcaaaacacagaacacagaaaacctttcctcaccagaccaagtcaagcacccatctcatgagtcactcatcacatcacagtgtgccgtttacagatgatgtcaccccacccacggagaattcctatttgtaaatggagggttatattatgccttacagagcttaattcagaagtctgtgcctcatatctgaaataaagggaaaaaacagacccacacaaaagtcagtaagtcccgtagaacctgttgggttgtttccttaggaagagctctgttgagtgtcctgagtagctggcaaattcttcttaggagcctgcatatgtcgtttactggcaggtggcatccacaggcgacatgtaaagaacacctggaacatgggggcttgagggttttgtttttgttttgtttaatttagattacattagcaggcctaatagttttaaaaggtaattcagccaaagggcaatttactttttgtacttcagacttctattgattgtcaagttgtacgaattgtaatttaaaaatttatactgccacatgattgtaaattttagttgtcttaagtcggaattggtgaaaagctgtttatgctggatttgggtcaaaatgacttgattatttgaaaaactaaaaaaaaaataataatgggaagaaagggctgcattataagatattgcaagactcagat

SEQ ID NO: 1488 - DNA, 2250 bp, Cricetulus griseus
ctggcgaatgggtcctagagattgaaaataccagcgaagccaacaactatgggacgctgaccaagttcactcttgtgctatatggcacagcctctgaggggctctctacacctcctgaaagcagcggctgcaaaaccctcacgtccagccaggcctgtgtggtgtgcgaggaaggcttctcactgcaccagaaaagctgtgtccagcactgcccaccaggcttcacaccccaagtcctcgatacacactacagcactgagaatgatgtggagatcatccgcgccagcgtctgcactccctgtcatgcctcatgtgccacctgccagggcccagctcccacagactgcctcagctgccccagccatgcctccctggaccctgtggagcaaacctgctcccgacaaagccagagcagccgagagtctcggcctcagcagcagcctcctgcactgcatccagaggtggaggtggagccccggctgcaggctggactgctgccctctcatctgcctgaggtggtggccggcctcagctgcgttttcattgtgctggtctttggcactgtcttcctggtcttgcagctgcgctcaggctttagcttccggggagtgaaggtgtacaccatggaccgtggcctcgtttcctacaaggggctgccccctgaagcctggcaagaggagtgcccatctgactcagaagaggatgagggccggggcgagaggaccgcctttatcaaagaccagagcgccctttgacgagcccactgcccaccccatcaatttgatcccttcctcgggcactttttaattcaccaaagtatttttttatcttgggactaggtttggaccctagttgggagggggaggtaagaggggcagacactgcttcctaccccacccttgggcctacctgttcgcctgaggtggggccgcaggagcctcacccctgccacccctccacgtggagaaaggagtcaaatctttagggcagcttccaaggcccagctggagttcctgcagagtgaagaggggcagcctttctctgggtccttgaccaggctgcagccctgcccctccctgcccctcagaaagcaataatggtccccatccaggcaacagggaggctggccaggaggtacttgaagaaggtggccacctctccaagggcttttgcatcccctgaccctctggctcatggatgagcctccgcaaaagctgcggttgtaggaagggaccaaagcaaagcaggcactttccagcgtgcccatacttacatgccctcagcctgcctctgcactccaggcctccagctggtagccaggctgagctaggctggcacgggccaagctaaagctctgggggccttatgctggtgtcctgaccatcctctatggcaccctcgccccctgccagggccctgttttctgagcccggggctgcctgggctgttggcactcacagtaccggagcccctgggtgggtggtgggaagggacggtggcccaaccggctcctcctgcctcccacccgatgctgctttcccctgtggggatctcaggagctgtttgaggatatattttcactttgtgattatttcactttagatgctgatttttttttttttttttttttgtatttttaaagggggtagcagctggaccattcacctcctcacgcccatgcccaccctgcccttcccatggctgcccagccctgaggtatagggaataactaagccccatgtcctgaagaggcaggctggcaggtgggctctaggaaagggggtcatggtaggagggtagactgacatctgtgtttcaaatggggttgtgccaagggcttatgggtcgctggctctccagtgccaggggtgggcaggtggcagcaccaagccctttctaacactgtgccctggtggagaaagcattgcctatgataccccccaagccctcttctgatgtgccttttgcacccctcccattaggacaatcagtcccctcccacctgggagccccggtttttcttttccccagcccttcctggtacccagcctacttgcccaggggtgtccttcctctcctgcctacccctcgtggccatcctggctggttttgtaagatactgggctggtgcacagtgattttttttttccttgtaatttaaatgggcctggcattgttggttctatttaatggacacaagataatgttagaggttttaaagtgattaaacgtgcagactatgcaaaccaa

SEQ ID NO: 1489 - DNA, 2250 bp, Cricetulus griseus
cccaggagttaagatcactgtttgaaaataccctcaaagagaagcctccaagacagactgctgccaatgaccgtggtgacaatggccagcgccagggtgcaagacctcatcgggctcatctgttggcagtataccagcgaaggacgggagccaaagctcaatgacaacgtcagtgcctactgcctgcatattgctgaggatgatggggaggtagacacagatttcccaccgctggattccaatgagcccattcataagtttggcttcagtactttggccctggttgaaaagtattcatctcctggtctgacatccaaagaatcactctttgttcgaataaatgctgctcatggattctcccttatccaggtggacaacacgaaggtcaccatgaaggagattctgctaaaggcagtgaagcgaagaaaaggatcccaaaaaatttcaggccctcagtaccgcctggagaagcagagtgagcctaacatcgcagtggacctggagagcacactggagagccagaacgcctgggagttctgcctggtccgagagaacagttcaagggcagacggagtttttgaggaagactcacaaattgacatcgctacagtacaggatatgctgagcagccaccattataagtcattcaaagtcagcatgatccacagacttcggttcacaactgatgtgcagttaggtatctccggagacaaagtagagatagaccctgttacgaatcagaaagccagcactaagttttggattaagcagaagcccatctcaatcgattctgacctgctctgtgcttgtgaccttgctgaggaaaagagccccagtcatgcggtatttaaactcacgtatctaagtggtcatgactataagcacctatacttcgagtccgatgcagccacagtcagtgaaatcgtgctcaaggtcaactatatcctggagtcacgagcgagcactgcccgggctgactattttgctcaaaaacaaagaaaactgaacagacgtacaagcttcagcttccagaaggagaagaaatcaggacaacagtgacactggcctccaatctgttgctgcagcccagcttgcctgcagggccaagtggccccagagtccaccttcattgtgcagtgcctgggctcacaggcatagtgctgctgggccctaggggagggtttagaagtaggggatgccattggactgaaacctggcaatggctttaagtagcaatgcccaagagccagaccacctcctggaggagccacatgctgcccagccatgctcactgcctggcagtcccactaagggtgtatatagccatgccagacatctccttgcaacttgatcaaatttcttaaagcaaacaaagaacaaaagtgtacatttcttttttttccttttaataaacaggtgtactctttatcatagttggtatggtggaccgtttttgggggcggaggattaattatattatcttctttaaaatctgttcctgtattgaacaggcagattgcaaaaactatggttggagcgctcagaagcaatgtttagggcttagccagtagttaactgtgccatttgtttaaatgagtacatttgctttgagaatagcatcttatggaagttaggaatgaggactgtgcatgcatgcatgcatgcatgcgtgcgtgcgtgcgtgtgtgcgtgcgtgctgctcctgctgctgctgctgctgctgctgctgctgctgctgctgctgctgctgctgctgctgctgctgctgctacaagctttgggcagaaagggcaaggtacccagcaccttgacaccatgactctgcctacaccagatgtctctgcagacctcaccatggcccctcctgtggcagcatcctttcataccatcctgggccagcaccagggtcgatgtctcaatccacctatgtttagaacattttttaaatcgttgtgtctgagcatctcagagtcaggtgtgtctttgcaaagggtcatctagatgaatgcctcattctggtctgttcagacaacaggaacacccttttctaatgtcttccattcctatctcccccaaaaaagatatattatttgtagcttgctctgtatttgaatttttagcaattttatatttagatatctttgaaatttaaatgactaatttggtcattaaatcttgtcacgtattcaatattaaaatactaaaaataaaagtcataaatacccaaaaaaaaaaaaaaaaaaaaaaaaa

SEQ ID NO: 1490 - DNA, 2250 bp, Cricetulus griseus
cctgaattctttgcttccggaatccgggattgttgctgacatcgaattagaaaacatccttgatcctgacagcttctacgagctcaaaagccaacctctacccctccgctccagcctcccaatatctctgcaggccacaccaaccaccccagctacactctctgcatcgtcttctgcagggggctccaggacccctgccatgtcatcatcatcttcatcgcgggtcttgctgcgtcagcagctgatgcgggcccaggcacaggagcaggagaggcgtgagcgacgggaacaggcagcagctgctcccttccccaatcctgcacctgcctcaccagccatctctgtgattggcgtctctgctggtggccacacactgggtcgtccaccccctgctcaggtgcccagggaggtgctcaaggttcagacacacctggagaaccccacacgctaccacctgcagcaagctcgccggcagcaggtgaaacagtacttgtctaccacacttgggcccaagctggcttcccaggccctcaccccaccaccggggcctgccagtgcccagccacttcctgcccctgaaactgcccatgccactggccctacaggcagtgctcctaacagccccatggcgctgctcaccattggatccagctcagagaaggagaacctaattgaacgacgcaggcgattcaacattaacgataggatcaaagaagactggggcacccctcatcccccaagttccaatgatccggagatgcgctggaacaagggcaccatcctgaaggcatctgtggattacatccgcaaattacaaaaggaacagcaacgctccaaagacctggagagccggcagcgatccctggagcaagccaaccgaagtctgcagctccgaattcaggagctagaactgcaggcccagatccatggtctgccagtacctcctaccccaggactgctctccctagccactagttccgtctctgacagcctcaagccagagcagctggacattgaggaggagggcaggccaagcacgacatcatttcatgtatcagggggacctatccagaatgcacctcagcagcagcctccagcaccaccctcggatgcccttctggacctgcactttcccagcgaccacttgggggacctgggggaccccttccacctggggctagaggacattctgatggaggaggagggggtggtgggaggactgtcagggggtaccctgtcccctctgcgggctgcctctgacccccttctttcttcagtatccccggctgtgtccaaggccagcagccgtcgcagcagcttcagcatggaggaggagtcctgattgggtctcactcctccccttggaccttttttcctaccctcctgtgagactcgccctgtccaaggaaatctgggggaggaggagttgcaattaggccccaaccctgtaataggcaaggaggaggaatcaggtggagccctgccccttttccacccctggccctactcctgcctaggcatgggaaggaggcgggataaggtggtgcccctggccactagggacccttataaacaggtctcccaaggaaaggagatgccaggatgctactccattccttctctgggaattgccagcccagcttttcctggcattggaggaagaaaaaaaatgatggtgtcccatccctggagggttgaagcctatcccttccctatgacccctgccttgctctggcaaggatccgaagtaagagtgtgatccagcccattcccctgacacatccctctataagaaaagcctagcacaggtatttcaggtatagaggaaccccagtacttctctgcaacttgtagaaaatggtaaaggaagggcacatccaggctgttttccagcccaaggggctaaagtctcccgtaaaaggcaggagcttggatgaagggtagcaaaggtatattgtacccctcatttgtttgtgtgattttttttattgagccctcctactcagaaactagatcagccttgacctctgcctcccacacacaattttccatatggggaactacccctgtttcagagccagtccccacaaagccccatctctgccacctacagccaaggtcttcagctttaaattgctggggccatgccccaaggagggtttactgaggggtctgtaggtttgtgactataataaatgctaggcgtgtttgatgcgcttttaactttgaaaaaaaaaaaaaaaaaaaaaa

SEQ ID NO: 1491 - DNA, 2250 bp, Cricetulus griseus
tgcacggatgctcatgtgcatgccgggctgtttgtcgaatctggtgatgggatatttagagaaaacattccttcttgcagtggcaagaattcgggacagttcactgcccttcccccctctgtccctacccttgaccttgtgcctccaggctgagggaggaatactgtatctagatgagggctctggcacagctgaaagttgttggcagggctttggagacaaaagttctgcatctgaccttgttcttcaccgcccccctttgtgtgcatctttgcacctgggctgacaaaaggttaggctgtggagcctgggttggtaggggcttcagtagttggaccctgcctgccaccttcccctccactgggggacacaatggtacctaaagtgttgcctatttctaggacctctctatgcagcagagactctaaattggggctctaattttcttttagaggatgtggacataaacgctgatctagaattcagtttgggtcctgaacggtctcagtgagtctgcgatgccttgagaggaccattccagctctgagcccctgggtgtgacagtgacagatgctccttgactggcttattctgtgtggtgggtgttggtgctgctttatcaggggccaggcatatgggttctagagcacttaccatgacctaaacactttgtttcttttgaagccgtgctctttgcatgggtattattgtcaatacagagtctctgaagatgctaacactagaactcacagtccggtcctctagaacaaatccagactatagcttcttcttttgagggagaaaattattcactccaaatgcatgccctgagccagacctcactgctgcacttgccgaggtgctaacgatgctgctcttcaatgctgacttccttcacagtgctctagaaccggacctgtgatcctgagcactgatcagcttagctagaccacaactgactcgactacttttcacttggtcctagaatgtggcatcatattgtgcttgctagaatgtgggaccaaattggcctcaggtgtttagtccagacttttgctttggagggggttgcacttttagatagtgtctgtggggatgtggtagacggcatgtgcccgttggcctgtttccagtgtgctgatctaagaaactcagagctgtctgtagcaagcagctggagtacgaggctctcacttgctcaggacaaactaggccagtggttttcaaactcctggcagagccctgaagtgttctaggggtggcctcaggagtcctttaggaaatgagggagtggagggctacacaggcttggtgatttgccctcagacagaacagctccccttgtagctgtcttatgtatcggggttcagggtaagattttatttgtggtaagggctctgctgctgcaaagttgaaagaccactgactagaccatcagctccagctggagcctgtactcctccttgttcagggaagattgttctacccttcccacgggacacctacccaagttagcattcctggaagcctttagcagacaggagcagcgggaaccatggtcggttaccagcacgctctgccctccagccttcacacagggtggaaggagaggctgtgttatgagagggtaaagggcatggtctggattcccagaagcttagcagagatgggaccatagtgaggggttgtgacctgttctgcccttcgtgtaagggccagtggaaacccagagagtctcctgtcagggaaaaccagggactgtctttagagccatatagttcctttggattagctctttgccaagagggctgagtatggctcccaatttttaaatccatttcatttttttaatgagggaaatggatataatttttcaaaaactaaataggtggagaggatgttcttgctttccaaagcccaaagggacaaatagggactttgcttataggccaaggaaagagcggaagtggggtaactcagtcctgcatttattaatcccactccccacttatactagggcatacatatactattttacttttttaaatcataaacggcaggagaacagatttggttagtttagaagaagagaaaaagctctataaatataaatatatattcctgtatttttatttaataatttataaatgccaagttcatttgacttttatttttgtgtaatatgtaatggtcatattaaaaataaataaataaagcccagaaatttaatgagaaaaaaaaaaaaaaaaa

SEQ ID NO: 1492 - DNA, 2248 bp, Cricetulus griseus
tgttttttccagcttcttttcgcctccttcctacctggtccgtagagcgcggttatgggtcgcaagaagaagaagcagttgaagccgtggtgctggtattgtaacagagattttgatgatgagaagatccttatacagcaccaaaaagcaaaacatttcaaatgtcatatatgccataagaagttgtacacgggacctgggttagctattcattgcatgcaggtgcataaagaaaccatagatgctgtaccaaatgccatacctgggagaacagacatagagttggaaatatatggcatggaaggtattccagaaaaagatatggatgaaagacggcgacttcttgaacagaaaacacaagagagtcaaaaaaagaagcaacaagatgattctgatgaatatgatgatgatgaatctgcagcctcaacttcctttcagccacagcctgttcaacctcagcaaggttatatcccaccaatggcccagccaggattgcccccagttccaggggcaccaggaatgcctccaggcatacctccattgatgccaggtgttcctccgctgatgccaggcatgcctccagttatgccgggcatgccacctggattgcatcatcagagaaaatacacccagtcattttgcggtgaaaacataatgatgccgatgggtggaatgatgccacctggacctggaataccacctcttatgcctgggatgccaccaggtatgcctcctcctgttccacgtcctggaattcctccaatgactcaagcacaggctgtttcagcaccaggtattcttaatagaccacctgcaccaacagcagcagtacctgctccacagcctccagttactaagcctcttttccccagtgccggacagatggggacacctgtaacaagctcaagtacagcttcatccaattcagaaagtctgtctgcatcttctaaagctctgtttcctagcacagcacaggctcaggcagctgtccaaggacctgttggtacagatttcaagcccttaaatagtactcctgcaacaactacagaacccccaaagcctacattccctgcttatacacagtctacagcttcaaccactagtacaacaaatagtactgcagcaaaaccagcagcttcaattacaagtaagcctgctacacttacaaccaccagtgcaaccagtaagttgatccatccagatgaggatatatcactggaagaaagaagggcacagttacctaaatatcagcgtaatcttcctcggccaggacagactccgattggtaatccaccagttggacctattgggggtatgatgccaccacagccaggcatcccacagcagcaaggaatgagacctccaatgccacctcatggtcagtacggtggtcaccatcaaggcatgccaggttacattcctggtgctatgccaccctatggacagggaccaccaatggtgcccccttaccaaggtgggcctcctcgacctccaatgggaatgagacctcctgttatgtcgcaaggtggccgttactgatcttaacttcatcgagtctaataggtttggagattaaaccttttctcaacttgtgctgtttatatagacaagcttccgtctataaggcttcattgtgactttaacaaacattatcttcccacataccaggaactattggacatttatttgacatgggagaaattatttggaataataaaacaggaacttttcctgaagttgcaatttatactgtatggcttctttttcatgtttcatctaggtttttagaagtgaagtaatagtaaatttggttcgttaaattgtgaaggcgctggaattacatgaacataccatcttaaataaaggcaagttctgtaagcttacattgctatttgtaaagttatgccttcacagcatttccagtgctgttggacttcatgtccccaacctagcttggtgagggctgtaactgtttccaagtacttgtacattggaagtctgaatgtgtaacaatatttaatgtatttagagagttcctcgtgttgcagggtttaagaaatctggcccactgaggtcatgtgacttttctgtactgttaaatttcattgtaataaaacaagagaaaaatttatgcctttttattcataactcagctgtggactagtgactgaaaggtttgtacagatgcatgccacagtagacgtccacataataaaattcagttaccaattaggaaaaaaaaaaaaaa

SEQ ID NO: 1493 - DNA, 2248 bp, Cricetulus griseus
gctggctgcttacttggtgtggacttcctgactggagtgctcactcgtgctgaaggacatgtcgggtctgagccccgggatcaggatgctgagaagaaaaagaaaccccgggacttggcccgaagagatttggcctttgaaattcctgagcgaggcagtcgacctgcttccccagctgccaagctccccacctccccctcgggctccgaggatctctccagtgtgtccagtagccccacctctagccctaagaccaaagtgaccactgtgacctctgcccagaagtccagtcagattgggacctcccagctactgaaaagacatgtgcagaggacagaagctgtgctaacccacaaacaagcccaagttcctattcatcagaccatggaggaggcagagaaagaggaggctgctgggggaaacccgatcaccatggcactgggagcttcagtgggagccaaggaactcactggacttctcaccacagccaagtcaagttcttctgaaggtggagttatagccagcgcagccccacctgtggcttccagcagtgccacgcccaatgccatccacacactgcagagtcgcttggtggccacttctcctggcagctcccttccaggggccacttcagccagcagcctcctccaaggcctcagcttcagcttacatgatattagcagcaagacctctggcctcccaggaagtccctccccagggccagctccacaggccactggtgtgaaattgccaactcccatgcagagcctgggtgccattaccacaggcacgagcaccattgtccgtaccattcctgtggccaccacactctcctccttgggtgccactcctggtgggaagcccaactgccatccaccagctgctgaccaatgggggtctcgctaagttggcaagcagtctacctggcttggctcagatttctaaccaagcatcaggcttaaaagtccccaccaccattactctgacactccgtggccagccaagcagaatcaccactctaagccctataggctcaggagcaacaccatccgaggagcccgcttcccagatgctgccctctaactcacagcgcctgcctccagcaccctgaatgtgccagcgatatgtcctatccctgagagtcctctttggtgcctaatgatgaagcagattgatcagccaccatgctctctctgctgttctaggaagcgtggggcagtaggacagtgaaggctgtgcttcagagttcatttcctttccttcgagcttgtctctctgcttagaagtaggaaggttgtagtgactactgtgtgaggctctggtgccagcctgaaccttgtagatcatggtccctggtgatatgggcacggaaggggagctgagcctctcatttcctatgacactgtgttccagagcatgctcctttccttttctatatgtagaaagtttccatcaagatgagaaataaagcagctcaatgtgactttgttcctggggccatataaacagctacaccaaagcctctcacttgtaatctaagtggaacatgtagtgttgaggagtctcaggcaagtgaggtcagagatgtgtgataggagtagagagtggtctccatcctccacacccttgccttggctgtggagctgcatggacagagcttcagagtgggctgtattctgaaattcagaaggtgttcggtgaagttgagaaggtatgaaatctggaagaagcctgcagtgctgaggcttcgataactttatagttcagagcatataaccaccaaaagagaggataagactgggctctgaaacttggagggttatttaggttggcagagagccctgaacaaccctttgtgacttaggagaacagcttgaactacactggaggggctgctcctgaaagatgctgcccctgtgttctggaaccaaagaaaacgtgtatcctgctttggtggtggatctatgtacatcccatgggtgacttctgaggcatggcctatataccttgaagaactgcaaaactgaggaaggggagctacaactgatcttcaccttgggggactgacccgacaagaaagtggctggagtctgtagatcacattcctcagatcccatctcaaactacataacttggaatgtggaaaggatgctttaccctacctatcttgtggcagacttgagggcatagcctcagaaggtaatactcttatggagtatgtagacggatcaggaaggctttaaattct

SEQ ID NO: 1494 - DNA, 2247 bp, Cricetulus griseus
ggagacgcgcgggtccgcggcttgagaagctgctgtcgccgccatgccgatgaagggtagcttccctatccgccgcacgctgcagtacttgagccgcggggacgtgatattcaaggactcggtgaaggtcatgaccgtgaactacaacacgcacggggagctgggcgaaggcgccaggaaattcgtgtttttcaacatccctcagatccagtataagaacccttgggtgcagatcatgctgtttaagaacatgacgccatcacccttcctgcggttctatctagattctggggagcaggtgctggtagacgtggagaccaagagtaataaagagatcatggagcacataaagaaaattctgggcaagaaagaagagaccctcagggaggaggagctggagaagcagcagcgatctcatccagccaactttggtccccgcaagtactgcttgcgggagtgcatgtgcgaagtggaaggtcaggtgccctgccctgccctggcgcctttacccaaggagatgacagggaagtacaaagctgctctgaaagccagcacttaggtctgagcaatatcatttgggatggactgatggaatttgatggaattctctgcaatggaaaggcctgcttgcatgcccatttaaaggacatggggagaaggatagggttggccagctgctgaacagatgtcaataaaaagttttaagttcttcctaatatatatgtaatagtctttaatttactttaatagtataaacctcatgtaggtagtattaagccacaacaacaaagccacattgaacagattttagtaaaaggcgctcataaccatgcacagcaactctctacatagacacaacgatgcagattctccttcaggactgaagacattgattagatagaaaattcaatttaaaaagaacatgcgggttttaaatgccaccacatagctcatttacacagggagaaaagctacaaaatggtagctctccgcaggttttaaacctggaatcaaaaggtaatggcatccatggtgttttctatagtgtgaagggcagagttatacaaccggtcccaagaaaattccacactgaactttcctttagtagatgtcctttaaaaagggggaggaggggagcagataatgcgctgtatcttaacagagaaatccaaactacatacaaactagttggtactatgaaaaatgtgcagcttctcagttataaaactagttgaacactgatttacaagttaattgggaaaacagactagaaaaatattccagcacttgagttgtgtgtgcattggcatctgtgaatgagcaggctgttgggatgacaactgatgatggtactttcccaaagaaaggccatttatataatgttgcagtctataccaaacactaaaacttaagagtgacataatgttgagcattttccctacattccatgtataaataccaaaattattgaaaattaactgaaagtgcgtattgctgagcattagaaatatctggtgttcttctccttcctaagccacttttaaactcactctcaggttgctgctaagacaatagcccccaaagaaaatggaaggattcatttagcaactgccaagcttccttgtgttatacttggaaagtataactttgaatagtgtgattgtcacaagaggcaatgacacaggcaagattgaacaaccatgagggggtgagggcagggacaaaaagtgggaagctgaagccaaatgacccatgtctcaccaaaggcactgaggactatagtcttaacaattatttcttaaaacaccccaggcagctccctgttctaggaaaatgaattggtaagaaattcaccagtacatccctgtcaaaggaaccttgcaatacccacatccattcacataagcaacgctagcatcaactcttaacatagaagtttggatacatggctacatgtctgtatacataatgtacacctatatacacaacattatatacactgtacaaagataatatgaacacatgtacattcattcagtcatctaggcctataattctgggcatacacagtgcagctaaagggacagggtgtgcacagaaagtgcacactgatgggaggcactcaatgaggaagtccagaacctagtacaaaacacctaggccaaccccatctcattttggagttggttttagaaattgacatcagagttaagacttttgcaaagagccacataatctagagactgg

SEQ ID NO: 1495 - DNA, 2247 bp, Cricetulus griseus
cgcggtcttcgacgccatgttcaacggcggcatggccacgacgtcggccgagatcgagctgccggacgtggagcccgccgccttcctggcgctgctgagatttttgtattcagatgaagttcaaattgggccagaaacagttatgaccactctttatactgctaagaaatatgcagtccctgccctggaagcacactgtgtagaatttctcaccaaacatcttagggcagataatgcctttatgttgcttactcaggcgcggttatttgatgaacctcagctggctagtctttgtctagacacgatagacaaaagcacaatggatgcaataagtgcagaagggtttactgatattgacatagatacactctgtgcagttctagaaagagacacattaagtattcgagaaagtcgactttttggagctattgtacgttgggcagaagcagaatgtcagagacaacaattgcctgtgacgtttggaaacaaacagaaagttctaggaaaagccctttccttaatacggttcccactgatgacaattgaggaattcgcagcaggtcctgctcagtctggaattttgtcagatcgtgaagtggtaaacctcttccttcattttaccgtcaatcctaaaccgagagtagaatacattgatcgaccacgctgctgcctcagaggaaaggagtgctgcatcaatagattccagcaagtagagagccgctggggttatagtggcacgagtgatcgaatcaggttcacagttaacagaagaatctctgtagttggatttggtttgtatggatctattcatgggcccacggattatcaagtgaatatacagatcattgaatatgagaaaaaacaaacgttgggacaaaatgataccggatttagttgtgacgggactgctaacacattcagggtcatgttcaaagaacctatagagatcctgcccaatgtatgttacacagcatgcgcaacactcaagggtccagattctcactatggcacaaaaggactgaagaaagtagtgcatgagacccctgctgcaagcaagactgttttcttatttttcagctcccctggcaataataatggcacttcaatagaagatggacaaataccagagataatattttatacataatctagtgttaacgaccattcactctaatctcgaaaacataaacaactggccacaaatagtttgagtgtcatgagtatttataattacagaataagaaacattttagtttcttagaagtaaaaaaagtttatttaaatgtctgcatgattcaaagcaaagagaacccagtttgtgtgaaaacctcagtctttctgctttgtcttgtatgattccataggtctgctgacttgtgatctttcaatagtttgggaattgaaagatttttgtcatatgtagcagatatgggtgtttgcgcttttttaaaaaacttttgtttctactactttgaaagataggtgaaatgggtcagtattcctacagaactctttttaactcaaataactaatttcagaaaattaagaaaactaactttgtatttggaattttgaaatatatggttgttagcatttggaataatgctaagagtcgctcggaaggatatctggcagcgtgatgattctacatttttatataaagctgattttaaaatacaagtgagataacattttccccttgaaaatgatagtcttataaaaaaaataaacctgtataaattaaacttaaggggtatcagtctatcagatagttgtggaaaatcgttaaaaattcttcaaagtatcaacttaagaatttttttctaaataggatataaaggatttcatcaaaagtaattgtattttcaagagggcaagagaggtgaagtgttggtggccagggtctcttgaagttgctgaagaaaggaaattgttttttgtttactctggtaccatgatcttatgttgtcagcctcagttagctggaatgcccactgatgtgtattctgctaaaccgaagttcagcaaagactgtagtaaccattccttaacaagtattgcatgccagaggtaagttagtgcttttgactttgggccatccatatgccttgccttttgctgagcaactgtaatggaatgtagtcactggaaggtacaagaaacggaaccactcactgacattggggcatcacctggaatacctttaaaaattaaaatttattccttttaaagttaaaaaaaaaaaaa

SEQ ID NO: 1496 - DNA, 2247 bp, Cricetulus griseus
cagcaagacgctctgaggtgttcaagagaaggggacgtactctcctcagaccccaccgccgaggctcgcgggcatcttcccggagactgctccgcaagctcgagagagctggggcgtggcgccaagactttcaaaaaccccgcacaagccgagagcagaatgtgtcgcttgcttcttgcgcgcaagcggagtcgcgcccgccttcctcagcccgggcgcaccgtccgctttcgtctctagcgccctcccgggccccgggagaacaatgccagtcctctccgcgcgcaggaagaggctggcgagcacggccgggccgcggcggcggagtggacccagcctggcagtccggtgggttcctccccagagcctgcgagttggggctagagcggccaggcctctgggccgggtcgagcccgggccgccgacggctgcgtcacgcgaaggggcggtgctgccacgggcggaggccggagccggaagcggaagaggcgctcggagtggggagtggggcctagccgcagccggagcctgggagacgatgcatcactgtaagcgataccgttccccagagccagacccatacctgagctaccgctggaagaggaggcggtcttaccagtcgggaggcatgaaggtcgactacgatacccatcccgaagggagcctcccccaaggagatcacggtccagaagccatgaccgcctaccctaccctcggagataccgggaacaccgtgacagcgatacgtataggtgtgaagagcggagcccatcctttggagaggactgctatgggtcttcacgttctcgacatcggagacggtcacgagagagagggccataccgtacccgcaagcatgcccaccactgtcacaaacgccgtaccaggtcttgtagcagcgcctcctcgagaagccaacagagcagtaagcgcagcagccggagtgtggaagatgacaaggagggccacctggtgtgccggatcggcgattggctccaagagcgatatgagatcgtggggaacctgggtgaaggcacctttggcaaggtggtggagtgcttggaccatgccagagggaagtcacaggttgccctgaagatcatccgtaatgtgggcaagtaccgggaagctgcccgtctagaaattaatgttctcaagaaaatcaaggagaaggacaaagagaataagttcctgtgtgtcctgatgtctgactggttcaacttccatggtcatatgtgcatcgcctttgagctcctgggcaagaacacctttgagttcctgaaggagaacaacttccagccttaccccctaccacatgtccggcacatggcctaccagctctgccatgctcttagatttctacatgagaaccagctgacccacacagacttgaagccagagaacatcttgtttgtgaattctgagtttgaaaccctctacaatgagcacaagagctgcgaggagaagtcagtgaagaataccagcatccgagtggcagactttggcagtgccacatttgaccatgaacatcacaccaccattgtggccacccgtcactatcgcccacctgaggtgatccttgagctgggctgggcacagccctgtgatgtctggagtatcggctgcattctcttcgagtactaccgtggctttacactcttccagacccatgaaaacagagaacacttggttatgatggagaagatcctagggcccatcccatcacacatgattcaccgtaccaggaagcagaaatatttctacaaagggggcctggtttgggatgaaaacagctctgatgggcggtatgtgaaggagaactgcaaacctctgaagagttacatgctccaggactccctggagcatgtgcagctgtttgacctgatgaggaggatgttagagttcgaccctgctcagcgcatcacactggcagaagccttgctgcatcccttctttgctggcctgacccccgaggagcggtccttccacagcagccgtaaccccagcagatgacaggtgcaggccagcacacaaggagttggagagctggactgggctgctggccccttttctccagcctctcccactggcctcagagccagagccaccgatgaacagtgcaatgtgaaggaaggcaggagcctgcaagggacgggggaatgtggtgcccagctgccagaaagcacagattggacccaagctatttatatgttgtaaagttataataaagtgtttcttactgtttgt

SEQ ID NO: 1497 - DNA, 2246 bp, Cricetulus griseus
tttgactttgagaacggtgcaacccgctcattcccaggaaagggcaaggacgacccgactgggccatatttgggagagttacggagcacaacgagactattctgttcaaagagaaattcctcgactggacagaactgaagagacctactgagaagaattctggggaagctgtccagcagaaggattattctagggctgacatcaaaccctatgatgtgacacggatggtggcaacgccccagatgacagccagcaccatcctagatggggtgaacgttggccgtggctatggcctggtggaaggagatgacaggagacagattgagattgccactgtctctgtagatgtgtggcatattctggaattcgattacagccggctccccaggcagagcatcgggcagttccatgagggggatgcctatgtggtcaagtggaagtacatggcaagcacagcagtgggaagccgacaaaaaggggagaacacccagtgagagtggctggcaaagagaaatgtgtctatttcttctggcaaggccggcactcaactgtgagtgagaagggaacatcggctctgatgacggtggagctggatgaagaaggggggcccaggtccaggttctgcagggaaaggagccccctgttttcttcagtgtttccagggaggtatggtggtgcactctggacgaagggaagaggaagaggaaaatgtgcaaagtgaatggagactgtattgtgtgcgaggagaggtgcccatggaagggaatttgctggaggtggcctgtcactgcagcagcctgaggtccaggacttccatggttgttctgaacataaacaaggccctcatttacctgtggcatggatgcaaagctcagggccacacaaaggaggttggaaggactgctgacaaataaaatacaaggaacagtgtcccctagaagcaaggattgcacagcagcagcaacgtgacaatacatgagtgtgacgaaggatccgaacctctgggattctgggatgctctggggaggaggggacaggaaggcctatgactgcatgcttcaagatcctgggagttttaacttcgcgccccgcctgttcatcctcagcagctcctcgggagacttctcggccactgagttcgtgtaccccgcgcgagcgccctctgccgtcagctccatgcctttcctgcaagaggatctgtacagcgcgccgcagccagcactcttccttgttgacaatcaccacgaggtgtacctctggcaaggctggtggcccactgagaacaagataactggctctgcccgcattcgctgggcctcagaccgaaagagcgccatggagacagtcctgcagtattgccgagggaagaatctcaaaaggccaccccccaagtcttatcttattcatgctgggttagagcccttgacattcaccaacatgtttcccagctgggagcacagagaggacattgctgagatcacagaaatggatactgaagtttccaaccagatcaccctagttgaagatgtcctagccaagctctgtaaaaccatctatccactggcagatctgcttgccaggccactcccagagggagtagaccctctaaaacttgagatttatctcacagatgaagacttcgagtttgcactcgacatgaccagagatgaattcaacgcactgcccacctggaagcaagtgaacctgaagaaagcaaagggcctgttctgaggtcaaaatgacaggcgccaccaagaagaggtcacttgcgatgtcgctagaccagaaaatggatattttgttttttggactggtattttttctgtcgaagaagaaagtattttcgaatcagagtttttccaaacgcttgtccaggagttgagaattttgtaaatgtgtaggagaactcttgggatcgttcttttccgtggttcaggtaaactgagaaacacatctcttccgttcactcagccgagtgctgcctcagtggccactgcaaccctgccctcctgttctagctcggcattaccttttttaaagcaattctctttataaagtgttattttgatagtttgtggattctaaatatatatatatatatttatataaacaccatataaatcaaatatgtatttaacaaagcaatatgcattcattcactttcaagttttttcctttggtgtcaaaacattattacaaggtagacagagtcgcttctgttgagttcggcctgccaccagtctgtc

SEQ ID NO: 1498 - DNA, 2246 bp, Cricetulus griseus
tacttgggtgccaacattgcctctggtgaggaagtagccatcaagctggaatgtgtgaaacaaagcaccgcagctccacattgagagcaagttctacaagatgatgcagggagggagtgggggatcccgtccatcaagtggtgcgggggctgagggtgactacaatgtgatggtcatggagctgctggggcccagtcttgaggacctcttcaacttctgttcccgaaagttcagcctcaagacggtgctgctgctggccgaccagatgatcagccgcatcgagtacatccactccaagaattttatccaccgggatgtaaagcctgataactttctcatgggcctggggaagaaaggcaacttggtctacatcattgacttcggcctggccaagaagtaccgtgatgcccgcacccaccagcatatcccctaccgggaaaacaagaacctgactggcactgcccgctatgcctctatcaacacccacctgggcatcgagcaaagccgtcgagatgacctggagagcttgggctatgtgctgatgtacttcaacctgggctccctgccctggcagggtctcaaagccgccaccaagcgtcagaagtatgagcggatcagtgagaagaagatgtcaacgcccatcgaggtcctctgcaaaggctacccctctgagttctcaacatacctcaacttctgccgctccctgcggttcgatgacaagcccgactactcctacctgcgccagctcttccgaaatctctttcaccggcagggtttctcctacgactacgtcttcgactggaacatgctcaaattcggtgcagcccggaatcccgaggacgtagaccgggagcgacgagaacacgaacgggaagagaggatggggcagttgcgggggtctgcgaccagagccctgccccctggcccacctacgggggctactgccaatcgactccgaagtgcagccgagcctgtggcttctacccctgcctctcgcatccaacaagctggcaatacttctcccagagcgatctcacgggccgaccgggagaggaaggtgagcatgcgcctccacagaggtgcaccggccaatgtctcctcctcagacctcactggacggcaagaggtctcccggatttcagcctcacagacaagcgtgccatttgaccatctcgggaaatgaggagagccaccaccaaccagtgtttgcttagtgtcttcactgcattttctttaataaaaaaaaaattaaaaaaacaacaacccagcacagagtcgacaatggattttgtttctttgatttacttttccaatggcaaaaagacaagattgtctttattactgaggatccctgtcccctcaccttgcccactgctcccaacatgaaggctgccaacactcctctaatgacattgggtcatactccagccccctgttcccaccatcacccaccacatgcagggcagccgatggaggtgcctgaagagcttgcatcagggagtggtttgccagtcacagacaagtcccatgagattttgtgagcctcggatccaaggagacacgcacaactgcagccccttggcagtgacagtggccagcttggtgttgggctttcccagaggtcccctcccctaagcatcctggtccccctttctcccctcccgtcacctctctgcagagaccttgaggaggcggtgacttgtattttccagagcagcaggtggcctgccatccttcctggccaagtttctgttctcgtccccctaaagtcaaggtggggtggacaatgacctccacatccctcagggcatagagtccttgccaccacctgtccccagatgccagtgtgtggcaaccccatctttcttccatacctgatcttaggcaagttcacagagtctgttcccagatggcatcggctctgacttaccatttagttccctggtcctgacagtcacctgtggtcacccctcttcccaggcctgacttctgagtaggaccctgggtcagggttaagtgttgaatttacccttcctggttaacacctgatttttaattttattattattttttttttaattaaagagcaaaactttttattactttgtaatttaaaaaactgaaaaaaaaattactgaagaactttggggggaattttgtacttttttcctgtgtaaatattggacttttttgagctttattgtggttgttaatttgaagtaataaagtagaaaaggacaaagtga

SEQ ID NO: 1499 - DNA, 2245 bp, Cricetulus griseus
tgaatgacctgtctacatcacagattcttccatcaaatgaaagtgttagcccacgtttatcagcaagccctcctaagtcaggcaatctgtggccaggattgacacctccacacaaaaaagctcagcctgcatctccaaagaggaaaaagcagcataagaaatacagaagtgttatttctgacatatttgatggaaccatcatcagttcagtacagtgtctgacgtgtgacagggtgtctgtaaccctcgagacctttcaggacctgtccttgccgattcccggcaaggaagacctggccaggctgcactcctccagccacccaaccatagtcaaagccggctcgtgtggcgaagcgtatgcaccacaagggtggatagctttcttcatggagtacgtgaagagctggttttggggtccagtagtaaccttgcaagattgtcttgctgccttcttcgccagagatgaacttaaaggtgacaatatgtacagttgtgaaaaatgacaaaaagttgaggaatggagtaaagtttgtaaagtacagaagtttcctgagattttgtgcattcaccttaaaagatttcgacatgaactgatgtttccaccaaaatcagcactcatgtgtccttcccgctggaagggctggaccttcagccatttcttgcaaaggatagcccagctcagattgtgacctacgacctgttgtcagtcatttgtcaccatgggactgcaagcagtgggcactacatcgcctactgccgcaacaatttaaataacctgtggtatgaatttgatgaccagagcgtcactgaagtttcagagtccactgtccagaacgcggaggcctacgtccttttctataggaagagcagtgaagaggcacgaaaggagagacgcagggtctcaaatctgatgagcataatggagcccagcctccttcagttttatgtgtctcgacagtggttacacaaatttaagacctttgctgaacctggccctatttcaaataatgactttctctgtgttcatggaggtattcctccacgaaaagctagttatattgaagacttagttttgatgctgccccagaacatttgggataacctctatagcaggtatggagggggccctgctgtcaaccatctctacatttgtcacacttgccagattgaggcagagaagatcgaaaaacgaagaaaaactgaattggagatttttattcggcttaatagagcatttcaagaagaggactctccggccacgttttattgcatcagtatgcagtggtttagagagtgggagagttttgtgaaggatcctccaggtccgatcgacaacactaaaattgcagtcactaaatgtggtaatgtgacgctcaagcaaggagcagactctggtcaaatctcagaagaaacttggaatttcctgcagtccatctatggcggtgggcctgaagtcatcctgcgacccccggttgttcatgtggaccctgatgcagcgcaggcagaggaaaagatccaagtggagacccggtctctgtagttgtgagggcacagagcttgttctgttttgaaaagcaaagggacacttggtgactaggttccctaacctttgctccacaggtagatccaggtatcctccttagcactgtaaatacttctgcttgaaaactttttcattgccctaagccatcataactggccaatctcttcagttctcaaaaaacctaatttaattgtataattttgacatggctttgcatagcaaggagcctatttttaattgagagcagtggccagaaaatggttaatttcctaaagctcaggagacattaggtagggtgttacttcttttgcactgtagcatacaagattgcggtattaaaatttataaaatgtcttttgaatgtaacaggatgtatttagtttgagtggaattcgtcaccagattatcagtaacttattgcttcttataatgtaaaatgttaaactttaattctatagacctaaatggtattcattaatgtcagtaactaaaaaagtcttagttttaggccactttttattttgagagcatgaagtatggaatgtatcaaatgagattgttgataaagctgaaacaacttgcaaaatgatttttaatgaactgcataaagtctttttgaatcatagagtatgcacggctgtttgcttgattatgtgatgtcaaaagcttaactatattgcaagtacaaacatgctaggtgac

SEQ ID NO: 1500 - DNA, 2244 bp, Cricetulus griseus
gcgccgggggatgcgcgggtctgggcgggcagccccggcgcacagccgcggcccgggcgcgcggcgcggggcggaaaagcctgtttatacagactgcacaccgcctggggaataatgcagtaaaggaagtgagcaggctcggcctgactgctccaacttcctgctctcacacacagcagaaggaaagagaaagaaaaaaaggggaaaaatcaggatctcattacaagagcaacagaccgtctgcagacgcctgtcagcatggaaagtcgggggctttcgcccgggtcctcctagaaatctccccaagaagactcccaaacgctcccccacatctgggtatggagagtgcaatcacactgtggcagttcctcttgcacttgttgctggaccagaaacatgagcacctcatctgctggacatccaacgacggcgagttcaagctcctcaaggcggaagaggtggccaagctgtggggtctccgcaagaacaagacaaacatgaactacgacaagctgagcagagccctgagatactattacgacaagaacatcatcaagaaagtgattgggcagaagtttgtgtacaagttcgtctctttcccggatatcctaaaaatggatcctcacgcggtggagatcagtcgggagaacctcctgctgcaggacagcgactgtaaggtgtcccctgaaggccgagaggcccacaagcatggcctgtctgccctcaaaagcacaagccgcaacgaatacatccactcgggcctgtactcgtccttcaccatcaattccctgcagaaccctcctgaggccttcaaggccatcaagacagagaagctggaggaaccatgtgatgacagcccccctgtggaagaagtcaggactgtgatcaggtttgtgaccaataaaaccgacaagcacatcaccagacctgtggtgtccctgccttccacatctgaggccgcggcagcatccgctttcctggcctcatctgtctcagccaagatctcctctttaatgttgccaaatgctgctgccagcgtttcgtctgcatcaccctcctcatctcggtccccatccctgtcccccaactctcccctcccttctgaacacagaagcctcttcctcgaggcagcctgccatgactcggattctctggaacccttaaatctgtcatcgggctccaaatccaagtctccatctcttcccccaaaaggcaaaaaacccaaaggcttggaaatctctgcacctcaactgttgctctccggcagcgacatcggctccatcgccctcaacagtccagccctcccctcaggatccctcactccagccttcttcactgcacagacaccaaatggactgctgctgaccccgagtccgctgctctccagcatacatttctggagcagccttagtcctgttgctcccctgagtcctgccaggctgcaagggccaaacacacttttccagttccccacactgctcaatggtcacatgccggtgccactccccagtttggacagagctccgtccccagtcctgctttcctccagctctcagaaatcatgatgagtgtcggtggtggtggcggcggcagcagcagcaactaaggactcaaaactgatgaagccagtttgtccccatgggctagtttacctgtgtcatgagaaggacattgtgaaaccctgttaatttggtttgcacttttcataacacggataacctagatgtatgttagccttttaaaacaaagattttggctttttatatatatatatatatatatattcagctctatatgaaagtgttttgcattaagtggattttaatgtttttgtttttttatccttttagctctgaagtgttgaacactgacagtgaagaacctttttaatgttttcaatataactaataaggatatgtgaagctttttattgctttaattctgcatatgctgaactctgcttctaaacacactataaccagctgtgccttcctttgcatttagttttatgtacatgatttatgtatttctatattaagggaaagtgtttgaaggacaaaatatcagcaaacagctcttggaagaatgttcttttcacatgtagaaaacatgaaagtgtactcccttcactgaaagaactgccttagacctcttttgacctgaaacccagtaaatgtaatgtccaagaatttttttgtaagaatgaacgaagccatatttagacaataaacattctttaaagaa

SEQ ID NO: 1501 - DNA, 2244 bp, Cricetulus griseus
gccggctctggccgaggaggccgcgaccgaggcgacgggccccagctgcctcgtgcagctgccgggcgaggtgctggagtacatcctgtgcagcggctccctcacggcgctcgacatcggccgcgtgtccagcacctgccgtcggctgcgcgaggtgtgccagagcagcggccaggtgtggaaggagcagttccgggtgaggtggccctccctgatgaagcactacagtcccaccgactacgtcaattggttagaggagtataaagttcggcagaaagctgggttagaagcacggaagattgtagcctccttctccaaacggttcttttcagaacacgttccttgtaatggcttcagtgacattgaaaaccttgaggggccggagatcttctttgaggatgagctggtgtgcatcctaaacatggaaggaaggaaagctttgacctggaaatactacgcaaagaaaattctttattacctgcggcagcagaaaatcctgaacaacctcaaggctttcctgcagcagcctgatgattatgagtcctatcttgaaggtgccgtttacatcgaccagtactgcaaccctctctccgacatcagcctcagagacatccaggcccagatccacagcattgtggagcttgtgtgcaaaaccctccgtggtatcaacagccgccaccccagcctgaccttcagggcaggtgagtcctccatgataatggaaatagaactccagagccaagtgctggacgccatcaactatgtcctatacgaccagctgaagttcaaagggaaccgcatggattactacaatgccttgaacctctacatgcaccaggtgttgacccgcagaacagggatccccatcagcatgtctctgctatacctgaccatcgcccgacagctgggagtcccactggagcctgtcaaacttcccaagccactttctcctgaggtggtgccaaggcgcagaaggggcaaccctggacatcttcgactacatctacatagatgcttttgggaagggcaaacagctgacggtgaaggagtgtgagtacttgattggccagcatgtgacagcggcactatacggcgtggtaaatgtgaagaaggtgctgcagcggatggtgggcaactttctgtcttgtcttgaaggtgcttgatatcctccagcacatccagacccttgaccctgggcagcacggggcagtgggctacctagtgcagcacacactagagcacattgagcgcaagaaggaggaggtaggcgtggaggtgaagctgcgctctgaggagaagcacagagatgtctgctactccattggactcgttatgaagcacaagaggtatggatacaactgtgtgatctatggctgggaccccacctgcatgatgggccatgagtggatccgaaacatgaatgttcacagtctgcctcatggccaccatcagcccttctacaacgtgctggtggaggatggctcctgtagatatgcagcccaagagaacctggaatacaacgtggagcctcaggaaatctctcacccagacactacatcccaaatgcagagctggagattcggtatcctgaggacctggagtttgtgtacgagacggtgcagaacatttacagtgcaaaggaggacactgctgagtagactccggggatgtccacacctttgctgctgctgctgctgctgctactgccttctaggggaacaggattcctgaaggacgagtgctggtccccctggagtcagcacaggacagccacttcaccagcagccttggctgcctccccagtttagatggtgtgtgctcctccggccacagagacagcgttgctctccgctacactagtgaatcagttgaaaggcaccgtgtccagtggcatggcttgtctgcttgtcccgtggtgacagtgtgtgactattctgtctcacactctttcgtcccattactaagcagccacggagcatgctgggagttcccattgttggctttctgctttgatttcctttttcgtagagaaacatcaaagctgagaaagatggtttccctccctgacctgactgtaaatatgtacctagactgtttttaaatgcgtttcttcaccaaggcttcgtttggctgagggagcctgtgtcacccgtgtaagttggtatttgggcactttatatttttctaaaaatgtgttttggatcctgtactctaataaatcataagtttacttttaaaaaattt

SEQ ID NO: 1502 - DNA, 2244 bp, Cricetulus griseus
caaaaggttctccccatcctccattttgctcgggagcccacagcaaacccatcaagtttttggtgagtgttagcaaggagaactccagcgcaagtgaagtttttggattcccctctctcagagtgtccatgtgaagcctgagaacctacgactggctgaggtaatttaagaatcgtttccatcgtgttttcttaccctcccactcactggacgctgtgtccccaactgacatgctcctctgctttgagctgctctccccagaattggctaaggagcgggtagtggtgctggaggtgcagcagcgcccccaggtacccagcatccctatctccaagtgtgcagcctgccagcggaagcagcaatcagaagatgaaaaactgaagcgttgtacccgttgctaccgtgtgggctactgcaaccagttctgccagaaaacccattggcctgaccacaaaggcctctgccgccctgagaacattggctaccccttcctggtcagtgttcctgcctcacgcctcacttactcccgtcttgcccagctactagaaggctatgcccgatactccgtgagtgtattccagccacccttccagcctggccgtatggccttggaatcacagagccctggctgtaccacattgctttcaaacagctccctggaggctggagatagtgagagagaacccattcagccttctgagctccagttggtttctcctgtggctgagggggatacaggggctctccgtatatgggcaccccctgatcggggtcctgtacctagcaccagtggaatttcttctgagatgctggccagtgggcctattgaaggttgttcgttgcttgctagtgagagggtgtcccggcctgaagctgctgtgcctggataccaacactcaagtgaagccatgaatacccacacaccccagtttttcatctataaaattgatgcatcaaaccgagagcagcggcttgaggacaaaggggaaacaccactggagctaggtgatgattgtagcctggctcttgtgtggcgcaacaatgagcgcctacaggagtttgtgttagtagcctccaaggagctggagtgtgctgaagatccaggctctgccggagaggctgcccgtgctggccactttaccctggaccagtgcctcaacctctttactcggcctgaagtgctagcacctgaggaggcctggtactgcccacagtgcaaacagcatcgtgaggcttccaaacagctgttgctatggcgcctaccaaatgtactcattgtgcagctaaagcgcttctcctttcgtagtttcatttggcgtgacaagatcaatgacttggtggagtttcctgttcggaacctggacttgagcaagttctgtattggccagaaagaggagcagctgcctagctatgacctgtatgctgtcatcaaccattatggaggcatgattggtggccactatactgcctgtgcacgcctgcccaacgaccgcagtagccagcgcagtgacgtgggctggcgcttgtttgatgacagcacagtgacaacggtagacgagagccaggtggtgacacggtatgcttatgtgctcttctaccgtcggcggaactctcctgtggagagaccccccagggcaggccactctgaacaccacccagacctaggccctgcagctgaagctgctgccagccaggcttcccggatttggcaggagctcgaggccgaggaggagatggtgcccgaggggcctgggcctctgggtccttgggggccccaagactgggtggggcccccgccacgtggctctaccacaccagacgagggctgtctgcgatactttgtcctgggtaccgtggcggctttggtggcccttgtgctcaacgtattctatcctctggtatctcagagtcgctggagatgagctcacctgcaggcacctcttgtgagctggcctacctgcctgctcaccaggccatgcctacctttgtggtggggaacaactctgggctctgggcctcagtgtatgtatgtgatgggagatctgtggggactccagcctctgcaggggcagaatatcctagggtatgtgtccatccagttgtctgttcctcctgtttctctgacccttgtcctagggcttggccctgctggaactatttcctgtatttaaagtgttaataaagtgagtattcaggcccgaaaaaaaaaaaaaaaaaaaaaaaaaaaaaaaaaaaaaaaaaaaa

SEQ ID NO: 1503 - DNA, 2243 bp, Cricetulus griseus
ctgccagagttcctcacccaccagtacaagtacgaggctggcgagatccactggggagcggagggccgcgatgtctgtgctaccaatggctccagcagcgatgaggggcctgaccccgaccttatctgccgtaaccggacagccaccaacatgatgtacttgctgctcattggggctcaggtgctcctgggcatcggtgctacccccgtgcagcccctgggggtctcctacattgacgaccacgtgcggaggaaggactcgtcgctctacataggaatcctgttcacgatgttggtatttggaccagcctgtggatttattctgggctctttctgtaccaaaatctatgtggatgccgtcttcattgacacaagtaacctggacatcactctgccttgctcttctactcctccctctctgatgtttggtttcccacaatccctcgcccccaccactcagaccccgccatggagagtgagcaggctatgctcccagaaagagaatatgagaggcctaagcccagcaatggggtcctgagacaccccctggagccagacagcagtgcctcctgttttccagcagctaagagtgatccccaaggtcaccaagcatctgctttcaaaccctgtgttcacctgcatcgtcctggctgcctgcatggaaattgctgtggtggctggcttcgctgccttcctgggcaagtacctggaacagcagtttaacctcaccacttcctctgccaaccagcttcttgggatgacggcaatcccctgtgcctgcctgggcatcttcctgggtggcctcttggtgaagaagctgagcctgtctgctctgggggccattcggatggccatgctggtcaacttagtgtccacggcctgttacgtctccttcctcttcctgggctgtgacacaggtcctgtggctggcgtcactgttccctatggaaacaactcagcacgtggctcagcccttgacccctactctccgtgcaacaacaactgtgaatgccagacggattccttcaccccagtgtgtggggccgatggcatcacctacctgtcagcttgcttcgctggctgcaatagcacgaacctcacaggctgtgcatgcctcaccaccgtcccccctgagaatgccaccgtggttccaggaaagtgtcccagtcctgggtgccaagaggccttcctaaccttcctctgtgtgatgtgtgtgtgcagcttgatcggggccatggcccaaaccccctctgtcatcattctcatcaggacagtcagccctgaactcaagtcgtatgcgctgggagttctttttctcctccttcgtttgttgggtttcatccctccacctctcatctttggggctggtatcgactctacgtgtctgttctggagtaccttctgtggggaacaaggcgcctgcgtcctctatgacaatgtggtctacagatacctgtatgtcagcatcgccattgcgctcaagtcctttgccttcattctctacaccaccacgtggcagtgcctgcggaaaaactataaacgctacatcaaaaaccacgagggcgggctgagcaccagcacagagtatcaagacattgagactgagaaaacctgccctgagtcacagtcaccttcagaagactcctttgtgcgaagctgagggctggcccctctcggcagagccctaccatcgccaccaccaccatcgccaccaccatcactaccacccacagacctcaaggcctgacatagccctgcgctgcccaggaacccaagggttcccgtgtggattatccaatgtctggtcctttgaggcttcaagcacaggcctgtgacaaggactaaggaggtggcatgtggtcaggagtcctccaaagtgggcatcattcctaaaaaagcaatgttgacctgatgtgcaaatttcctttggcctgtctctcttctcgcttctgtggggatggctttctgacatgctttagaaaacctgtttggggatgcttctctgaccgaacactcttaacagttccaaagaaaccaaccgaggctgggctttaacagaagggtgtaaaaatccagattcccagaagagaagaggaagaaaagcacatacttaatagattctgaatgtggtagtctgtatttttgcagcttatattttccagatgagcagtttagagatacatgatataaagtatatactgtacatttgctgaaaattatattaaaagaactattttaattctt

SEQ ID NO: 1504 - DNA, 2243 bp, Cricetulus griseus
cctcagccagtcttacctctcattgacttggacaagcagtctgtggggattgagggaggagcacggcgtggggctttccagaagaataacgagctaatcctttattacttctcagacgccaagacggtgtatgagattttccaaagaggacttgttgtgtctgacaatggaccatgcctgggatacagaaagccaaaccagccctacagatggatatcctacaaacaggtgtctgatcgagcagagtacctgggctcctgtcttttgcacaaaggatataagccatctcaggaccaatttgttggcatctttgctcaaaataggccagagtgggtcatctctgagttggcctgttacacatattccatggtagctgtgcccctgtatgacactttgggagcagaagccatcatatacgttatcaacaaggctgatatccctgtggtcatttgtgatacaccccaaaaagcaacaatgctaatagaaaatgtagagaagggccttacaccaggcctgaagatagtcatcatcatggatccctttgatgatgacctgacagaaagaggagagaagagtgggattgagatattatccctgtctgatgctgagaatctaggcaaagagaacttcaaaaagccagtgcctccaaacccagaaaacctaagtgttgtctgcttcaccagtggaactacaggtgaccccaaaggagctatgataacccatcaaaatattgtttcaaacatggctgctttcctcagattgttggaacctatcttccatcccacccctgaggatgtgaccatatcctatcttcccttggcccatatgtttgagagggttgttcaggctgtcatattttcctgtggaggcaaagttgggttcttccaaggagatattcggttgctacctgacgacatgaaggttttgaaacccacggtgtttcccacggtgcctcgactccttaacagggtctatgataaggtacaaaatgaagccaagacacccttgaagaagttcttattgagcctggccatcatgagtaaattcaatgaagtgaaaaatggcatcattcgacgggacagtttgtgggacaagcttgtcttctcgaagatccaaaacagcctgggtgggaaggttcgcgtcatgatcaccggagccgcccccatctctactccagtcttgacattcttccgggctgcattggggtgtccggtgtttgaagcttatggccaaacagaatgcacagctggatgtacaatcacgtcacccggggactggacagcaggtcatgttgggactccagtggcttgcaattttgtgaagctggaagatgtggctgacatgaactactactcagtgaacaacgaaggcgagatctgcatcaaaggtaacaatgtgttccaaggctaccttaaggacccggagaagacgcaggaagcactggacaaggacggctggctccacactggagacatcggccgctggcttccgaatggaactctgaagatcattgaccggaagaagaatatcttcaagttggcacaaggagaatacattgctccagagaagatagaaaatgtttacaacaggagcagaccagtattgcaagtttttatccatggggagagcttacggtcgttcctggtaggaatagtggttcctgaccctgattcgcttccctcatttgcagccaagattggggtgaagggatcctttgaagaactgtgccaaaaccaacgtgtaaaggaagccattctagaagacttgcagaaaattgggaaagaaggtggcctgaaatcctttgaacaggtcaaaagcatctttgtccacccagagccattctccattgaaaatgggcttttgacgccaacactgaaagcgaaacgagtggagcttgccaaattcttccagacccaaatcaagagcctctatgagagtatccaggagtaggataagtttgccgagctggaagctgtggaggaagaagcagaaacttttgcccggtgaacttttccaggaaatgaggcaagcaactaagctcctctcctgcactgggagcaaaggtcctcaggcaagcatgaagcctgaactgcaagcctgacttctgggaagggacttccagatctttctccctggactccaatccctgcagtactcactgcctgatagcatgtggggcctgtacttgtaaatggcagatctctgaaataaactactgcagatattaaaaaaaaaaaaaaaaa

SEQ ID NO: 1505 - DNA, 2243 bp, Cricetulus griseus
tctacccggcagcggtgatggcttcctcgacagggctggccacaggcacagcgctgtgccaacatgccaacgctgtcaccgaggctgcccgggctctggctgctgtccgcccaacccgaggtgtggctttccaggcacacagtgtgggcgccggggctccttcatggcccgagacaacgtggccaccttcatcggctgggtgccgggccgagctgggtgtgcctgaagtgctcatgtttgagacagaggacctagtgctgcgcaagaacgagaagagtgtggtattgtgcctgctggaggtggcccggcgcggggcgcgcctcggcctgcttgccccaaggctggtacagtttgagcaggaaattgagcaggagctccgagatacccctcaggtatccagcgtccctgctgctgaagaagatgccactgaaattgttactgtatcgggagctcccacccgaacacccagaatgacacccaatgaccttcggaacctcgatgaactggtgagggagatcctgggccgttgcacctgcccagaccagttccccatgatcaaggtctcggaagggaagtaccgagtgggagactccagcttgctcatctttgtaagggtgctaaggagccacgtgatggtgcgcgtgggtggcggttgggatacactggagcactacctagataagcatgacccttgccgctgctcctctactgcccaccgtctgcccccgcagagggctgggactttctccccgcagaggggatcccccactcctagtccccgccctggtagcccagtccctggaagtgagcgccggggctcccggccagaagtaacccccatcagcctgcgaagcacaaaggaggggcctgaggtcccgctcagcctcaggccccgagatcagctgcccccctcccccgctcccgccgctactccggggacagtgactcctcagcttcctccgcccagagcggccccccgggtgcccgcagcgacgacgcggccactggttcccggagggagcggcccagccaccggctgacctccggtctcccggcttccccgagacggccgcccacccctcgcagccagtctcgagaccggctagaccgggaacggtcccgcttggccccgggaggccgaggcgctcagctgtcggcctccagcccggtgcgtcgcgcccgcagccagagccgcgaggaacaggctgtcctgatggtgcgcagggaccgagacgggcagcatgcatgtgtagctcggggtagaggtggcggaggatccgggggttctggaaggagcaccccacagactccgcgtgcccgcagccctgcggcgccccgtccttcccggggccccagcccaagcttagagctggctaccacacccgccagccttttccgcacgccactgcagcttgacccgcagcaggagcagcagctgtaccagcgactggaagaggaattcttggctaatgcccgagccctgaaggctgccgccagccatacctccatgggaccagcccctgaccccccagctccggactctgcttactgttcgtccagctcctcatcttcatcactcagtgtcctgggtggcaagtgtggccaacctggggaatcaggccgcacagccaatgggctgcccgcgccccgcagccaagctctgtccagctcttctgatgaaggcagcccctgccttgctataggggggccactggatgcaaccaagagctctctaactggtccagaaccttcgctgaccttggcgaggggccggatggacacacaaccagaccgtaaaccctcacgcatccccacccctcggggaccccgccgcccatcaggacccatggagctcggggcttggcatgcccttcagtcgggcaccccaaggacccaaccagattcttgaatgtgatagactgggtcagctgcacccacacccattccattttctttgtggccttaacctaccctctgcattcagggacccctccacctcttgagcaccagaccccacgggaccagaccccacgggaccacacggcacaatggaacacctgttgtacattccggttttggggatgagtgttgctatttaattactaatattattgaatgccttagaggagaccagcctggtgtcctgaggacctgtggtccagtaaacagaacctctgacagaaaagttttgctccagctcctgtttttggggactgagccttcattatatgttgggattctag

SEQ ID NO: 1506 - DNA, 2243 bp, Cricetulus griseus
ttccctgtaccctcaccaggtcacaggagtggtcccccagagccgcccaggaaccgaatgcctcccccgaggcctgatgtgggctcaaaacccgataaccttccccctccagtaccaaatacaccaagacctgttcagtcgaatcttcacaaccggggatccccaacagggccgggagcccccagacccccgtttcccggaaaccgaggtgctgcttttggagccagctctgtgcgccagaatccctcgagctcctcctctccgttctccaggcctcctttcgcccccgactccaagccgagccttggatgacaagcccctccaccacctcctcccgtgggcaacacggccccccatcccacagacgaacgccgttccacctcctccctcacacagtcccagaagcgggcctaggcctcctcttcctcctgataggcctggtgctggggcaccgcccccacccccaccatcgacatcagttcgaaatggcttccaagactcatcttgtgaagatgagtgggaaagcagattctacttccatccgctttctgatttgccacctccagagccatatgtaccaacaaccaagacgtatcccagcaaactggccagaaatgaaagccggagtggatccaaccgaagagaaaggggcgccccaccccttcctcccatcccgaggtgatctctgcctgctggtctctacccaagctccaaagctgcttgtgttgttgctgtttgaaaactgcgcacccctcctctccccttcctttgcccctctcagagatagtaggagggaatgacggaagctgaggtggggattcgtgcgtttggtggggggaggggattcgagaaatgatgcacctagctgtttatgttgtatatattcttgagtctattgcttgtgtcagctgcaacctgccagggtatatatatgattttgtttacaagattttactgggacttttaaatctagctatagagttggaaaaagatttccattttgatgttttatatagttaatgtttaatattgccattgtctctattaaagcacatggccacatgtatgtatctacctgaaatttgtattttgggtccagtgtattgctcacatgttgctgggagatgctgagagactaaaaaaaaaaaatcaatccaaagaaaaatggaaagacattcctatttatagaataattgtttcatttatatggaagcagaacttaggaattctaatagttgaaatgtctaataaattatgaagtgactgatttgaatatattgtatttttataactttccttgccaaagccctgaacttggtgttttagagagtcattttcctcccttctcctctgccatttgtctgtcttccatgagaacgaagaaataaaggcttaacaagcttgtaccttttttttgggtctgaattttttaagggatagtgaaaattggacaagacctagtatgtctccatttttcaggtacatttctaaattagaaatagggtcacagctcaaagttgccattcataataaagaagttgtagaatgtatttttgaaaagaatgctgcagtaatacacctacatcccttgcctagaaattagtaacccagctgcatctcaaactctggaaaagttctgtgcttagcttaacctatggcagaatacacacacacaaaaacctgactattttcttccctgaagtcagggcttacaagtatgtttttttccataatatttccagttctgtgtattcaagatgcaatacagtattttaacatttgcaaatcattttatatggaaatatattgcagtattaaaattcagtgttcagtgtctccttcactatgcatttaatttactgaaagctgagaaaatgtttaacccaatggtgccttattctgtgatctgaaaggaattgactttttatgtctacgtggtggattatttgcatatttgtaaaaactgttaggcctttatattttaacttgtattagcaattttgttattgtaatagcaggaacagggtggttattaaagtatcctcagatctttggtatgaaattaattttccctgtttataggcaggagctgtggaggaatttttttcataccaccgaactgtgtaagcagacacaacttaggtatctgtgtcatcagagtagttaaatggtagggtagactctacccttgacacctgcatctttgtaagtcatccagacaataaataaaacgcagaattata

SEQ ID NO: 1507 - DNA, 2242 bp, Cricetulus griseus
cctgaaagcagacccagaagtagctttttaccaagctggagaaaattggaaagggctcttttggtgaagtgttcaaaggcattgacaatcggactcagaaagtggttgaccataaaaatcattgatctggaagaagctgaagatgaaatagaggacattcaacaagaaatcacagtgctgagtcagtgcgacagtccatatgtaaccaaatattatggatcctatctgaaggacactaagttgtggataataatggagtatctcggtggaggctctgccctggatctgttagaacctggccctttagatgaaattcagattgctaccatattacgagaaattctgaagggacttgattatctacactctgagaagaaaatccacagagacattaaagctgccaacgttctgctctctgaacatggggaagtgaagctggctgactttggagtagctggccagctgaccgatacccagatcaaaaggaacaccttcgtgggcactcccttctggatggcgcccgaggtcattaagcagtcagcctatgactcaaaggcagacatctggtccctcggcatcacagcgatagaactggccaaaggagagcctccacattccgagctgcaccccatgaaggtgttattcctcatcccaaagaacaaccctcccacactggaaggaaactacagcaagcccctcaaggagtttgtggaggcctgtttgaataaggagcccagctttagacccaccgccaaggaattactgaggcacaagttcataatccgcaatgcaaagaaaacgtcctacctgaccgagctcatcgacaggtacaagaggtggaaggcggagcagagccgtgacgactccagctcggaggactcggatgtggaaacagatggccaggcgtctggaggcagtgactctggggactggatcttcacaatccgggagaaagatcccaagaatctggagaatgggactcttcagccatcagatttggaaagaaataagatgaaagacatcccaaagaggcctttctctcagtgcttgtccacaataatttctcctctgtttgtggagctgaaggagaagagccaggcatgtggaggaaacttggggtcaatagaagagctccgaggagccatctatttggcagaagaggcttgccctgggatctctgacaccatggtggctcagcttgtgcagcggctgcagagatactctctgagtggtggaggaacttcagctcactgagatgcctttggcatcgggtttggtttttcctttcttcttcatcttcctccttattaaaagtcaatgagcgcctttgctgtctctgagaagaggtgtcacggaggggccccgccctcctgtagccgccagcacctgtccagggacacggtcctcatcgtgctgcagccagtggagtctttcagatggggtggggagggtctactccttcaagcaattattttatttttttatcgtttttaattttaatcatagtgcacatattcaaagaaaaattatctttaacaaaaaccctgaaatgtatatttgggttgtgacaaggcagttgaagacatgcaacctcaggtacctgcttcatgttgatagctcctgccccgggagactgagtcgctctggtggatcatgtacagacttgtatatagcgtcatttttacggaaattttggcgtgcgtaagggatcactgtgtacacatcggccaagtgcttctgtagataatctatctctgtggagtaaatatttgacaggccagaacttgagtctattgccttgcctttattacatgtaaattttgaactccgtgaccagtgatttggattttattttgtatttacagggtctgtcatgaataataattagcaccctcccaacccccacggaacactcctgtttgtacctcaaaaacatgcaaattctccctcactttccctttgccccctttggtactcttggaagtttttctttctcatcgatggtactgttttcattgtgttttcagttgggacatatcttttttcacagagctttacattactctgagttcctcccggatgaagcaccctcatctagtctttgttgagttgtgcctttgtgtctgcaccagctgtaccgtcctgtccacacctttccgttgaacctggtcgtagaatctgcatatcattttcccatcatgaaagtgtctgaatgcttacaccaataaattttataactcac

SEQ ID NO: 1508 - DNA, 2242 bp, Cricetulus griseus
ggatgcgaagatggcggcggctgcggccgagctggtgatcggctggtgcatcttcggcctcttgctcctggctattttggcattttgctggatatatgttcgtaaataccagagtcagcgggagagtgaagtggtctccactgtaacagccattttttccctggcagttgcactgatagcgtcagcacttcttccggtggatatatttttggtctcttatatgaaatatcaaaatggtacatttaaggagtgggctaatgccaatgtcagcgtccagattgagaacaccgttctgtatggctactatactttgtattctgttatactcttctgtgtgttcttctggatcccctttgtctacttctactatgaagagaaggatgacgatgacaccagtaaatgcactcaaattaaaacggcgctcaagtacactttgggatttgttgtgatttgtgcacttcttcttctcattggtgcttttgtgccactgaatcttcccagcaacaaaaattccacagagtgggaaaaggtgaagttcctgtttgaagaacttggaagtagtcatggtttagctgcgctgtcattttccattagctctctgaccctgattggcatgttggcagccataacatacacagcatacggcatgtcagcattacctttaaatctgataaaaggcacaagaaatgctgcttacgagcgcctggaaaacaccgaagacatcgaagaagtggagcagcacatccaagcgattcgatccaaaagcaaagatggtcgacctttgtcagcaagggatagacgtaccttaaagcaatgtgaagaaagattacgaacacttagaaaaagggaccggcacttagaattcattgaaaacagctggtggacgaaattttgtggtgccctgcgccccctgaagatcatttggggaatatttttcatcttagttgcattgctgtttataatttctctcttcctgtcaaatttagataaggctcttcattcagctggaatagattctggtttcatcatctttggaacgaacctgagtaatccattgaacatgcttttgcctttgttacaaacagtgttccctcttgattatattcttataacaattattattatgtactttatttttacttcgatggcaggaattcgaaatattggcatatggttcttttggattagattatataaaatcagaagaggacgaaccaggcctcaggcactcttatttctatgcatgatacttctgctaattgtccttcatacgagctacatgatctatagtcttgctcctcagtacgtaatgtatggaagccagaattacttaatagagagcaatataacatctgatgtccataaaggcaattcaacccttcctgtgccaagaagatgcgatgcagatgcccctgaagatcaatgtaccgttacccgcacatacttattcctccacaagttctggttcttcagtgctgcgtactattttggtaactgggccttccttggggtattcttgattggattagttgtatcctgctgtaaagggaagaagtcagtcattgaaggagtggatgaagagtcggacataagtgatgatgatgagccgtctgcctactccgtgtgaatagccttctgtcctaagggttttatgaagctggctgaatatctgttatgcattttcaaagttttaaagtaacattaggatgaactgtctagctttcatcaaaaaatgagagcatggccattaaaaagaactatattttttatgttttctgaagtaacattattgtatcatagattaacacttaaaattgctataataatgctatgtaaatacaattatttccaggtttgtgagggaatgcttgtggaaattttcttttttgtataatagtgttaaatttattaaaatcttgcagaatttacattccctttgttgcttttaaaaaacgtaagaagtcacttgtcttgtgccttagggtctctggaataatgtgaaatttttaagtgtttctctgataggctgaacagagtgccatagtattgctcgtggataagcctaactctcgaggcttgttttcagttttggccataagattattagcgataactcaagtggagttcatgaacaattgttaaactgcttaagaccattgtattctaagatgtgttacaggtttcattgttcaggtcttaatacatgaaaaaactaaaaaaaaaaaaaaaaaaaaaaaaaaag

SEQ ID NO: 1509 - DNA, 2242 bp, Cricetulus griseus
ccgccgccgccatgtcccgctacctgcgccccccaacacgtctctgttcgtcaggaacgtggcagacgacaccaggtctgaagattttacgtcgagaattttggtcgttatggtcctatagtagatgtttatgtcccacttgatttctacactcgacgtccaagaggatttgcatatgttcaatttgaggatgttcgtgatgctgaagatgctttacataatttggacagaaaatggatttgtgggcgtcaaattgaaatacagttcgcacagggggatcggaagacaccaaatcagatgaaagccaaggaagggaggaatgtatacagttcctcacgatacgatgactatgatcgatatagacgttctcggagccgaagttatgaaaggaggagatcaaggagtcgctcttttgattacaactatagaagatcttacagtcctagaaacagtagaccaactggaagaccacggcgtagccgaagccattccgacaatgatagattcaaacaccgaaatcgatctttttcaagatctaaatccaattcaagatcacggtccaagtcccagcccaagaaagaaatgaaggctaaatcacgttctaggtctgcatctcacaccaaaactagaggcacctctaaaacagattccaaaacacattataagtctggctcaagatatgaaaaggaatcaaggaaaaaagaaccacctagatccaaatctcagtcaagatcacagtctaggtctaggtcaaaatctagatcaaggtcttggactagtcccaagtccagtggccactgatagtataaatcatgatactttctaggcatgtatcattcatttactcatagtttggtatacttaaattatcaggaatacaatgttgcaatgatgacgttttaaaaaaaaaaaaaacaaacacttgttagtttccctgtacccggcaatggttataattaaaatgatatgctgttgagaagccactcttaagagtccagtttgtttaatgttatgggcagctaccaatttgtggtgtctctgtatatttttgtaaagattctcattttttatgcttgaagtatttggtgaaaaagatgttggtgaccataatttgcaacattgtcttattaaaaataaattttcataatccatatttggtagaactgttaacctagaaatgtagcttgctaataagatagaatgatacaaaagtgaagttgtagccacattacaacactgactgctcagacggggaatgatgccaactgggttaaatagtatttttcagggagatagaacttttcactgaaacatggagccttcactgctttcccctcctcttccccgctggtttctaagatttgaaacataaaataagggggaaagactgttcttagcatactttctctaaaatttaactatcgttgatcattgttatttaggggttttgttttgtttgtttctgttaggagcaagtaaactatttgaaagtccattttgtttatattcatagtgtaagacaaagtgaattttgatgcttagagcacttagtatgtgcatttgtatcccagtttgcctgccctcttcatgagggaggcttgctctttacaccttagtttattaattaatgtaggcaagtcaaaaagatgacactcctaggtgattctgtggtgccgtgaaattttttgggaaaaagttgagtttttaagcaaaaagccacatcacttagctttttgataatgtaggacatgactaaaataagaaagtgatatacccttaaatatttataaatttctagcatttctcttcaagatcgtttggaggcaataaaatgatttgaaatgtccggtgtcatttcagaataaaaagcaagcctctttaagatcttagactgcttgcttacagaagtgagtggaggtgctgtgggggacgatccttctagaggattactttatttttcctttcaattttgattttagaaatctaggccttgcttgtagagaacaaaagatggttttttaaaaactgtttgtggaatgtgtttggaggattaattctagaatctttgtatatttaatagtatttctaactttcgtttctttactgtttgcagttaatgttcttgttctgctatgcaatcatttatatgcacgtttctttaatttttttagtattttccttggatgtatagtttaaacaacaaaagtctatttaaaactgtagcagtagtttgcagttctag

SEQ ID NO: 1510 - DNA, 2242 bp, Cricetulus griseus
  modified_base (680)..(680): a, c, t, g, unknown or other
tgtggttgttggttgttcgctcgtcttacggtgatggaagctgcacatttttcgaaggaccgagaactgctggaggtctggttctccaggcagcagcccgacgcaagccaggggatccggggatcttcgcaccatcccgagatcttgagtgggatgtccttttgaaggatgtgcagtgctcaatcatcagtgtgacgaagactgacaagcaggaagcttatgtactcagtgagagtagcatgtttgtctccaagagacgtttcattttgaagacatgtggtaccaccctcttactgaaagcactggttcccctcttgaagcttgctagggattacagtgggtttgactcgattcaaagcttcttttattctcgtaagaatttcatgaagccttctcaccaagggtacccacaccggaatttccaggaagaaattgagtttcttaatgcaattttcccaaatggagcagcatattgtatgggacgtatgaattctgactgttggtacttgtatactttggatttcccagagagccgagtaatcaatcagccagatcaaaccctggaaattctgatgagtgagcttgacccagcagttatggaccagttctacatgaaagatggtgttactgcaaaggatgtcactcgtgagagtggaattcgtgacctgataccaggttcngtcattgatgccacattgttcaatccctgtggctactcgatgaatggaatgaaatcggatggaacatatttggactattcacatcactccagaacccagaattctcttatgttagctttgaaacaaacctcagtcagacctcctatgatgacctgatcaggaaggttgtggaagtcttcaagccaggaaaatttgtgaccaccttgtttgttaatcagagttctaaatgtcgcacagtgctttcttcaccccagaagattgaaggttttaaacgtcttgattgccagagtgctatgttcaatgattacaattttgtttttaccagttttgctaagaagcagcagcaacagcagagttgattaagaaaaatgaagaagaaaaaacgcaaaaagagaagacacacaggaggtggtagctgctttctagatgttgatactgggggccgggttctccatgaccaccaccttgtagttgcagaaagccctaggtgtaatgatagtgtaatcattttgaagtgtatgcattattatatcaaggagttagatatcttgcatgaatgctctcttctgtgtttaggtgttctatgccactcttgctgtggaattgaagtgcatgtagaaaagaactttgactgtatgaatctctacgacacttgtgaaaatgattcaatttggtttatgcacagtgtaatatttctgcaggcatcgtccaaaatcccccacagacaaggctttcgtcctcattagatgctggcctcagctgaccatctgcgactgttctaataaattgctgccagagtttttacatacagttacctccactttctagagcatattctctactaatgttattcaaaaccaaatttttacttcatacaggtgttttatgcaatggcaattaaagtttttcttccaacaagttgagtccttgttaaaaatgctgattccagttactgttttgtgttctgccattttaatgattgttcctgctatttatagtcctataagagcaaaaatggactaaaattcctatttatttccctctttttttttttggtagtttctggactgatgcagtgatgttttgttccttccatatttataatgaaacacatttttagcgtttctaaacatagaatctacttggtttggaatcaagtggttggaacactgtctggatttttactttaagcattgctgtttattgaatgcttcattggggaagcctccagtcagctttatcagtttgattctgtgatatgcacagcacctgatgttttgaactgctatttggaggaccagtgcttatttaagctggattttgtgacccagtagattttgttggaggtctgattaccccatttgatagaattatggattctaatgatgaaatttgcataggtttctgtggaataaaagcctagaaaagaacctgtagattgaatagtgatgctggtgtgattacagaaggggaagtttggtgccattatttctttggtgttggacttttaatcagttgaaatgtatttctgtaccacaatgtaagtttcaaattaaaagttt

SEQ ID NO: 1511 - DNA, 2241 bp, Cricetulus griseus
ctgggaaggtgggtaccccgagatcatcaaggagaacaagctcttcgagcactactatcaggagctcaagatcgtgcccgagggagagtgggaccagttcatggactcactccgggagccgctcccggccacgctgaggatcaccggttacaaaagccatgcaaaagagatactccattgcttgaagaacaagtattttaaggagttggaggacctggaggtagatggtcagaaagttgaagttccacagccactaagctggtaccctgaagaacttgcctggcacacaaacttaagtcgaaaaatcttgaggaagtccccgctgttggcaaagttccatcagttcctggttagcgagactgagtgtggaaacatcagccgccaggaggctgtcagcatgatccccccactgctgctcaacgtagagccccatcataagatcttagacatgtgtgcagcccctggatccaagaccacacagttaattgaaatgttgcacgcagacatgagtgtccccttcccagagggatttgtcatcgcaaatgacgtggacaacaagcgctgctacctacttgttcatcaggccaagcggctgagtagcccctgcatcatggtggtgaaccatgacgcttctagcatccccagactcacagtagacgtgaacggaaggaaagaggttctcttctatgatcgaattttatgtgatgttccctgcagtggtgacggcacgatgaggaaaaatattgatgtttggaagaaatggaccaccttgaacagcttgcagctccatggcctacagctccggattgcaactcgaggtgctgagcagctggcagaagggggcaggatggtgtactccacgtgttctctgaacccggtcgaggacgaagcggtaatagcggccctgctggagaagagtgatggtgctcttgaactggctgatgtatctgctgagttgccaggactgaagtggatgcctggagtctctcagtggaaggtcatgactagagatgggcagtggtttgcagactgggatgaggttccccagggcaggcacacacaaattcgacctactatgttcccaccaaaagacctggaaaaactgcaatcgatgcatctagagcgatgcctccgaatactaccacatcatcagaacaccggaggcttctttgtggcagtattggtcaaaaaagcatcaatgccatggaataagcgtcagccaaaggtacagagtaaatcttcagagcccagggagaccacaacatccggccctgtgggtgccacagagaggaatcatggtgaccattctgagctggacgggcagatgaccacaggagccggtgactcagaagcaacacacactgagaacacagagtgtaatgaaaagaaagatggcgtgtgtggccctcctccatcaaagaagatgaagttgtttggatttaaagaagatccattcgtgttcattcctgaagatgaccctttgttcccgccaattgagaagttttatgccttggacccttcgttcccgaggatgaatctgcttacccgaactacagaagggaagaagcgtcaactttacatggtctccaaggagctgaggaatgtgctgctgaacaacagcgagaagatgaaggtcattaacaccgggataaaagtctggtgccgaaataacagtggcgaagagtttgactgcgcgttccgtttggcacaggaggggatatatacattgtatccatttattaactcaagaatcattactgtgtccatggaagatgtgaagacgctgttgacacaggagaaccctttcttcaggaaactcagcagtgaggcctatagtcaagtcaaggacctggcaaagggaagtgttgtgctgaagtacgaaccggattcttcgaatccagatgccctccagtgccccattgtgctgtgtgggtggcggggaaaggcttctattcgaacttttgtgcccaagaacgagcggcttcattatctcaggatgatgggcctggaggtgttgggagaaaagaagaaagatggggtcattcttaccaatgagagtgcagccagcccagagcagcctgaaaacgatgagggtgatgagcaaacaacacaagaggcctgcgtcccagatgccacaactggtgacccagctgcagctgagccatcccggtgaagatgtctccacacgctgaactgctagcgtcccttggtgttggagatgaaatccagaatgtccttagc

SEQ ID NO: 1512 - DNA, 2241 bp, Cricetulus griseus
attgaagggggaaggaaactgcgggcggcgcgcgtgtctctctctctctctctctgtgtgaatgtgtgtgcgtgcccgtgtgtgcgcgcgcgggtgtgtggactagaaggtgggggcagccgagttagtcccaagtcgtcggactccatttgctattcttttctttctcccccacacccgggtggtagtgggcgttcgtctttgcgtctcttttcattcatctccagacctttaggggtgttttagggttgggggcagtggggagggcaggcgaggggaaaggaggaggacatggagatgaagaagaagattaacctggagttgaagaacagagccccggaggaggtgacagagttagtccttgataactgtttgtgtgtcaatggggaaattgaaggcctgaatgatacctttaaagaactggagtttctcagtatggccaatgtggaattaagttccttggcccggcttcccagcttaaacaaacttcgaaagttggaacttagtgacaatataatatctggaggcttggaagtcctggcagagaaatgtccaaatcttacctacctcaatctgagtggaaacaaaatcaaagacctcagtacagtggaggccctgcaaaatcttaaaaatttgaaaagtcttgacttgtttaactgtgagatcaccaacctggaggattatagagaaagtatcttcgaactgctgcagcaaatcacatacttagatggatttgatcaggaggacaacgaggcaaccgactcagaagaggaggagaggatggagatgaagatgaggaggatgaggaagaagatgacgctgggccacctgaaggatatgacgaggaggaggaggaggatgaggacgaagccggttcagaagtgggagagggagaagaggaggtgggcctttcatacttaatgaaagaagaaattcaggatgaagaagatgatgatgattatgttgatgaaggggaggaagaggaagaagaggaggaagagggtcttcggggagagaaaaggaagcgagatgctgaagatgatggagaggaagatgatgactagatccctccaggatgagggtgcctggcgctcctgggcgtgcagtagagcgaccatatgtctttgtttcttcatgtatgatagctgtccctttaggagatgatgtgtaactttttataggaaaagtgtggttttactgtcttggccttatcattccgattaagatttgctagtctgttaatcataatgtaagtagaaaacaattttcattcatcttcccattgtgaaattctctagcactgtatttagaatctggatttttataattcatgcttaatgtattagacatttttagcccataattaaaacatggttgcttttacacaggtgtagtttggtgcatttcattcataatgttttaaagtaatttataaattaacaaattacactcagctgtaatattaatggcaatagtctcttgaatgacaaagctgattgatttttgtttttagaggtgatccaggtgtcgatagcttgaaggcagttttgggggctggggtggtatttgaggactttcctgtcacagtttgggaaagcagaagcagagtgagggggttcttttcagatgtttggcatggtgttttaaaataacaagtatgaagttatttgcagagatgataacaaggttgcatatctgactgaaataaacgtgtggtatattcagtgccggtactggggtctccaacagactaacactttactcatctcaataataggaatgtctgctttcagtccctaggaattctcttggcacactatgccaggttcaaaataaatgcttatttttaaaaaggaaatctatattgacttttttatcaatcatctattgtgcaatcaaaattagagttcttgggtttaaaaacaacaaatagggcctccagataactattaagacttatttagctttgtgggtggtattttcatgcaaataagcaagggtgggctttctattctgtacatgttctgggttctgttttatcactctctctgtactgcgtgtgtatacagtatgttaagtccttagagactttgattattacttttgtgcaactgtattttgagtaaagccaccacagtgttaaacacaaggacaggcagtactgatactgctgtaacttaagttttgaaactgaattgctttgaataaatcgaagaattattaaataaaaaaaaaaaaaaa

SEQ ID NO: 1513 - DNA, 2240 bp, Cricetulus griseus
gagctgaagcgatgccactggagtgacatgttcactggaaggcttcggtctgagatcccaccagctctgatctcactaggggagggactcatcactgcaggagcacagctggtggaactggacctcagtgacaatgcatttggacctgatggagtgcgaggattcgaggccctcctcaagagcccagcctgcttcaccctgcatgaactcaagcttaacaactgtggcatgggcatcggaggtggcaagatcctggcagcagctctgactgagtgtcaccgaaagtccagtgcccaaggcaagccccgggccctggaaggtccttgtggctggcagaaaccgtctggagaatgatggagccactgcattggcagaagcttttgggatcattgggactctggaagaggtccacatgccacagaatggaattaaccatcctggtgtcacagccctggcccaggcattctccatcaaccccctgttgcgagtcatcaacctaaatgacaacaccttcactgagaagggtgcggtggccatggctgagaccctgaagactttgcggcaagtagaggcgatcaacttcggggactgccttgtacgctctaagggggccattgccatcgcagatgctgtccgtgggggcctgcccaagctaaaggagctgaacctgtccttttgtgaaatcaagagagatgctgccctggttgttgctgaggctgtggctgacaaggctgagctggaaaagctggacctcaatggcaatgccctgggagaagagggctgtgagcaacttcaggaggtgctggacagcttcagtatggccaaggttctggcatccctcagtgatgatgagggagatgatgaagaggaggaggaagatgaggaaggagacgaggaggaggacgaggaggaggacgaggaagaggacgaggaggaggacgaggatgacgaagaggaagagccacagcagcgagggcaaggagaagaatcagccacagcctcgcggaagattctggaccctaacagtggggagccagctcccgtgctgtcctccccgcctcccacagacctctccaccttcctgtcattcccctccccagagaagctgctgcgtcttggtcccaaggtctccatgctgatagtccagcagactgatacctctgaccctgagaaagttgtctcggctttcctgaaggtggcgtctgtgttcagggatgaagcctcagtgaagacagcagtgctggatgctgtcgatgccctcatgaagaaggccttcagctcctcgtctttcagttccaacaccttcctcaccaggttgcttatccacatgggcctgctcaagagtgaagacaagatcaaggccatccccagcctgtatgggcccctgatggtgctgacccatgtggtgcagcaggattacttccccaaggcccttgctcccctgctgttggcatttgtgacaaagcccaatggtgcactggaatcctgttcccttgcccgccacaatctgctgcagatactatacaagatctaggcttaaagtcagcttcttcttgtccctcaccctgcctgcaccagtgactaagggaacttggatggactgagctcagccaatgtctccattggatactttgaccagaggcaggggagggtctttgtctcgtgtgtcctgttggtcccttaagtacgtacgtatgtcggtgtggtgtgtgtaggtatgtacttcctgtctggattgcagatggtcatctctccttgctggactaacccaggtccactgtgggggattgatgcccagggaaaagggctgaaagctgctgttattaaacttaccgccaacttagccataggctctgttggctgtcctgcctaccctgccttcctgtcccaccaaagcctggggagctactgtggcctgctgtctccactgtgcctaaggagtgggaattgcctggggtgccctggctcttgtacccagaggaagcactttggctggcccagacctgttcttcatcctggggagggaagggcaggtcccctaatgcctgagctacatgtcgggctgctcttcaggggttttctgaggcaggagagaacctgtgtagtgggaattgagctgggtaggagatgccctgtgacttcccttagtggctgtgtggccacctcctgctttcctttgtattgtgtgtctaggctgtgcctgggagcttcacaaataaaagtcacctgtggtagctgca

SEQ ID NO: 1514 - DNA, 2240 bp, Cricetulus griseus
gcgaccgaaggtccatcggctctgcagctctgagcacgcgactggccgggaagttgcaggcggtccacaagccatcaggaaaggattgccagccagagaaggacaacatccgaagtcccaatgcacagatcagcccccaatcacaccaagaggagccggtcaccatttgccagcacacgacgtcgttgggatgacagagagagctctggaaccagcctgaatgttgagaatggggattatcccaggtatcctccaagagagtacagggcctccgggagccgaagaggattggcttatggacatattggcactctgagggcacgtgatagtgaggaggagggggctgggcctgttgacagactgccagtgagagggaaaactggcaagtttaagcatgatccagagaagggggcaagagctccccgcttctctagtgttaaccatgatgtgaaagaggggcttggcaaggtagaaccccctcctgctgcaaggtgctctgctagcagagctgagttcttgaagcaaagtggtatggcctctcagatgtcctctgctgaaggcagggcagttgcaaggggtaacaacagcttggagagggagaggcagaatttattagcacgtcctagcagggctcctgtgagtatgtgtggtggtggtggggaaaactccccaaagagtgcagaggagccggtggtaaggccaaaagtccggaatgtggcgactccaaactgcatgaaaccaaaaatattttttgatactgatgatgatgatgatgtagtaccacagagtactcccaggtggagagatgctgccgatgctggcgaagcccatgcagagggcctagcaagaagagcccgaggtgagggtgcaggcagctcctctgagccaaagtatcctgaagacaagaaggataacaggaatgggcaggtgaaaccagagaaagtgtcaagacggcgacgcaccatggctgactctgacttctgggcatatactgatgactactacagatactatgaagaagattctgacagtgacaaagaatggatggctgctctgcgcaggaagtatcgaaatcgggaacaaccccagtcttccagtggggaaaactgggagcctctgccagtaaaggaagaaccggaacctcagcaagcccagtgttggcagcaatggaagtggctatcctgaagaagtgcaagaaccgtctcttcaggaagagcaggcctccctggaagaaggagaaattccttggctccggtacaatgagaatgaaagcagcagtgaagcggataatgagtccggccatgagatgatgcagcctgggatgttcgtgctggatggaaacaacaacctggaagatgactccagtgtgagcgaagacctagaagtggactggagcctatttgatggctttgcagatgggttgggagtggcagaagccatctcctatgtggatcctcagttcctcacctacatggctctcgaagagcgcctggcccaggcgatggagactgcccttgcgcacctggagtctctcgccgttgatgtcgaggtggctaacccacctgcaagcaaggagagcattgatgcgcttcctgagatcctggtcactgaagatcatggtgcagtgggccaagaaatgtgctgtcccatctgctgcagtgaatatgtgaagggtgaggtggcaactgagctcccgtgccaccactatttccataagccatgtgtgtccatctggcttcagaagtccggcacctgcccagtgtgccgctgcatgttccctcccccactctaaaggccaaggctctttactcttagcctggttattttccctatctgaaacccacaatactacaggagccctctttcaaaattaacaatggcaatgaaatcagttggtcaattaaactaaacttgttgattccttgtgattatttccaatgtgaaaatggttgtgtccaattacatttaaaaaccatcctttcttttagaaggtagaaaggggaaactaaactttctaaatgctacttgagattgcagcaagaacataaattttctaacctgaaagttgaaacaagtcatattcgttctgtagactatgttgctctttccttgttgatgtcaagtttatctgttaaatacgttggaaagacaaaaatcacttgcgttgcatgttatgggttaatgttcctgtattcagtggtgtaaaagcttattaaagttcttcttttggtttgacacag

SEQ ID NO: 1515 - DNA, 2240 bp, Cricetulus griseus
gacaacttctactaaatgacatagatttgcttagaggtagagaagcagagctgaaggaaagaattgaagcatttgaattgacccagaagctgcaagaagagaaaataaaagtgaggctgaggctattcagagacgggaacagaatctaaagaacattgaggagacctatgatcagaagctcaaaactgaacttttaaaataccaactggaactaaaggatgaatacatcgctcgaacaaataaactactggaagaagaaaggaagactaaagaaaaactattcatttgcaagaggagctcacaattattaattccaaaaaggaggaactcagtaaatctgtaaatcgtatgaaagaagttgagctggagctagagtctgtcaaagcccagtttttggcaatgtcaaaacaaaaccacttgctgaatgaaaaaatgaaagagatgagtgattactcactactgaaagaagagaaagtggagcttcaggcacaaaataaattacttaaacagcaactggaagagaataggaatgagaacttacgtctcctagaccgtataactcagccacctcctgagcttttggtttttcagaaagaattacagaaagcagagcatactgtagcactggagcacaaggagtttgaaatgcaacggcaagctctgcagaaacagcttcagagtgaaattgaacattctacacagttaaagggccagatattagaatacgatgcttctgttaaaaggttaaccattcaggttgctgatttaaaatcacaactaaaacaaactcagacagccctagagaatgaagtattccgaaatccaaagcagtctctgccccttcattccctgagtggtctagtgagtggcaagatggcacctcacaatggggatacaagaggggatttcttgaatgtgcctcttgaacagaacaaggttatggcaggtgcagttaaatcaaggatcctaccttatgcaaatacagcggcagaggctagttccccagactctgaccttgagtttgtagccagtagtactaaagccaaagtaagagagctagagcaagaggctgagcgcttggaaaaggcgttcagaaattaccatcgaagagttactcgggatcctaacatgagtcctcagccagcaaagagtcctccatctgcatactcgataggagttcgtagaagcacagcttccagttccatggatagacatgtttctgcagaggacagggttgtgtctgaacagcctcttgtggacatggtaaaggaagaaaagcatgatgtgtccaaagcgtttatgggcagtgtggcttcacggcctcgaaggacctcttcctctgtacgcctctcctctacaccccatccaaaatcaagaagaagccttgataatgaaatgtatctggaaggtctgggtagattacacattgcttcctccagcccttgtcttgacagagcagatgggtcacatgttgcctcttctagtccttgtcctgacaggacaacagcccagccatcacctattcaatctaggcacagtttctctggtccttccaagacaaaagtgaattttcaaatgtggacaagcaatctttgaaagataaaagaggagtgtgaaccaccttttagatggaacaagccagaagcagaaggactccaccctgctggtgacatgcctgtcatggatgttgctgcagctgctgtgccttccagaccaatttcatacgactacccaaatgttgatgagagccaaactggagaacaaatggaagaacagcagcagtgggaactccacatgaaagaacggaggaagagagaagaacaaaggcagaatgaacggcaagaagctctagagagggaaagaagagagctggaaaaactggagcaggagcggagaatgattgaagaatcactgaagattgaattagaagaagaattacaaaaaagtgttcaagaaccaaaagacaaatcaactcatggtgaaaatcctttagagaaatacatgaaaatcatccagcacagacaggagcaatcaagtgcagataagagctcaaaaaaatcaggcagagaaagctcactagtggacacgatgacacctagtgacaaggatgaaagttctccaggtttttctcatgaagaaccagatgacgtctggtaatcatattagctgcctagcttcttacttagaagaagttgtgtaatagtattcttaacttttctgtaattaaaattgtcagaaaa

SEQ ID NO: 1516 - DNA, 2240 bp, Cricetulus griseus
aagagaacgattgcagcaaggactttgggagatctggtccggaagctaggggagaaaatcctccctgagatcatccccatcctcgaggaaggtctaaggtctcagaagagcgacgagaggcagggtgtgtgtatcggactgagtgagatcatgaagtctacaagccgggacgctgtgctgtatttctctgagtcccttgtgcctacggcaaggaaggctttatgtgatcccctagaggaggtccgagaagcggcagccaagacctttgagcagctgcactccaccatcggccaccaggctttggaggatattcttccatttttactgaagcagctggatgacgagcaggtgtcggaattcgccctggacggtctcaagcaggttatggctgttaagagccgtgtggtgctgccctacctggtgcccaagctgacaacgccccctgtcaatacccgggtgctggctttcctctcatctgtggcaggcgatgctctgacccgtcatcttggggtgatcctcccagcggtcatgctggccctgaaggagaagcttgggtctccagacgagcagctggagatggccaattgtcagggatccgcctcttcaatgactccagtcccgtggttctggaggagagctgggatgccctcaatgccatcaccaagaagctggatgctggtaaccaactggccctgatagaagaactacataaggaaatccggttcataggcaacgagagcaaaggcgagcatgtgccaggcttctgccttccaaggaagggcgtaacctccatccttccagtgctgcgggaaggtgtcctcactggtagccctgagcagaaagaggaagcagccaaggccttgggtttggtgatctgcctgacatcagctgatgccctgaggccctctgtggtcagcatcactggccccctgatccgaatccttggggaccggttcagctggaatgtgaaggcagctttgctggagacactcagcctcctgctggccaaggttggacttgccctgaagcccttcctgcccaagcttcagaccacctttaccaaagaccctgcaggactccaacaagggcgtgcgcctgaaagctgctgatgcattaggaaaactcatatccatccacgtcaaggtggacccgctcttcacagagctactcaatggaatccgtgtgatggaggacccaggtgtgagagacaccatgctgcaggccctgaggtttgtgattcagggtgcaggtgccaaagtggatgctgccatccggaaaaatgtcatctcactcctgctaagcatgctgggacatgatgaggataatactcggatctcctcagctgggtgccttggggaactgtgtgccttttgacggaagaggagctcagtactgtccttcagcagtgcttgctggctgacgtatctggcattgactggatggttcggcatggccggagcctggctctgtctgtggctgtcaacgtggctcccagcagactctgtacaggcaaacacagcagtgaggttcaggacatgatcctcagcaatgccacggcagacaggatccccattgccatgagtgggattcggggcatcggcttcctcatgaagtatcacattgagacaggagatggacagttgccacccagactctccagcctactcattaagtgtctgcagaacccatccagtgacatcaggctggttgctgagaagatgatctggtgggcaaataaggacccccggcctcccctggagccccaggccatcaagcccattctgaaggctcttcttgacaacaccaaggacaagaataccgtagtgagggcctacagcgaccaggccatcgtgaacctgctcaagatgaggcagggcgaagagttgtttcagtcactctccaagatcctggacgtggccagcttggaggtactgaatgaatgcaaccgaaggtcgctgaagaagctggctagccaggcagattccatggagcaggtggatgacaccatcctgacgtgacaggccaggttctctgcagaaactccgctccacatctttgttcactgttttcatttttgaaaatacgtttattccaagggggagctcaggagatggtgttctttctcaaaagtattttagtataccaaccaaccagagccaaagccttaaatcaaacccacacacaactgaaaattgcctcctccatctcttgcccttatctttggaaaagagaaagaaagc

SEQ ID NO: 1517 - DNA, 2240 bp, Cricetulus griseus
cagctccgcacctttgccttgcctccaattcccccgagcctggttactccccgattcttagaagtgggctcagaaaggccggtgagctgcagtttggatggactgtttcctgccccggaagccagggtttacctctcgctgggagatcagaggctgcagcctgacgtgaccttcgatggcgacagcctcttggccactgccacagctacgccaagcgcagaacaggaaggcaccagacagctgttatgcagcgtgaccctcgggggcgaaagcagggagacccaggaaaatctgactgtttacagtttccctactcctcttctgactttaagtgagccagtagcccctgaagggaaggtggtaaccgtaagctgctgggctggggctcgagcccttgttaccttagagggaatttcagctgcggtcccggggcaacccgctgagctccagttaaatgtcacggagaaggacgacaagaggggcttcttctgcgaagctgccctcgaagtggacggggagaccctaagaaagaaccagagcgctgagcttcgtgtcctgtattcaccccggctggatgactcagattgtcccagaagctggacatggcctgagggtccagagcagagcctccgctgcgaggcccgtggaaacccggagccctcagtgcactgtgctaggcctgatagcgggggcgctgtgctggcgctcggcctgctgggtccagtgactcgctccctcgcaggcacttaccgttgcacagcagtcaatggccagggccaggctgtcaaggacgtgaccctgaatgtggagtatgccccagcgctggacagtataggctgcccagaacacattacttggctggagggaacagaggcatcgcttagctgtgtggcacacggggtcccaccgcctaatgtgagttgtgtgcgctctgacacggacagagtcatggaagggttgctgcgcgtgactcgggagcacgctggcatttaccgatgcgaagccatcaacgctagaggatcagcagccaaaaatgtggctgtcaccgtggaatatggtcccagttttgaggagctgagctgcccgagcaactggacgtgggtagaaggatctggaaggctgttttcctgtgaagttgacgggaagccagaaccacgcgtggagtgcctgggctccgagggtgccagcaaaggggcggtattgcccctggtatcctcaaaccctggtcctagaaactctgtgacctctagtaatctttcaccgggtatctacctctgcaatgccaccaaccggcacggttccacggtcaaaactgtcgtcgtgagcgcggagtcgccgccacagatggatgaattcagctgcccaagtcatcagacttggctagaaggagctgaggctacggcgctggtctgcagtgccaggggccgcccctctccacgggttcgctgttccagggagggtgccgccaggctggagaggctgcaagtgtcccgggaggatgcggggacctaccgttgtgtggccaccaacgcgcatggcacggattcacggaccgtcactgttggtgtggaataccggcctgttgtggcggagctggcggcctcgcctccaagtgtgcggccaggcgggaacttcaccctgacctgccgtgcagaggcctggcctccagcacagatcagctggcgcgcgccccctggagctctcaaccttggcctctccagcaacaacagcactctgagcgtgtcaggcgccatgggcagccacggcggcgagtatgagtgcgcagccaccaatgcgcatgggcgccacgcgcgacgcatcacggtgcgcgtggccggtccgtggctgtgggtcgctgtgggcggtgctgcagggggcgcggcgctgctggccgcgggggctggcctggccttctacgtacaatccacggcctgcaagaagggcgagtacaacgtccaggaggccgagagctccggcgaggcggtgtgtctcaatggcgctggcgggacaccgggcgccgaaggcggagccgagacccctggcactgccgagtcacctgcagatggcgaggtttttgccatccagctgacagcccagtaagccggcagccagcccctctccccgggggtgtctgcaagcattggggtgggcatatgtattattcatgctctttatttattcaactccaggggcatcacttccattttctacccattcccctcaataaagtttttataaag

SEQ ID NO: 1518 - DNA, 2239 bp, Cricetulus griseus
agtggaggattgaactggaagatgactgtctgcctgctggctgcctgggtcatggtttgtctggccatgatcaaaggcatccagtcttctggaaaaatcatgtattttagttctttgttcccttatgtggtactcatatgcttcctaatcagatctctccttttaaatggttcagttgatggcatccgacacatgttcacccctaagcttgaaatgatgctggagcccaaagtgtggagagaggcagcgactcaggtcttctttgccttaggcctggggtttggtggagtcattgccttttcaagctacaacaagagggacaacaactgccacttcgatgctgttctcgtgtccttcatcaatttcctcacttctgtcctggcaacactggtggtgtttgcagtcctggggttcaaggccaatgtcataaatgaaaagtgcatttcacaaaattcggagatgatcttgaaattttgaaaatgggaaacattagttgggatgtcatccccatcacattaaccttcagcggtcactgcggaagattatctatttagtgtatgacatcattcagaaagtaaaggaagaggtatttgtgcagcgctctggaaattactttgtcacaatgtttgatgattattctgctacattgcctctgctaattgtggtcatcttggagaatattgctgtaagctttgtttatggcatagataagtttatggaagacctaacagatatgttaggctttgctccaagcagatattactattatatgtggaaatacatttctcctttaatgctactaacattgctaatagctagcattgtgaatatgggattaagtcctcctggctacaacgcatggatcgaagagaaggcctcagaagaatttctgagctacccgacctgggggatggttgtctgcttctctctgatggctcttgcaatacttcctgtccccattgttttcattattcgtcgctgcaacctcatagatgatagttctggtaacttggcctctgtgacctataagagaggaagagttctgaaagagcctgtaaacttagaaggagatgacgcaagcctcattcatggaaagataccaagcgaaatgtcatctccaaattttggtaaaaatatttatcgaaaacaaagtggttccccgacactggacaccgctcccaatggacgctatgggattgggtatttgatggcagacatgcccgatatgccggagtcaggcttgtagctgaaacaaaagcagaagctgcgtgcgttcatttttattaatgaacgttggttctactatgagaagcattgggcttcacttatcagaaggtgatctcaggtgtccatgactgtgatctttaatcccaacagtataaggcagtccaagaagagtattcctcagtttacattagcacagaaatgattacaaacaaagcttacagtgactgaggtcatactttgccaggaatttttaaaaaaaaaaacattttggcatatttcaactatttctatctgttaaagaaacaggcattacctcagtttctaatgatttctgaacttaatattattggcaattttaaaatccctggtatatcttacaatttataatttttgccttcaaggtaagacccagtattaccaagaacagttgtgtgagttcgtgcctgtcagcacgtttccatgaatacgttttgtagataggttgtacttataggcacttaattgaagaaaactgcaaagtattttcttatatgatagctgtatagagaaatagtgtccaagagtgagaaggcactaatgctggatgagatgttagatttggaggtgactggggatcacatgtgatggttgtatattttgtgtaaaataggtgggtgaaaataacctaagagtgagttgctccacactctctagaattatgcagactctgcatttttcttatgccgtgtgcctaaaaacctacttaatatttattgtggttcgagatcacttatagtatatttatataatatacttgcaatgtatagagatgcatattgggactctatgtgctgatttgaaaacttgaagcaagatagtatttgttttcatatatttctgttttgcttcattttatgcaaatataaatccttttttaagtgattgttaaaacagtatggcattacattttaacctacaaataaatgaagtttaaacaaaaaaaaaaaaaaaaaaaaaaaaaaaaaaaaaaaaa

SEQ ID NO: 1519 - DNA, 2239 bp, Cricetulus griseus
actgcttacaagatattatgagagtttgtagtgaatccagtactcactttgcaacacttacagcaaggatgttaatagccttggataagtggctagatgaacgtcatgcacaatcacactttatcccagctttattccgaccttctccccttgaacgcatcaagacaaacgttataaacccggcgtatgctgctgacttgggtcagacagaaaactcactacatatgggctatagtgcactagaaataaagagtaaaatgttagcccttgagaaagcagatacctgcatttacaaccctttgtttggatcagatcttcagtatacaaatcgggtagataaagtggtaataaatccgtactttggtctaggagctccagactactcaaaaatccaaattcccaaacaggaaaaatggcagcgaagcatgagcagtgtcatggaagacaaagaacgacagtgggttgatgactttcctttgcatcgaaatgcctgtgaaggagattcagaattactaagccatcttcttaataagggatattcagtcaaccaactagataatgaccactgggcacccattcattatgcatgctggtatgggaaagttgaggccactcgcatattgttagagaaaggaaagtgcaatccaaaccttttaaatggccagctcagctcccctcttcactttgctgctggagggggacacgcagacatagtacagatcctcctaactcacccagacattgacaggcatataacagaccaacaaggaagatccccattaaatatttgtgaagaaaacaaacagaataactgggaagaagctgcaaaattgttgaaagaagccattaacaagccatatgaaaaagttcgaatttacagaatggatggatcatatcgttctgttgaactaaagcatggcaataatacaacagcacagcagataatggaaggaatgagactctctcaagaaactcagcaatatttcacaatttggatctgttcagaaaaccttagtcttcagttcaagccttatcataaacccttacaacaagttcgtgactggccagaaatacttgctgaattgactaatttggatccacaaagagaaacaccacagcttttcctaagaagagatgtaggacttcctttagaagttgagaaaaagattgaagaccccctagctattcttattctctttgatgaagccagatacaatttactgaaggggttttatacagctcctgatgctaaactgataacactggcaagtctgctgttacaaatagtgtatgggaattatgagagtaagaaacacaaacaaggtttcctaaatgaagaaaatctgaaatccatcgtacctatcactaaactgaaaagtaaggcacctcactggatcaatcgaatactccatgagtacaagaatcttagtatgagtgagggtgtcagtaaggaaatgcatcacctgcaacgcatgtttctacagaactgctgggaaattcccacgtacggagcagcttttttcacgggacagatatttacaaaggcaagcccaagcaatcataaagttatccctgtgtatgtaggagtgaatataaaaggacttcatctcctcaacatggaaactaaggctttactcatcagtcttaagtattgttgctttacgtggcagctgggagatgctgggacttgttttcaaatccatagtatggaaaataaaatgagctttatagtgcacacaaaacaggctggtctcgtggtaaagctgctaatgaaattaaatggacaactaatgccctctgaaagaaattcatgaaaagaaaatagctggtactcaagccaccacattttgtaatgcaagagttttttcaatggaagatttcttaaagtatgacttaacaaggtgtatagtctcttgtagtatatatgtatatgctgttacatacactgtacagaatctgtactcctgtttggtgtgtaatataccacttagctttgtatgataggtcataaacttctaatttttgagagaaccacataaaaataaacagtctgtattatattagacaaaatagtaagctttataaaaagttatttttggtaaatagtaaagaattagtgtggaatgtgatgaaattaaaatatagctttgatataattttatgtgttacttcaacatatactgaaaatcaacatgatttgaataaataaaatgtattttgtacttgaaaaaaaaaaaaa

SEQ ID NO: 1520 - DNA, 2239 bp, Cricetulus griseus
aaggagaacaaagagctgagaaaattggtactgcagaaggatgacaaaggcatccatcataggaaacttaagaaatctttgattgatatgtattctgaagttcttgatgttctctccgattacgatgccagttacaatacacaggatcacctgccacgggttgttgtggttggagatcagagtgctggaaagacaagtgtgctggaaatgattgcccaggcacggatattcccacgaggatccggggagatgatgacacgttctcccgtgaaggtgactctcagtgaaggtcctcatcatgtggccttgtttaaagatagctctcgggagtttgatcttaccaaagaagaagatctcgcggcattaagacatgaaatcgaactccgaatgaggaaaaatgtgaaagaaggttgtactgttagccctgagaccatatctttaaatgtcaaaggccctgggctgcagaggatggtgctcgtggacctgccgggcgtgatcaatactgtgacatcaggcatggctcctgacacaaaggaaatgattttcagtatcagcaaagcgtacatgcagaatcctaacgccatcatcctgtgtattcaagatggctctgtagatgctgagagaagtattgttacagacttggtcagtcaaatggatcctcatggaagaagaaccatatttgttttgaccaaagtagacctggcagaaaaaaatgtagccagtccaagcaggatacaacagataattgaaaggcaaagctcttcccaatgaaagctctgggttattttgctgttgtgacaggaaaaggaaacagcgctgagagcattgaagctattagagaatatgaagaagaatttttccagaattcaaagctcctaaagacaagtatgctaaaggcacaccaggtcaccacaagaaatctaagccttgctgtgtccgactgcttttggaaaatggttcgagagtcagttgaacaacaggctgatagcttcaaagcaacacgttttaacctggagacagagtggaagaataactacccacgccttcgagagctcgacaggaatgaactatttgaaaaagcgaaaaatgagatccttgatgaagttatcagcctgagccaggtcactccaaaacactgggaggaaatccttcagcagtctctgtgggaaagagtatcaactcatgtgattgagaacatctaccttccagctgcacagaccatgaattcaggaacatttaacaccacagtggatatcaagcttaaacagtggaccgacaagcagctccctaataaagcagtagaggttgcttgggagacgctacaggaggaattttcccgtttcatgacagaacccaaaggaaaggagcacgatgacatatttgacaagctcaaggaggctgtgaaggaggagagtgtcaaacggcacaagtggaatgactttgcagaagatagcttgagggtcattcagcacaatgctttagaagaccggtccatatcagataagcaacagtgggatgcagccatttactttatggaagaggcacttcaagctcggctcaaggatactgaaaatgctattgaaaacatgataggcccagactggaaaaagaggtggttgtactggaagaatcgaacccaagaacagagtgttcacaatgaaaccaagaatgaattggagaagatgctgaagtgtaatgaagaacacccagcttatcttgcaagtgatgagattaccacagttaggaagaacctggaatcccgaggagtcgaagtagatccaagcttgattaaggatacttggcatcaagtttatagaagacatttcttaaagacagctctaaatcactgtaacctttgtcgaagaggtttttattactaccagaggcattttatagattctgagctggaatgcaatgatgtggtcctgttttggcgaatacagcgcatgctggctatcactgccaatacattaaggcagcagctcacaaacactgaagttaggcgactagagaaaaacgttaaagaggtattagaagattttgctgaagacggtgagaagaagattaaattacttactggcaaacgggttcagctggctgaagatctgaagaaagttagagaaattcaagagaaacttgatgctttcattgaagctcttcaccaagagaagtagactgtatgaaaatcctgctcataatcacctctgcatacattggaagaacgagaacttcggtcttt

SEQ ID NO: 1521 - DNA, 2239 bp, Cricetulus griseus
gagccgcccagagccggactggcttcggagtcggcgttgtaaccgccgtcggaaccgccctctcgccaccccggcggtcaaggtgccggctaccaccgcgaacggcggagcgcgccggggagccgcgcgcctttgtgcgagatagcctgcttgaggaaactgaccccaaagactcctatctcagtccaagaaatatcatggccgagccagactacatagaagatgacaatcctgaactaattaggccccagaagctaatcaaccctgtcaaaacatcccgaaaccatcaagacctccacagagagctccttatgaatacaaaagaggggtcttgcccctcagaataaaccagaattgcagaaggtaatggagaggagaaaacgagaccaagtagataaagcaaaaggaggaagaagcgcagaagaagaaatccgacctggaaatagagctattaaagcggcagcagaagttggaacagcttgaacttgagaagcagaaattgcaagaagagcaagaaaacgccccggaatttgtgaaggtgaaaggcaatctacaggagaacaggccaggaggtggccaagccaggagtcctaggtccaggctgttagtttgtcatttcttgctacaactattctttttaaataaagtaattccttagttctttcggaggattaaactagagggtgttactcagcttctgtgtctcatagagaggccagatcttttgagttctcctgagagcagtatagaggggtgtccatgaagacagagtgatggggccattagatactgtatgtaatgcaaatagagatccatttctaggaggctttagtggagggctttatcctttttacattttgagtatcttagattcatagcttgagacatttctggtgaatgatcacacaatttctttccccttttgtttcttgtgaagaatgactatttttgcgctctctcagcatgacgctgttggtagggatggtcttgactactgtgttgcatctctcaggaaaagctgaggtgccgggcagagctgctcagtttcctcatgctagctagcatgctgttcaaagagacatctaagttacaaataatatgaaagttctcatgcaaaatatattttatactgcaggcatgggatttttttatttagtacttctccatagagatgatttagccagtaatttctacactgcagacttgtttttcctttcatgatgcacacaatgctggatgtagtactttggaacccttgattagcacactagacactagctttcactgggaacacttcagtttgccagttaacaggcccatgttctatccaagtgtgattacgaagtaaatggatgataattcactgctacatagagaaacgtgagagttgattacagcggaaatggattcttggtcttatcacaaagtgtcatctaaataaaatatgagatgctgaagacaaaattgtttgaagattagaatggtgactactttgtcatcttccttctttttgagaaaggaaaggtcattcctgattgttggaaaaaaagcctccaatgcatactgattgttctctgtgtatatggagtaatgatgtcaggtgttagggtgaactcatacaccactggggaaaggttaactacaaacatgtctttcctggttgcattcagacctgtgatattccttggtggttagcgctatggggtcgggccaaaagaggacttaagaatggcatgaagtgatggcttctgctacgtcccagaccacacaggtagtgaggaagtgaggcttttaggagtcacttgctcacatcagctcaggagcctgcattttaaatgtcactctttctttgctcctaacactgtatagtccaaaccccgaggacttgtcaacatctgagcagtgttgtgctttgagccacttttaggggagaaaaaaaggctccatttttccattctgtagttttcttaagatagacatgtgttttgtagtctcctgctagtaaagtagttttgctttctaagctataacagttgactttattcttctactctgagaatcttgacctgtttgagtgtacataatatatataaagggagccttaatggatttgttttcataatttaatattttttgtatttgctcttgtataattgttttttttatggaaagtattacagaatcgagggtggaattcttagaaccaaagttattcttaataaaaatcaccaatgcttgg

SEQ ID NO: 1522 - DNA, 2239 bp, Cricetulus griseus
ggataatttgtagaagctatgattcgccaacttaaagaatcactaaaagcaaataactataatgaagctgtatatttggtccgttttctatctgatcttgtgaattgtcatgtgattgctgccccatctatggttgctatgtttgagaattttgtaagtgtgactcaggaagaagatgtgcctcaagtgcgacgggattggtatgtgtatgcatttctgtcatctttgccttgggttggaaaagagttatatgaaaagaaagatgcagaaatggaccgaatcttctccaacactgaaagttatcttaaacgacgccagaagactcatgtgcccatgctacaagtatggactgccgataagccacatccacaagaagagtatttagattgcctgtgggcccagattcagaaattgaaaaaggaccggtggcaggaaaggcacatcctaagaccctaccttgcctttgacagcatcctctgcgaagcactgcagcacaacctgcctcctttcacaccaccacctcacacagaagactcggtgtacccgatgcccagggtaattttcaggatgtttgactacacagatgacccagagggtcctgttatgccagggagtcattcagtggagaggtttgtcatagaggagaatcttcactgcatcataaaatcctactggaaggaaaggaaaacttgtgctgcacagctggtgagctatccagggaagaataagatccccttgaactaccacatagttgaggtgatttttgcagagctgtttcagcttccaacgccccctcacattgatgtaatgtacactacactgctcatcgaactgtgcaaacttcagcctggctctctgccccaagttcttgcacaggcgactgagatgctgtacatgcgtctggactcgatgagtacaacatgtgtagacaggtttattaattggttttctcatcacctaagtaactttcaattccgttggagctgggaagattggtcagattgtcttactcaggatcttgaaagtcccaaaccaaagtttgtaagagaagttctagaaaaatgcatgaggttgtcttaccatcaacatatattagatattgttcctcccaccttctcagctctgtgtcctgcaaacccaacctgcatttacaagtatggagatgaaagtagcaattctcttcctggacattccgtggcactctgtttatctgttgcttttaaaagtaaggcaactaatgatgaaatcttcagcattctgaaggacgtaccaaatcctaaccaggatgatgataatgatgaaggcttcagttttaacccattgaaaatagaggtctttgtgcagactctgctgcacctagcggccaaatccttcagtcactccttcagtgctcttgcaaagttccatgaagtcttcaaaactcttgcagaaagcaatgaggggaagttacatgttctgagagttatgtttgaagtttggaggaatcacccacagatgattgctgtccttgttgataagatgattcgtacacagattgttgactgtgccgcagtggcaaactggatcttctcatcggagctgtctcgtgactttactaggttgtttgtttgggaaattttgcactctacaattcgtaagatgaacaaacatgttctgaagatccagaaagagctagaagaagctaaagagaaactggcaaggcaacacaaaagacgaagtgatgatgatgacagaagcagtgacaggaaagatggggccctggaggagcaaatagaacgactgcaggagaaagtggaatctgctcagagtgaacagaagaaccttttcctcgtcatcttccagcgtttcatcatgatcttgactgagcacttggtacgatgtgaaacggatgggaccagcatattgaccccatggtataagaactgcatagagaggctgcagcagatcttcctgcagcatcaccagataatccagcagtacatggtaaccctggagaacctgctttttactgccgagttagaccctcacatcctggctgtatttcagcagttctgtgctctacaggcctaacagtcatgtatcttccctttttatcttgaaataatttgtcttatttttgatggtttgaatgtttgctttcttgtagtagcctttcacttcctaaaggaaacaggggaggagttaaaaaaataaaaaaaaaaaaaaaaaaaaaaaaaaaaaaaaaaaaaaaaaaaaaaaa

SEQ ID NO: 1523 - DNA, 2239 bp, Cricetulus griseus
cagcagccttgctggagagaaggccctagaaacctgtagcttaggggggtgggggccccagatgttagtcggtccaaagaggaaggaagaggctatcatcatagtggaagatgatgatgaggatgaaaaggaaagtgtgaggaggcggcatcggcgacgtaggcggaggaggaggaagcagaggaaggtgaaggagagccgagagaggagtgcccagaggatggaaagcatactgcaggccctggagagcattcagatggacctggaggcggtgaacatcaaggcaggcaaggccttcttgcgtctcaaacgcaaattcatccagatgcgaagaccctttttggagcgcagagacctcatcatccagcatattccaggcttctgggtcaaagcattcctcaaccaccccagaatttcaatcttcatcaaccaacgcgatgaagacattttccgctacttgaccaatcttcaggtacaggatctcagacatatctccatgggctacaagatgaagctgtactttcagaccaacccatactttacaaacatggtgatcgtgaaggagttccagcgcaaccgctcaggccggctggtgtctcattctaccccaatacgttggcaccggggccaggaaccccaggcccaaactcgcaggggccatgacaccagacaaagcttcttcaactggttttccaaccacagcctgccagaagctgacagaattgctgagatcatcaagaatgacctatgggttaacccagtacgctactacatgagaggaagtggctacagaacaaacagaaagaagcaaataagaaagggaagtaaagccaagaatgcatacgaaatggtgatcatggaagatgttcatgacccttttgccattgaagacattctcagtgaaatctcagaaattgatgagatcactgacaatgagaccattcatgacatcaagatctctgacttcatggagaccaccgactactttgagaccagtgataatgaggtaactgacgtgaatgagaccctgtttgacagcgagaaccctgaccttaatgagggccccaacaataagatcactaacaacagagagcgcaatgcttcaagtccagatgacagcagtgagagcccagaagaaaagaacgcctatgacagtgaggattctaataatgagaaagctgacggtgacaacgaaaccctagaaggtgacaataagcagggtaataatatccaagacagcagtgatagtgacaatggagatgagggcagtgatgatgatggcaatgaaggagacagtgagggcagtgatgatgatggcaatgagggtgacaatgagggcagtgatgatgatgacagggacattaaatactataagaatgccattgaagtctttgataagactctggataacagcaccaaccagcataactatgaggaggagatccaaatcatctctgacgactcaacagaagaagaggaggcggccattgaggaagctatcgtgctaagcgaggacagctacgaagaggaccaagtctatgaggtggaagcaagtgaagtgatctcagatgactctgatgtccaggaagtgctgccggtcccaaacgcttgggccagcctggggaagaaagggaaaatcggataaacatattaccctttgggggctctctctatatacccctataccctaccccatttgccctcctattcagctagggctgtgcggccccgcattgcacttcgttgggggggggggagaccgacgtgttacacgggtttaaagtttatttttatggtttagtgatgcagagttcttatttggaggagggattaccctcccctttggccctcctcccctgcaggcttctgtgtgctgctaatcttatttattgtgatgccttggtcagggcccctctagcccccttctagtgagcataggcccaagcccctctctccgtgctgtgtgaacatccctatcactaagtgaggagatccgctgtgaccttcgtcacaactacgcagtggtctccagactctgctaccacccccttctcccgaagtttctctccaacccctttcttcccttcaccagccctgaccactagcccgcctcagtgtctttgcaaggcagcttcgcctttgtggtattcctgctccccagaagcaccgcccctttccccgtgacccctcgatgagcctaataaaactgagcaaattacaaaatgaaaaaaaaaaaaaa

SEQ ID NO: 1524 - DNA, 2239 bp, Cricetulus griseus
caagttctagtatccctgctaataaccctttagttactcagctgctccagggcaaagatgttcccatggagcaaattctgcctaaacctctcaccaaagttgaaatgaaaacagtcccactgactacaaaagaggagaaggggataggagcattccctggtaccaatgtaatggaaagtaacaccagagaggaagttaatggcaggcaggcctatttggccatccagcagttgtggaaaccctttcagagtaagcagctttcccaggtcccaaggccagtcttcgaagctaaggacctgagggactcttgcattgacactcaccaatacccagaaggactaagtaaaacactttcatttgtgccaccctctcagtttgactttgctcactcaggtttccagttggaagaagtagccacaagccagaaattcatgttgggctgtcctggcagaaggacatccaagcctgcaatggcgggtcactatttacttaatatttctacctatggcaggggttcagagagcgttaggaggacccattctgtaaatcttgaggaacgattttgtctaagtagccccactgaagatgtgaaaatgggatatgcagattgtaaaaacacaactggagacagcagcagcagcaaagaagatgaaactgatgaagagaatgtgagtgatgagcagaagcctgtgtcagtgaaggaggagccctgggatgctcaaagctctggcaagcatccccacagtggggaaactgtgtcctccggtgattgtttagctagcaagaatggtaaaagctgaggcaccaacgagtgagcaaaatcactttaggcaaggagaattacatattctctagaggccaaaacatttgatgaaaagaccctagccagagaatttattcaggcagcaacaataaacaaatggctcatgctgtgagagctaagacagtatgtagcagccccgagcttttcaattctactgctctttctctccctgcagacagtcccacgcatcagcctctgctccttccaccactgcaaacccccaaattgtatggaagccccacacagatagggccaagttatagaggcatgatcaatgtctccacctcatcagacatggaccatagctctgctgtaccaggtagccaggtatctagcaatgtaggggatgtaatgtcattttcagtgactgtcactaccatccctgctagccaagctatgaatcccagcagccatggccagacaattcctgttcaggcctttcctgatgagaacagcatcgaggacgcgccctcaaaatgttactgccggttgaagccatgatcatgtgcaaaggatgtggagctttctggttaaagagctgagctcttctgatacagatcctgagttcaattcccagcaaccgcatggtggctcacagccatctgtaatgagacctggtgccctcttctttgcatcacaacagtatgtgctaagtggaaagcttggccatgggtagtttgtagctcaatttatagaacagtccaaagagactttgcaaaaacatgatgacaggcagggaccttttcctatgtgtttcaatacctacatacctattgaacaaaacagtaggtaaacatttcctaaagttgaagcaatagcttcatagagtcttggttactttatttttttaatgctttacatttgatacaactattaaagatcaattttaaaataactttccagtaatatattttaagtaatatatattttaatatctatgtaaaaagtgacagtggaagacggaatttctcatatgtggtatgtttaatgtaggatctcactgttaaggcacaaattatttcaaaggagttactctaaaaacacattatttcccaaaagaaaaatgcaataaggggaatgatttgggggctttattttttattttaaaagaaaatagacttatttaccacaagctatttttccctctctgatgataaggtttgtacagactggtttggtaaattccaaatttttgtgtcatttgcctttttaaaggaattgttaacattggaattgagggtatgtacagagaagttggtgtcgacgccatttaataagtcatattttttcacaaataaggaaaaatcattttaataagaattttaagtatttgcaataaatatatgtatatagattgtatgtattcatatattatttttcattttattattaagtaaaagataattaaaagtgaaa

SEQ ID NO: 1525 - DNA, 2239 bp, Cricetulus griseus
  modified_base (2082)..(2082): a, c, t, g, unknown or other
  modified_base (2109)..(2109): a, c, t, g, unknown or other
acagaaaataccattgaggatgaagaggaggaagaggaagatgaagaggaagatgacttggaagttaaggaagaaaatggtgttttggtcttaaatgatgcaaactttgataactttgttgctgacaaagatacagtgctactggagttctatgcaccatggtgtggacattgcaagcagtttgctccagaatatgagaaaattgccagcactttgaaggataatgaccctcccattgctgttgctaagattgatgcaacctcagcatccatgctggccagtagatttgatgtgagtggttatcccaccatcaagatcctgaagaagggacaggctgttgactatgagggctccaggacccaggaagaaattgttgccaaagtcagagaagtttcccagcctgactggacacctccacctgaagtcacgcttctattgactaaagataactttgatgatgttgtgaataatgcagacatcattctggtggaattctatgccccgtggtgtggacactgcaagaaacttgcccctgaatacgagaaggctgccaaggagctcagcaagcactctcctccaattcctttagccaaagttgatgccactgaacagacagacctggccaagaggtttgatgtctctggctaccccactttgaaaattttccgaaaaggaaggccttttgactacaatggcccacgagagaaatatggaattgtcagctacatgattgagcaatctgggcctccctcaaaggagattctgaccctgaagcaggtccaggaattcctgaaggatggagatgatgtagtcatcattggggtctttcagggagacagtgacccggggtatctgcagtatcaggatgctgctaacaatctgagagaagattacagatttcaccacactttcaacactgaaatagctaagttcttgaaagtctccatggggaagctggtattgatgcagcctgagaaattccagtccaagtatgagcccaggagcaatgtgatggatgttcagggttccacagagccatcagccattaaggactatgtggtgaaacatgctttgcctctggtgggccaccgaaaaacctccaatgatgccaagcggtacaccaagcgccctctggtggttgtatactacagtgtggacttcagctttgattatagaactgctactcagttttggcgtaacaaagtcctggaggtggccaaggacttccccgagtacacctttgccattgctgatgaggaggactatgcgacagaagtgaaggacctgggtctcagtgagagtggcgaggacgtcaatgcagccatcctagatgagagcgggaagaagtttgccatggagccagaggagtttgatgcagacactctccgggagtttgtcacagcttttaaaaaaggaaactaaagccagtcatcaaatcacagccaatacccaagaacaacaagggaccagtcaaggtggtagtgggaaagacctttgatgccatcgtgatggatcccaaaaaggatgtcctcattgaattctatgcaccctggtgtgggcactgcaagcagctggagcccatctacactaacctaggcaagaaatacaagggccagaaggacttggtcatagccaagatggatgctactgctaatgacatcaccaatgaccgatataaggtggagggcttccccaccatctattttgcccccagtggggacaaaaagaacccagttaaatttgagggtggagacagagatctggagcatttgagcaagtttatcgatgaacatgccacaaagaaaagcaggaccaaggaagagctttaaaggcctggtggtctgcagaaggtgaagggaccagacactgtagtggacatcattaggcaccaagcaacacaatgacagtatcttgacttctttttttaatgctttgttgtgccacctcatgctctgaatactgaatagccatgaatgacttgatagtttcaactaagtaatttttttggaaggtatacatcttattttatctattttgggttttttttttttattttttaactatttacttcctttttttttnttttttagttaaaactttaaaaaaatnaaaaaaaaaaaaaaaaaaaaaaaaaaaaaaaaaaaaaaaaaaaaaaaaaaaaaaaaaaaaaaaaaaaaaaaaaaaaaaaaaaaaaaaaaaaaaaaaaaaaaaaaaaaaaaaaaaaaaaaaaaaaaaaaaa

SEQ ID NO: 1526 - DNA, 2238 bp, Cricetulus griseus
caaagagattgattttgatgatgtggctgcaataaacccagaacttctacagcttcttcccttacacccaaaggacaatctgccactgcaggaaaatgtaacagttccgaagcaaaaacgcagatcagtcaactccaaaattccagctccaaaagaaggtcttcgaagccgttccactcgcatgtccactgtcccagaggttcgaattgccactcaggagaatgaaatggaggtggagctgcctgtggctacaaactctcgaaagcagttttcggttgccactggcctccctaggccctcctgtcctgcaatgacagaattaccgttgtcgatggtcagcgaggaggcagaagagcaagtccatcccacccgaagcacatcttctgcaaccctgtcggaggaaatcatgtattgtgaaggaaatggaaaaaatgaagaacaagcgggaagagaagagggcccagaactcggaaataagaataaagcgagctcaggaatatgacagcagctttccaaactgggaatttgcccggatgattaaagaattccgggttactatagaatgtcacccacttactctgactgatcctacggaagagcacaggatctgcgtgtgtgtgaggaagcgcccactgaataagcaagaactggccaagaaagaaatcgatgtgatttctgttcccagcaagtgtttgctctttgtgcatgaacccaaattgaaagtggacttgacaaagtatctggagaatcaggcattctgcttcgattttgcctttgatgaaacagcttcaaatgaagtcgtctacaggttcacagcaaggccactggtacagacgatttttgaagggggaaaagcaacctgctttgcctatgggcagacgggcagtgggaagactcacacaatgggtggagacctgtctggtaaatctcagaatacatctaaagggatctatgcaatggcttcccgggatgtcttccttctgaagagtcagcctcgctaccggaacttaaacttggaagtttatgtgacattctttgagatctacaatgggaaggtgtttgatctgctcaacaagaaggccaagctacgtgtactagaagacagcaagcagcaggtgcaggttgtgggacttcaggagtacctggttaactgtgctgatgatgtcatcaagatgctcaacatgggcagtgcctgcaggacttctggacagacttttgccaactccaattcttcccgctcccatgcctgcttccagattcttcttcgagccaaagggagattgcatggcaaattctccttggtggatctggcagggaatgaacgaggggctgacacttctagtgctgaccgccagactcgcatggagggtgcagagattaacaagtctctcctagcactgaaggagtgcatcagggcgctgggacagaacaaggctcacaccccattccgtgagagcaagctgactcaggtgctaagggattcattcattggggagaactcgaggacttgcatgattgccatgatctcaccaggcataagctcctgtgaatatactttaaacacgctgagatatgcagacagagtcaaggagctgagcccccacagcgggctcagtggagagcagccaattcaaatggaaacggaagagatggaagccagctctaatgggacctcgctggcagtcaatttcaaggaagaagaggagctgtcttcccagatgtccagctttaatgaagccatgagtcagatcagggagctggaagagagggccatggaggagctcagggagatcatacagcaaggaccaggctggcttgagctctctgagatgactgatcagccagactatgacttagagacctttgtgaacaaagcagaatctgccctgactcagcagactaagcagactaagcacttctcagccctgcgagaagtcatcaaggccctgcgtgtggccatgcaactggaagaacaggctagcaaacagatgaacagcaagaaacggcaccaatgatgacttcaataaagatctgtttatgtcacaccagcctcttcccctatccagcaaactttgggcaccttctggctttggttagggactgagttggatgggttttggtaaatgccaggtaaggggcatcaggcccaggaagactcggagagagaattgctgttctcttgcttagtttggagcaggaggaaggagcttttcatgactgcttccccttttcctcccc

SEQ ID NO: 1527 - DNA, 2238 bp, Cricetulus griseus
taaccagccaaaataatagagaccatttgtgccttggttcgaagtggctgtgcctttatggtccatgtatgccaagatgagcaccaacttttacaatgaattttttcacaaagccaacgtcaaaattagatgaacttttggagaaattgtgcgtgtcgttgtatgatgtgttccggccattgatcatccatgtcattcacttagagacattatcagagctttgtggcattcttaaaaacgaagtgcttgaagaccatgtacagaacaatgctgaacaactgggggcatttgcagctggagtaaaacagatgttggaagatgtacaagagaggcttgtgtaccggacccatatctacattcagacagacatcacaggctacaaaccagcacctggagacttggcatatcctgataagctagtcatgatggaggaaattgctcagagtttaaaagatgagcagaagaaggcttcaacagactccctcaatcctcgaccacagaacacgatttctccagcagatcttcacgggatgtggtatcccacagtgcgaagaacgcttgtctgtctctccaaattatatagatgcatagatagggcggtgttccaaggattatcccaggaagcattgtctgcctgcatacagtccttgcttggagcatcagagtctatcagcaaaaacaagactcagattgatggacaacttttcttaattaagcaccttttgattctccgtgaacaaattgctccatttcacactgaattcaccattaagaatttcctggacctcaagaaactagagcagttcattcagcagcagaccaagctgtttgtagagcagctggaggagtttatgacaaaggtgtcagcattaaaaaccatggccagtcagggaggccccaagtacaccctctctcagcagccttgggcacaaccagcaaaggtcaatgaccttgtggccagtgcttacaagacaataaaaacgaagctgccactgacgttgagaagcatgtcactgtacttgtccaataaggacaccgagttcatcttgtttaagcctgttaggaacaacattcagcaagtctaccagaagttccatgctctgttaaaggaagagttcacccctgaagacatccagatcatcgcttgtccttcaatggaacagctgaatctcctgctgtcagtttctaaatagtaccattggaccatggatgtcaaccgtctatcccatgggagaggcctgaggagtcctgcagcctgcaggatgcccaagacccccatgtgggatggcttctgagaaacatgggtgtgcctttataaagtgaagaatactctggttgcctgtgctgtactagacaccagctttctggggtccccagtcctgcaatagccaaacacctacctgtggcaaacactgcccatgaattaaatacaccaccagtcaagggtcaaaggactataagcatccctgaattttcctgtgaatcccgcctgaatttgggattggattggcttagaccctggtgttacagtaaatgtagcctgcttcttcagttactcaaactgtagacttgaaggtgggactgtgctgagggctctgaaatagggcaggtgacctcatggtgcaggtggagtgactggaaggagcagcttcttgcacagtgtgcgtgtgggtgacccatcctgatgcaacaggccacttggttttcaacccagtttaaattggtggtggacgttgcttggtagagcatattactctctattttgggaaactggaaggtaagaggggtccatatttttctttgctatgaaatgaatgagttaaggaagattgtatttactattttaatacatgtctaatgtgataaagtgtaatatccagttctgtgtattatatgtacatttggtgttcaaatagcctttccaaagaaattagggcgtgattgtacagcactgtgacccagtagtctgatgcacagagcccgacacgttctccaggagacacttgttcttgggtttgattttttttatttctgaaaacactcaacaccttaccaagtgctgggaaggtggtactgatccaatttgtttgctgaatgaatatttgtttaaatctgtacagtttcaagtgtttacttatacagagtgtacatactttgaaataattaatttaaaatgctttatattatttagctagaaattgctgtttttaataaattaaatttttttaaaaaataaag

SEQ ID NO: 1528 - DNA, 2238 bp, Cricetulus griseus
cagcctttcccaacagcaggttctttccctggagcagcaatgcagggaacgcactcatgctctggaggcccagattgaagctctggaacaaacacgggtggccaacaagatagcttcagagaaggaaatgcaacagctgcagcaggagaatatggcccttaaagaaagcagaaatgaatgtgaacgttctttacaacatcaccaatttgaacttaagaaactaaagggaggagggtgcggaaacagagggaagagttccagcaacaggctgcccagctgacaaccatcatagaagagaaaaatcggaacctgtgtgaaaaggacaaagtgcttctccataaggagcaggaacttcgccagctggagaaaggtcacgattctgccctactacagattcaccaactgcagagtgaactggaggccttgaggagctgtagagcccaggaggctgtagaacccacaacaggagaggaccccctgcagctgcagggccaggagccaacttgtcatcgcaaaagccatgcatgcagcagaggatgctggaacttaagaagactctacagaaggagctgaaaatcaggcctgacagtgagctttttgaggtccgggaaaagacaggccctgagataccaaatatggccccttctgtcaccaataatgctgacctgactgatgcccgagagatcaactttgaataccttaaacatgttgttttaaaattcatgtcctgtcgagaatctgaggcttttcatctcataaaagcagtgtcagtgctgttgaacttttcacaagaagaagagagcatgctcaaagaaactctggagtataagatgtcttggtttggatccaaaccagctcccaagggcagcatccggccatctatctccaaccctcggataccatggtcctagaaccacccaaggagggagctacatgggctgacactctgtgaaaaaaatactgacacaccagacttgggtgggtttttaattgctgttaactgcagttttttgtgtaagtgtctagacactgtttacaagccttaggccaacctccttgcaagctggtatgaacttcactgggcactgcccagatcttcgtagtgctgctaatatcccagctctggccagctatagttgagtcctctatctttgaacattagcacttaaaattgaagtgattggcatatcagggaacaactaattatcaaacagaggttacatgactgaagggggagtcagtcctttcatagaaaagccaactcaagggtggtcgttgaagtccccttccagtagcatgttggggttcctcatgcaatgttgcctctcaagaaagtatcatttcattttgtttccccaaccacctagaacttgagatgtgtccatctcataggtaacggggccaatgtggactgatgagtatgcaactttccagttcctggagtaaagctagcaagcagacggaatgatctctacgtagagcaccaaatacactcagttgccttcttaatgaatgtgctcgtcttggatgggttgctggtaaaccattttaaactatttttatagcaaatgttcttcactattataaacatgtcttctgtatcataaaatacatttaaaacactacattcatacctggcatccagacagcccagttggctgctgcccttgatagcatatatgcctcagttttatctgatagaaacttacgttcatttttacacttgctttggataagccactttagctctcaagggaaaccatttgatttgagtttgaaagtttcattagcaattaaagtaataactggagcttctaaagttaacatttatctaggtaaatttatatttttctatcttaaggccaacatatgtatgtacacacatacagtgtgcctgccatacagaaatccaagtatttgcagcatttgccttctaaatcaggatggcattgctttggctgtggctcctcttaggcccactcatttaaatggctttcctgctgcacgttaagctccttcagcactagaagagtgcaatagctattctaaggagcttgatgcactttacttctataacctttgataacgagacagtacatgtagccctttatatatgagcactggactgtgatcttactaccaatgtaaataggggtggcattatctaaaaactgctgtgagtcatttgtggtgcaatactttttgattaaagcacttcaggatgcaaaaaaaaaaaaa

SEQ ID NO: 1529 - DNA, 2238 bp, Cricetulus griseus
tctgacattcaatataggaccaaagatgcttcaacttggatccaggtccctcttgaagatacagagtctcccgaacatccttcactgtccaggaccttaaacctttacagaatatgtgttcaggattcgcaccatcaaggaggatggcaaaggctactggagtgactggagtgaggaagcaagtggaatcacatatgaagacagaccatccaaaccaccaagtttctaggtataagataaatccacggctcatatggaaggaattacctctttctgaagccaatggaaaaatcttggattatgaagtgattcttacacagtggaaatcattttcacaaaattacaccgttaatggtacagaattgatagtaaatctcacaaataatcactatatagcatcgctagcagcaagaaatgtagttggcaaatcagatacggctgtcctcaccatccccagctcccacttcaagaaactactctatatcttacagaaccagtattggaaatgaaattgttgtgaatgtggattcttcccacacagaatatacactgtcccctttgagtagtgatacactgtacatggtacgaatggcagcgtacacagatgaaggtggaaaaggatggtccagagttcacgtttacaacaccaaagtttgctcaaggagaaatagaagccatagtggtacctgtgtgcttagcattcctcttgacaacgcttctgggagtcttgttctgctttaataaacgagatctaattaaaaacacatctggcctaatgttccagatccttcaaagagtcatattgctcagtggtcacctcacactcacccaaggcacacactgatgtgagtgttgtggaaataagaaagacaaacaacaaaaagaccttgtccagatgatctgaaatcattggacctaatcaagaaggaaaaaataagtacagaaggtcacagcagtggcattgggggatcttcatgcatgtcatcttccaggcccagcatctccagcaatgaggagaatgagtctgctcagaacaccgcgagcactgtccagtactccactgtggtgcacagtggctacaggcaccaggtcccctcagtccaagtcttctcaaggtccgagtccacccagcccctgttagactccgaagagaggccagaggatctgcaattggcagataatgtagacagcagtgatgagattttgcccaggcaacagtatttcaaacagaactgtagtcaacctgaagccaatccagatatttcacattttgaaaggtcaaaccaagtttcatcgggcagtgaggaggattttgtcagactgaaacagcagcaggtttcagatcacatctcacagccctgtggctctgagcagcagagactgtttgaggaaggtcctgccacaggtgctcttggcgcaggcactgatggacaagtagagcagtttgaatcagttggaatggagactgcgatggatgaagaaattcctaaaagttacttgccacagactgtaagacaaggtggctacatgccgcagtgaaattctggctcctgcaaagctttagtgggacctataaaggaaagctaaaacactcatctgtgacttaagatggaaagtcatctttactccctgaagatagtcattgcccttaaggacaaagtcacaactgggccatctccattccagagtgtctgggatcctccttcaagcactacatgaactgactctgtcctctaaatggctgaagtactctgtgctgtttggatgtttgcactgaagaaaatgtgtgtctgagatttacaaagctgtggaccaggctggcctcaaactcagagatcagtgcctctgcctctacagagctgaagaagccgtaagggttttgtaaagtttgctgagtggggattgaacccatggccttgtacatgctagacattcactctaccactgagctacccacccacacatctcattctgttgtttaggctcaagtgatcctcctgtcccagcttcctgaggatctgggactttgggtatgtgctgtcacacccaacaaaagatggtatttttgatatctgccatttctgaggtagagttttacatgtgacttaggaatatttaaacctagtcctggttgctttgttaaaggaacaatccaggtatgcagggtttagcactaaagccattaatgtatttgtgcctaacttcccagtgtgacatggaggcaggggctgaagtaga

SEQ ID NO: 1530 - DNA, 2238 bp, Cricetulus griseus
acagacagcgcggtcgggttttgggggcagctggaggagggattcggcaactcccagaagttgaggcgccgcggagcgtgggcgcagagaagagcgagttaaactttgcgggctgtgcaggaggtcggcggccggacaccatggcactgccattccggaaggacttaactgagtataaggacctggatgaagatgagctccttaacaatctgtcagaaacagagctgaaacagcttgaaactgtcctggatgatctcgaccccgagaatgctcttctgcctgcagggtttcggcagaagaaccagacgtcaaagtctgccacgggaccctttgatagagaacatctgctttcttatctagagaaggaagcattggaacataaagaccgggaagactatgtgcccttcactggagagaaaaaagggaaaatttttatccccaaacagaaacctgtgcagacttttgcagaagaaagcatatcccttgatccagaattagaagaagctttgacaagtgcctctgatacagaattgtgtgatcttgcagctatccttgggatgcacaatctgattacagacacacagttctgtgacgtggtgagaagtagtaatggtgtcaaccaagaacatttttcaaatgtggtaaaaggtgaaacgattcttccagtgtttgatgagccaccaaatccaaccaacgttgaggagagtttaaagagaattaaggaaaatgatgcccgtcttgttgaagttaatttgaataatataaaaaatatcccaattccaactttaaaagagtttgccaagactctggaaaccaacacacatgtgagacatttcagtcttgcagccaccaggagcaatgaccccgtggctgtggcatttgcagatatgctgaaagtgaacaagactttgaagagtttaaatatggagtccaacttcatcacaggcactggggttttagcactgattgatgctttgagagacaatgagaccctgacagagctcaagattgacaatcagaggcagcagttgggcacagctgtagaatcagaaatggccaagatgcttgaagagaatacgaatatccttaaatttgggtatcggttcacgcagcagggaccccgaaccagggcagccaatgctataacgaaaaacaacgacttagtgcgcaagaggcgaattgaaggagaccaccagtaagagtgccaagggtaacatttggaagcctgcagatgaccagaggctcctgttggtgacaacagatgtaaaaacttcctgggtagaaggggaaagactggaaatctttgttaactatatgcattattttcctagcttaaggtattatgtttgatttgtaaaatcagtaatgggtagtattttatatttttagcctttctactgaaatcattttaatttagcttaattgaatggtttgtattttttagataaaaatgcagttgtaggaaaagtttcagaagtcatgtatgtaagaataatttgaacaccttgaggaccaatctttttaaagcaaaaagggatattgctcacttgatattaatgttgctccttatagataaaggatacagcacatggccggttacctttatgaatttggcaagagtttgctttttccttattagggaaataactgtggacatttacatttttgtaaaagctagtggttaaaaaagcatcaattataatggaaaacagtgtttaccttgatctttaaaagtctggcacctcctgactttttattaactcagtattttcaaattcctctgagatttttatgacatagtaataaattaggactttgcaacagttttaattaaattgctcttttaaaaagttttaaatggcccattttataaaactgtgcatttgtatttgtcttgttataattttcagtatgcctacatgaaattgtatacattaaattcaatgctagtctctaatattaatactttgaaagtagattttggtgctatacacttactatagctaaaatctactggagtttaaagaataaatgaaatacatttttctaaaggtgcctgtcattccaaagaccaaataaacattttgtgttaaccatattagcggctgctggtgattttaaggacagcgtctttgattattgagttgtacatcatcactagtcaaattagccgtgtactttatccaaggggtgcactcctgaaaagttacgtgtaaatagagctttaaagagtgtttt

SEQ ID NO: 1531 - DNA, 2237 bp, Cricetulus griseus
cctgggaacatgattacgatgcctttgttttgccgctgctggaggaccaagcagccgtgttatgtattattcaggttagactctcagaacgcccagggatatgaatggatattcattgcatggtctccagaccattctcctgttcgtcaaaaaaatgttgtatgcagcaacaagagcaactctgaaaaaagatttggaggtggccacattaaggatgaagtatttggaacagtaaaggaagatgtatcattacatggatataaaaagtatctgctgtcccagtcttctcctgcgccactgactgcagcagaggaagaattaagacagattaaaattaatgaggtacagactgacgtgggtgtggacacaaagcatcagacactacaaggagtggcatttcctatttctcgagacgctttccaggctttggaaaaactgagcaacaaagagctcaactacgtgcagttggaaatagatataaaaaatgaaataatcattttggccaacacaacaaacacagaactaaaagatttgccaaagagaattcccaaggattcagcacgctaccacttctttctgtataagcattctcatgaaggagactacttagagtccatagtttttatttattcgatgcctggatacacatgcagcataagagagcgcatgctgtattccagctgcaagagccctctgctagaaattgtagaaagacaactacaaatggaggtgatcagaaagattgagatagacaatggggatgaactgactgccgatttcctttatgacgaagtacatcccaagcaacatgcccataagcagagttttgctaaaccaaaaggtcctgcaggaaagagggggattcggagactgattaggggtccagcggaagcagaagccactactgattaaaagtgttttatgaaatgttgcaatatagttttgtaaaattccagcttttagtacaaggagaactgaaatcattccatgttgatatagttgggaggaaaattgtactttttgaaaaatagcactttccacttctatgtattttttaaattaatgctatagaagactcctgatttctattttttagttaaagctagacaagatttcaacataatcatgtttggttttgtctcactgttttcatagcgtgttgattccacacttttcacataatcttcaatattttacataggtcagccagttccagaacgcctgagacttgctctagtactctgcagtgaggtctgagtttcccttttttttttttttttttggtttgtcttttttgtttcttgtttttcttttttctcaaaacatgtgttttctgaagctttgtattttcatttacaacctagaaattttgagcctcagttttttgatacttgaaatagagggagatagaacacttcatattttaatctgctaaccctgctgcagagccataacttggaggagttttgaaatggactatggtattcaggatttggaagtcctttacctgaacttcatgctgcgtaagataaatatcagtaatacacatttcatggtatgaaatatgaagccctcttgttgcaaagcattattactgaaggtaatacatgcgcctttcagaaattcagttgtgttcacatagaccatatgagaggagttacgggctcatgggatttttaaaaatagatttgagtatttgtgtgttttgtttgtttacaaacacttagactttactatttaaatatgcagaacttttggcagtaatgttgcacttgtttactagaggtaaacttttagttttacgtgtgcacacgtagtcacatgtgcccacagattgctgctgtgagagtcctggagccttgttgcagaccatcgccaaaagctgccattttccagcagagggagtactactgccggtcatgaagatctgaaactggtggtgactttctgaagcaccggtgtgcagttatgctctgaattctatcacactacatccaagtaaatgcacattccagaatatagatgtgatcatgtaaccttactaataattaaaccaatgattgctgagaatcacttatgcatttgttttaaggtataactcattgtttacagtatgttttaggtgacaatagatgtgaataacattcccaataaatttatatagcagtgaaaaattacatgtcttctgtggacattttataagtgcattttatatcaataaaattttttctctttga

SEQ ID NO: 1532 - DNA, 2236 bp, Cricetulus griseus
ggcgcgcggggtctgatccgggcggtggtcggcgggcttcggtcaatcggccccggggtgcgcgcggaaggtagagtaggtgtcgggtgcctgccctgggctcgtggccatgaacctggatcctctgcggaagcgcgtccggcagtacctggaccagcaacagtatcagagtgctctgttttgggcagacaaagtagcctcactctctcatgaggaaccccaggatgtttattggttggctcagtgtctttacctcacagcacagtatcacagagctgcccatgcactgaggtcacgcaaactggacaaagtgtatgaagcatgccgataccttgcagctagatgccactatgctgcaaaagagcaccagcaggctcttgacattcttgacatggaggaaccgattaacagaaggctctttgaaaaatacatgaaggatgaaagtggctcaaaggacccttccagtgactgggaaatgtcccagtcctcgataaagagttcgatttgtcttctacgtgggaaaatctatgatgctttggataatcgcaccctggccacctacagctacaaagaggctttgaaacttgatgtctactgttttgaagcatttgatcttttgacatcacaccacatgttgacagcacaagaagaaaaagaacttcttgactcactgcctcttagcaagctctgtgctgaagaacaagaattgctacgattcgtatttgagaacaaattaaaaaagtataataagcccagtgagactgtcattcctgggacagtagatggcttgcaagagaatctggatgtggtagtgtctttagctgagagacattattataactgtgattttaagatgtgctacaagcttacttctgcagtgatggaaaaggaccctttccatgccaactgtttacctgtgcacataggaactctggtggagctgaataaagcaaatgaacttttctatctttctcacaaactggtggacttgtatccaggtaatcctgtatcttggtttgcggtgggatgttactatctcatggttggtcataaaaatgagcatgccagaagatatctcagcaaagctaccacattggaaaagacctatgggcctgcttggatagcctacgggcattcttttgctgtggagagtgaacacgaccaagcgatggctgcttatttcacagcagcacagctgatgaaagggtgtcacttgccaatgctgtatattggactagaatatggtttgaccaataactctaaactggctgaacgattctttggccaagccctgagcattgccccggaagatccctttgtcatccatgaggttggagtggttgccttccagaatggagaatggaaaacagcagaaaagtggtttcttgatgctttggaaaaaattaaagccattgggaatgaggtaacagttgacaaatgggaaccattgttgaacaacttgggtcatgtctgcagaaaactcaaaaaatatgatgaggctttggattaccacaggcaggctctggtgctaatccctcagaatgcgtccacctattctgctataggatacattcacagtctgatgggcaacttcgaaaacgccgtggactatttccacacggctcttggtcttaggcgagatgacacattttctgttacgatgctgggtcattgcattgaaatgtacattggtgattctgaagcttatattggagcagacattaaagacaaattaaaatgttacgactttgatgtgcatacaatgaagacactaaaaaacatcatctcccctccatgggatttcagggactttgaagtagaaaagccaaacacagaggaagcagggcttgcacctctggaaaactccactaaaactccagactccagacctcccttggaagaaacttttgaaattgaaatgaatgaaagcgacatgatgttagagacatctatgtcagaccacagcacctaactcaagacagtggtctagaacccacccccccccacgcttatatttgtaggtcagtattcccttatatccttgctagtcttagaatttcccacttcctaaggtgagtccaaactacatttctatgttgaggaccagtggcctgaattaagagatgggttagcacaccttggcagcagatatattctgatattctgaatctacaaagtagttatacatagtacaaataaagatggacaaatattaaaaaaaaaaaaaaaaaaaaaa

SEQ ID NO: 1533 - DNA, 2236 bp, Cricetulus griseus
cgcgtagcggacatggcgagctcccgggtcccacagcagcttttcctgcagggtgtggccgctgtctacacgtttgcctttgcgtccctctacacccagatcccaggcctctatggcccagagggaatccttcctgctcgaagaacactgcggccccaaggcaagggtcggtggcagcagctgtgggaaacgccaacactgctatgggaggcaccaagactggggctggatactgcccagggtctggatctactgaccttattgggcaccgtgctagcactgggtgccctgctcctgaactctctgcgacaccccttcatctacctgttgctctggattgcctacctatcagcctgccaggtgggccaagtgttcctttatttccagtgggattccctgttgctggagaccggcttcctagctatactagtcgccccactgaagaagccttccaaccgcaagagggtggattatcaggggccttaccccatgagaacctcccattctggcttgtgcgctggctgtctgtttcgactcatgtttgcctctgggcgtggtcaagctgaccagccgctgccctgcgtggtggggactcactgccctcacctaccactacgagacacaatgcctgcccacaccagctgcctggtttgcccaccacctgccagtctggctgcacaagctcagtgtggtggcccaccttcctcatcgagatcgcacgtgccccctctgttctttgcccctgttcgccgcttacgattgatggccttctacactcaggtattactacaggtcctgattatcattactggcaactataacttcttcaacctgctaaccttggtgcttaccacttccctcctggatgaccatcacctgtctgctgagcctggcctcagatgccacaagaaggtgcccacctgctggcccaaggtcctgctgaccatgctatccctactgctggaactaactgtttatgggctgctggcctatggcaccgtgcactactttggcctggaggttgactggcagcagcatatcattctttctaaaaccaccttcaccttccaccagttcttccagtggctaaagatggtgactctgcctactgtgtggctgggggcagcctccctgacctgggagttgcttattgccctctggaggtggatccaggtgcaaggatggctgcggaagttctttgccagtatccagctctccatcctgggtgctgccacagtggccttgttcttgatcagcctagtaccttactcctatatggagcctgggacccacaggcatctctggactggggctcatcgcctgttcagttctgtggaacatctgcagctgaccagctcatatggcctcttccgtcggatgactggtctgggtgggcggcctgaagtggtgctggagggcagctatgatggacaccattggacagagatagaattcatgtacaaacctggaaatgtgagccgaccaccccctttcctgataccccaccagccacgcctcgattggcagatgtggtttgcagcccttggcccacatacacaaagcccctggtttaccagcctggtgctacgtctcctgcagggcaaagagccagtgatccgcctggtccagaaccatgttgccaagtacccgtttcatgagcagccacccacctacctacgggcccagcactataagtattggttctcaaagcctggagagcacagccaatggtggcaccgccagtgggtagaggaattcttcccctctgtatctctgggggacccaaagctggaaatgctgctccaacagtttggacttcaggataggagtccactccggggccgcagccccagcaatgccctcgcacagacactaaactgggtgcgaacacagctgtctcctctggagccgtccatcctgctgtggggactcttgggggctgtggtgactgtcagagttgtacagaccctacttgccccctgcccactccagtcctcaaaattgtctagagaagaaaaacgtaagcagactcccaaaaaggattccagagctgcctctgagcaggctgcccccaacagaaacagcagtgactctggggcctcccggaggaaaaaatagcttcatgtgctgtcagccagccacatgtcctgatggaattatatccctagaattgcatcccatctcatgtcacagcccagccacggtgccttgggcagtcctgccagggcagatgcag

SEQ ID NO: 1534 - DNA, 2235 bp, Cricetulus griseus
aagcacacaaaagcggaggagcagcactgtgatgaaggaaggatggatggtccattacaccagcaaagacacactgcggaaaagacattactggagattggacagcaagtgcatcacactcttccaaaatgacacaggaagccggtactacaaggaaattcctttatcagaaattttatgtctggaacctgcgaaaccttcagcattaattcccattggagctaacccccactgttttgaaatcactacagcaaatgtagtgtattacgttggagaaaatgtggtcaatccttcaagtcccccaccaaacaacagtgttttcaccagcggcattggtgcagatgtggccagaatgtgggaggtggccattcagcatgctctcatgcctgtcatccccaagggctcctctgtggggtcaggaaccaatttacataaagatgtttctgtgagcatttcagtttcaaattgccagatccaggaaaatgtggacatcagcaccatctatcaggatttttcctgatgaagttttgggttctggacagtttggaattgtttatggaggtaaacatcgtaaaacaggaagagatgtagctattaagattattgacaaattaagatttccaacaaaacaagaaagtcagcttcgtaatgaggttgcaattttacagaaccttcatcaccctggtgttgtaaatttggagtgtatgtttgagacgcctgaaagagtgtttgttgttatggaaaaactccatggagacatgctggagatgatcttgtcaagtgaaaagggcaggttgccagaacacataacgaagtttttaattactcagatactagtggctttgcggcatcttcatttcaaaaacatcgttcactgtgacctcaagccagaaaatgtgttgctggcatctgccgatcctttccctcaggtgaaactttgtgattttggttttgcccggatcattggagagaagtctttccggaggtcagtggtgggtaccccagcctacctggcacctgaggttctgaggaacaagggctataatcgctctctagacatgtggtctgttggggtcatcatctatgtgagcctcagtggcaccttcccttttaatgaagatgaagacatccatgatcagatccagaatgcagccttcatgtatccgcccaatccgtggaaggagatttctcatgaagccattgatcttatcaataacttgctgcaagtgaaaatgagaaagcgctacagtgtggacaaaaccttgagtcacccgtggctacaggactatcagacctggttagatttacgagagctggaatgcaagattggagaacgctatattacccacgaaagtgatgactcgaggtgggaacagtatgccggtgaccaggggctgcagtatcccgcacacctgatcagcctgagcgctagccacagcgacagtcctgaggctgaagagagagagatgaaagccctcagtgagcgtgtcagcatcctctgactccatcctctctaatctgtcaaaacactgtggaattaataaatacatacggtcaggtttaacatttgccttgcagaactgccattattttctgtcagatgagaacaaagctgttaaactgttagcactgttgatgtatctgagttgccaagacaaatcaacagaagcatttgtattttgtgtgaccaactgtgttgtattaacaaaagttcccagaaacactaaacttgttattgtggatgatttatgttatatttaatacattaaacctgtctccactgtgcctttgcaaatcagtgtttttcctaccagagcctcgttttggtaagaggcagcacctatccatgacatcattgtgtttggtgtgcccccatcgatggcagtgttgttataagcaaactcttgaggagtagataacttgctggtgttctgtgaacaactcaaaatgcatggggggagggggttgaaagatggctataaggcatataaagtcctaagattgagttgcgtgaagacagttttactggatggtttcaaatgttctggccatttggtgagcctcagtgtatttaaactcccgtaagtgcccctcaaaagcctaactgccttagaatgcaaactgctacacagaccagatgcatttcttcctttcctacagtaccaactgtgttacagaaaaccagcaactcagcaaacgttggccttttgtgtatttttcaataataaataaata

SEQ ID NO: 1535 - DNA, 2235 bp, Cricetulus griseus
  modified_base (269)..(269): a, c, t, g, unknown or other
gaaggttcggtggcagtcgtcggttgttccagctggtgggaggttggcttcacggtgctgggcgctgggcccctagtttatgtagctgggaagttgggctgcggggtcgtccctgtcctcctgcttccggtgttcctgggtttccttctgcggcgcggggcctcgccacggactcgccggccctgtggggccgcggcttgagtggtgccttcctgcgagtcctaagtacattttaaaaccttcaagatggttctagcagatcttggaanaaaaatacatcagcattacgctcattgagcaatgccaccattatcaatgaagaggtattaaatgctatgctaaaagaagtatgtacagcattattggaagcagatgtttggacaccaactaaaggaaagcagaatgtgatcatgtttgttggattgcaagggagtggtaaaacgacaacatgttcaaagttagcatattattaccagagaaaaggttggaagacctgcttgatatgtgcagatacattcagagcaggtgcttttgaccagctgaaacagaatgccacaaaagcaagaattccattctatggaagctatacagaaatggatcctgtcatcattgcttctgaaggagtggataaattcaaaaatgaaaattttgaaattattattgttgatacaagtggtcggcacaaacaagaagattctttgtttgaagaaatgcttcaagtttctaatgctatacaaccggataacattgtttacgtgatggatgcatccattggacaggcttgcgaggcgcaggcgaaggcttttaaagataaagtagatgtagcttcagtaatagtgacaaaacttgatggtcatgcaaaaggaggtggtgctctcagtgcagttgctgccacaaaaagtccaattattttcattggtacaggggaacatatagatgactttgaacctttcaaaacgcagcctttcatcagcaaacttcttggtatgggtgacattgaaggactgatagataaagtcaacgagttgaagttggatgataatgaggcacttatagagaagctgaagcatggtcagtttacattgcgagacatgtatgaacagtttcagaatatcatgaaaatgggcccattcagtcagatcttggggatgattccaggttttggaacagattttatgagcaaaggaaatgaacaggagtcaatggcaagactaaagaaactgatgacaattatggatagtatgaatgatcaagaactggacagtacggatggtgccaaggtttttagtaagcaaccaggcagaatccagagagtggctcgagggtcaggtgtctcaacgagagatgtccaagaacttctgacgcagtataccaagtttgcacagatggtaaaaaagatgggcggtatcaaaggacttttcaaaggtggtgatatgtctaagaatgtgagtcagtcacagatggcaaagttgaatcaacagatggccaaaatgatggatccacgagttcttcatcacatgggtggcatggcgggacttcagtcaatgatgaggcagtttcagcaaggtgctgctggcaatatgaaaggcatgatgggtttcaacaacatgtaaagaagatgccttcatataaactgccgtggttgattatgtcatctgcgggaggagtggctggttttttccaaaagtcatcatatttctgctttaaatcttctgttagtttcactgtcataacacttcttaagttaaacaaatcatgatgtaaaattttagtacataaaggtttttaattgtctcaaaagccaagcattacatttataaacagtcccgatcagtaaaattacatgatattgaagaaaagtgctgcaaaataaacttcaagtgataagttaaagggttgttaactttctttatggtttaacgtggtcagtgtaccccccccagaaagtagacaaagagctaacggatacatttaaagggagatatggtagaataatctaatcatgaatattaggaaatgttatttattttagaataaaataactttattacaaaaaactcagctttgctatttaaattgaaatcaagagtttgattatagttcataatgtgtgatgtttgtatccaacttaaatgttttacatgttttgggagttccatagtccttgattgtttttaaagccatttttgtgtttcttacatattactgaaaattaatgttttgtataatagataa

SEQ ID NO: 1536 - DNA, 2234 bp, Cricetulus griseus
catagtttatgctgttaacaacaaacattctattgataaggtaacaagtcgatggattcctctcataaatgaaagaacagacaaagacagcaggctgcctttgatattggttgggaacaaatctgatctggtggaatatagtagtatggagaccatccttgacgctgagaggttttctctttttacatacactttttatccagagggggaggcatgagacaacttggactgtccttcgacgatttggttatgatgatgatctggatctgacgcccgagtatttattccccctgctaaaaatacctcctgattgtactactgaattaaatcatcatgcatatttgtttcttcaaagcatctttgacaaacatgatttggacagagactgtgctttgtcgcctgatgaacttaaagatttatttaaagttttcccttacataccttggggaccagatgtgaataacacagtttgcacaaaacgaaagaggctggataacctaccagggcttcctttcccagtggacgctcacaacctacttagatgtgcagcgttgcctggagtatttgggctatctaggctattccatactgacggaacaagagtctcaagcttcagctattacagtaacaagagataaaaagattgacttgcagaaaaaacagactcaaagaaatgtgttcagatgtaatgtaattggagtgaaaggctgtgggaaaagcggagttcttcaggctctccttggaagaaacctaatgagacagaagaaaatccgtgatgatcataagtcctattatgcaattaacactgtttatgtatatggacaggagaaatacttgttgctgcacgatatctcagagtcggaatttctaactaaggctgagatcatttgtgatgttgtgtgcctggtatatgatgtcactaatcccaagtcctttgaatactgtgccaggatttttaagcaacattttatggacagcagaattccctgcttaattgtagctgcaaagtcagacctgcatgaagttaaacaagaacatagtatctcacctactgatttctgcaggaaacacaaaatgcctccacctcaagccttcacttgtaacactgctgatgcacccagtaaggatatctttgttaaattgacaacaatggccatgtatccgcatgtgacacaagctgacctcaagagctccacgttctggcttcgagcaagttttggtgctaccgtttttgcagtcttgggctttgctatgtacaaagcattattgaaacagcgatgattaaacaaaacaaaaatggcctaccaaaagcaaatacttttatgtacattctgaatgctttaaattctgctagaaatattgagatatttatacatgcagagttactttattaatgtttgtaattcatgcataagagtattttactgatagtaatgactgcagtattggatggcatgtggagagaaaacaccttagtagccaaacttaagtggctaaatttcataggccaaaagggaatattttgtaaataatgtatatattcaagcaagatatggtttcccacactgagttctagaaatggtatttgcaaacatttctacattagtgtcatagtgttcacttggctcatcctgctaggtttcagtcaccagagattgtgttactcatggatcacatatttatttcacattgactcaggatgatcctttggcttctagagccatttctctgtgtttttaagatcacacaggagtcaaggtcagctttccaaaaccacttcgtttctgtcacagtaggctagcatcaaagccattgtaaaatctagaaaattgtgtagctgagtgtgtgactgagtactgaggcagaagcagttagcaaaggtgttacctatgtgactatattgcttctttgtcagtgtgtgggattttatagccctttcaatcaaatgggaaaacaatttgtatattatcaatgtttttagtttaaataaacaagccaccctgaccactgctgaatttcacctgaagtgaaaaccattctataaaggctgtgtctgttgtatattgctatagctgcatgtgtcatgaagtgttctatatctggccaggataatctagagacaacacttttttaatggtaaaataaatctaatgaatataaactctcacaataaacctatttttccatcattgaccttttcaggtatttaaataaataaatgctgtgtaatgtga

SEQ ID NO: 1537 - DNA, 2234 bp, Cricetulus griseus
ggggtgtcctgttcttttccacccccaaggcatttcaggaaatggtccagcgtctctatggccgtttcctgagagtctatatgcagagcaagagaaaaggagaaggggcacagaccccgaactagagggtgagctagacagccggtatgcccgccgaaggtactaccgactcttgcagagcccctctatgtgcaaggatgtggcagtgacaaacagcagtgctggtgcccgacaggcactggagcagttccaccagctcagccaggtcctgcatagactcagtctgctggagagggtcagcgctgaggccgtaaccaccaccctgcaccaagtgactcgggaaaggatggaagaccgctgccggggagagtatgaacgctcctttcttcgtgagttccataagtggatcgagagagtggttggttggcttggcaaagtgtttcttcaggacaacactaccaggccaagttctccagaagcagggaacacactgcgccgttggcgctgccacgtacagagattcttctaccgtatctatgccaagactctcggccagccattgaggaccttaaatactgcttggagaggacagatctgaggcagcagctgcttgtgtccctcaaggtggccctagagactcgactcctccacccaggtgtcaacacatgtgacatcatcactctctatatttctgccatcaaggcattacgtgtactagatccttctatggtcatcctagaggtggcttgtgagcccatccgtcgataccttaggacacgagaggacacagttcggcagattgtggctgggctgacaggggactcggatgggactggggacttggctgttgagctatctaagactgaccctgccaacctggagacgggccaggacagtgaggatgattctggagagcctgaggactgggtccctgaccctgtggatgctgatccagggaagtcaagttctaagcgacgctcttcagacatcattagcctgctggtcagcatctatggcagcaaggacctctttatcaatgagtaccgctcgctgcttgcagatcgcctcctccaccagttcagcttcagccctgagagggagattcgtaatgtggagctgttgaagctgcggtttggtgaagcccccatgcacttctgtgaggtcatgctcaaggacatggcagattcccgacgcatcaatgccaatatccgtgaggaggatgagaagcggcctgtggaagaacaaccaccatttggggtctatgctgtcatattgtccagtgaattttggcctcctttcaaagatgagaagctggaggtccctgaggacatcagggcagccctggatgtttactgcaagaagtatgagaaactgaaggctatgaggaccctcagttggaagcacaccctgggcttggtgacaatggatgtagagctggctgaccgcaccctgtctgttgcagtgaccccagtgcaggcagtggtcttgctgtatttccaggaccaagccagctggaccctggaggagctgagcaaggtggtgaagatgcctgtggcattgctgcggaggaggatgtcagtgtggctgcagcagggtgtgctacgggaggagcctccaggcacgttctctgttattgaggaggagcggcctcaggacagggacaacatggtgctcattgacagtgatgatgagagcgactcaggcatggcctcccaggctgaccagaaggaagaggaactgctgctcttctggacatacatccaggccatgttgaccaacctagaaagcctttctctggagcgcatctacagcatgctccgaatgtttgtaatgactggtcctgcactggctgagattgacctgcaggaacttcagggctacctgcagaagaaggtccgcgaccagcagctcgtctactctgcaggtgtctaccgcctgcctaagagttgcaactgatggcccccttccaggctctgacccatagcattcatgcctgtggaaagacagctaggataccttctgaccccatgtccatgtgcccagcctccacccattccctgcctaacaccccagagtacaaattaaagtagattggttcatccttttgtgtagttttttggacccacatggtcatatatagatttgtcctctatggccaccctaacttagctctgtagggcctattttcccagtagcaggtaatggggctacccaatcaaccaggcttactccag

SEQ ID NO: 1538 - DNA, 2233 bp, Cricetulus griseus
  modified_base (973)..(973): a, c, t, g, unknown or other
  modified_base (2215)..(2215): a, c, t, g, unknown or other
ctttttgaactgtttccttttattctcttaggggtatttggagggcttttgggggagcctttttcattagggcaaatattgcctggtgtcgtcgacgcaagtccaccaagtttggaaagtatcctgttctcgaagtcattattgttgctgccattactgctgtggtagccttccccaatccatacactaggctcaacaccagtgaactgattaaagagctgtttacagattgtggaccgctggaatcctcctctctttgtgactacagaaatgacatgaatgctagtaaaattgttgatgatattcctgaccgtcctgcaggcgttggagtatattcagctatctggcagttgtgcctagcactcatatttaaaataataatgacagtattcacttttggtatcaaggttccatcaggcttgtttatccccagcatggccattggagcgattgctgggagaattgtggggattgccgtggagcagcttgcctactatcaccacgactggtttatcttcaaggagtggtgcgaggttggggctgactgcatcacgcctgggctttatgccatggttggtgccgctgcgtgcttaggtggtgtgacaagaatgactgtctccctggtggttattgtttttgaacttacgggaggcttggaatatattgttcctcttatggctgccgtaatgaccagtaaatgggttggtgatgcctttggtagggaaggcatttatgaagcacacatccgactaaatgggtaccctttcttggatgcaaaagaagaattcactcatacaaccttggctgctgacgtcatgagacctcgaagaagtgatcctcccttagctgttttgacacaggacaatatgacagtagatgacatagaaaacatgattaatgaaaccagctacaatggctttccagttataatgtcaaaagaatctcaggagtattaggtgggtatttcgccctnaagaagacacctgacaattgacaatagaaagtgccagaaaaaacaagaaggtattgttggcagttctcgggtatgttttgcacagcatactccatctcttccagcagaaagccctcggccattaaaactgagaagcattcttgatatgagcccttttacagtaacagaccacaccccaatggagattgtggtagatatcttccgaaaactgggtctgaggcagtgccttgtaactcacaatgggcgcctccttggcattataacaaaaaaagatatcctccgtcatatggcccagacggcaaaccaagaccccgcttcaataatgttcaactgagttctgtagatgaggagagagaggagacagaagaggaagttcgtttgttgaatagcacaattctttaatgaaggactcgtcctacttttttactaacttttaaaaaaaaaaagaaaggaaatacaagccgagcttttgcaacctggtttgcaaataatgctgggagagcagagggattgtctggggagggagaaggaaaaggagtgaggtacttctctaagtgactggagcagtaattcatctcatgtcgatctgcactggctgcatttgctgaggctgtgcagtgagagtgcaggcctgagccttcatggagatggagccttcactgggaatcctcaagcctctggctggccttcagcaccacagtgacacgttctcagtccctgtttctagagggattactttgaattgagccatctattatgactgcaaggtcttgcccttttatatcagaactgttctgtttaactcatgaaacgtatagttaagcattacctttctacattccaaaagagcttctctctctttccccttcccttttctgagctgtaagaaaacctctttaaattggtgtgtccttttgaagcagtcctttctcatattgagacgtactgtgattttactgaggtttcatcacaagaagggaatgtttcttgtgccattaaccatgtagttggtacacatcactaaaggcttagaaatgtgcatacacaccactgctggccaagcagtaaaatcttgagatgggaatgaaatctcctagcatgtgtggtgtgattcagatcaaaaacaagaaactggactctaatcagtttttttttttcctcttctagactttatggataatgtgacctactcttatgcaaattttctatttctaaaattcctactatgacaaactttttttnttttttaagaatatatca

SEQ ID NO: 1539 - DNA, 2233 bp, Cricetulus griseus
gcaggacctgagaagctgagtgtaactttgatgatactatggggctgaactggaggagagtaacaaaaacgtgaagaagctggacgccatgaccctcattaaagaagacatgtccatcttcgggcactgccctgcccatgatgacttctatttggttgtatgtaaccactgcagccaggtggtgaagcctcaagccttccagaagcattgcgaaagaagacatgggcccctcagcaagctttatgcccgggccccacccccacctccagcccctgccagctctcagaaatgccatgtagtgaatgggcagggcccagcttgtagagccccaggttccaccaaaacctcctccagggagaagggccaggggtcccggagccgtggccatcagcctcctgagaagacccagaaggacaacctctgccttttcgtgcctgtggtgaatctggagaagatgtccagtctcccgaagcctgatggacatggagtcagggtggctccaccctctgctttcctcagtcagccacgaggcctccccaaggactcccctggaaaacgtccccacggccccctctcctaaagaacctcctggcagagagaacatggagttaatcccgggtgagggctccagtcaccgggccgaaagcagccccccggagaaggagcccagtggagccaggctgcctcctaaaacccaccgaaagatggctcgtaaagagtttgaccttaacaggcagtgtggggtcataaatccagagaccaagaagatctgtacacgcctgttgacctgcaagatccactcagtgcaccagcgcagggaggtcccaggcaggaccaaggactttgacgtactagtggctgaactgaaagccagctctcgtaaaggagagtctcccaaggagaagagccctggacgaaaagaaccagctcttgaacgcccctcccaggagcctccctctgccatccagggtgtggcagcagcagctgcccccaacaacacctctgctcgttctaagcaggcctacccatactgtgtacttcccaggtcccaggcctcctctgagagtgaggcggatgatgaaggtccctgtggtggtgatggggatccaggcctattcccattccctctgccccggggcggggcccaggcctccagcgaggagagtgaggaggaggggacacctgatgatctccaccttccccctgactgccattatacaacccggccccctaggccacaggcgttttgcacatttggaagccggctggtaagcccgggatgctatgtgtttagccgccggctggaccggttttgctcagcactcagctccatgctagaacggcacctcagctcacacatgtggaagaagatcccaccagctgctgaacctccatcccatcttgtcagcccctccttatctgatcccctgagtccatcctctatgggcagctgcccccgacttccaggcccacccccaagacctgcctgcccagcctccataccacccatgaaggacagccttgtccctagctaccctgcaggctcccccagtgtagcagctgcctgcagccaggccaggagtgcatgggcggtagccaggctattacctcaccactgcctgccaacactccatctccatccttcagcaagctcgccaccttccaacggccagccaagtcgtccaaaggcaaggaaggggtggagatggaggccccttctcgaaagaggaagttatcccctggccctaccactttcaaacggacctgcatcctggagcctgctggaaaaggcaaaccctctggctgtcggggtctctcagccaagtactaagacaaccctgagcatggggcttaatggaacagtggggccaagagtgaaaagagcaggtcccctggactgtcggggttcccctcattcatcccccataccagtcaaggcttctcagctagagaaccggggaatggctggccacccagctaaggtcctgccatccaactgcctctctgaggaggaggtagccaagaagcggaaaaacctggccacttactgccggccagtcaaggccaagcactgtcaggctggtgtccctcctgatgggacctgctctgtgcgtcgcaagaagccaggtccagccctgccctttgaggagaagtgctctacactgaagtcaaagccattaacgagaaagtgcctgcccactgcaacggagccgccagcacctcctcccttcca

SEQ ID NO: 1540 - DNA, 2233 bp, Cricetulus griseus
tgaaattgctgaacaagagatgcctgccctgatggccttaaggaagagagcccaaggagaaaagcctttggctggagccaaaattgtgggttgtacacacatcactgcgcagaccgctgtgcttatggaaactctgggcgctctgggagcgcaatgccgatgggctgcctgtaacatctactccactctcaacgaagtggctgcagctctggcagaaagtgggtttcctgtctttgcctggaaaggagagtcagaggatgacttttggtggtgcattgacagatgtgtgaatgtggagggctggcagccaaacatgatcctggatgatggaggagatctcacgcactggatttataaaagtaccccaacatgtttaagaaaatcaaaggcatagtggaggagagtgttactggagttcacaggctgtaccaactgtccaaagctgggaagctgtgtgttccagccatgaacgtcaatgactcagtcactaaacagaaatttgataacctctactgttgccgtgaatctattcttgatggacttaaaaggacaacagatatgatgtttggtggaaagcaagtagtggtctgtggctatggagaggtggaaggtgctgtgctgctctgccaagaactcagctgtgcctgtgtctgtgcctactgggatctcttttcttacccaggactcctttctgttccttgaatattatgttcattttaatgcttcctggttccaagaggggtgtgcctccatgatcttaatacctctggtgttggccaggcatttgttttgctttctaaccccactaaactctgttcaggaagtagggggaccagctccactgggacccatagttttgcttccttgtcatttaactggaccgttttctaggaagccccctctagactggcactgtctcagaaaaggagagcttcatgtggatagtgctttctgaaacttctggaactgagttggcaaaggtgtttgctagagatttggaagcttgagactttggagtgggatcctgtttgacatcctaaagagcaagtctgtttgtttccaggaagatgtcatggctggctgcagagacagatgactctgtgggaaggaggtgggaacgagtttgaacctcatcagacatccgtccctgtggctgttgcccttggtaaaaagtgagatctgcaatctgagatctcatctttctttgctgctgctgctgctgctgtatctttatgatctggccccttctgtttaaggattctgtttcagagagtttcttaagtaactccagcattataaaagagctagtaatataaacagtgtgaaatttctcattccacccaaggtgtgtgcctggaagctagtctggaaatggcttatttttgtaagatagggaaacagaactggggtaggtggctatttgccttattagatggtatatataggctcagcccagaaaatggattcttcacagggcatcatctgtggctatattctcttataaggaagaccatagaggctgaagagttcacaaagatattcaattctgtttgcctcactctgatttctagctaccaggaggcaagaagaaggctgattatctctaggtatgtggccctggtccatggggacacataccgcttatctgcaatgaaatgtgtactacttcaaggtcttcttgctttcttggtggaaacattgtttcctttttcttgttaaacaaaattcctctaggccacctcccctctgccattctcactcctcatgttcccctcccatgagagcacagctcccatggccacacactcctgcaaagctttttttttgctgcttggcttttctctgaacagatctgaaattgctgctcctgtggtttcctcagaattaactttgtcatgttttaaaaaaaatcagaatgcattattgcattaagcttttttaataaaggaaaattatggaaagaaaataggtaacaccagcaaattatatattgacaagtctaaactatatatatatatatatatatatatatacatatatacatatctatataaataatcatctagttcttcctgtcatcttactgaaaggaacaagacctctaaggatcaccagttctgagaagctcttggaaattttatgtctaagtgattgtattagatcagcaataatgactatgtaatctcaaaaaataaaataaaatattcttaaaaactaaaaaaaaaaaaaaaaa

SEQ ID NO: 1541 - DNA, 2233 bp, Cricetulus griseus
aataggtattcttcaggtgttatacttttgtcctggttttaagtctggagtgaagcacttatttaatattatttcaaggaagaaagaagctctgaaggatgactctaatcagaaagataagggaagctgcaaagaagattctttggcaagttatgagcttatatgcagtctacagtccttaataatttctgtggaacagcttcaggctagtttcttttaaatccagagaaatatacagatgaacttgctacacagccaagacgactgcttaacacactcagggtgtgtttctgaaaatgagagtacaagaccttctcaaaagaaatcaaaagttaaaataaattggctaaagtctacaactaagcaacccagcattctttctaagttctgtagtctgggaaaaataacaacaaaccagcgatccaggggacagcctagagaaaatgagtgtgatcttgaagaggacttagggaagcaccagactgatcccacagctaatggtggtatactggagtctccaggaagcagtgtgaacgttagtgaagtgaagcccataaacaaaggtgcagaacatatggttttgaactggtagagaaattatttcaaggtcagctagtattaaggactcggctgtttggaatgtgaaagcttaacagaaaagaagagaagattttcaggatattagtgtccctgtacaagaagatgagctttctaggggaagataaatatttttgtgaaaattgccatcattatacagaagcagagcgaagtctcttatttgataaaatgccagaagttatcactatttcatctgaagtgctttgctgctagtggcttggagtttgattgttatggtggtggactttccaagatcaacactcctttattgacgcctcttaaactgtcactagaagaatggagcacaaagccaactaatgacagctatggattatttgctgttgtgatgcacagtggcattaccattagtagtgggcactatactgcttctgttaaagtcactgaccttaacagtctagaactagataaagggaattttgtgtttgaccagttgtgtgaaataggtaagccagagccactgaatgaggaggaagcaagggggatggctgaaaattacgatgatgaagtgtcaattagagttggtggaaatgcccagccaagtaaagtttagaaacaaaaaaaaatgtagaagctgttggacttcttggaggacaaaagagcaaagcagattatgagctgttcaacaaagcgtccaatcctgataaggttgccgggacagcatttgttgaaaatagaaattctgaaactaatgatactaatgggacccatgaatctgacaggaacaaggagtccagtgaccaagcaggcattaacatgaatggatttgagaacaaaatttcttatgtagtacaaagcttaaaggagtacgaggggaagtggttgctctttgatgattctgaagtaaaagttacagaagagaaggactttttgaattctctttccccttccacgtctcctacatctactccctacttgctattttataagaaattatagtaagtatattttccttgtgtatatattaaacagacctggataaacattggtaaagttcattacacctaagagtctttagtttatctttgaagctgttggatattattggtctctctaggcttttatatagtgagattttaaatactgaaaaccatgttaatttttagaatcattttccttagtagagactagtggtgcataagcttctgggaacaaacttgtataggtactaaatgatccaaaatggaagcttggaagcagtaaacatttttggatttactacgatcttttgtgtttgctttttaaaataaagtgcttgtatttgtattctccatattttggagtaattatctacttgatgtttataagtctggctttttcacctgagaaacagaatctcattcagtatatttagttttataatagtcatggaaccaaatctttgggctgtatcagaggcacaaagtccagaatgtgtatattcacaatggtgtatattttgtgccttgaataactttgtaaagtgtctcagaaaacctggcagtcccttctatcttcataagaattttttgtgtatttatgaagatgactgtactctagtcgatcttttgggcatgactaatttgtatctcttctatactcattctgcacgatctgt

SEQ ID NO: 1542 - DNA, 2232 bp, Cricetulus griseus
cgcgtgaactgaccgaccgttctatgactgcaaagatggaaacgaccttctacgacgatgccctcaacgcctcgttcctccagtccgagagcggcgcctacggctacagtaaccccaagatcctgaaacagagcatgaccttgaacctggccgacccggtgggcaacctgaagccgcatctccgcgccaagaactcggacctcctcacgtcgcccgacgttgggttgctcaagctggcgtcgcccgagctggagcgcctgatcatccagtccagcaatgggcacatcaccaccacgccgacccccacccagttcttgtgccccaagaacgtgaccgacgagcaggagggtttcgccgagggcttcgtgcgcgccctggccgaactgcatagccagaacacgctgcccagcgtcacgtcggcggcacagccggtcagcggtgcgggcatggtggctcccgcggtggcttcggtagccggcgccagcggcggcggcggctacagcgccagcctacacagcgagcctccggtctacgccaacctcagcaacttcaacccgggtgcgctgagcagcggcggcggggcgccctcctacggcgcggccgggctggcctttccgtcgcagccccagcagcagcagcagccgcctcagccgccgcaccacttgccccaacagatcccggtgcagcacccgcggctgcaggccctgaaggaagagccccagaccgtgcccgagatgccgggagagaccccgcccctgtcccccatcgacatggagtctcaggagcggatcaaggcggagaggaagcgcatgaggaaccgcatcgccgcctccaagtgccggaaaaggaagctggagaggatcgcccggctagaggaaaaagtgaaaaccttgaaagcgcaaaactcggagctggcgtccacggccaacatgctcagggaacaggtggcacagcttaaacagaaagtcatgaaccacgttaacagtgggtgccaactcatgctaacgcagcagttgcaaacgttttgaggacagagtgtcagggctgaggggcaatggaagaaaaaaatataacaaagacagacttgagaacttgactggttgcgaaagaaaaaaaaagtagcccgagtaccgaagccaagggtacacgagatggactgggttgcgtcctgacggcgcccccagtgtgctggagtgggaaggacgtggcgcgccttgccttggcatggagccagagagcggcggcctgttggctgctaggctttgcgatcgggctgtgcccgcgagaccagaacgatggacttttcgttaacattgaccaagaactgcatggacctaacattcgatctcattcagtattaaaggggggcgggaggggttacaaactgcaatagagactgtagattgcttctgtagtgctccttaagaacacaaagcagggagggctagggaggggagggaggctcgtgagtgccaggctagactgcagatgaactcccctggcctgccttcctcaactgtgtatgtacatatatatatttttttaatttgatgaaagctgattactgtcaataaacagcttcctgcctttgtaagttattccatgtttgtttgtttgggtgtcctgcccagtgttgtttgtaaataagagatttgaagcattctgagtttaccatttgtaataaagtatataattttttatgttttgtttctgaaaatttccagaaaggatatttaagaaaatacaataaactattgaaaagtagcccccaacctctttgctgcattatccatagataatagtagctagatggaataacagctgaatgtcaaattcgctagagtaaaagctgtgttctctgtttgattgtaggaatagatgccctgcatgctatcatagggtcatactctctcccgcagcaactcacaagtccagactgttgaccagaagatgctatggtgtttctagaggctggaaaacagggatgttgcaaaagggagaggaaagcaggcacttcagtttagagctatatcaagtggcatgtgctgtgctcgtttataatcatagagatttagcaatagatgcttcttctcaaagcagaaacccatgcaagtttttacagaagatgtctccttccaacttggaatctgacaattcctagagaaagatggcctttgcttgtgcatatttataacagcgttcttgtcacaataaatattcaaataatggttt

SEQ ID NO: 1543 - DNA, 2232 bp, Cricetulus griseus
gacggcctgcttcgcctcgtgtccctcccgccgccgccccgcagaaatgcttcgactacccacagtccttcgccagatgagaccagtgtcccgggcgctggctcctcatctcactcgggcctatgccaaagatgtaaaatttggtgcagatgctcgagccttaatgcttcaaggtgtagaccttttagcggatgctgtagctgttacaatggggccaaagggaagaacagtgattattgaacagagttggggaagtcccaaagtaacaaaagatggggtcactgttgcaaaggcaattgatctaaaggataaatacaaaaatatcggagctaaacttgttcaagatgttgccaataacacaaatgaagaggctggggatggcactaccactgctactgttctggcacgttctattgccaaggaaggctttgagaagatcagcaaaggggctaatccagtagaaatccggagaggtgtgatgttggctgttgatgctgtaattgctgaactgaaaaaacaatctaaacctgtgacaacccctgaagaaattgctcaggttgctacaatttctgcgaatggagacaaagacattggaaacatcatctctgatgcaatgaaaaaggttggaaggaaaggcgtcatcacagtgaaggatggaaaaaccctgaatgatgagttagaaattattgaaggcatgaagtttgacagaggatatatttccccgtattttattaacacatcaaaaggtcaaaaatgtgaattccaagatgcctatgttctgttgagtgaaaagaaaatttctagtgtccagtccattgtacctgctcttgaaattgctaatgctcatcgtaagcccttggtcattattgctgaagatgttgatggagaagctctaagcacactggttttgaacaggctaaaagttggtcttcaggtggtagcagtcaaagctccaggttttggggacaataggaagaatcagcttaaagatatggctattgctactggtggtgcggtgtttggagaagaggggctaaatctaaatcttgaagatgttcaagctcatgacttgggaaaagttggagaggtcattgtcaccaaagatgacgccatgcttttgaaaggaaagggtgagaaagctcagattgagaaacgaattcaagaaatcactgagcagctagaaatcacaactagtgaatatgaaaaggaaaaactaaacgaaagactcgctaaactttcagatggagtagcagtgttgaaggttggaggaacaagtgatgttgaagtgaatgagaagaaagacagagttacagatgctctcaatgctacaagagcagctgttgaagaaggcattgttttaggagggggctgtgctctgcttcgatgcatcccagccttggattccttaaagccttctaatgaagatcagaaaataggtatagaaattattaaaagagcactcaaaattcctgcaatgacaattgctaagaatgcaggtgttgaaggatctttgatagttgagaaaattctgcagagttcctcggaaattggttatgatgctatgctcggagattttgtgaacatggtggaaaagggaatcattgatccaacaaaggttgtaagaactgctttactggatgctgctggggtggcctccttgctaactacagcagaagctgtagtgaccgaaattcctaaagaagagaaggaccctggaatgggcgcaatgggtggaatgggagggggtatgggaggtggcatgttctaattcctagaatagtgctttgcccttatcaatgaactgtgacaggaagctcaatgcaggttcctcggtgataacttaagagaagtcacctgaagaaaatgaagagaaggctggctgatcactataaccatcagttactggttcccattgacaatacataatggtttactgctgtcattgtccatgcctacagataatttattttgtatttttgaataaagacatttgtacattcctgatactgggtgcaagagccatataccagtgtcctgctttcaacttaaatcattgaggcagttctactattctgttacagtcaggattgtagtgcttgtgtgaccagatgagttcagaagcagcctttctgtggagagtgagaataattgtgtacaaagtagagaagtatccaattatgtgacaacttttgtgtaataaaattttgtttaaagttaaaaaaaaaaaaaaaa

SEQ ID NO: 1544 - DNA, 2231 bp, Cricetulus griseus
gcaaggaatgattatcttcttacactagcagcagcgaatgcacatcaggaccgatactatcaaacagatttagttaacattatgaaggctcttgatggaaatgtctatgaccacctcaaggattatttaatagccttcagcaggactgagctagaaacttgccaagctatacagaacacattccaatttttactagaaaactccagcaaggtggtacgggactataaccttcagctgtttctacaagagaatgctgtatttcacaagcctcagcccttccagttccagccttgtgacagtgatactagtttaaaagccgcccaactggtggatattgagctctcccctgtcagtgccctgagaatgaccatagctgagagtcgacagttagaatcagaaactggtaccacagaggaacacagtctaaataaggaggctcggaaatgggccacacgtgtggcacgtgagcaacaaaaatattggcaaagttgtttattcctataaggcttctcaaccagatgagttgaccattgaggaacatgaggtgttagaagtgattgaagatggagatatggaagactgggtaaaggctcgaaataaagttggacaagtgggttatgttccagaaaagtacctacaatttcccacttcaaacagcctactgagcatgctgcagtctttggctgctttggacagtcggtcacacacatccagcaattccacagaagcagaactcatttcaggcagcctcaatggagatgctagcgtctgttttgtgaaagcactttatgattatgagggccagacagatgatgagttgtcctttcctgagggagcaattatccgtatcgtgaacaaagaaaaccaggatgacgatggcttctggggaaggggagttcaatggggcgaattggcgttttcccatcggtgctagcatttagtattagtgggctaacctgaaggggctgaggccacgtcttgcccattacctagactagtagagggaggttatggcagaagcagaagtggagcttccagatctgaaatgagccactttaatgttcttttgtcttttgggtgtttccctcttggtttttacagtgtatgcccttctgacctttgaacccaagtgtctggctgcattgaggacacaggcctacactgggcagctcctctactgggaaggcccttgtattattttatctccaagccagagtactggcccagatatcaggttgtgattaatgcagagcagctgtcaccttcagcaagtgcagcttcaggtcctgctgccctgacatttgtctggggtgaagaacctgtgggccctggaggaaacctgctttctgtggaacagataaaggactgcacacctgcacaggtgaaaccaaggagaccagaccttcaggtggtgggagagccatgtgccgttgcctatggcacagcagcaggcctgaagggctgcccacactggactgtaggtcttcttgacctagggaacaaagtaatgtttgccaattctctttaccttggttgggaaatgaaattcacagatttaaaggttgtacgatgttttgaaatttccatctctcctgagaatctctaaaaacttgaaatgctcacatgtccccgtgggatttttgactgataccagagctgaaggggttgtcagtcattgaccactttagcaatgatgctctgatgaatcttctccatgaatttggatttttgttttttgcatttctttatctgttgatctatttgaggtctttttatgtttatcaaacttattcttaagtttaaaaagttaaaagggtgttttaagatttttcaaatttgctgatctttaaagtgcttataatagagcaattcctgccacccagtctcttattctcttcagctaaccaaattgtgcttgatttgagtttcccataacctcagagttatttgaacttcttttgttatattttaaaatattttttggaagagctgctaattttattttaagggaacaaagttgtaaaaaaatatagcctccttttaaaaagtaaatataatccttctctccaagctgcataacccggcatcaccgtgcacaggtcagggctcagaggaagcctccgtgcagatgcgctttctttacagtggctgtaaaaagtttgtatttattatgtataaaatgttgaataataaaaaatgaaaattaagttttaaaaaaaaaaaaaaaaaaa

SEQ ID NO: 1545 - DNA, 2231 bp, Cricetulus griseus
cttcagtacctggccaagcatgagaacactcgggacctgaagtcttctcagcttgtcactcatctccaccgtgttgtctccgagctgctgcagggtggaacttccaggaaaccgtcggactcggctcccaaagccatggacttcaaagagaaacccagcttcctggccaagggatcggaagggcctgggaaaaactgtgtgccagtcatccagcggacttttgccccttccggtggggagcagagtggcagtgacacggacacagacagtggctatggtggcgaattggagaagggtgacctgcgcagtgagcagtcatacttcaaaagtgatcacggtcgcaggttcaccatgggtgaacgagtcagcacaattaagcaagaatcggaagagccccccaccaaaaagagccgaatgcagctctcagaggaggaaggccccttcactggcagtgacctgatgggttccccgtttcctgggcccccaccccaccatcagcctcccttttgcctgcccttctatctcatcccaccgtcggcaactgcctacctgcctatgctggagaaatgctggtaccccacctctgtgcccgtgttgtacccaggcctcaacacctctgcagcagccctctccagcttcatgaacccagacaagatcccgactcccctgctcctgccgcagagacttccttctcccttggcacattcgtcccttgactcttctgccttgctccaggctctgaagcagatccccctttaaacttagaaaccaaagactaaactcttgaaagagatctcctgctgcttcgcttttcttcctccctgattccaaaaccacaaaggtcggcccttcatgcagacccacatagaagattcagaatgtgtgtgacctgagtgtgtgtgtgtgtgagtgcgtgtgtgtgcgcatgagtgcttgtatatgtgtttgtatgtataggacattaggttccttctgacacagggaagacatgaaaagaatgacctaacaccagataggactgtagcagttctctgggcttttccctacccagagaagagccccctttgatacaaatcagttggatttttcataagttcaaaagcttgatctgtgagtcactcttcagtttgggagctcggtctgtctgtggctttgagaaaaggtactttcaaaagagggtttccagagcacagctcccagccagctgttcggaccccaccctcctcctttattgtcgagctgactcagagcagactgacagtggtcaggcggagctttctgctaaggtggtgaggtagccaacactggcatgtcacagtagtggtttgggcaaatttccgcaggtctcctcccccacccctgcctctgatgaataaagacaatgagtgcagttccctaactcaggcttttgtggtgattagctcaactgaggaactgaaaatggccccctttgtacaagctgagctgctagggaaccaaggtagacctgagttgggagacccgaggcacctgttctctaggtctcccttctgtggcaagctgacgaggaaaccaaaggagggtctcagagatggcagatgccctaagcatcccaaagtgtacaaagctaaataatcaattgctgcacttactactcagctagactcggatttcaagtccatcctgaagctttgaaccaagctgagcttctcaaaggcctagcagagctttggcaccccaagaccctttctgtaggctaattcctcttgcccggcagcgtatggagtgtccttattgctaaaaaggattctgtctcctttagggaagttttctttggatccagagtccttgttttcttgacttgctcagccagccctgcaccagcttttccaaatgcactatgcttgtgttttaacttcttttcccatttttatttgggcataaaaaataattgttgcctttatttgtaaagctgttataaatatatattatataaatatatgacaaaggaaaaatgtttcagatgtctatttgtataattatacttgatctacacagtgagaaaaatgaatgtattcctgtttttgaagagaagaataattctttttctctagagagaggagaggttacagtgtttatattttggaaccttcctgaaggtgtgaaattgtaaatatttttatctaagtaaatgttaagtagttgttttaaaaatacttaataaaataatcttttttcctgtggaagagaaa

SEQ ID NO: 1546 - DNA, 2231 bp, Cricetulus griseus
  modified_base (2015)..(2015): a, c, t, g, unknown or other
cagacaaagaggcagaagtagaagaatcttaccgaagaaaataaaagtccaaatagcgcctaaaagtagaagaagaacaggatttgaaatttcagattggagaactggcaaataccctgacaagtaaatttgaattcctggggattaatagacaatccaatctcccaaacttttcacatgctgctcttacagactgagactcgaattgcagactggcgggaaggggctcttaaatggaaattacctaaaacgaagatggtgaggaggaggaagaaagccaagcacacgaagttagagatgagattcttcctaagccgactgtgaaagagaagacctgcattgatccaaactccacagaatcctctgagaattccacaggttctctttgtaaagaatcattttctggtcaagtttcttcatcactcatgccacttactcccttctggaccctccttcagtcaaatgtacccgtgcttcaaccaccattacctctggaaatgccaccacccccacctccacccccagagtctcctccgccgccacctcctcctcctccgccacctcctcctttagaagatggtgagattcaggaggtagaaatggaggatgaaggaagtgaggagcctcctgccccaggaacagaggaggatactcctttgaaaccttcaacacagaccacggttgtaacgagccagagttcagttgattctacagcctctagtcctccatccactaaagcagtaaagagaaaagcagcagaaattagtactgcagtggtccagagatcagctactattggtagttctccagttctctacagccagtcagctataactgcaggtcaccaagcaatgggaattgcacaccaggctgtcgggatggcacaccaagcagtatcagttagccatgcagcagcaggaatgggtcatcagaccagagggatgagtctgcagtcaaattaccttggactagcagcagcacctgcaattatgagttatgctgaatgttctgtcccaattggagtgaccactccatcattgcagccagttcaggctcgaggaactatggcagcacctgccgttgtagaaccaccaccaccaccacctcctccacctgcacctacacccacaccaccaccgccaccaccagctcccaaagtgccaccacctgagaagacaaaaaaggaaagaaagagaaggcaaagaaaagtaaaaccaaaatgccatctttggtaaagaagtggcagagtatccagcgggagttagatgaggaagataattcaagttccagtgaagaggaccgggagtcaactgctcagaagcgcatcgaggagtggaagcagcagcagctggtcagtggcatggcagaaagaaatgctaattttgaagcccttcccgaggattggcgagcaagactgaagagaaggaaaatggcccccaacacatagttttggcagctctgttatccttcctttgcttgactatcgggatctttctgacctcctcctcgagtctgctgcccctcaagtgttgagaactgtgctgacagccacactttcccagaaatcctacagcactcttatttacatacagcaggagtagcagcagcaggtgttcagatccttgattttgagaaatccaacccctaacgtatgtggtagtaagtaaaataagccactttgttgctttgtcttcattgtcttaccgcttcaaaaattgaccttccttctatgtgtggggatattcaccatagattttggtatttaagaagcagttcactgttgtatactttctgttgtattgcaatcaggaaaggtcactttaaacagaaagaaaaaaaacaaattgtgtcttaaagctgtttgtatttctccagtttcagacattgtaaatttgtatatatgcactaataaaactttttatacttctaactggttatccctttgctcttcttgggaggaaaaggtgctttctagcttttttataagtaatacaaagctgattatggaaaataanactttataatcacaatagttaaccaaagacaatagtttggattttattctagtatattcctatgcagttaatttttttttttacttttgtattacagtgtattagattttatttatcatgtgctaatgttgagatgcccattttgtacataaaattgttttgtaatttgcatagagttaaatttctacaaataaagattatcaactagctattaaa

SEQ ID NO: 1547 - DNA, 2230 bp, Cricetulus griseus
cgatcatcctcccctctgaagacaggggagcagacacctccacatgaacacatctgcctgagtgatgaactaccaccccagagcagtcctgtccccaccaaggaccgaggcacctctactgatagcccttgtcgccgcagcgctgctactcagatggcacctccaagtggtcaacctgccactgcaccgtgggtcggcccgggggcccacctcccatcgagaccgaatcctactaccaggcagatgtgcggctggaggcaactgaggagatctacctgaccccggtgcagaggccgccagatcctgcagggcccacctccaccttcttgccacccactgagagccggatgtcagttagctctgatccagaccccgctgtgtactccacaactgcagggcggccacatccctccatcagtgaagaggatgagggcttcgactagtactgtcatccccagaagcgagctgagccaccaggtggagggtggcggggaagcctcggggagccaccgccgcctccacgggcatcactgagctcggacaccagcgctctgtcctacgactcggtcaagtacacgttggtggtggatgagcatgcccagcttgagctggtgagcctgcggccatgcttcggagactacagtgacgaaagcgactctgccactgtttatgacaactgtgcctctgcctcctcaccctatgagtcagccattggtgaggagtatgaggaggcccctcagccccggcctcccacctgcctctcagaggactccaccccagatgagcctgatgtccacttctctaagaagttcctgaacgtcttcatgagtggccgctctcgctcctccagtgctgagtccttcgggctattctcctgtgtcatcaatggggaggagcatgagcagacccatcgggctatattcaggtttgtgcctcgacatgaagatgaacttgagcttgaagtggatgatcctctcctggtggagctgcaggcagaagactattggtatgaggcctataatatgcgcaccggagcccgaggtgtctttcctgcctactatgccattgaggtcaccaaggagcctgagcacatggcagcccttgccaaaaacagcgactggattgaccagttccgggtgaagttcctgggttccgtccaggttccttatcacaagggcaacgatgtcctctgtgccgctatgcaaaagattgccaccacccgccggctcacggtgcactttaacccaccctccagctgtgtccttgagatcagcgttagaggtgtcaagataggtgtcaaagccgatgatgctcaggaggccaagggaaataaatgtagccactttttccagctaaaaaacatctctttctgtggatatcatccaaagaacaacaagtactttggtttcatcaccaagcaccctgctgaccaccggtttgcctgccatgtctttgtgtctgaagactccaccaaagccctggcagagtctgtggggcgtgcatttcagcagttctacaagcagtttgtggagtacacctgtcctacagaagatatctacctggagtagcagtgccaccaccctctgcagccctctgccccaggccagtactaggacagctggcaacggacaggatgtggcactgccacaagagaatgggggagtgagggctgttgtttcgggggggcaggggtatggggagaagcagatgcagtttattgtaatatatggggttagattcatctatggaggacagtacaggctctctggggactggtgaagggtcaagctgggggtgggggtcaggcctctgactacaaagggttcccctaggaacagaggcactgccccatcctgggtcttgtttcatgccagggatcctggcttttctagctcttggctcctgccttgacaaagcccattccacctggaagtgcccaccgtccccttcccacctcacctagagccctgagctcaggctgagtccaaccacctccggaggactttccagtaaggaaatggcaatacatgacagtcaagacatctgtggggcctctgggcagctctaacctccagcctggccagcatgctggtcctggcaggcttgtgtgcgctaggaaggagagggctacagcacgccctgccttgcggggaaaggaggcctctcagctggtcccagccatccctgtcactgtcttgtcacctggctactactattaaagtgccatttc

SEQ ID NO: 1548 - DNA, 2230 bp, Cricetulus griseus
tgagttaaggattcgagagtatccagaaagaggagatacatggcgggaaaagagagattatgttcctgacagaatgggactgggaaagagaacggttgtcagacagatggtacccatctgatgtggatagacattccccccatggcggaacatatgccatcctcacatcattcctctgaaatgatggggtccgatgcaaatttagactctgaccaaggccttggaggggtaatggttctcagtcagaggcagcacgaaatcattttgaaagctgcacaggaattgaaaatgcttcgagaacaaaaagaacagcttcaaaagttaaaagactttggagctgagccacagatggccgaccatccaccaccccaagactcaagactacagaatgcatcaagacctgggatatatccgcccccaggatcctatagaccacgccctcctatgggtaagccaccagggtcagttgtaagaccctctgctccacagaccgagatcgtgttcttgactatgagcgggatcgatttgacagagaacgcagatctcgagatgacaggaatcagtcatatcgagacaagaaagaccattcctcatccagaagaggaggatttgataggccatcctatgaccggaagtctgatacgaccaccctatgaaggcccatccatgtttggaggagaaagaagaaccttacccagaggatcgaatgcccctgccagctccttccctgggccaccagccacctccagctccacgggttgagaagaagcctgagtctaagaacgtggatgatattctgaaacccccaggccgggagagcaggcctgaaagaattgttgtcataatgagaggactgcctggcagtggaaagacacatgttgcaaaacttattcgggataaggaagtagaatttggaggacctgcacccagagttttaagtctagatgattatttcatcactgaagtagaaaaagaagaaaaagatccagattctggaaagaaagtgaaaaagaaggtgatggaatatgaatatgaagctgagatggaggagacgtaccgcaccagcatgttcaaaacgttcaaaaagactctggatgatgggttttccctttcatcatcctggatgctatcaatgacagagttagacattttgaccagttttggagtgcagcaaaaaccaagggttttgaggtgtatttggctgaaatgagtgccgataaccagacttgtggcaagagaaatatccatggaagaaagcttaaagaaataaataagatggctgatcattgggaaactgcacctcgtcacatgatgcgtctagacatccgttccttgctacaagatgctgcaattgaagaagtagagatggaagattttgatgcaaatattgaagaacagaaggaagaaaagaaagatgcagaagaagaggaaagcgaactgggttacattccgaaaagcaaatgggagatggacacttctgaggcaaagctagacaagttggatggcttgaggactggcactaaacggaaacgtgactgggaggcgattgccagcagaatggaggattacctgcagctccctgatgactatgaaactcgtgcttccgagcccgggaagaagagggtgagatgggcagacctagaagaaaagaaggatgcagataggaaaagggccataggttttgtggtcggacagactgattgggagaagatcacagatgaaagtggtcacctggctgaaaaagccctcaatcgaaccaaatatatatgagacttagttttgaatggagcgttattcctctaaggtggttcgcttttgaggttgaccagaagccaaggcctcatgaagcttcttgtgttggaagcgttcttgtgtttccacgtttcaattttgttttgtttctaccactttcatttttaaaagttacccagtatccccaggaaattttagaatcttgctgtacccaagcaagatattaattttctttttaactaatttggggagggagggttagcttaactgttgaagtctggtggggatccgtaggaggattccaacagaacatttcctccactgtacactgtcacagactatcatcattgctttgtggttgtttttgtttttttactgtatgtgactggtagttgattgtactgggattaaaaacaataaactttcacgataaagccgatgagattcataggctgtacagaaaaaaaaaaaaaaaaaa

SEQ ID NO: 1549 - DNA, 2230 bp, Cricetulus griseus
gaatgtgtatacagtgatggcaactccaaggaatactagacgctcccaactacgaagcagaatttctcaaggcagtgatagttaccagaccaatctcttagcctggaaggtaaaagcagaaccaggcaactcaaagtgtgtcttaaaagacagcagtgcagtggaggattctacacatgctgatgaccaagctgaagatgatctgcgaatagcagtagaatactttcagagaggtcccaggaaagcctcactgaataaagaaaagatcttggaaaaacgcttgaaaactttggaaaatgtggcttggaaaaatggcttagctccagaaacaatcgatattttattaaatgtggcactcagtggcaagtttgggaatgctataaacacacggatattgaagtgcatgattccagaaactctcatatctgaagattctgtggttaaggcggtgtcctggctctgtgttggcaagttgctctggttaattatccaaggtacttttttatcgttggttggttgcaatgtttgactttattgatcgtaagaagctaaattagtttggctctattggcttcttttttgcttcattgcaagatgatgctctgtgtccctatgtttgccatttgttatatttactgactaaaaggaaaatgtcaaaccatttcgtgtgagaaaattgcttgatcttcaggtaaaatgggaatgcagcctcacccccaagccttgttgtcgctgtataagttctttgctcccactttgatttctgtatctttgcctgtaaggaggaagatctattttaataattcaaagaatctttgggcttcagctctgattgctgtgaagcaaagaaaccaaggagcttttccagaacctccaaagctgatattaggtccaagtaaaggccgctctctaaaaagaaaatggagttctcactcagttataccagcactaaattctgctaacatagaatgcaggggaaagaagcatctctctgattttctcaggagtgaaatatcacttccgatagaacagcttcaaagtttccctcaacttttgcagaacattcattgcttagagctgccttctcagatgatctcagtgctgaacagctctctgctacttcactatattaattgtgtcagtgatgaggcaatcttactgaggctcagttattggctgagtcaaacattacaagaagaatgtatatggtataatataaataattatgaacaagaaaaagaatttacaaacttcctggacattgtcatcagggtgcagtgcttcttacaagaggggttttactcctgtgaagcattcctgtataagagcctgcctctctgggatggcttttcttgtcggtcacagttccttcagcttttgacctggattccattcattagcttctctgaggtgaagccactttttttttgatcatctagcacctctcttctttacatcaaccatttatttcaagtgtagtgttctacaaagtctgacagaactacttcagaattggctgctgtggctttccatggatgatcacgtgcaaccggtgacaagcagtcctctggagacaactttgggtggatccatggactctgtggttcagttgattgactacgtaggctggctgtccgtgattgcaatacgcttggagagcaacagtacattgttgttgcactttattttggacttctatgagaaggtgtgtaacatatatataagttatgatcttccaatattggtgttatttcctactgcaatcttccattctgcactcctgagcctggatgccagtatcttgaaccaactttgttacattatatacaggtatcgcaataatttgacagctgcaaagaaaaacaaccttttaaagaaggaaaaatcagagttcagtctcagcagcaagatctgtcaagaatttaattactatttgacagttatggttcattgcttatggatgtccacaccatttgaaaaaggagtatacattgatccccaaatcttggaaaatactgaagtaacagagtatagaaacagcttaaatttagtccaccatccttctctattgagctatgcagcttgctttttgctacaggaaagccccgaagaaaggacagtagacgtgagctctattcgggggaagaaatggaaccggtatttggactatttattttcagagggttttcagggcctgaaacttttcataaaaagtagtatccattgttct

SEQ ID NO: 1550 - DNA, 2229 bp, Cricetulus griseus
cacgctccgggctccctccccgacgctggcccggtgaccgtggcgcggcgacggcggcggcggcggacagtcgtcatggccgcctctaagcccatggaggcggcgatggcggcggcggcggcggctgcgcccagttctggaaatggagtgggcggtggcggcgggactgcgggccccggctcgggcgcggggaccctggcgcgatggcacgtggctctggccatcggggcgcccctgttgctgggtgccggggccatgtacctgtggagccgaaggcggaggcgccgggaggcgggaggccggggcgacgccagcggcctgaagcgcaacagcgaacggaagaccccggagggcagggccagcccggccctgggcagcggccaccccgacggttctggtgactccctggaaatgaattctctggatagagcccaagcagccaaaaataaaggcaacaaatatttcaaagcaggaaaatatgaacaagctattcaatgctataccgaggctattagtttgtgtcctactgagaagaatgtagacctttctacattttatcagaacagagctgctgcctttgaacagttgcaaaagtggaaagaggtggcacaggattgtacaaaggctgttgaacttaatcccaaatatgtgaaagctctctttagacgtgcaaaagcccatgagaagctggacaataagaaggaatgtttggaagatgtcactgctgtgtgtatattagaaggcttccaaaatgagcagagcatgctgttagctgataaagttcttaaacttctcgggaaagagaacgccaaagaaaaatacaagaaccgtgaacctctgatgccatcgccacaatttattaagtcttacttcagttctttcacggatgatatcatttctcaaccaatgcttaaaggagagaagtctgatgaagataaagacaaggaaggagaagctttagaagtaaaagaaaattctggatatttaaaagctaaacagtatatggaagaagaaaactatgacaagatcataagtgaatgctcaaaggaaatagatgcccaaggcaaatacatggcagaagccttactactgcgagccaccttctacctgcttattggcagtgccaattcggccaaacctgatttagataaggtcatcagtttgaaggacgctaatgtgaagctccgagcaaatgccctcatcaaaagaggcaccatgtgcatgcagcaacagcagcctatgctgtccactcaggatttcaacatggctgccgagatcgaccctcagaactccgatgtttatcaccaccgaggacagctgaaaattctgctggatctagttgaagaagcagtggcagactttgatgcgtgtattaggttaagacccaagtttgctctggcacaagctcagaagtgttttgcattgtatcgccaggcatacacagcaaacaattcttcacaagtccaggcagctatgaaaggttttgaagaagtcataaagaaatttccaaggtgtgctgaaggctatgcactttatgcccaggcattaacagatcaacaacagtttggtaaagctgatgaaatgtatgataaatgtattgatctggaaccagataatgctacaacttatgttcataaaggtttacttcaacttcagtggaagcaagatttggataaaggtttggagctcatcagcaaagccattgaaattgacaacaaatgtgattttgcatatgaaaccatgggaactattgaagtgcagagaggaaacatggaaaaagccattgacatgttcaacaaagctatcaacctggccaagtcggaaatggagatggctcatctgtattcactttgcgatgctgcccatgcccagacagaagtagcaaagaaatacggattaaaaccaccgacattataaaaccaaggggaaagcagactgactctttttaaaagaagtttaccccctcttcaactgaaccctgaagacactgtcatgaactgtgttgaatggtggaacttagtattccctttgtgatgttgtcattcattacatctgtttcatgtttaggtgttgtgggtgtggctgttgaaggaagtttgcagtcttgcagcttttattccctgtgcaacaaaagcttaaaacctattaaaggaatattaaaacaaacttgtagaatacaaacagtaattggccatgcaaataaaaactttgatttattgtatttgtttt

SEQ ID NO: 1551 - DNA, 2229 bp, Cricetulus griseus
gcctgtcgaagacatacagaagcgccctgatcagacatgggttcagtgtgatgcttgcttaaagtggcgaaaattaccagatggaatagatcaacttccagaaaaatggtattgctacaataaccctgacccacagttcagaaactgcgaagttccagaagaacctgaagatgaggatttggtacatcccacttacgaaaaaacctacaaaaagaccaaggagaaatacaggatcagacaaccggaatttgtccctcggatcgccgtcaggtacgggaactgagaagtgagctgctgtcagtcacgcaagagagagatgattacaagagacagtgtcatgtgtacaccgagcagataaaagtcttacagcagaggatattagagctgaatgacaagtgcgtgaagaaggaaacttgtcaccagtccactgagactgaccctgtgttcttacttgaaagtgttaatggtcagtctgaaagtcctgaccacataggttctcagtatcagcaagctctggaagagatagagaggctgaagaaacagtgcagcactctgcagcatgtaaagactgagtgcagccagtgctctggtggtgagagtaagagcgaaatggatgagatggccgtgcagcttgatgacgtgtttcgacagctggacaagtgcattgtggagagggaccagtataaaagtgaggttaatttattggaaatagagaaatcacatgttcattctcagtgtgaagaactcaaaactgaaattgagcagttgaaatctgcaagtcagcaggctggagccgatgtttcaacttcaagcaatgctgaggaagctgtcaatttcgtggatggggaaagcctcaagcttcgttctcttcgagtcaatgtagggcagctgcttgctatgattgtgcctgacctggatcttcagcaagtcaactatgacgtcgatgtagtggatgagattctaggacaagtggtggagcagatgagtgagatcagcagcagttaagacgcaggcgtgtggtagcgggggctttcacagcgtcggctgagtgtaacgggcggcagactgaagaagcaagcgcatccttactgtctatgcattcgagtgtccagttactgtggacacctgtgaaataacctgtgactggctggggtcgagcagctgaatggctaccatggcttctgttctgaatgtaaatatttgtattgagcccacacatatttttttattgccctagagactggtgtttttcaccaaggtgttttcaggttgttcctacggtttgtgcaatttttctggctccctaaaatgtatttttctcaaaattgagggctgtgccataatgtaaatggatatgttgctactgttgtttcttttaaatgagcattagtaaggttttcaataatgtagtgaccctcctgatgaggtctgcttacaggggaactgagggtagagtttttctcttaagctcctgtctctgcatagctctgctcataggagagaggaaagccaaagctagcttcatttcacctggctttttcttgtgctgagattgctagtcatcaaggaaaaagtgttctccaggacaaagaaaagatccttaaagtgttaaaaatatccagtgacaaccatgtttacttagaagcccatttttggctgttggattcagcgtgaagtgggcgcaataattatttgagatttctttttgtgaaatttcctgtatagcctttgtagggttactgcaggtcagtgtgagctgagcacgcagtctctcgcagatgcagacagcgccgcacatcttctgctctagtatgaatgtaagtgtttttatcctggagtgaatcacaaacaggcctgggacgatagtgtcacatgccataaaatatgctttgactggtcccaagtattgtgcaatctgaaaagaggagatggccttttagtacatatgtaactgtataaaattaagaatcatattttccacaactgaaatgtgttattttttccaaagttttattgttgctatttattttaacttttctttctgaaaattcagtgcatattcattttgtgtgtgtggttagttacacatctgttgtatacaacattgaatctttatgtatattattctggaaattgccaaataaatgaagtttttgtttttatttactagaaaaaaaaaaaaaaaaaaaaaaaaaaaaaaaaaaaaaaaaaaaaaaaaaaaataaaaaa

SEQ ID NO: 1552 - DNA, 2228 bp, Cricetulus griseus
gcgccgcgggcctggttctcccggctcgggccgccccccgaggacgctgcgcgggcggccgtttccagtaagtttgccaaagatgagagtgactttatcaagtttggatacttgtgagagctccttcacacctctagtggtcatagaactcgcccaggatgtcaaagaagaaaccaaagaatggctcaaaagcagaattatcgctaaaaagaaagatggaggtgcccagctgctgtttagaccactgttaaataagtatgagaaagaaacaatagaaaaccaaaatttataccttgttggagcctccaacataagactgttacttggggcagaagcagtaggcctggtgaaggagtgtacagatgctgccatgcgggccttcacctacggaacgcgccacaacttcaaaggtttccatgataacaacgatgacttcctcactatggctgagtgtcagttcattatcaaacacgaacttgagaatcttagagctaaagatgagaagatgatccctggttatccccaggccaaactgtaccccgggaaatcactgatgaggagattgctcacgtctggcatcgtgacccaggtgttcccactgcacgacactgaggccctaaagaagcttgaggacacctggtatactcggtttgctctgaagtatcagcccatagacagcattcgtggttactttggagagacaattgctctgtactttgggttcttggagtatttcacctttgccttaatccccatggccatcatcgggctgccctactacctctttgtgtgggaagactacgacaagtatgtcatcttcgcctcgttcaatctcatctggtccacagtgatcctggaggtgtggaagcgtggctgtgccaacatgacctaccgctgggggacactggtcatgaagaggcagtttgaggagccgaggccagggtttcatggggtcctgggcatcaattctgtcaccggcagggaggaacctctctactccagctacaagagacaactacgcatctacctggtctcgctgccgttcgtgtgcctctgcctctatttctccctctacgtcatgatgatctactttgacctggaggtctgggccctgggtctccacgaggacaatgagtctgtgtggaccggcctcctgctgtacatgcccagcattgtgtatgccatcgtgattgaggtcatgaaccgtctctatcgatatgctgctgagttcctgacgtcttgggaaaatcacagattggaatctgcctaccagaatcatctaattctgaaagtgttggtgttcaactttctcaattgttttgcttcgctcttctacattgcctttgtcctgaaggacatgaagcttttgcgccagagcttggccacactcctgatcacctcccagatactgaaccaagtcgtagaatctcttcttccttactggctccaacggaagtatttcttgaaggtgaagaggaaggtgcaggctttaaaggtggatattgacacaaccctgtatgagaaagtcctcctggagaaggaaatgggaacttacctgggaaccttcgatgattacttggagctgttcttgcagtttggctatgtgagccttttctcctgcgtttacccgttagcagctacttttgctgtgctaaataacttcacggaagtcaactcagatgccttgaaaatgtgcagggtcttcaaacgaccttttgcagaaccttcagccagtattggtgtttggcagttggcttttgaaacgatgagtgttatatctgtggtcactaactgtgctctgattggaatgtcaccacaagtgaacgccgtctttccagaatccaaaacagacttggttttgatcgtggtggctgtggagcatgccctcttggctctgaagttcatacttgcatttgccatccctgataaaccacggcatatccagatgaaactggccagattggaattcgaatccttggaggcactcaagcagcagcaaatgaagatggtggcagaaaacctgaaggaggagtcccaggaagatgggaagaaagctccctgagccccagtgtgctggccgtgccatccccaaattctgctgaggaatacccgcctcacacctgcacagggtgggggtaccagcctgaactcaggccagatgcttggctgtgtgaagtggctcagctttccacatggcagtcacagtaggtgccagtcacttccaaccc

SEQ ID NO: 1553 - DNA, 2228 bp, Cricetulus griseus
cggtagcggcggcggcggcggcggcggcggcggcggcggtggcagctggtcgctgactgagcgggaggcgccatggcggcggacggagagcgctccccgctgctgtccgagcccggcgatggcggcgctggcggcaacggcttagcgggcccgggcgggagcgcgaccgggcccggtggaggcctgacgccctccgcacctccgtacggagccggtaaacatgccccgccccaggcatttcccccgttccctgaggggcatccagcggtgttgcctggagaggacccacccccctactcacccctgactagcccggatagtgggagtgcccccatgattacctgtcgagtctgtcagtctccgatcaacgtggaaggcaagatgcatcagcatgtggtcaaatgtggtgtctgcaacgaagccactcccatcaagaatgcacccccaggaaagaagtatgtccgatgcccctgtaattgtctccttatctgcaaggtgacttcccagcggattgcttgcccacggccgtactgcaaaagaatcatcaacctagggcctgtgcatccaggacctctaagtccagagccacagccaatgggtgtcagggtcatctgtggacattgcaagaatacgtttctgtggacagaattcacagaccgaaccttggcacggtgccctcactgcaggaaagtgtcatctattgggcgcagatatcctcggaagagatgtatctgctgcttcttgcttggtttactcttggcagtcactgccactggccttgcttttggcacatggaagcatgcacagcaatatggaggtatctacgcagcctgggcatttgtcattttgttggctgttctatgtttgggccgggccctttattggggctgtatgaaggtcagccatcctgtccagaacttctcctgagccccttgatccagtctgtgcctggtggctgcctggtagcaacagtaacactacaaaaggctctctggacttctgcaaggaagccaagcagctgcctccctttcccctggggagaggtaggaaggaaccagtcccttacttaggtttggaagcgtaggtaagaccattgctagctgtctgctttcttccaagggttgctgtttaggatacataggcaaaacattgcccctaggcctggatcctaaagatggttctagccatgtccttcctatgtgtgctccctgagaaccattcctgacccttacacattccagggcagggtgggggtgggaagtgtgtgtggggggtgtcccctccctcatgtgcaccattaggaccttccttgctgctgctattgcacttcaccaggggctggctctggcctcaataccctgagtccctttctcccacatttcttgtcctgtggggtgggtcagccactgctctgtacagaactacagaactgatgtatatagaactatttaatatgggatatggtcccctaatcctgtattcccctgaattcctccttccgagtttccttacttccagttgcagcactgaactgggttaaggtagggtcgctgtctcgggagaggttaggaattcatctgtgcttgtaaataaataatgtcatgactactaaggaagccagaagcttggtttaacatttaaaacagggggtacacaaaaaatcaaaaacccggggcctaaaggacactggacttgagaggaggctatttcccaggtgtaagttacttcagcaggggtgtcacagtgctaggtaaagggtgatgggacagtgatcactgccaagagctttggagcggatcttgctgtcacacaaggaagacaaaagggagtgtgacaacaaaaagtaatcaaggcgccatccgacattcttagcccgagcattcatcatgtaagtccaaaaggtataggcatagggggtgttggggtagaggtgccggaagctgtcagtaagtggtacagcctgtagcaactccccaaagccctggcgctcctggggagtaaagccagcattcttcttgtttcctttggggttacgaaggtcaatttcttcatgagccacattgagatccccacatagcacaagaggctttcgggaagctaagtccttcagaaacttgcaaaaggctttatcccaacgctgtcggtactccagccttaccagacccctgcctgcattgggaacgtaggctgttaccaggacaaaggagtcaaattctgccacaatcacc

SEQ ID NO: 1554 - DNA, 2228 bp, Cricetulus griseus
agagcagttatgactttgggtcaggaaagcgggacaagtgctgtgagtgacgacagagtgagactgtcagtgtctggagcagacacatctgtgaggagtgtagatgggcgtgtgtctaaagagcctcctcagaatgagaacttccagatggaggaggatgggtcgctcaagcagagtgaactacaaagtaaaaaaccaaacagcaggtggcaagagcagtcagaaggcttctccagtggatgatgagcagctctcaacctgcctctctggattcctagatgaggttatgaaaaagtatggaagtttggtcccactcagtgaaaaagatgtccttgggagattaaaagatgtctttaatgaagacttttctaatagaaaaccatttatcaatagagaaataacaaactaccgggccagacatcaaaagtgcaacttccgcatcttctacaataagcacatgctggatatggatgatctggcgaccctggatggtcagaattggttgaatgaccaggttataaatatgtatggtgagctgataatggatgcagtcccagacaaagtccacttcttcaacagcttttttcatagacagctggtaaccaaaggctataatggagttaagagatggactaaaaaggtggatttgtttaaaaagagccttctgttgattcctatccacctggaagtccactggtctctcattactgtgacactctccaatcgaattatttcattttatgattcccaaggcattcattttaaattttgtgtagagaatataagaaagtatttgctgactgaagccagagaaaaaacagacctgaatttcttcagggttggcagactgctgttacaaagtgtattccacaacagaaaaatgacagtgactgtggagtctttgtgctccagtactgcaagtgcctcgccctagagcagcctttccagttttctcaagaagacatgcctcgagtacgaaagaggatctataaggagctgtgtgagtgccggctcctggactgagactcggcagggactccaaaaggctggccatgttggagcagatggtttgttacttgaatctccaaacacttactgaatttttacagatatttcagattggtggtattgggccactattgttacctcaaatttattttcacccttcttcatttctcctgctatcatgtactttttaaatgttcagtttagtttcattttaactttatggattccataatccctcccatatttaatatttattatccaaacgcatgcatatagacagagcatgcagtaaagagtattaaaaaaaaaaagcctagtagatttggtgcagcttttgaaacatagttagatgtgaactgaatacaggtttaaaatttaaccccagaacctaaaaatgcaagatgtttttgatagagcatagctcagaatagacgttccctatggcataaagggtagctaggagtggttgtgaaagccagtcatgttttacaccagcagcacctttcactgatgtccctcagatgagtccctgagcatgagatgctttccttccagtgtgaggagggggggcgttcctacttagggacacaagagcttgcaagcatagtgctgatgtgagaagagttaaggtaggctggcctcaaactcataagagatccacctgcctctgtctcccgagtgctgggattaaaggcgtgcaccaccttttgttaaatttcttgtagtgaatatatattaattcatcttttaattttcttagttatcatgagaattaactttcagttggctgctcaaggaaaagaaaagcagttgctgccaataatttcacagtgcatttttggctttgcactgtattctctgtttaccactgaatatgaataacatggtcatcttgaatttatggttgaaatacaacagtaacagacctaactggggacacagccagcacttgcctaatatcagttgtcccttttctttgcaattgtggttcagtgcttcatccctgcagtagaagcaattggggtctgagcaggtcagggccagagaacagtgagttaatacactgattatctgctctgcttcgttatgttaagagacccaattagtcagcagttatacagcatatacttctgctgtatgctaggtcagtactcaacccttctagctaaatatttttttgaaaaataaactaaatgacctttataaaaaaaaaaaaaaaa

SEQ ID NO: 1555 - DNA, 2228 bp, Cricetulus griseus
atggcggagctgacggtggagggttcgtggctccaacggggctttctacaagggatttatcaaagatgtccatgaagactccctcacagttgtttttgaaaataattggcaaccggagcgccaggttccgtttaatgaagttcgattaccaccaccacctgatataaaaaaagaaattagtgaaggagatgaagtagaggtatattcgagagcaaatgaccaagagccatgtggatggtggctagctaaagttcggatgatgaaaggagagttttatgtcattgaatatgctgcttgtgatgccacttacaatgaaatagtcacatttgaacgacttcggcctgtcaatcaaaataaaactgtcaaaaaaaacaccttctttaagtgcacagtggatgttcctgaggatttgagagaggcgtgtgctaatgaaaatgcccataaagattttaagaaggcagtaggagcatgcagaattttttatcatcctgaaactacccagctaatgatactgtcggccagtgaagcaaccgtgaagcgagtaaatatcttaagtgatatgcatttacgaagtattcggacgaagttgatgcttatgtccagaaatgaagaggccactaagcatttagaatgcacaaaacaactcgcagcagcttttcatgaagaatttgttgtgagagaagatttaatgggcctagcaataggaacacatggtagtaacatacaacaagctaggaaggttcctggagtaactgctattgagttagatgaagatactggaacatttagaatctatggagagagtgctgaggctgtaaaaaaagctaggggtttcttggaatttgtggaggattttattcaagttcccaggaatcttgttggaaaagttattgggaaaaatggcaaagttattcaagaaatagtggataaatctggtgtggttcgagtaagaattgaaggagacaatgaaaataaactacctagagaagatggaatggttccatttgtgtttgttggcactaaagaaagtattggaaatgtacaagttcttctagaatatcacattgcttacttaaaggaagtggaacaactgagaatggaacgcctgcagattgatgaacagctgcgacagattggtatgggtttcagaccttcttccaccagagggcctgaaaaagagaaaggatatgccactgatgaaagtaccgtctcttctgtacaaggttctaggtcttatagtggaagaggcagaggtcgtcggggccctaattacacctccggttatggtacaaattctgagctgtctaacccctccgaaacagaatctgagcgaaaagatgagctgagtgattggtcattagcaggagaagatgatcgagagactcgacatcagcgagacagcaggagacgcccaggaggaagaggcagaagtgtttctgggggtcgaggtcgtggtggaccacgtggtggcaaatcctccatcagttctgtgctcaaagatccagacagcaatccatacagcttacttgataatacagaatcagatcagactgcagacactgacgccagcgaatctcatcacagtactaaccgtcgtaggcggtctcgtagacggaggactgatgaagatgctgttctgatggatggaatgactgaatctgatactgcctcagttaatgaaaatgggctagagtcacagttgcagattatatttctagagctgagtctcagagcagacaaagaaacctcccaagggaaactttggctaaaaacaagaaagaaatggcaaaagatgtgattgaagagcatggtccttcagaaaaggcaataaatggtccaactagcgcttctggcgatgaaattcctaagctaccgcgtactccaggagaagaaaagactaagaacttaaaagaagaaagcactcaagaagcagcagtcctgaatggtgtttcataactgaaggaagttcctagtttacagttcttttacattacagttacaatagtgcttgtacaagcttgccaaagatagaatatggatcgccagtcttacatcgcactttcagttcctccatttggaattcagaaaggggagggatcctgaagaaatcatatgttaaacatactttgacacctactgtgttaaaaatatatcatcagatgtgccttgagaatagtatatgtaacattaaaaaaagttgctggactaaaaaaaaaaaaaaaaaaaaa

SEQ ID NO: 1556 - DNA, 2228 bp, Cricetulus griseus
caaggatctttcctcagaggagcgctttcatgttgaattacactttagtcctggagccaaaggctgtgaagaggataagaatttgccatctggctatgggtatcggccagcttccagggagaatgaaggacagaaggtagtcttaaacctgatgatgatgaaccccacacttctaaaagagatgaagtcgatcgagctgtaatactgtttaaaccattggtatcagagccaattcatatacaccggaagtcaccacttccaaggtctaggaaggtggctacaaatgaagttgtatctgaaaatgccaactatctccgaacaccaagaactcttgtggaacagaaacagaaccctactgtaggctttgagctgtattccatggtaccatccatctgtcctctggaaactcttcacaatgccctgtttttaaagcaagtggatgacttcctggcttccattgcttctccatcaactgaagttctacgcaaagcccctgaaatgtcctctatagcctcacgtgccagcccagcaatgaggagaaaagtttccttaaatacatacacacctacaaagatactccccacaccacccgctgccttcaagagcaccaaagcaagcagcaaagcagccatcagcggaccgtctccagcagttactcctcatccctcaagtcggaagaagagcatgattagcaaaactgaggggcatgagcacaagaaaagcacagggaagaaaagatgaactcgcaccggaatcaaagttcccatacttagaactggacttgttgcttaacaaaagatgtgtaagaaaaccttgactaaggctggtcagagccagtttcatgacaaccgctattgctgtcactgtgatgattaccatgtgcctgtggcaatgacaaaggactcaagcgtcctgctgactattaccaaagtgctctctgaccagctgactctccacacactcttgcgtctccacaagattgctgccagtaaggttggacaggcaagatcacatgttgatgacttttcttaaagtccatttccaaagagatctcactgaccatttacattagaattttttcgttcttgctactataccatatgctgcaatatttattaactggagtatatagaacatgaattattttttcaatttgtgctttgaattttgtattgtgaattatttaaaatattacaaacacaggtgggagaactatacctttatacacataaatttgcaaattaatttgtagaaaatattttctttatatatttctttaccataaaaggtacttggttcatcaagaaaaattttcgttttctgtatttgcaagaaaggcatttttaaccgttccttttttatgagctgtaactgacaagtggaatgaaccttacacttgattttcagagtttttcttagagatctatggactcagatctaaaatgagagttctgctgttagtaagtgccatctttggtacattccttttgtttccattcttgtgttcagtatgtttgttgatttcaccaagaaaactcgaagaatgtgcatttgtagtaagtaaatgccatttacaaatgatgagatttggaaggaagattgagatcactgttgtaattccatctaatatttttacaaaaagaagaaatcattatccttggtgctttttccccttgatgcacaaaacagttgtgtaaaacatttgaaatgatttacaaactgaacagcctgctaagtaaaaatctcaagcatttggtagtaacaacataagtaaagtcgtaagctgtagcttcaagcttatgtttataactactggacccttattgtataaattcttcaaaggtgacttctcaccttaaatcatcttaaatgaactgacttgtagagaatagacagatgttcttggttgttttaaaagggataatataaaaaagttacaaatataaacaatggaagaagttcattacttcacttgaatgtaaatgaattaaatggattgtttggtgatatatcttgtaaacaattgaatgtatgttagttttctatatgtgaatatgtggttaatgtgttcattatggggggtgaggatactatttttatattttaagtggaatgaattaaaattctttctagaataagagtgacttgaatgtaaagtgctttatttgcattctttgtttcttttgtattttctaaaatagaaagtccccagtaacactttatattaa

SEQ ID NO: 1557 - DNA, 2227 bp, Cricetulus griseus
cgcctggagagttttccgccccgcgggcttcctccgtggtacgttagacacttcgcgggttgagatccgggaaagcgtcagtgggaaggagctgcaagtcaacctcagcgcccgggtccccggtgccagagtcaactatgagctacccaggctaccccccacctgctggtggctaccctccagctgctccaggtggtggtccctggggaggtgctggctaccctcctcccagcatgcccccaatcgggctggataatgtggccaactatgcagggcagttcaaccaggactacctctcaggcatggcaaccaacatgtctgggacatttggaggagccaacatgccaaacctgtatcctggagctcctgggggtgcctaccctccagtcccacctggtggctttgggcagccccctcctgcccagcagcctgtccctccttatggaatgtatccacccccagggggaaacccaccacctgggatgccctcatatccagcatacccaggggctcctgtgccaggccagcccatgccaccccctgggcagcagcccccaggggcctatcctggacagcctccaatgacctatcctggacagtcaccaatgccaccccctgggcagcagccagtgccaagttacccaggatactcaggatccagtaccgtcacccctgctgtgcctccagcccagtttggaaaccgaggcaccattacagatgcttctggatttgaccccatgcgagatgctgaggtccttcggaaggccatgaagggctttggaactgatgaacaggccatcatcgactgcctagggagccgttctaacaagcagaggcagcagatcctcctgtcctttaagacagcctatggcaaggatttgatcaaagacctaaaatcagaactgtcaggaaactttgagaagactatcctggccctgatgaagaccccggtcctgtttgatgtctatgagataaaggaagccatcaagggggccggtactgatgaggcctgcctgattgaaatcctcgcttcccgaagtaacgaacacatccgggaactaaacagagcctacaaaacagaattcaaaaagactttggaggaggccattcgaagtgacacatcaggacacttccagcggctcctcatctctctctctcagggaaaccgtgacgagagcacaaatgtggatatgtccctagtccagagagatgtccaggagctgtatgcagctggagagaaccgcctaggaacagatgagtccaagttcaatgcgattctgtgctcccggagtcgggcccacctggtggcagttttcaacgattaccagaggatgactggccgagatatcgagaagagcatctgccgggagatgtctggggacctggagcagggcatgctggctgtggtgaaatgcctgaagaacactccagccttctttgctgaaaggctcaacaaggctatgcggggagcaggaacaaaagaccggaccctgattcgaatcatggtgtctcgaagtgagctcgacctcctggatatccgagcggaatataagcggatgtacggcaagtcgctgtaccatgacatcacgggagacacttctggggactatcggaagattctactgaagatctgtggtggcaacgactaagtagtgacagtggctcgcctctgccccctgctggcattggccagggaaaggcccagagagcatccttcaatttttcctagtctatccagtaccccaggcacacacacccccacccccaccccagaaccatggccttttccttctggtctcttttcatccccatactgtgccgaaagggcccagctgggccagagttctcaggcagccatctacccggccctcacagccttttgctgttcagaatagatgtttttctttcctggcctctgcaatcattcctcgttgcttgtgactaagactctcagctttgttgtagacatgtgattttgtatttttatttgaaaacttttttaaaccatcattgccagacagatacatataagtgtgtttactatatacatgtttctgaggagagtagtaagtgggtgggtcaccccatccttgccccagccagtggctgggatccttctagtttggaatgtgccttaaacctgaatgtctgtagccaaaagctgtttccaaattaaagtcagccagctctggaacattctggaaatgtcaaaaaaaaaaaaaaaaaa

SEQ ID NO: 1558 - DNA, 2227 bp, Cricetulus griseus
gtcctccgcgccaccgcgatcgcccaccccgagggcccccaagatgaagaaggacgagtctttcctgggcaagttgggtggcacgctggcgaggaagaagaggaccagggaagtgactgacttgcaagaagaaggcaagagtgccatcaattccccaatggccccggcttcggtggacatccaccctgaagatacccagctagaggagaatgaggagcggaccatgattgaccccacctccagagaggacccaaagttcaaggagctgatcaaggtgcttctggactggatcaacgacgtgctggcagaggagcgcatcatcgtgaagcagctggaagaagacctctacgatggccaggtgcttcagaagctgctggaaaagctgggacactgcaagctgaatgtggctgaggtgacacagtctgagatcgggcaaaagcagaagttgcagacagtcctcgaagccgtgcaagacctgcttcggccccacggctggccactgcgctggaatgtggactctatccatgggaagaacctggtggccattcttcacctcctcgtctctctggctatgcacttcagggcccccatccaccttcctgagcatgtcactgtgcaggtggtggttgttcggaagcgggaaggcctgctgcactctagccatatctcagaggaactgaccaccaccacagagatgatgatgggccgatttgagcgggatgccttcgacacgcttttcgaccatgcaccggacaagctcaaccttgtgaagaagtctctcatcacatttgtgaacaaacacctgaataagctgaacttggaggtgactgacctggagacccagtttgcagatggtgtgtacctggttctgcttctgggcctccttgaagactacttcgtccccctccacaacttctacctgacacctgacagctttgaccagaaggtgcacaatgtggcgtttgcctttgagctgatgcttgatggaggactcaagaagcccaaggcacgccctgaagtaatgtggtaaacttggacctcaaatctactctgcgggtcctttacactctgttcaccaagtacaaggatgtggaatgacagcagctgatccttctgggacagtatctaggcaagaaaaatcagtgtatctgtccaccagccccggctccagggactccgccccacttgtcctcaggaatcccctgggctatgctctccttggaagcagggtcttgtcttagtgaaaaagatctttgctagtttttcactcctgtctcagaagccttagacttgtgatgtgtgtccctgccccccacccccatccatcttgtggtttactggtcttgactgaccttttacataaactctcaggacccagaatgcctccggcccccagagaagctacacagggcctgtttgggtctcttgctggctctgaatgtgcagcttcagagccggcttggagccagaaccttgcatctctgaggccctgttagggaatggatactatttttagagtactttacgaagggggtgggtatccattactagggctgcctgaccacaggctacatgcccacacccttcctagaactctgttggcaccccctgcagcatgtcttataacagaaaacgctgccgttcacacaagccattcaccactcattctccttgactctagagaggtgttggtgatgccatagctggctggcttcttgtctcgggaatcctacttctgtgattcacccccctcatgttcctcctacctccagccttctatacggccaccctcttccttgagccttcagcatccacggcagctacttctctctcttcttattcccactttgccgtggaccagggctgtgaagtaaggtgctgataccaaatagaatgccagcagtgaagttccagcaaacagtttaatatcctcccttggttccactgttgctaagctggggatgggcttggaatagtttgctctgatggaggtggcttcccagcaggggaaaaagataattaaaacggcattaccgtgtctccccgtgggaagcagtgacattaaagagccacactaacaaaataaccaggactggaacgttctgtgcagccttccctacatgcacacaaccacagcagcatctgggagctgctgggtcctcctgctctgctcacaggtggtctaagggtcaggcaggtctgcacccccacccaccatctgcaggcc

SEQ ID NO: 1559 - DNA, 2227 bp, Cricetulus griseus
  modified_base (421)..(421): a, c, t, g, unknown or other
tctggctcggaggcccgaggagcagcagccgcaggagcgggccgccgcagagtgggaatggtgccgggggcgcctagaaggaggcgcagtccgtccctgtcagggttagtgaatgaggctctctgcccgggccggcccggggactgtgctctgcgggtcccagcatgagtgcgggccccggctgtgagccctgcaccaagcggccccgctggagtgccgctggaacttctgcgccggctgcctcggactcccggagcttccccggcaggcagaggcgcgttctcgaccccaaggacgctcccgtacagttcagggtcccaccgtcctcgccagcccgcgtccccggggcggcgggaccgcacagaggcagcgccacctcgtttgttgtgcaagtggcaaaatgaaggaagcatgcagaacngcttttggcaagtgagcctccaacaataactccggcaccacaacagcttagcaatgctaacattgaccagtcaccccaacctgttgaccacagtgacacagataatgaagaagatagagacaatcaacagtttcttacacccataaagcttgcaaatacaaagcagacagtaggagatgagcaagccagaagctactgtaagtgcagtggttcttgtcactctctaaaagaatgtacgggctgtcagcaggaggtggatgtggtaccagagagtccttttgtcagatgctggtgctgaggacattgcaactgaaccaaaaactgacaacaaattgactagacaagaaagtagcctaggtgattcacctccatttgagaaagaaagtgaacctgattcaccaatggatgtagacaattcaaaaacagttgtcaagattgccaagcaagagaagccaacaagcgatcttaggaaacggtacttgactaagggaagggaaattagattacatttccaatttgaaggagagactcatgctggaaccagtgatttaaatgccaagccatctggaaacacttctagccttaatgtggaatgtagaagttccaagcagcatggaaaaaaagattctaaaaatcacagatcatttcatgagaattcccaaatcagaggacagaagaaaagaacaatgtgaagtcagacatcaaagaacagaaaggaagatccctaaatacattccacctcaccttcatcctgataagaagtggctgggaactctatgaggaatgaggaaatgcctcggtgtggggtccgattgccactcttaagaccgtctgctaaccacacagtaactattcgggtgaactgcagggagtaggtggaaaaacccctgacacgattacatgtcacttacgagggtaccatagaaggcaatggccgaggtatgctacaggtggattttgcaaatcggttttgttggaggtggtggtaactggtgcaggactagtacaagaagaaatccgatttttaatcaatcctgagttgattgtctcacggctcttcactgaggtgctggatcacaatgagtgtcttattatcacaggtactgaacagtacagtgaatatacaggctatgctgaaacttaccgttgggcccggagccatgaagatgggagtgaaaaggatgattggcagcgacgctgcacggagatcgtcgctatcgatgcacttcacttcagacgctacctcgatcagtttgtgcctgagaaaatgagacgtgagcttaacaaggcttactgtggatttctgcgtcctggagtgcctccagagaatctttctgcagtggccacaggaaactggggctgtggtgcctttgggggtgatgctcgattaaaagccttaatacagatactggcagctgctgcagctgaacgcgatgtggtttatttcacctttggggactcagaattgatgagagacatttacagcatgcatactttccttactgagaggaaactgaatgttggaaaagtgtataagttgttactacgatactacaatgaagaatgcagaaactgttccacccctggaccagacatcaagctttatccatttatataccatgctgttgagtcaagtgcagagaccactgaccagccaggacaaaagacagggacctgaggaaccaagtggataggacttccgctcacctctcagagacgtcctgtttgaattgtggggtgtaatgtatgaactgacttcatctgatataaatgtgtatataatccacatttgtaatcaaagatgca

SEQ ID NO: 1560 - DNA, 2227 bp, Cricetulus griseus
ggagaacgtgtttgctgggcagtcaaagatctatgcctacatgagtcccaacaaatgctctggaatgcgctcccctcttcaggaagagaactcagttgcacatcacgaggtcaaatgccaggggaaaccattagctggaatctacaagaagcgagaagagaaaagaaatggtgggagtacgatccgaagctctgtgaagtccgatgaacagaagatcaaagacgccaggagaggtcccctggcaccttttccaaaccaaaaatctgaagcagcagaacctccaaaaactccaccccagtcatgtgatcctacgaatacagtggttgccaagcaggccttgaaaaagcccctcaagggcaagcaggcccctcggaaaaagtctcaagggaaaacacagcagaatagaaaattgacagatttctacccggtgcgaaggagctctaggaagagcaaagctgagctgcagtctgaagaaaggaaaaaaattgatgagctgattgagagcgggaaggaagaaggcatgaagattgatctcattgatggaaaaggcagaggtgtgattgccaccaagcagttctctcggggagactttgtggtagaataccatggggacctcattgagatcaccgatgctaagaagcgggaggctctgtatgcacaagacccctccacaggctgctacatgtactattttcaatatctgagcaaaacctactgtgtggatgccactcgagaaactaaccgcctggggaggctgatcaaccacagtaagtgtgggaattgccagaccaaactgcatgacatcgacggcgtgcctcacctcatcctcatcgcctcccgagacattgcagctggggaggaactcctgtatgactacggcgaccgcagcaaagcctccatcgaagcctacccttggctgaagcattaaccatgtggcctccctgcctccctgccaccctgcctccttcaaaggacaaagtgccctcaaagggaaatgaatttttttttacacaccacacttactcttagctaattacttcaaatgtttttaaaaagtatattaaagatgccttttcatgtagtatttaaatatctgttacaggtttccaaggtggacttgaacagatggccttatattaccaaaacttttatattctagttgtttttgtacctttttgcatacaagttgaacgtttgtgcttcccgagcagtctaggacttggcacaggtggttttagagaatggagtcgaacatgaactaggaagccgggctctgcccaagatgaaagccaggactcccccacaccccacatccaaggacaggcgggtgtgagggtgctgccaccacccatgcacagcctggacgggatgtctccaagctcttgttctcctcatcgtcttgataggcatacacattgacgtgtatgaatattttttacaaaggtttcacagtaagctagtcttcccctctgctttctccaaagcttactgagcccggggtttggaggcccggccgggaacagacctcttcacatgcttttggcttttccaggcacctcgaagcatcagggtgggcagtcagactagaggcaggtcgggaaaagcactgttctcctgccccaatggggcaggtctcctgaaactgcattaattctttatagaaatgtgaacactgaatttattttaaaaaaaaataaaaaccaaaacattttaaaaaaatcaaaaaaaaaaaaaataaaaaaaaaaaaccaacagaaaacaacttatatgtatatagggtttgaagggagtgaaatgactgcttttttgttttcagaggaccaggatgatagttaagttcttaacctgtgatagcagaggtaggtgactttcttctccctgggaaggactagttctcgccattcacctttagtctaggggctggggctctggagccaggtatgagaacctacccttgtccccaacacctccccctagcccccagcctcatgatggtgctacctaagaaagtcttccccacaccccttgctagcctggtcagtggtcagacttggaggaggatccgaaaggagggtgtaactgtgagataaaatgtcttggttgtacctgtttgtggcttagctttgtatttaaatagcaaacaaaaaaaaaggaaataaacttgaaaattatttgtcatcataaaaataaagcaaaaaaattaaaatatttattgccaggcaaggcc

SEQ ID NO: 1561 - DNA, 2227 bp, Cricetulus griseus
tttcatgaacgtggacagcctggcttggctactcactcttctgttaatagggtcctggcaggggcagtgattggagatggacagtctgctgtggccagtaacattgccaatactacgtaccggctccagtggtgggacttcactaagtttgaccttccagaaatcagcaatgcctccgtgaatgtcctggtacagaactgcaagatctacaatgatgccagctgtgacatttctgcagatggccaactcctggcagctttcatcccgagcagccaaaggggctttcctgatgaaggcatcctggcagtgtattccctggccccccataacttgggggaaatgctctacaccaagcgatttggtcctaatgccatttctgtaagcctgtctccaatgggccgatatgtaatggtgggcctggcctcacgaaggatcctgctgcacccctccacagagcacatggtagcccaggtcttcaggctgcaacaggcccatggtggtgagacctccatgaggagtagttttcaacgtccttacccatgcctgctgaccactgcaacctcggaacctaccacatctgtgacatctcagggcacacagactctggcctccagttacagaatgctgaaacacagactgagagggaagaagaggaaccagggacagcatcctcaggtcctggtgaaggggagggctcagaatatgctggcagtggggaagatgccctcagccggatccagaggctaatggccgagggtggcatgacagctgtggtacagcgagaacagagcaccaccatggcctccatgggtggcttcggcaacaacatcatcgtcagccaccgcattcaccgcagctcccagacaggcacagagtcaggggctgctcgtacctcctcaccccagccctccacctctcggggactgctctcggaacctgggcaactggcagagcgaggcctaagcccccggacagcctcctgggaccagcctagtacctctgggagggaaccacctcagccagccccaccgtcttcctcctcctcgcccccactccagtccccttcgccagcaatgagggccgaaccatgcactgcaatgtgaccaataacagtcaccttcctgagggtggatggcaacagcagaggtgaagctgcaggccctagtggggagccacggaaccggtagagtccaaaacaggcactggtgcctcccctcaagccactgaacagaagctggacctcacagctggctgggaactgtacacacagaagagttgatgcctgcatctgggaacaggaggaatgagggggtggggcatggagccagtggctaagaggcagtccaaggggcaagactggcctggggaactagagccctccaggatctgaagcccagaacagccacactgctgggcctggtgtgaatgaagaagcaagtgggtatctctgccacaatccccctttctcctagggtcactggcctagggggactcggccctgggcaggtgccccagaagagtgaagtcttccagatctagaccacaccgtcctggacagaacagtaggacagttcttccctgcccactactgggggccagagccaccaggagcaaaggagcagcctacccctatccccaattgcctctgactctaaatcttctagagttccagcctctgtctatcctctcagcccacaaagacataaaagttgggcacagcctccatgtgggggacttcctatactcacaagtggggacacctgtggagtgaaggaagcaacctgcttgcctgacacaggatgagtcaatgcacggtggtggacaggtcctcaggagtggggggtgtaggctggcccgccccagcttgtcctccaacccccccctccccaaagccctccatgcagcacctataggtgtcagtattacctaagcctaggccaaagccagcccaaggctggagggagagattccaggtcagaatgtggggtcttgctctgtgatctgaggtgttgcatgtggaatcctgaactgtacgtgtagtttttagtggagaaatcaaggctctgatcattttgttttagtatgaaaatgtgatttcctttctgtttgtcactcatcatagaaacattgtggtgggaggagaggggatagtctactgctaatgagggagacaccaaagagctacatcaattaaaatgatgaccatgcccctcaaaaaaaaaacaaa

SEQ ID NO: 1562 - DNA, 2226 bp, Cricetulus griseus
caggacagtcagagacgcaaatccaagcatatggccccaggagatcctggcaaaggtacacacagaaggaagagtctgtggaccaacctgagttctgctatgatgaatttggtttccgtgtggacaaggaaggttctgaacctggatgcagccagatggcaggtgcacccatggtggaggatcccccacagaggctacggtggcaggcccacctggagtttacccacaaccacgatgtaggggatcttacctgggacaagattgcagtctccctcccccgctctgagaaactccgctccctagtgctggctggcatcccacatggcatgaggccacagttgtggatgcggctatctggggcactacagaagaaaaagaactctgagttgtcctaccgtgagattgtaaagaacagttccaattgatgagaccattgctgccaaacagattgaaaaggacctgctccgcaccatgcccagcaatgcctgctttgccaacgtgaacagcattggggggccccgcctgcgcagagtcctccgagcactggcctggctctacccagagattggctactgccagggcacaggcatggtggctgcctgcctcctgctattcctggaggaggaagatgcattctggatgatgtgtgccattatcgaagacctgctgcctgcttcctacttcagcaccaccttactgggtgtccagactgaccagcgggtcctgcgccacctgattgttcagtacctgcctcgcttggacaaactgttgcaggagcatgacattgagttgtccctgatcacactgcactggttcctcacggcattcgccagcgtggtacatatcagactgctgctgcgcatctgggacctgtttttctacgagggctccctggtgttgttccagactacgctgggcatgctgcgccttaaggaggaagagctgatacagtcagagaactcagcctccatcttcaacacgctgtcagacatcccagcacagatggaggatgccgagctactgctgggggaggccatgcggctggctggctccctcactgatgtggctgtggagacccaacgccgcaagcacctggcctatctcattgcagaccaaggccagaccctggggactagtgccaccaccaacctctctcaggttgtacgccgcaggactcagcggaggaagtctggcatcacctccctgctctttggggaggatgacctagaggctctcaaggccaagaatatcaagcagacagagctggtagctgacctccgagaagccattttgcgtgtggctcgccacttccagtgcacagaccccaagaactgtagtgtggagctgaccccagactacagcatggagagccaccagcgggaccatgagaactatgtggcatgcttacgcagccaccggcgccgggccaaggccctgctggactttgagcggcatgatgatgatgagctaggcttccgaaaaaacgacatcatcacgatcatttctcagaaggacgagcactgctgggtgggtgagctgaacggccttagaggctggtttccagccaagtttgtggaggtcctggatgaacggagcaaagagtactctattgcgggggatgactctgtgacagaaggagtcacagaccttgtgcgagggactctctgcccagccctcaaggccctgtttgaacatggactgaagaagccgtccttgcttggaggggcctgccacccctggctgtttattgaggaggcagcaggccgggaggtcgagagagactttgattctgtgtattcccgcctggtgctctgtaagacatacaggttggatgaagatggcaaagtcctgactccagaagagttgctgtatcgggctgtgcagtctgtgaatgtgacccatgatgctgcacacgcacaaatggacgtgaaactccgctcacttatctgtgtggggctcaatgaacaggtactacacctgtggctggaggtgctctgctccagcctgcccactgtggagaagtggtatcagccctggtccttcctgcgcagccctggctgggtccagatcaagtgtgagctccgcgtcctctgctgctttgccttcagcctctcccaggactgggagctccctgctaagagagaggaagagaagcagccactgaaggagggtgttcaggacatgctggtgaagcaccacctcttcagctgggacatagatgggtga

SEQ ID NO: 1563 - DNA, 2226 bp, Cricetulus griseus
  modified_base (32)..(32): a, c, t, g, unknown or other
gagcggttggcagctcgatggttccttctttntgggggaatactgtcctattacgattctcctgaagatgcctggaaaggttgtaaagggagcatccagatggcagtctgtgagattcaagttcattctgtggataacactcgcatggacctgataatccctggggaacagtatttctacttaaaagccagaagtgtggcagagagacagcgatggctggtggccctagggtctgctaaggcctgcctgacagatagtaggacccagaaggaaaaagaatttgcagaaaacactgaaaacttgaaaaccaaaatgtctgaactaaggctgtactgtgatctccttgttcagcaagtagataaaacaaaagaagtggccacatctggtgttgctgactctgaggaggggatggagttgaacagttgtgaaaatggatctttaaatatggaagtaaatggtgatgaagaaatcttagtgaaaaccaagagttccttgtatttgaaatccacagaagtagattgcagcatgtcaagtgaggaaaacacagatgataatgggacaggtgagatactgaaggaagatgaaaaggaaaacctggggaatcatgactgtgagctggcacaacctggaccagactcagtttgctcaccagaatctgtctggaaagacaacgaagaggttatcccgactttctttagtgccatgagtgccagctttagtgacattgaacttctggaagacagtggcattcccacagaagcattcttggccttgttatgcggtggttccagtactagacaaacttggtcctacagtgtttgcacctgtgaaaatggatcttgttggaaacatcaagaaggtaaatcagaagtacataaccaacaaggaagagtttactaccctccagaagatagtgctgcatgaggtggaggctgatgtagctcaggttaggaactcggccaccgaagccctcttgtggctgaagagaggtctcaaatttttaaaaggctttttgacagaagtgaaaaatggggaaaaagatatccagacagcactgaataacgcatacggcaaaacattacggcaacaccatggctgggtagttcgaggggtttttgcgttggcactgagggcagcaccatcttatgaagattttgtggctgcactaaccgtaaaagaaggtgaccaccagaaagaagctttcagcactgggatgcagagggacctcagtctttacctccctgctatggaaaagcagctggccatcctggacactttatatgagatccacgggctggagtctgatgaggtggtgtgacagctacagaacagcacctcctaccttcagggaataaagtctgctaacgtgttgagttgcccgcatgcattgatctctcaaatgccactattctgcaattgcaaggttttcagaattcttgtaaattgtaaattggttccatcaacctagcatggtgacctcattgcacagctgatctcatccgcacagaaccccatgtatgtgtccacaggtgtgggtggagtcagtgaagagcaaggtgagctagatggcagatgagccagcttcatgacacgggtaatgtgtgattcccatgtgtcatgagatttcactagaatgtcattcggcagcccaactacctcatgtgaaattggctgtggacaatctgtgttaggtgagaaatgtgttcagagaaatttattctggttaataaattgaacagtgtggtgtctctatgaagaacaaacatgtcacaccagacgccaaaggctcaactatacatagattctcttggattcctttctacattaatgtttagttctgcagtcgtaccctcatgaatgtctgtagttttgcagagccacatgctgagtgtctgtcacagaaccctgtgtcacctcttgtctctcagtattttggatgaacatcataatgctgataggaaacaagttaaactccaaaagcatcagacaaccgtggctgcttagtgtaatgggcctttatttagaaatgtattggagccttttagggccaattgttgagtgaaaattttgtgtgcaaatgtgtctgcttctctgtccaagttgttattctgtatttcatgggaagtggggcaggggagggttttacttcctttggagaatgtttgaaaacatctgtcagatttttatattcattagttacaataaacatatttttagagtatttta

SEQ ID NO: 1564 - DNA, 2225 bp, Cricetulus griseus
  modified_base (1973)..(1973): a, c, t, g, unknown or other
atggagttcccagcctatcctccaaatttgtctctgaaagaagagcaagaaaacgagattcaaatccaggaattggaggatgcccccatagatatgcagaaagtacaaatttgttccgaaggtgcatgggtgccagccctatttgatgaggtggccatatatttttttttcggatgaggaatgggaagttttgacggagcaacaaaaagccctctatcgggaagtcatgaggatgaattaatgagactgtcctgtccctggaattcccattccctaagccagacatgatcagtcggttggaaagggaagaggagtatcctaattctgatgagtggcggctcccgccgcagttacgatgcagggttcaagttgatggtggtggagtatgctgagagcaccaacaactgtcaggctgccaagcagtttggggtgttggaaaaaatgttcgagactggcgaaaagtaaagccacagctccaaaatgcccatgccatgcggcgggcattccgaggtcccaagaatgggaggtttgctctggtggaccaacgtgtggctgagtatgtcagatacatgcaggccaaaggggaccccatcaccagggaggcaatgcagttgaaagctcttgaaatcgcccaggagatgaacattccagagaaagggttcaaggcaagtctgggctggtgtcgaagaatgatgagaaggtatgacctatctctgcggcataaagtgccagttccacagcacctggcagaggacctgactgagaagctcgtcacttaccagcagagtgtgctggctctgcgccggacacacgactatgaagtggcacagatgggcaatgcagacgagacacccatctgcttagaagtgccctctagggtgactgttgacaaccagggcgaaaagcctgtcttggtcaagacaccaggtagggagaaattgaagatcacagccatgctgggtgtgttggctgatgggaggaagttaccccatacatcatttgagggggacatacatcccccctgggaagttccccagtggcatggaaatccgctgccaccgctacgggtggatgactgaggacttgatgcaagactggttggaagttgtgtggagacggagaactggagctgtgcccaaacagcgggggatgctgatcctgaatggcttccggtgtcatgccaccgactctgtgaagagctccatggaaagcatgaacacagacatggtgatcatcccagggggcctgacctcccagctgcaggtgctggatatggtggtctacaagcctctgaatgacagtgtccgggcccagtattccaactggcttctggcggggaacctggcactgagccccactggaaatgcgaagaagccacccttgggcctcttcctggagtgggtcatggttgcatggaacagcatctcaagtgaatccattgtccaggggttcagaaagtgccacatctccagcaacttagaggaggaaggtgacgtcctatgggaaattgagagccagttgcccagagaaccagcaaaagaatatgaccctgaaagtgtggctgagggcaactgaaggaagagttcaggtaactggccagagagcatagtcaacattgttccatttacaaaaagtttgtctgaaaacataactttcttctcttataaatgttgaacttttaaggctggtttgtctgcttgcattacttaacatagttgcactgccttttgctgatctgcaggaccatgacccagggagagagtgaagtctgcctttagtatgtatctctaagcctccggtctgtgtcctagggtggtcataccatgcccaccagggggatgatgatacatattacttgctttcctctagggaatgttgagagttttaaaacatcatcttagtccatggaacttcagatgggatgagccatttcagacagttcctgttgtcagcagatgcctgaaggataaaanaaaaagttaattagtatgaggcaacccttggttaacaggcctttgcttttcaggctgcttgtagatgtctctaaaccatctgctgtctgtgcagacaagacccactgactcatacttggttaatttcttgaatatttttatcaaaagggcagtgggagggattgggccttgaaccacagctgctttcagacttcaactctacaagaatagatatgagtcactgactttttccacaatagtaatttgcattcc

SEQ ID NO: 1565 - DNA, 2224 bp, Cricetulus griseus
accacctcggagaagagtggcagaagctgattgtgtggaagtttccgccgtcaaaagataccagcagcttagagtcttgcctacaaacagaacttcatttctgcactgaccagccccagaaggaggagatggcccctctgccacctatcagttctgtcctcttggcgttttccattcttggagaactacccaccaagctaaaatcatttggtcagatgctgctgaagtatatgcttaagcctctggtgacttgcccatcactccatgctgtgattgaaaagcagcccaactccgttaccattcgctttcagtctctgatgacagacttggagcatccatcaccacctgaggcttttgcaaagatccaattggtcctggaagtgctccagaaacagcttctagatttgcctcctgatactgacctagaaagtggaaaagttcctgaaatcatgttggctgagatgcttggtgatgtgatctgggaggacctgtctgagtgcctcattagaaactgtttggtttattcgattcccacgaacagcagcaagttgcagcaatatgaggagatcatacagtctacagaagaatttgaaaagtccctaaaggagatgagatttttaaaaggcgatactactgacttgctgaaatacgctcggaatatcaactctcattttgctaataagaagtgccaggatgtgattgtggctgctagaaacctaatgacctgtgaaattcacaacactgtgaagattacccctgattctcaggaagctgtcccagacttacccaggccagacgtggacaacaagctgcaagtacagaaggcgtgcagaatgcagttcaatgacactgggcacttggagcccggaacatcactggacccacattccttttctttacccacatgccgcatcagcgagtctgtgaagaaattaatggagcttgcctatcagactttactagaggcaaccacaagtagtgatcaatgtgctgttcagcttttctactcagtgagaaatatattccatttgttccacgatgtggtaccaacataccacaaggagaaccttcagaagctcccccagttggctgccattcaccataacaactgcatgtatattgctcaccacttgctgaccctgggtcatcagttcagattgcgtcttgctcccgttctttgcgatggcacaactacctttgtggaccttgtgcctggcttcagaagacttggcacagagtgttttttggcccaaatgagggcccagaaaggagaacttctggaaagattatcaagtgctaggagcttttccaacatggacgatgaagagaattattcggcagcaagcaaagcagtgaggcaggtactgcaccagctaaagagacttggaactgtgtggcaggaagtcctgccagtgaatatatattgcaaggctatggggaccttgctaaacacagtgatcactgagatgattggcagaattactgctctggaggacatctcaactgaagatggcgatagattgtattccctgtgcaaaacagtgatggatgaagggccacaagtatttgcacctctgtctgatgaaaacaagaacaagaaataccaggaagaggttccagtctatgtggccaaatggatgcctttcaaagaactgatgataatgctgcaggctagcttgcaagaaattggagatcggtgggcagatggaaagggacccctggcaactgcattctcttccagcgaagtaaaagctttaatccgtgccttgttccagaacacagaaagaagagccgctgcccttgctaaaattaaatagttctccctccctgagaaagcttctcttgactctgggttcctccatgggtgtcattatttccttcagaacttctcagaatcactcactggttttggtgaaccagtatatcatggatttcacataaagacacctgacctggcctggatgaaggttatctgaactggatattaagatatcactttaagcaaagcactgagttccttgactgtcgctgctctccattgccaagtatgaatctgctgggcagcatgatttgttcccaggccctctgagagttgtgtatattgtaattttagaccccagctttggacattccaaagttagggttcagaatttgtacaatacttttgggggtatgtggattgggggcacattatgaccttacaggaattagggatacctcttaa

SEQ ID NO: 1566 - DNA, 2224 bp, Cricetulus griseus
gtctttggaacaggctgtgaaaacgaccagtgctatgatgacatccgagtctctcgagtgacctgggacagttccttttgtgctgtcaaccccagattcgttgccatcatcatagaagcaagtgggggaggagccttcttggtgctccctctgcacaagactggacgaattgacaaatcctaccctacagtatgtggccacacaggacccgtgctggacatagactggtgcccacataatgatcaggttattgccagcggttcagaggactgcactgtgatggtttggcagatcccagaaaatggactgaccctttccctgactgaacctgtggtgattttagagggtcactcaaaaagagttggcatcgtcgcctggcatccgacggcccgaaatgtgctccttagtgcaggctgtgataacaccattatcatctggaatgtggggacaggggaagccctcatcaacttggacgatatgcattcagacatgatttacaacgtgagctggaaccgcaatggcagcctcatctgcacagcatccaaagacaagaaagtgagagtcattgatcccaggaaacaggagattgtggcggagaaagagaaagcacatgaaggagccaggcccatgcgcgccatcttcctggctgatggcaatgtgttcactactggctttagccgaatgagcgagcggcagttggcactctggaacccgaaaaacatgcaggaaccaatcgctcttcatgagatggacacaagcaatggggtgctgctgcccttctatgacccggataccagtatcatttacttatgtgggaagggtgacagcagtatccgctattttgaaatcacggacgagtccccatatgtccactacctcaacacattcagcagcaaggagcctcagcgggggatgggctacatgtctaagcggggacttgatgtcaacaaatgtgagattgctagattcttcaagcttcatgagagaaagtgtgagcctatcatcatgaccgtccccaggaagtctgacctcttccaagatgacctgtaccctgacacagcgggcccggaagctgcactggaagcggaggagtggtttgaggggaagaatgcagacccgatcctcatctccttgaagcatgggtacattccaggcaagaacagggacctcaaggtggtcaagaagaacattctggatagcaagccagcagcaaacaagaaaagcgatctcattagtgctcccaagaagacagctgacacagccagcgtgcaaaacgaagccaagttggatgagattttaaaagagatcaaatccataaaagacacaatctgcaatcaagatgaacgtatttccaagttagagcagcaactggcgaagatggcggcctaaggcccacccacctccccggatggcagctgctcattggcgtgctccaagggagggcagaaagggaggcactgccatttggaaacattccatttcagatctgtcagccagcgataggccacattccagtaagaactcaattcccctcccaaatctgcgaagaaatgaaagctgagcttttgatcaggaagctttacggtgtttgacaggcccaggggcatgttgaacttcactacattgacaataccaggtattctgaattttttagagaacaaacccaccccagcctagtgtcctgcccacacaccttttgatgaatggggccaacgctacctttgctccgtgtattccaagggacagcactgtgtatgtgtataaactaaatgaagatgagatgattattttgtataaagtctcacaagaacaatcagcgtagccacacagtgctgtctcactcgcagcacaaacccggacatctgatgactgtctgtcaggaagagttgagaaatcacgtggacccacacaccttagcatgtgttcgtgctggtgtgggcacattgctggctgcaagcaaatctacagggtatcgggacagaggcagagtgtggtggcagctgcttagagtgtgtggactgactgggtactcttgtaagaaaagattcccagccatccatacaggggttgctagctccacaactccaagggcataggaacctttgtggttttgtgtgtctgtcttgtgttttgacagtgaactgctcccagatccactcttatagagtggccatagtgttctgtcaaaacacctgcttccgttttcaaagataaaagacattga

SEQ ID NO: 1567 - DNA, 2224 bp, Cricetulus griseus
agccgtgctgttcagacctcttcctgttccctgacgagagtgggagtgtgtcccaggagccgggccctgcttgtgcctccctccctcaccacttgatcagtgacacaatgacaggcgtacctgctgaaaatgatgacttctgtattctttttgctccaaaagcagccatccaggagaaggaagaggagccggtggtaaagatcatggttgacgaggctatcgtgataagagatgactatttcagtctgcccattacaaggacggatagcagcaaagctccgctccacctgcccgtccctgccgttcgctacgttgttaaggaagtctctctggtgtggcatctctatggaggcaaggactttgccacagttcctcctgcttctccagctaagagttacattagtccccatagctcaccttcttaaacacctacaaggcacggacgtcatacagtctatggtggcaaaggaaggaaccatgactttttaatggagtctttcttacagtaagtggagcttctgttgactccagatccagaagttacaaagtctcctggagctgatgtcacctgcagtttgccaaggcatttgagtacctcaaaggagccaaacctagttgtttctttccctgggccaaaacaaccttccccaaagcatagtgccaattcagtgaaggaggctaatggactggaggaggacttctcagctgaggaagcttcatttagtgaccagcctgtgttttttagagaattcagattcacggcagaagttcctatccggcttgactatcatggcaaacatgtatcgatggatcagggaacattggctgggattttgattggcctggcccagttgaactgttctgagctaaagctgaagaggctattctataggcatggtttactaggtattgacaaattgttctcatatgcgatcaccgaatggctcactgacattaagaagaaccagctaccaggaatcctgggaggtgttgggcctatgcattcactagttcaattagtgcaaggcctgaaggacttggtttggctgccaatcgagcagtaccggaaagacggccgcatcgtaagaggcttccagagaggcgctgcctcctttggtacctccactgccatggctgctctagaactcacaaacagaatggttcaaaccatacaggcagcagcagagactgcgtatgacatggtgtctccgggtaccctctccattgagcccaagaaggcaaagagatttcctcatcaccgattagcccatcagccagtagacctgagggaaggtgtggccaaggcctacagtgttgtcaaagagggaattgcagacacggctcagaccatttatgagacagcagctcgagaacacgagagcagaggggtcactggtgctgtgggtgaagtcctgcgccagatcccaccagcagtggtcaagcccctaattgtagccactgaagcaacatcaaatgtgttaggtggcatgagaaaccaaattagaccagatgttcggcaggacgaatcacagaaatggcgccatggggaggactgatgcttccagtgtgactccgcagagtgtgaggagctaaggagcacggtgtcctagtggcagcatcttagagaacttgtttaatttatgtgctcatctcaggaacaaaagcagtttttagtaaagtaattaatgtcgaaacacttgcagccaaaaccttgtggcattttaggacctgacacttgcctgcagaagtggctggtggtcagtagaaattttctgccatgttgaatgcttttgcttttcattaaaagtgactgtaattgtacttgttactgacaagatctcattgggaacatctttgtaaacagcgttgagtcaaggtgtgctgtgttctctgtgtcatttacaagattacataaatatgaagagaagtgaagatgtctcaagttttcggcacagtaaggtaacccaaatgtagtaagtttctgtatccaaatgcaagtaaaactgtgtgctctgtggtggactgtatgtgccatcgttcagtacgtagtgcatactattagtggcacgggacactggaaatgggctttattcttagaaaattataaataaaagtactccaaatatgtcttagtcagctaatctaagtaccatttttacttggttaataatgtacattttgataacatgtcaggaatgaataaagtatttttatttaaaggtaa

SEQ ID NO: 1568 - DNA, 2222 bp, Cricetulus griseus
gcaaaactgcaagtagaaaagattttgtgtgacttattgtcgcctgaaaacttaaggaaggtctgaaggagtcttcctggagttcattaccgtgtattaaaacaaatcttttggatgtccttcagtagtggaagagcctcactctcctggtgagctgatgcggaagcagcctcaagaacgaccagaggacgacccagagcctgtcaaaggaagcttaaaccgtgctcagtcagcacaagccatcaatgcagcagtggcagtgcctgccaaagaagacggctttaaaagacgggtgtcctcagtttttgagccagtaacaaccccttgtggacattcattctgtaagaattgtcttgagcgatgtttagaccacacgccatattgtccgctctgcaaagagagcttaaaagagtatctggcagacaggaggtactgtgtcacccagctgttggaagaattaatagtgaagtatctaccggatgagctgtctgagaggaaaaaatctatgatgaagaaactgccgagctttcacacttgaccaagaatgtcccaatatttgtttgcactatggcctatccccactgtgccttgccctctccatgtatttgagcccagatacaggctcatgattcgaagaagtatacagactggaaccaagcagtttggaatgtgtgtcagcgatacacagaacagttttgcagattatggttgtatgttacaaattcgaaatgtgcatttcttacctgatggaaggtctgtggttgacacggttggaggaaagcggtttagagttttaaaaagaggaatgaaagatggatattgcactgcagacattgaatatctggaagatgttaagattgagaatggagatgaaatacagagtctgagagagcttcacgacttggtatactcgcaagcctgcagctggtttcagaatctaagagacagatttcgaagccaaatccttcaacactttgggtcaatgcctgaaagggaggaaaaacctccaggcaacccccaatggccctgcatggtgttggtggctgctggcagtccttcctgtagaccctcggtatcagctctccgtgctgtcaatgaagtccctggaggaacggctgacaaagatacagcatatcctgacttacttttctagagaccagtctaagtaatgaactgcttggatctcacctagcttgctcttagccctgaggctgagaagcggttggatctcattctaaagtcaccctaatctggccccgttgtaggccagattgtccgctgcctttgcacacccagtgctggtttaagaaataaagaaaacttttgtttttcttcaacctcctgaatcttgtggatctgcaaatgaataccttcaactaggtcccagaccactaagaacttgcacagaaaacacacatggaacgtgtgttaaaacctctacattgtgatgaagttgcactatgtaccatattctaactgaactaagtactcgtgtgtatggtgtgtgtgtgtgtgtgtgtgtgtgtgtgtgtgtgtgtgtgtgtgtgtgtgtgtgtgtgtgtgtgtgtgtgtgtgtgtgtgtgtgtgtgtgtgtgttgtgtggtgtgtgtggtgtgtgtgtgtgtgtgtgtgtgttgtgtgtgtgtgtgtgtgtgtgtgtatgtgtgtgtgtgtgtgtgtgtgtgtgtgtgtgtgtgtgtgtgtgtgttaaacttaaaaagacaaaaaaaaaaaattttttttgtttggaaatcctgctcttgctgaactgtcttggccattgactatgacacagtttcttatttatgtaaatacttgcatccccgtggccagcaggcaggggtgcagaatctagagccagtctccaggaacaactgcagacctgacatggtactgtgcatccattcataaaacacttaaaactgtgaaaatatggtttacattcaaatgtacataaaggtagatggagaactcgattcaaccagttagcttgtacattctagggggcttttcacattaactgcccgtctctgtcatttagagtttgacatgataacttgtatttaaggaattaggtagtgtataatccgttgaggatctgggggaggaggagcttaacgtagaaataagcttgtaaggtttgttttgttttactctggtcttggtgcaaatgttagttatgccttattcataccacagttagagcaccgtgctgtgacatg

SEQ ID NO: 1569 - DNA, 2222 bp, Cricetulus griseus
tttgattggcattgccaagacaggaagtggaaaaaccattgcctttcttttgcccatgtttagacatatcatggatcagagatcattagaagaaggagaggggccaatagctgtcatcatgactccaacccgagaactggctttacagatcactaaagaatgtaagaagttttcgaagaccttgggactcagagtggtctgtgtgtatggagggacaggaatcagcgagcagatcgctgagctgaaaagaggtgctgagattattgtttgcacacctggtcgaatgattgacatgttagcggctaacagtggtcgggtcacaaatcttcgaagagtgacgtatgttgttttagatgaagcagacagaatgtttgacatgggttttgaaccacaggtcatgcgcattgtggataatagtccgtcctgaccgacagacagttatggtttcagtctactttccctagagctatggaggctttggtccgcaggatcctgagcaagcccattgaagttcaggttggaggcaggagtgtggtttgctcagatgtggaacaacaagtgattgtgattgaagaagaaaagaaattcttgaaattgctcgagcttttaggccattatcaggagtcaggatctgtcattatatttgtggataagcaggagcatgctgacggtcttctgaaggacttgatgagggcctcttacccttgcatgtctcttcatggaggtattgatcaatatgacagagacagcatcataaatgactttaagaatggaacctgcaaacttctcgtggccacgtctgttgctgctcgaggtctagacgtgaaacatctaattcttgtagtaaattacagctgccccaaccattatgaagattatgtgcacagagctggacgaactggaagagcaggcaacaagggttatgcctacactttcatcacagaagatcaagctcgctatgctggtgacatcattaaagcgcttgaattgtcaggcacggcagtgcctcctgatctggaaaaactctggagtgacttcaaagaccagcagaaggcggaagggaaaataattaaaaagagcagtggtttctctggcaagggattcaagtttgatgaaacagaacaggctttggccaacgagaggaagaagttacagaaagctgctcttggcctgcaggactctgatgatgaggatgctgctgtcgatattgatgaacagattgagagcatgtttaattcaaagaagagagtaaaagacatggctgcaccgggcacatctagtgtgcctgccccgactgcaggcaatgccgagaagctagagatcgccaagaggctggcgcttcgaatcaatgctcagaagaacctgggcatcgagtctcaggtagatgtgatgcagcaagccaccaacgccatcctcagagggggcaccattctggctcccacggtgtctgcgaaaaccatcgcagaacagcttgctgaaaagatcaatgccaagctcaattatgtgcctttggagaagcaggaagaggagagacaggagggtgggcagagtgaatctttcaagagatatgaggaagaactagaaattaatgacttcccacagacggcaaggtggaaagtcacctctaaggaagccctgcagagaatcagcgaatactctgaagccgcgatcacaatcagaggaacctacttccctcctggcaaagagcccaaagaaggggagcggaagatttacttggcgattgaaagtgccaacgaactggctgtgcagaaagccaaggcagaaatcaccaggctcataaaagaagaactgatccgactgcaaaattcataccaaccaacaaataaaggacgatacaaagtattataaacatcttggaggcactttgtccctgtgctggtctgtgaagttcacaatgtattgtaaagtaagactttgaaaattttgtcttgcttattttttaaaaacaagaaaccagtgtttgttacagaagtcagttgtcagtaagtactgccccacactgatccaaactccatctccatcagacctgatttcagaatgtgatgttcccaatgtaaaccttagataccaatactcttaaatgtctggaaacaaggactctgtgttgaatgtggtagtaaagtgtgtcagtcactaagggccactggcctctcctctttcattgaaattgtgatgtaatcgtctccaacgaaagggtaaaa

SEQ ID NO: 1570 - DNA, 2222 bp, Cricetulus griseus
agctgtcagaaaaggaggaagaaatcgttgactggtggagtaaattttatgcttcttcgggggagcatgaaaaatgtggacagtatattcagaaaggctattccaaactcaagatctatgactgtgaactggaggacgtagccgactttgagggcctgacagatttctcggatactttcaaattgtacagaggcaagtctgatgagaatgaagacccatctgtggtaggagagtttaaaggctccttccgaatctaccccctgcccgatgaccccagtgtgccagcccctcccaggcagtttcgggaactgcctgacagtgtcccacaggaatgcacggttaggatttacattgttcaaggcttagagctccagccccaggacaacaatggcctgtgtgatccgtacattaaaataaccctgggcaaaaaagtaattgaagaccgagaccattacattcccaacactctcaatccagtgttcggcagaatgtatgaactgagctgctacttgcctcaagataaagacctgaaaatctctgtctatgactatgacaccttcacccgagatgagaaagtgggagaaacaatcattgacctggagaaccgcttcctgtcccggttcgggtcccactgcggcattcctgagcagtactgtgtttctggagtaaacacctggcgagatcagctgagaccaacacagttgcttcaaaatgtagccagattcaaaggcttccctccaccagtcctttctgaagatggaagcagaatccgatatggaggacgagactaccatctggatgaatttgaagccaacaaaatcctgcaccagcaccttggggcccctgaagagcgtcttgccctccatattctcaggactcaggggctggtccctgagcatgtggagacaaggactttgcacagcactttccaaccaaacatttcccagggaaaacttcagatgtgggtggatgtcttccccaagagcttaggaccaccaggaccccctttcaacatcactcccaggaaagccaagaagtactaccttcgtgtgatcatctggaataccaaggacgttatcttggatgagaagagcatcacaggggaggatatgagtgacatctacgtcaaaggctggatttccggcagcgaagaaaacaaacagaaaacagatgtccactacaggtccttggatggcgaaggcaattttaactggagatttgttttcccgtttgactacctccccgctgagcagctctgtatagtctctaaaaaagagcatttctggagcattgatcaaacagaatttcgagtgccccctcgactgatcattcagatatgggacaatgacaaattttccctggatgactacttgggtttcctggaacttgacttacatcgcactatcatcccagccaagtcatcagagaagtgcaatttggacatgattccagacctcaaagctatggaccctcttaaagctaagactgcctcactctttgagcagaaatccatgaaaggatggtggccgtgctacgctgacaaagatggctcccgtgtgatggctgggaaagtcgagatgacactggaggtcctcaacgagagggaggcagacgagaggccagccgggaaggggcgcagtgaacccaacatgaaccccaaacttgacccaccaaaccgaccggaaacctccttcctctggttcacaaacccatgcaagaccatgcgattcatcgtgtggcggcggttcaagtgggtgatcatcggcctgctcctgctgctcatcctgctgctgttcgtggctgtgctcctgtactcattgccgaactatttatcaatgaagatcgtgaggccaaatgcataatgaaagcaaggccttcagtcaaccagcaatacagagttgcctcacacactgaagtgtgatttcaagtccaagtccacctcaggtcgtgtatgaagtacttcaccaagacatgtcagttcctagcgggtctaaaccccaaactcagacaatggacaatgtttttatcctgtttcctttttgaagtattaaaaactttattttctaaactttaagcttattttcagagtatttttaaggtggctggttccatttaaaaatcatctttttatgtggtctccattctatgattcaagtttgggaaattactgaaatgaatttgaaatggtctgtgccttaatgtcatatagttcttatttgtaa

SEQ ID NO: 1571 - DNA, 2221 bp, Cricetulus griseus
gccatcactactatcactgcttcatctttaggtttgaataattccagtcacagaagaaaaaaattgccctccacattagacagtaacagactgccagctagaaaaagaggaaagctgtcttctttacaacagacttatggtgtagaaacttcaaaagagtatctgtctgacattgagccgtgggtagataaatataaaccagaaactcagcatgaacttgctgtgcataaaaagaaaattgaagaggttgaaacctggttaaaagctgaagtcttagaaatgaagccaaaacagggtggctctattttattaataacaggtcctccaggatgtgggaaaaacaactactaataaaaatactatacaaaggagcatgggatccaagtacaagaatgggttaatcctgtcttaccagatttccaaaaagatgaatacaaggaattacttaatttagaatcaaaagtctacatagttccataccaatctcagatagcagtcttcaatgactttctgttaagagccaccaagtataacaaactgcagatgcttggagatgatctgacaactgataggaagataattctggttgaagatttacctaatcagttttatcgggattctcatgctttacatgaagttctaaggaagtatgtgcagattggccgatgtcctcttgtatttataatctctgacagcgtcagtggagatagcaatcagcggttactctttcccaaaaagattcaagaggagtgttctattgcaaacattagtttcaaccctgtggcaccaacaattatgatgaaatttcttaatagaatcatgactatagaagctagtaagaacggaggaagagttgttgttcctgataaaatgtccctggagttgctctgtcaagggtgttctggtgatatccgaagtgcaataaacagcctccagttttcttcttcaaagggagagagcagtttatggtcaaagaaaaaagaacgtcattgaagtcggatgctgagagatcaaaatcaaaaccaagaaagaaacataataatgctttggaaaatcaagagatccaagctattggtggaaaagatgcttctctctttctcttcagagctctggggaaaattctgtactctaaaagagcacctttaacagaattagactacgctcccttgcctgcccacttgtcagagcatgaacgggatatgttacttgttcagcctgaggaaatagtagaaatgtcacatatgcctggagacttttttaatttataccttcaccaaaactacgtagatttcttcatggaagtagatgatcttgtgagagccagtgagtttctaagctttgcagatgtcctcggtggtgactggaatacacgctctatactcagggaatatagtacatctgtagctacaagaggtgtgatgcattccaataaatcccggggattcgctcactgccaaggaggaggatcaagctttcgacccctacataaacctcagtggtttctaatacacaaaaagtatcgggaaaattgcctggcagcaaaagcactcttttttgacttctgcctaccagctttgtgtcttcagactcagctcttgccgtatcttgctctgctgaccattccaatgcgaaataaagctcagatttcttttatccaagatattggaagacttcctttgaagagaaactttggaaggttgaaaatggaagccctgagtgaccgagagctgattgaccctgacagtggggatgaactgcagcataatggaggaccgcctgtacaggaagctcagggtgaagcctctcagactgctcgttaattgctcagttcttatagtttccattacaagcagctgacttctgtcatcttgaagtaaaacaggtctcaagtactcagtaattagtatttatttaatcttgtgaatggtttagggaggagaggccatgttgtgaagtatgttttgaatgtcgtgcttaaatatcagaaaatgtgaaggagtaatccagaatattcagactttatggggtgttgtaaatgtgatttataaaacaatttaggatgcaattatgagtataaataaaatttgtgccttatttacagtttgcatttagcttctcagacaccattttggtatgttgtacagtggaatattttagatacttctggaaaatatttacataatttatatcaaaattaaaatgttggatttcaaaaaaaaaa

SEQ ID NO: 1572 - DNA, 2221 bp, Cricetulus griseus
cgctggcgctgtcaccggcctcggcctgagcgaaacaaggcgcgcgagacgctcaagaacgcggctctgagcactcagctgcgggaggcggccacgcaggctcagcggactctgggctccgccattgacaaggctactgggactctgctatacggtttggcctctcgactcagggatacccggcgtctgtctttccttgtgagctatatagccaataagaagatccacactgagctccagctgagcgctgctcttgaatacgtgcggagtcatcccctggatcccattgacactgaggacttcgagcaggaatgtggcgtgaatgtggtgctgacaccagaacagattgaggaagctgtggaggccaccataaatagacatcgttcccagcctcctggtggaacggtaccatttccaatatggggctgttgatgggagaggctcgggctgcactcaaatgaggtgaggttgctggccagaccctgtctctaatggagcagctccggggggaggctcttaagtttcataaaccaggtgagaactataagactccaggctatgtaaccactccatatactatggatctgctgagacaacacctggagatcactgggggacaggtacgcacacgattccccccagagcccaatggaatcctgcatattggacatgccaaagccatcaatttcaactttggttatgccaaggccaacaatggtatctgttttctgcgctttgatgacaccaaccctgagaaggaagaagcaaaattcttcactgctatttatgacatggtgacctggctgggttacacaccttacaaagtgacatacgcctctgactattttgaccagctgtatgcttgggctgtggaactcatccacaggggtcaagcttatgtgtgtcaccagagagtggaggagcttaaaggccacaactctttaccttcaccatggagggaacggcctattgaggaatcactgctgctctttgaggccatgcgcaaaggcaagtttgcagagggtgaggccacacttcgaatgaagttggtgatggaggatggcaagatggaccctgtggcctatcgagtcaagtatacaccgcaccatcgcacaggggacaaatggtgcatctatcccacctacgactacacgcactgtctttgtgactccattgagcacatcacccactcactgtgtaccaaggaattccaggctcgacggtcttcctacttttggttatgtaatgcgctggatgtctattgccctgttcagtgggaatatggccgtctcaacttgcactacgctgttgtttcaaagcggaagattctccagcttgtagcagctggtgctgttcgggactgggatgatccacgactcttcacacttacagccctacgacgcaggggttttccacctgaggccatcaataacttctgtgctcgggtgggcgtgacagtggcacagaccacaatggaaccacatcttctggaagcctgtgtgcgtgatgtgctgaataacacagctccacgagccatggctgtgctagagccactaaaagttgtcatcactaactttcctgctcccaagcccttggacatccaagtgccaaacttcccagctgatgagaccaagggcttccaccaggttccttttgcttccactgtcttcattgagagaacagacttcaaggaggagtcagaaccaggctataagcgcctggctttgggccagcctgtgggcctgagacatactggctacgtcattgagctgcagcatgttgtcaagggttctagtggctgtgtggaatgcttggaggtgacctgtagaagagctgattctggagagaagcccaaggcctttattcactgggtgtcacaacctctggtgtgtgagatacgcctctatgagcgactattccagcacaagaaccctgaagaccctgttgaagtgcctggtggattcctaagtgacctgaacccggcatcgctacaggtggtggaaggagcattagtggaccgctctgtggtgttggcaaagtcttttgacaagtttcagtttgagcgccttggatacttctctgtagatcccgacagccaacaaggacagcttgtcttcaaccgaactgtcacactgaaggaagatccaggaaaggtgtgaactgaaaacatgtggacctacctcatcctggaggctgggggtgcctcaccaccccatactcc

SEQ ID NO: 1573 - DNA, 2219 bp, Cricetulus griseus
cttgtggtatagagatcgtgtgcaaggatatgaggaacctgagacttgcatataagcaggaagaacaacgaaaacttggcatatttgaaaacctcaacaagcatgcttttcctctttctaatgggcaggtgctatttgcattcagctataaagagaagtttccagttaatggctggaaagtttatgatccagtatctgaatataagagacagggcttgccaaatgagagttacagttcccctcagcatttgagtttaacgaattattcttgattacaattttggatcacctctatagctgtcttttggaaccttttgtgcaactgtgaagaaccatgtgttatatcctgttgctagtatgagtcacttggaattgtgggtaaattattatgtacgatggaatccacggatgagaccacagatgccaattcaccagaatctcaaggagcttctggctgtcaaagttgagctgcagaagcgtgtggaggacctgcagcgggaggtggccacccgaaccatctcttcttcttctgagaggggctcctcacctacccactcagtcactcctgtccacacctcagtctgatggacaaggctagtgtcctgggccatcctgctgctctgctgtctttcagcagctcaggaaccaggccattgatgttattgttctagcttgtcattttaggaattaggccccaggaccatttgtgtggctaggtggcagctcctattgttaacaaatacttggtttgtgtgaacagcctgtgacccacttgagggcagtctcaccctgtgaacgtccttgtcttgtacaggtagcttgggagaagctacattgaatgcagtgccgtatttcagcttaagaggatctcataccacttctttgcaagttaagtcctttgttaggaataacctgttcacatatagaacgcatcatcagccatgtggtttcttctttcagcctttggcacaatttgacaactttttaaaggaaatgttagtgtggcaaatggaccactgctacctgttctacagttatcttcatgcaagaagtcctcctgtacaattggtacaatatgtactgctgtgtacatacaaggtattttttaaagagaaacatgcctttattttcctatgcccttttttatgtttagaatagttgtctcaggagtcatctgctgaactgtgctgtatgagaaattcttgcctaagagaattcatgctgacttttgtgtggtacatttgaattaagatttcagatgtgttatctcagtggcaatgtagtattgtcctgtaactctggtacttgctgtttgacgtggcacatcccattcactcattgatagaggtagcagcaggttccctcaggatgtagcaaactatgactgctacagaaaactatccaaccttaaaataactagagacatttattcaaagtttcataagctaagataaagtctccatttttatcatctgggggatttgtttctaaactatagttcaagtgataattaacttttgatttattctcctcatatatacaaaatcttatttgtaaatggataaactgccatgtctgaggtaggactgctgtgagttcagggtcagctttggctatatattgagttctgtaccagctgggctctattgtggaaccctgtctcaaagtcaataccaaaaagaaaataacaaactataatacttttccttcatatgctttttaaaactgggaacattaaacaattttccctagaaatactgtataattgcccaacaacaataggactattaaacatagggtggactggatgatgctttgacagaaccagagaggccatgggggccctgattagtaaggtcagctagcctggtacagatggctggtggaatggtgatctggtcctggtcaggccatgtcctcccagctgtgtgcctgcaacacccatagaaattccattggattttaaagaagcacaagagagtatttccctttgtatgtttctagcacagaactgtttctaaaacaacttgaagtgtagttttcttatctaagcaattatttcatgtttgttttatttaaatactagaatgtaaaacctttaaggttcagatttttaaacaactagtacaatactgtatttgcctcatctgatgcactgtattccaacctgtaattaaaattataatatgtttgctccctagaaaaaaaaaaaaaaaaaa

SEQ ID NO: 1574 - DNA, 2219 bp, Cricetulus griseus
accgcctgtctgtgttgctgaatctgttgccagcagctggtgaactccaggattctggcctagccctctgtcctgaagtccagggtctcctggaaggctgtgagctgcctgacctcccctgccagcctgctgctcccagaggacatggcactgcgtaacctacctccctctccggactgctcatagacgctttaacttcgatgcagatcggcctctgctcagtgctttagaggagtcggtggtgcgcatctgctacatccgtagcttcgggcactttgttgctcgattacaaggcagcatcctgcagttcaatccagaggtcggcatctttgtcagcattgctcagtctgaacaagagagcctgctgcagcaggctcaggcccagtttcgaatggcggaggaagaggctcggcggaacaggctcatgagagacatggctcagcttcgattacagctcgaggtctcgcagctggaagggagcctgcagcagcccaaggcccagtcagccatgtctccctacctcatccctgacacccaggccctctgctaccacctccctctcatccgccagctggctactagtggccgctttatcatcatcattccaaggacagtgattgatggcctggatttgctgaagaaggaacagccaggagcccgggatgggatccggtacctggaggcagagtttaaaaaaggaaacagatacattcgctgccagaaggaggtgggaaagagctttgagcggcataaactgaagaggcaggatgcagatgcctggactctctataagatcctggacagctgcagacagctaaccctggcccaaggagcaggagaggaggacccgagtggcatggtgaccatcatcacaggtcttcatttggacaaccccagtgcactgtctgggcccatgcaggctgccctacaagctgctgcccatgccagtgtggatgtcaagaatgttctggacttctatagacagtggaaggagattggttgagactggcccgcaggccctgcagtggggctgactccagatttctcctgtgcttcctggcgaccaggaccaccacctgtagtcaccccaccacatgcagactctagcacgcaaacaggaaggaaggccagctgcactgaggctgcagggagggcccaggagccagctgggaggatggggggggccctgttgccaaggtgaaatcaggaaagtgagcaagtgcttggagtaggagtggcttgtggacccctggccagccttccacctaaccccccttctgtccccagggataggggcaaaggcaggcatgggtgtctgagttcctggacttctgagaggaaaggacaccagagggctctgtcctcacccaagatacagggtgggtggggctgggagcttgggcccctggctcttaggaagagttgggagatactgtctgcatgattctctgcagaccctgcccattctcaaggaccctcctccctcgctcatctcctttggggacaaggcagctcgggagccagctgtggtgcctcttagggaagcaggggctgcacactccaaggccccactttctttctgctgctgcccaacttccaggcccacatggggtatgggctggctggctctctgccagcagtcatcccttccccagcagttcacagtcactgtgctctgtgctcttggctgctgttctgggataggggtgccaatgagggagggaaggccaaggccacccctctcaccaccttgggagggctggaggaagggtggcagagaggcaagatccctggaagctgcttgtgcagggccctctgccctgaactactctccttttgcctgttcccaggactagagccctggtgggctaagcacgggctggctttggagtggcaagtgacacaggagcagagatcatgaatagctcgggggcagaatggtgccctgagagcaaagagctgtaggggaggctctggccatggttacccctgttccacccctcagcctggaagcagagcatagctggggctgggttcttttctgcctccccctccttatcccaactggcctagctgctttggctgtgcttagaggagctggcttcctgccttccactaagacagagggtctgggaaaactaggggacagttggggttatcccatttccaattctggcagagacttgagactcaagcttaataaagaccccctccccaag

SEQ ID NO: 1575 - DNA, 2219 bp, Cricetulus griseus
agcacagtcactggagagctgaacgcacctacagtaagcagttcgtccactccaagtcatcacagtaccggagaatgaagaccgaatggaaatctaatgtgtatctggcccggtctcggatccagggactgggcctgtatgctgctagagacaattgaaaaaacacaccatggtcattgagtacatcggaacgattattcgaaatgaagttgcaaacagaaaagagaagctttatgagtcccagaaccgaggcgtgtacatgttccgcatggacaatgaccacgtgattgacgccacactcacaggagggcctgcaaggtatacttaaccattcttgtgcccctaactgtgtggctgaagtagtgacctttgagagtaggaagaggcgactcaacacttcattggattttacaagacagaaagatatttttgttttctgactttttgaaaaacagcttctggaagctctggttcctcggcctttgtctgaaggaagcacagcacagagagagccaactgaggctgccttgctgtgcactgaggtcaacagagtcacagaatggtccagctactttttttttcttttttctttcttctttccctccctctgttttcttgtggtgggtttgtttggtttttgttttgttagtctcattaaggagaaacttttctggggcaaagagccggcggctgccctgccccagggtgggggccttcctatgaatgtaagactgaaatcaccagcgaagggggctgtccagagtgctggccacgccttactgacaggggcaggccctgagtttaactaagtggacaccactgatcaaggaatgtactgagatgacttccttagggatagagctaagggataataacttgcactaaatacatttgaatacttgattccatgagtcagtttattgtagtttttgatttctgtaaaataagagaaactttttgtatttattattgaataagtgaatgaagctatttttaaataaaagttagaagaaagccaagctgctgctgttacctgcagaactaacaaaccctgttactttgtacaaatatgtaaatattttgagaaaaacagtataaaaatagttattgaccaaatgctaccaggcgctgcagcagctcgggtgcttataaccgttgtagggatgttacaatataattttgttattaaatatgccattataattatgtaataaccaaaattctgccctggtgtgtctgggctttttggaaactgtctattagtgcttgttttctacacctgacttctgacagagcagcgctgtgctacgactacaacttttatagctgttggtgatttaaactaatgtttcatgttatattgttgcatccctacttcttcagtcaggttttttttgtgcttacaatttgtgataactgtgaataacggcttaaacacacacccaaatggaggctgaatttttttcttcagcaaaagtagttttgattagaactttgtttccaaccacacagaattatgtaaacataatagagtcatgtagcagggacctaacccaactccttagccttctatttaacataaaaatttagaaaaagaaaaaaaaaaaaaagaacgaagaagagagagagatgatgataatactccagctgcaggactccggcaatagggtttttcgaagatgtaattttaaaatgtgtttgtatgactgtttacattacatttatttaaaaaaaaaaaaccaacactgttttgtgtttgcttgtagaaacttaatcagcatttgaaccaggttagctttttattttgtacttaaaattctggtactgacacttcacaggctaagtataaaaatgaagttttgtgtgcacaattggagtgggctgtgagctgtggtacactcagtgacacagccctcagcttgtaatgtatatggcatgatgtatttttatcttacagaataaatcaattgtatatatttttctcttgataaatagctgtatgaaatttgtttcttgaattatttttcttctcttgtacaatattctgacatcctaccagtatttgtcctaccgggttttcgttgttttctgttctgtataatagtatctaatgttggcaaaattgaattttttgaagtatacagagtgttatgggttttggaatttgtggacacagatttagaagatcaccatttacaaataaaatattttacatacta

SEQ ID NO: 1576 - DNA, 2219 bp, Cricetulus griseus
gaaaacaccatggcagagcaggtggccctgagccggacccaggtgtgtggcatcctgagggaagagttgtaccagggtgatgccttccaccaagctgatacacatatatttatcatcatgggtgcatcgggtgacctggccaagaagaagatctatcccactatctggtggctgttccgggatggccttctacccgaagacaccttcattgtgggctatgcccgctcccgactcacagtggatgacatccgcaagcagagtgagcccttctttaaagccaccccagaggaaagacccaagctggaggagttctttgcccgtaactcctatgtggctggccagtatgatgatccagcctcctacaagcacctcaacagccacatgaatgccctgcatcaggggatgcaggccaaccgcctattctacctggccttgccccccacagtctatgaagctgtcaccaagaacattcaagagacctgcatgagtcagacaggctggaaccgcatcatagtggagaagcccttcgggagagacctgcagagctccaaccagctgtcgaaccacatctcctctctgttccgtgaggaccagatctaccgcattgaccactacctgggcaaggagatggtccagaacctcatggtgctgagatttgccaacaggatctttggccccatctggaaccgagacaacattgcctgtgtgatcctcacatttaaagagccctttggtactgagggtcgtgggggctactttgatgaatttgggatcatcagggatgttatgcagaaccacctcctgcagatgttgtgtctggtggccatggaaaaacctgcctccacagattcagatgatgtccgtgatgagaaggtcaaagtgttgaaatgtatctcagaggtggaaaccagcaatgtggtccttggccagtatgtggggaaccccaatggagaaggagaagctaccaatgggtacttggatgaccccacagtgccccgtgggtccaccactgccacctttgcagcagctgtcctctatgtggagaatgagcggtgggatggggtacccttcatcctgcgctgtggcaaagccctgaatgaacgcaaggctgaggtgagactacagttccgagatgtggcaggcgacatcttccaccagcagtgcaagcgtaatgagctggtgattcgtgtgcagcccaatgaggctgtatacaccaagatgatgaccaagaagcctggcatgttcttcaaccctgaggagtcagagctggacttgacctatggcaacagatacaagaatgtgaagctccctgatgcctatgaacgcctcatcctggatgtcttctgtgggagccagatgcactttgtccgcagtgatgaactcagggaagcctggcgtatcttcacaccactgctgcacaagattgatcaagagaagccccagcctatcccctatgtttatggcagccgcggccccacagaggcagatgagctgatgaagagagtgggcttccagtatgagggcacctacaaatgggtgaaccctcacaagctctgagccttgggaacttataccatctgcactctgccccttttggacaccctttctgtgtctatccttcttaccacctaacctcatatttggactattagccccacattggaacgactttgggaccataggctttagccacacattccagtccctgggctcgtgccaccactctataccctatgctgctgcaaaactcactgtaatgcttttcagggccaccattgaccctatctgagccacccatctctccacaagagcctatcagtctgtccctagactcctcaagacaggagttaggaacaatggggaggaaccttgagcctcagagggataaagaccaaaccacactccctagtgtctatgggcaagctcctcaaaattcaaatgaaatggtcaaggacacccatgtgagaagacctgcccatggccacaccagcttcagtgccacttgacattcctcctcaccagctggaagagaccacatactgcctaacaatattgtggcactagagatgtcccctaaccaactccatactccatggtcatcatcccacccacaggcagccttctcaccaaaggaaggcagaagtagcagctatgatttccctaccccaaccttgcaattaaatcctccaaaaagttaaaaaaaaaaaaaaaaaaaaaaa

SEQ ID NO: 1577 - DNA, 2218 bp, Cricetulus griseus
  modified_base (71)..(71): a, c, t, g, unknown or other
aggagttccgactctgaggaagcctttgagacccctcgagtcaacaacccctgtcaaacgctccaccagcnccaccccgccaccccctgaagtcaccccagagcctgaggtcagcactccagcagccccagaagaaccaggatgcagttctgagccggttgtggttcccgatggccctcacagtgactccgtggaaggaagccctttccgtccttctcactcctcctcggccgtgttcgatgaagacaagccgatagccagcagtgggacttacaacttagactttgacagcattgagttggtggacaactttcagagcttggagccatgctctgccgactataagggtcaggagtgtaaggtgagcacacgaaggaaatccaccgagtccgtgcccccctccaagtctacactttcccgctcgctcagtctgcaagccagcgactttgatggtgcttcctgcccgggcagcccggaagctggggcccttgccacagattgatacattcagggtgaagaagtcaccaaagaggtctcctctgtccgatccgccttctcaggaccccactccagctgccacgccggaagcacccccagcaatctctacagtggtccatgccacagatgaggagaagctggctgtcaccagccagaagtggacgtgtatgacagtggacttggatgctgacaaacaggacttcccacagccctcagacctgtctaactttgtaaatgagaccaaattcaattcaccctcagaggctggactacagaaactcctatgaaattgaatacatggaaaagcttggctcctccttaccccaggatgatgacactccgaagaagcaggccttgtaccttatgtttgacacctctcaggagagccccgtcaagtctcctccagtccggatgtcggattccccaactccatgttcagggtcgagttttgaggagactgaagcccttgtgaatgctgcagcaaaactccagcatcctgtcacacgtgggctgggctccaatcaggagcctctcttgcaggtgccagagaagtcatcccagaaggatctggaagccatggccttgggtaccccccacagaggcaattgaagggaagctgctcacccaccagacgtctccatctccaaaactgccttgtactcccgcatcgggcccactgaggtggagaaaccccctggtcttctgttccagcagccagacctcgactctgcactccaggttgccagagcagaggttatctccaaggaaagagaagtctcagaatggagggacaaatatgaagaaagcaggcgggaagtgatggagatgaggaaaatcgtggctgaatatgagaagaccatcgcacagatgatcgaggatgaacagagagagaaatcggtctcccaccaaactgtgcagcagctggtcctagagaaggagcaagccctggctgacctgaactctgtggaaaagtctttggctgaccttttcaggagatacgagaagatgaaggaggtcctggaaggcttccgcaagaatgaagaggtgctgaaaaagtgtgcacaggagtacctatcccgagtgaagaaagaggaacagaggtaccaggccttgaaggtgcacgcagaagagaaactggacagggccaatgcagagattgcccaggttcgaggcaaggcccagcaggaacaagcagcctatcaagctagcctgcggaaggagcagctgcgagtggacgctctagaaagaacgctggagcagaagaataaagagatagaagaactcaccaagatttgtgatgaactgattgccaaaatgggaaaaagctaactttgaaccaagtgcttggacttggccgttttgtgcaatacgaccgtcagcacactgttgtccttccaattccatggacaggttctcttctcactttatatgcactactgtgttccctctaaacaaggttggtttgaccgtatgcagtgccgacacctaccaggattccttgctatccgtttgcattttctagtataattcatagcaagttgacctcagagttcctgtatcagggagattgtcagattctctaaagaaaaaacaatttgctgaccttggccttgacctttggcgagcagcatctgatgtgacatgaacatacacagcctgcatagggactcttgccttaaagagtgtacaattgatccacatttgctggtttagtttttta

SEQ ID NO: 1578 - DNA, 2217 bp, Cricetulus griseus
gggatccaagatggcagctgccgacggcgacgactcgctctaccccatcgcggtgctcatagacgagctccgcaatgaggacgtccagcttcgtctcaatagtatcaagaagctctccaccatcgccttggcccttggggttgaacgaaccagaagtgagctcttgcccttcctcacagacaccatctatgatgaagatgaggtcctcttggccttggccgaacaactggggaccttcaccactttggttgggggacctgagtatgtgcactgcctgctgccacccctggaatcactggccacagtggaagagacagtggtgcgagacaaggcggtagaatccttacgggccatctcacacgagcactcaccgtccgacctagaggctcacttcgtgcctctagtgaagcggctggcgggtggagactggttcacctcccgcacctcggcctgcggcctcttctcagtctgctacccccgagtatccagtgctgtgaaggcagaacttcgacagtacttccggaacctgtgctcagacgacacccccatggtgcggcgggccgcagcctccaagctgggggagtttgccaaggtgttggagctggacaatgtcaagtctgagatcatccccatgttctctaacctggcctctgacgagcaggactcggtgcggctgctggcagtggaggcgtgcgtgaatattgcccagcttctgccccaggaggacctggaggctttagtgatgcccaccctgcgccaggccgctgaggacaagtcctggcgagtccgctacatggtggcggacaagttcacagagctccagaaagcagtagggcctgagataaccaagacagatctggtgcccgccttccagaacctgatgaaggactgtgaggccgaggtgagggccgctgcctcccacaaggtcaaagagttctgtgaaaatctctcagctgactgccgagagaatgtgatcatgacccagatcttgccctgcatcaaggaactcgtgtcagatgccaaccagcatgtcaagtcagcactggcttcagtcatcatgggcctctctcccattctgggcaaagacaacaccattgagcacctcttgccactcttcttggctcagctaaaggatgagtgccctgaggtacggctgaacatcatctccaacctggactgcgtgaacgaggtgatcggcatccggcagctctctcagtccctgctccccgccattgtggagctggctgaggatgccaagtggcgggtgcggctggccatcattgaatacatgcctctgctggctggacagctgggtgtggaattttttgatgagaaactcaactctttgtgtatggcctggctggttgatcatgtctacgctatccgagaggctgccaccagcaacctcaagaagctggtggagaagttcgggaaggagtgggcccatgccactatcatccccaaggtcttagccatgtctggagaccctaactacctgcaccgaatgactacactcttctgcatcaatgtgctgtctgaggtctgtgggcaggatatcaccaccaagcacatgttgcccacggttcttcgtatggctggggacccagtcgccaatgtccgcttcaatgtcgccaaatccctacagaagataggacccattcttgacaacagcacactgcagagtgaagtcaagcccatcctggagaagctgacccaagaccaggatgtggatgtcaagtactttgcccaggaggctctgactgttctgtctcttgcctgatgctggaagaagaaccattgccggcctctggtgtccactctccaacccccaccatgtacctcccatagggaggtggtgggggccatgactgtcactccctgtgcatggtctgaccccaggcccctccccccagcacggttcctcctctctgtagcctggagagacttatctgtccacctcccaaggggctggggcagtgcaagttggggcagggcagcggcctgaaaggaagagctggctgttcctgcccacactgggagagacggagcatcctaggtcactggctcctgctgctgtaatagggaaccctcaccctctacttacaccaccaccctttctcagacccccaaccatggttttttgtgtgtgtcaactgtgccatttttattttattcctttccctactcttcacacagagaaataaaagtgtagaaata

SEQ ID NO: 1579 - DNA, 2217 bp, Cricetulus griseus
gtccgacttaggcatcgctgcaagatccggagtacgcccgaggacctcagaaaccatgccgaaaccacacagtgaagcagggactgccttcattcagacccagcagctccatgcagctatggctgataccttcctggaacatatgtgccgcctggacattgactccgcacccatcacggcccgcaacactggcatcatttgtaccattggtcctgcctcccggtctgtggagatgctgaaggagatgatcaagtctggaatgaatgtggctcgtttgaatttctctcatggaactcatgagtatcacgcagagactatcaagaatgtgcgaacagccacagaaagctttgcatctgaccccatcctctaccggcctgttgctgtggctctggacacaaagggacctgagatcaggactggactcatcaaaggcagcggcactgcagaagtagagctgaagaagggagccaccctgaagatcaccctggacaacgcctacatggagaagtgtgatgagaacatcctgtggctggactataagaacatctgtaaggtggtggaggtgggcagcaagatctacgtggatgacgggctcatttcactgcaggtgaaggagaaaggtgctgactacctggtgacagaggtggagaacggtggctccttgggcagcaagaagggggtgaacctccccggagctgctgtggatctccctgctgtgtcagaaaaggacattcaggacctgaagtttggagtggagcagggtgtagacatggtgtttgcctctttcatccgcaaggcagaagatgtgcatgaggttaggaaggtcctgggagagaagggccagaacatcaagatcatcagcaaaatcgagaaccatgaaggcgtccgcaggtttgatgagattttggaggccagtgatgggatcatggtggctcgtggtgacctgggcattgagattcctgcagagaaggtcttcttggctcagaagatgatgattggacgatgcaaccgagctgggaagcctgtcatctgtgctactcagatgctggagagcatgatcaagaaacctcgccccacccgtgctgagagcagtgatgtggccaatgcagtcctagatggagctgactgcatcatgctgtcaggagaaacagccaagggggactaccctctggaagctgtccgcatgcagcatctgattgcccgtgaggcagaggccgccatctaccacttgcagttatttgaggagcttcgccgtctggcacctattaccaacgaccccacagaagctgccgccgtaggtgccgtggaggcctctttcaagtgttgcagtggggccattatcgtcctcaccaaatctggcaggagtgctcaccaggtggccaggtaccgcccacgtgctcccatcattgctgtgactcgaaatccccagacagctcgtcaggcccatctgtaccgtggcatcttccctgtgctgtgtaaggatgcggtacaggatgcctgggctgaggatgtagacctccgtgtgaatttggccatgaatgttggcaaggcccgaggcttcttcaagacgggggatgtggtcattgtactgactgggtggcgccctggctctggctacaccaacaccatgcgtgtcgtgcctgtgccttgatggccctctggagcccctcttctagcccctgtcccatcccctcccccatcccatccattaggccagcaacgcttgtagtgctcactctgggccatactgtggcgctggtgggctgggacacccaggaaaatttactggctttgaaatatggactagagcccagctgtctcatggccctacccaagctagggatgaaggaggaatgcagaattgtaaaccctctgcctttatcacaaaagggcagcaacacctctgtgtgttttgctcctgtagaaagttgcccagagaactcccagccctgggagacagcaagagtgtaggggcttaggacatggggcccaggtccctgtgtgtagataacccttgaccctgggcctgatttgcttccccaacagctttggcctccccactcctccttgtgcactccactcagctgtggctgcagacacacactccactcgccaccttctgttcgacggcagcatccccaggcctgttgctatagtgcccacctgaatgtcaataaacagcagctgaagcacaaaaaaaaaaaaaaaaaaaaaaaa

SEQ ID NO: 1580 - DNA, 2217 bp, Cricetulus griseus
  modified_base (1844)..(1844): a, c, t, g, unknown or other
gagaagggtcaggcgcgcagggcgtccgcgcagctcgactccgggaagggcgcgcagactccgctgtcgggatgcagccgcctgcgctgctggcgctgctgagctgctccgtggcttttgctttggtgtctgaagagataaaagaaaaggtcaagcattcccaggatttggatcagagtagtcaatcaaggaaacacgacatagacttgaaagaaattgtgtttgtcatccagagtcaaagcaatccttttcatgccaagagagcagagcagttgagaaggagcattttacagcaggcttcgaatctgacacaggatctccctagagtcctcctcctccatcaattggcaaagcaggaaggtgcttggaccattcttcctttgttaccacacttttctgtaacgtatagcaagaattcagcgtggatcttcttctctgaagaagagacgagaatacaaatccgcagactcctagaaacactcaggcgatttgacccctctaaggaatggtttttaggaaaagcattgcacgatgaggaatccacgatcattcaccattatgccttctctgagaatcctacagcctttaaatatcccgacttcgcagctggctgggcccttagtgtcccacttgtgaacaagcttgccaagaggttaaagagcgagcccctgaagtctgacttcacgatagatttaaagcatgagattgccctctacatctgggacaagggtggaggacctccccttactcctgtgcctgagttttgtacagacgatgctggctcccactgtgccaccacgttccattcttttctgccactttgtggaacaccagtgaataaggaggagatttttgttgcagtgaaaacatgcaagaaatttcatggtgacagaatacccattgtaaagaagacgtgggcggcacaggcaagccttatcgaatactacagtgactatgcagaaagccccattcccactgtggacctggggattcccaacacggacagaggtcattgtggaaaaactttcgccattttggaaagatttttgaatcgtagccatgacaaagtagcatggttagtcatagtggatgatgacacattaatcagcatctccaggctccgacatttgcttagctgctatgactccagtgatgcggtgtttctgggtgagcgctatggctatggcctgggcacaggcggctacagctatgtcacaggaggaggcggcatggtcttcagcagggaagccatccagagacttcttgccagcaactgccgatgctacagtaatgatgctcctgatgacatggtcctgggtatgtgcttcagtggattggggattcccgtgacacacagtcccctcttccatcaggctcggccagtagattacccaaaggactacctctcccatcagatccctatatcatttcacaaacactggcacattgacccagtgaaggtgtatctcacgtggctggcacccagtgaggaaggcagcgccacgcagaagacacagaaggatccaagagaagaattatagaacagagcctgggggagcagataaagagatgcacccaaccgctaagttgtggtccagctgcttgtgtatgccacatggaatagatgtttctcagccttcgtggaaatagggtatttttgatgggtggactcatatgggagactggggaaaatcacttcttttgattgatgtcatcattgtaacacagtgattaccgtgtgccttttttttttctgggatgtgacacaacagctttgtgactgtcacaggaaataaatggtacctgaattcttttttgttttcttcattgtaaagaaaacacanaacaaaaaaaaaaaagttaattttgaacctggatttttcagggcacataccatcctcttcaatgttctttttccatttaagtaaggatttctttgccagtggatatttttagcctaaggatttagcaccaaggatttatgtgcgaattacctggtaggtcatttttacttttaagccatttctcatgacctcgcacattgcccgactgtgtagaattttttcagtatcttacagctaaatcagaagtcaagacacaaaaataacttttgttgaatgcttggaaataaaattgcactccagcctgattaatgtatgtaggagcatgtaaatgccagtgttctctgcgtgtcctgattgattgaagacattcagt

SEQ ID NO: 1581 - DNA, 2215 bp, Cricetulus griseus
acagccactgtggccacctttcttctgcagctttttgagcatgacaaggatctgaaggttgtcaacagttacctgaaaagctgcttcctcatcttccccaactacaacctgggccatggtctcatggagatggcctacaatgagtacgtcaacgagtactatgccaagattggccagtttgacaagatgaagtccccatttgagtgggacattgtcacacgtggactggtggccatgacagttgagggcttcgtgggattcttcctcaccatcatgtgccaatataacttccttcggcagccacaacgcctgcctgtgtctacgaaacctagtggaggatgacgtggatgtggccagtgagaggcagagagtgctcctggggatgctgacaatgacatggtcaagattgagaacctgaccaaggtatacaagtctcggaagattggccgtatcctagcggtggatcgcctttgcctgggtgtgcgccctggagagtgctttgggctccttggtgtcaatggtgcaggaaagaccagtaccttcaagatgttgaccggtgatgagagcacgacagggggcgaggcctttgtcaatggacacagtgtgctcaaggacctgcttcaggtacagcagagtcttggctactgcccgcagtttgatgccctgtttgatgagctcacagctcgtgaacacctacagctgtacacacggctgcgtggcatcccctggaaggatgaagcaaaggtggtgaagtgggctctggagaagctggaactgactaagtatgcagacaagcccgctggaacctacagtggtggcaacaaacggaagctgtccacagccattgcactcattgggtatcctgccttcatctttctggatgagcccaccactggcatggaccctaaggccaggcgcttcctgtggaacctcattctggacctcatcaagacgggacgatcagtcgtgctgacgtcacacagcatggaggagtgtgaggctctgtgcacgcggctggccatcatggtgaatggacgactgcgctgtctgggcagcatccagcacctcaagaataggtttggggatggctacatgatcactgtaaggaccaaaagcagccagaatgtgaaggatgtggtgcggttcttcaaccggaacttcccagaggccatgctcaaggaacggcatcacacgaaggtgcagtaccagctcaagtcagagcacatctctctggctcaggtgtttagcaagatggagcaggtagtgggtgtgctgggcatcgaggactactcagtcagccagaccaccctggacaacgtatttgtgaactttgccaagaagcagagtgacaatgtggagcagcaagaggctgaaccctcaaccttgccatccccacttggactcctcagcctattgaggccccgctctgcacccacagagctccaggcactggtggctgatgagcctgaggacctggacacagaagatgagggcctcatcagctttgaggaagaacgggcccagctttccttcaacacggacacactctgctgaccatcaagaaccacgtcagggatgcaactgtggggggcagaagttaggcggtggccgtagccccagtcacacatgccgggccctggaaaggcaggttcaggaccaaagggctcccgccctcctcccaactaccacctcccccaattgtgccaaaggctggcctggccctgggctgcacataccctcaccctgctttgccttaaagccttgggtcttggcccagccccttaccctacccggcaccatccaccttcccagggtgacatgggctgccccaagcatcctgtgacccttctctgcagcggccccaagtctacccaggccagtgtcttgcacaggtgtctttttgtggacatccctgactgcaggaaggagctgggcagctggcctatttactttgctttacgagcctccctcactctgctgttgtgaagaagttaggctacccatgggaagtcatggaagtggttgcctcagccctggtggaatagcaggaatggagaagctgggtttgctggccaggtgaggggccactgctccctccctgtcccctcaagctgcctttgctctcccatccagcttggcccttcccgtcacccacctgggagcgggaccttgtatatagcgcacagatgtttgttttcaataaataagcaaaaag

SEQ ID NO: 1582 - DNA, 2214 bp, Cricetulus griseus
gttggacgagcttcccgcggcctgcctgtcgccgtgcgggccgcccaaccccaccgagctgttcagcgaggcgcggcgcctggccctcgagcagctgctggccggtggtcccgacgcctgggcctccttcctacggcgggagcggctgggccgcttcctcaacgccgatgaggtgcgcgcggttctgggcgccgctgagcggccggtcgaggacggcgcggccgtggccgaggactcgtttggctcctctcacgactgctcttcgggcacctactttcccgagcagtcggatctggagccgccggccttggagctcggctggcccgccttctaccggggcgcttaccgcggtgccacgcgcgtcgaggcgcatttccagccccgcggcaccggcgcgggcggcccgtacggctgcaaggacgcgctgcgccagcagctgcgctccgcccgagaggtgattgctgtggtaatggacgttttctctgacattgacatcttccgagacctacaggagatctgtaggaaacggggggtggctgtgtacatccttctggaccaggctctgctctcccactttttggacatgtgcatggatctgaaagttcatcctgagcaggaaaagctgatgacagtgcggactattacaggaaacatctactatgcaaggtcaggaacaaaggttgttgggaaggttcatgaaaagttcacactgattgacggcattcgggtggccacaggctcttacagttttacatggacggatggcaaattaaatagcagtaacttggtaattctgtctggccaagtggttgaacattttgatctggagttccggatcctgtatgcccagtcgaagcccatcagctccaaactcctgtccaacttccagatcagtggcaagtttgaccatctggctaaccaaaagccgcagtcaaaggagcccacattgggcaatctgctacgcatccggctggccaggctctcaagtactcccaagaagaccaacctgagcccagaagtgccaccagaagacagagccaaagccaggcgccatgactctgaggcttctaccatcagtgatggagactattttaatagccacaaggaccaactagaggatagtaaggtagtggatgcctctacccaaacagagccaggagaagagatggctgcagtaagcctgagtgaggtgggaacacaaaccagttccagcgtggcatgtgttgggatccaaacaacagttgtcacaagggcagcaagctcccaggctacagtgtgggctaagtccactgccacacagactgaagctgatgagagcttccttcttcagggtgcccagtctaaagaagggtcacctgcatccaagatgtcagtgtcgagatcttctagtctgaggtcatcctcttctatgtcttcccagggctcactggcaagctctgtcagttcccatgtttccctaacaggccctgacctccacactcccggataccccaagtatctgggtctgggcaccccccacctggatctgtgcctaagggactcattcagaaatttgagtaaagagcggcaggtccacttcactggcatcaggtcccggcttaaccagatgctgaccgtgctgtcaaggagaacactcttctcagaacactacctcagctacagtcccggaagcttcactagagcctctatgaacctggtttctgtcagggacatagcactttatcctccctatcagtgactgctgtgtccagtcaaccccatgtccccagccgccctcttacatctgacactgagtcacctttgaatttgagtctagacattgtctgatatttttattttgttctgtagaaaccacctgttcgtttaaacactatgggtactttttccccttttgcactattttaatatatcttaagactacataggtgttttaaggttggcttgagagataaaatactgctgtgtatgtgtgtgtgtgtgtcttgtcttagtgctttcaatcagcactttttaggatcagaatcatatttaaaagttaaacagcattgtttcttaactgactttatcttgaatatctgtgttcttagcattaaataagtatagacaacttcttgtttgcctggggttgtttttttctttctggctaacttttttatctttaaaagtacatcataaataaatgcaccataaaagtaaaaaaaaaaaaaaaaaaaa

SEQ ID NO: 1583 - DNA, 2214 bp, Cricetulus griseus
tcccctccaggaccagtcaggacccgaggggccccacgagtcgccagccgcaacctgtccccaaagacacgctaatgaacctgcacgtgtacatctcagagcacgagcacttcacagacttcaacgccacctcagcactcttctgggagcagcaggaccttgtgtacggtgactggaccagtggagagaactcggatggttgctacgaacactttgcggagcttgacatcccacagagtgtgcagcagaacggttccatctatatccacgtctactttaccaagagcggcttccacccagacccccggcagaaggccctgtaccgccggcttgccacggttcacatgtcccggatgatcaataaatacaagcgtaggcgatttcagaaaaccaagaatctactaacgggagagacagaggctgacccggagatgatcaagagggctgaggactacggccctgtggaggtgatctcacactggcaccccaacatcaccatcaacatcgtggatgaccacaccccgtgggtgaagggcagcgtgccacccccactggaccagtacgtaaagtttgacgcagtgagtggcgactattaccccatcatctacttcaatgactactggaacctgcagaaggactactaccccatcaacgagagcctggccagcctgcccctgcgcgtctccttctgcccgctgtctctgtggcgctggcaactctatgctgcacaaagtaccaagtcaccctggaacttcttaggtgacgagctgtatgaacaatcagacgaggaacaggattcggtgaaggtggccctgctggagaccagcccgtatctgctggcactcaccatcatcgtctccatcgtccacagtgtctttgagttcctggctttcaaaaatgacatccagttctggagcagccggcagtccctggaggggctgtccgtgcgctccgtcttctttggcgttttccagtcctttgtggttctcctctacatcctggacaacgagaccaactttgtggtgcaggtcagcgtcttcattggggtccttatcgacctctggaagatcaccaaggtcatggatgtccggctggaccgggagcacagagtggcaggaatcttcccctgcccaaccttcaaagacaagtccacctacattgagtcttcaaccaaagtatatgatgatatggcgttccggtacctgtcttggatcctcttcccgctgctgggctgctatgccgtctacagcctcctgtacctggagcacaagggctggtactcgtgggtgctcagcatgctctacggcttcctgctgacctttggtttcatcaccatgaccccccagcttttcatcaactataagctcaagtctgtggctcacctgccatggcgaatgctcacctacaaggccctcaacaccttcattgatgacttgtttgccttcgtcatcaagatgcctgtcatgtatcggattggctgcctgcgggacgatgtggttttcttcatctacctctaccaacggtggatctaccgcgtcgaccccacccgtgtcaacgagtttggtatgagtggagaggatgtttcagcattggcatccagggcccaggcgcccactgcagcaggggctctcacacctgcgtccagcacagctgtcaccgaagaggatgcttccacagtcccaaaggccactcctggggccagcactgccagccagccccaggaagcccctccaaagccagcagaggacaagaaaaacgattagccacgcgggtcctctcttctgctcccggtgaccatcatccacctcctgggccccttccctcccctccctgtcgccctcttcctggacagatcgggcggggcggcaggaggctccctggggccagggcccagtgtgtgagatggcggccaggcaggccagggctggctgtgtgtatgtggaggcatcgtcagtcgtcttgtctatccgtctgtccctgtgtgtgtgcagacatctcgccctgccagcccagcaccatcgggaatcatggtgaagccagcacggcgccgagggtgggccaggcggggaaggggccagggctcctctgtgggatgcctgtgctcctccatcatcttgcccctcatcccctgaccaccctgctcccagaccaccaccctttaacacagtctggatttaataaattcatatgggtgtttaacttaagctcaaacca

SEQ ID NO: 1584 - DNA, 2214 bp, Cricetulus griseus
tcctcacgaaccacgaccatcaaatcccgtgtccgggggtcctcacagtgagtgatagctgcttcaggaatcttgcagaagaccgtagtgggataaatcttaaagatcttgtccaagatccttctttgttgggtgggactatatcagcatacaagatagtaccagatgaaatagaagaaatcaagggtccagtccaggtgcagcagcaaggagaacattctcagagccagtcacagtgctgtagatattaccaaggtggctagaagacatcgcatgtctccttttcctctgacatctatggacaaagccttcatcacagtcctggagatgactccggtgcttggtacagaaatcatcaattaccgagatggaatggggcgagtccttgctcaagatgtatatgttacaacaggtgctccaatcccctgtggtgctgatgcagtagtgcaagtggaagataccgaactaatcagggaatcagatgatggtactgaagaacttgaagtgcgaattttggtgcaggctcggccaggtcaagatatccgacctatcggccatgacattaaaagaggggagtgcgttttggccaaaggaacccatatgggcccttcagagattggtctccttgcaactgtgggtgtcacagaggttgaagttaataagtttcctgtggtcgctgtcatgtcaacagggaatgagctgctaaatcctgaagatgacctcttaccaggaaagattcgagacagcaatcggtcaacacttctagcaacaattcaggaacatggttaccccacaatcaacctgggaattgtaggagacaacccagatgacttactcaatgccttgaatgagggtatcagccgtgctgatgtcatcatcacctcaggaggggtatcgatgggggaaaaggactatctcaagcaggtgctggacattgatcttcatgctcagatccattttggcagggtttttatgaagccaggcttgccaacaacatttgcaactttggatattgatggtgtaagaaaaattatttttgcactaccagggaatcctgtatcagctgtggtcacctgcaacctctttgttgtacctgcactgagaaagatgcagggtatcttggatcctcggccaactatcatcaaagccaggttgtcgtgtgatgtaaaactggaccctcgcccagaataccaccggtgtatactgacttggcatcaccaagaaccactgccctgggcccagagtacaggtaatcagatgagcagccgtctgatgagcatgcgcagcgccaatggattattgatgctacctccaaagacagaacagtacgtggaactccacaagggcgaggtggtggatgtcatggtcattggacggctatgatggtcaccaacaggagaaagctttgatgcatgtccacatatcattgactgtatcctgtaatatgcaacggcacagctagtttttctgatctggataaaagttgatctgtatagtcaacatcttgaactatatttcaaatgaatttaaataccttttaaagaaaaaaaaaacacctaagaataaatcttaacagacaactctattctgattatatcaaagcaaaattttcctttcttgcaaattgctttgtgtgttcaatgctaggtctgatagcgatagcttttagtagacagcggtaggtgcctgcagaacttgtgtttttctcatctttaaatacaactacttatgctcttaatcaaggctgtctgcttatttatactagtgtaggcaacacttggatttcccttcttagtatgcttcataactgctttacagagagcttttgcttgttctttatcatgtatctcgtgtttatgtgcacagtgccaaaagaggagtgactgcgcggaggccctgccctgccgcaagaaccatccctgctgagcacccagggaagttctcaccctagcagcctcgtggcacagtactcgcaggcagtaactggataccttttatttgaacaaacaaactgggggaaaatgcttccttaagtgctgacagcctttttaaccaacacatttaaaattgtacagaacaaaaataaaatcaaagactgatcttgtacagatattagtgttaccagcattcatgtggaaatcaaaagcaaaaacaaaaaaatgttaaacaaactctgtaccataacattttctgtaatgatactgaaacttaatg

SEQ ID NO: 1585 - DNA, 2214 bp, Cricetulus griseus
atcctaacaagcctacaagaaggtgctcaggacccgatatatccagacagagctgggctctcgagagcgcttgctggtagctgtcctgacttcccgcaccacactgtccaccctggctgtcgctgttaaccgtacagtggcacaccattccctcgaatactctacttcacagggcagcgaggggctcgggctcctgcagggatgcaggtggtgtctcatggagatgagcggcctgcctggctcatgtcagagaccctgcgccaccttcacacacactttggggctgactatgactggttcttcatcatgcaggatgacacatatgtacaggccccccgattggcagctcttgctggccaccttagcatcaaccaagacctgtacttgggccgtgcagaagaattcattggctcaggagagcaggcccggtactgccacgggggctttggctacctgctgtcacggagtctcctgttgcgtttgcggccacatctggatggctgccgaggggacatcctcagtgcgcggcccgatgaatggcttggccgctgcctcatcgacactctgggcgtcggctgtgtctcacagcaccagggacaacagtatcgctccttcgaactggccaagaatagggaccctgagaaggaggggagctatgctttcctgagtgccttcaccgttcaccctgtctccgagggtaccctcatgtaccggctccacaaacgcttcagcgctctggagttagagcgggcttacaacgaaatagaacaactacaggctcagatccggaacctgacggtgctgacccccgaaggggaggcagggctgagctggcctgtagggctcccagcccctttcactccacactctcgcttcgaggtgctgggctgggactacttcacagagcagcacaccttcgcttgtacagatggcgctcccaaatgccctctgcagggagccagcagggcagacgtgggcgatgctgtggacaccgctctggagcagctcaatcggcgctatcagccccgcctgcgcttccagaagcagcggctgctcaatggctaccggcgctttgaccctgccaggggtatggagtacaccctcgacttgcttctggaagctgtaactcagcgagggcaccggcgctccctggcccgcagagtcagcctgctgcggccactaagcagagtggaaatcctgcctatgccctatgtcactgaggctacgcgggtgcagctggtgctgccgctcctggtggccgaagcttccgccgccctggcttttcttgaggcctttgctgccagtgtcctggagcctcgagaacatgcattgctcaccctgctgttggtatatgggccccgggaaggccgcgggggccctgacccgtttcttggggtgaaggctgcagcagctgagttagaacgacggtaccctggggcaaggctggcctggcttgctgtgcgagcagaggccccttcccaggtgcgactcatggatgtcatctccaagaaacacccagtggacacactcttcttccttaccaccgtgtggacaagacctgggtcggaagtcctcaaccgctgccgtatgaatgccatctctggctggcaggccttctttccagtccactttcaggagttcaaccctgttctgtcaccacagagatcccccccaggtgtccctggggctggccccgaacccccatcccctggtgttgacccctctcgggggctgcagtcgggggcagatttgaccggcaggcatcggcagagggctgcttctacaatgctgactacctggcagcccgtgcccggctggctggtgaactggcaggccaggaagaggaggaagccctggaggggctggaggtgatggatgttttcctccggttctcagggctccacctctttcgagccgtagagccagggctggtgcagaagttctccctgcgggactgtagcccccggctcagtgaggaactgtaccaccgctgtcgcctcagtaacctggaggggctgggaggccgtacccagctggccatggctctgtttgaacaggagcaggccaacagcacttagcttccctacccctgtgcctgccatagccccaggaagggcaaggcaaggtgatggacagatggagggcttgtcactgtatttttttaataataagaaaatgttattaaaagtatcttctgccaaaaaaaaaaaaaaa

SEQ ID NO: 1586 - DNA, 2213 bp, Cricetulus griseus
ggacccgctgccctcgccggcagtcgctgcggcagctgaggcggaggctgacgaggaggcggatccgccagcgacagacccacgaacatcccaggtcactgagcggcgtgacctggaccctgggcgaatgcagatgccccaggggaatccgttgctgctgtcctacaccctgcaggagctgctggccagggacacagtgcaggtggagctcatccctgagaagaagggcctattcctcaagcatgtggagtatgaggtttccagccagcgcttcaagtcctccgtgtacagacgctacaatgactttgtggtcttccatgaagtgctgcttcacaaattcccgtaccgcatggtgccagcccttccacccaagagagtgctgggagccgacagggagttcatcgagggccgccggagggccctgaagcgcttcatcaacctggtggcccggcacccgcccttctcagaggatgtgctcctcaaactcttcctctctttcagtggctcagatgttcagcacaagctcaaggaggcggcccagggcgtgggagatgaattcacgaactgtaagctggctgctagggccaaggacttcctcccggctgacatccagacccagtttgccatgagccgggagctgattcgaaatgtctacaacagcttctacaagcttcgagacagagccgagcggatcgcgtcccgggccattgacaacgctgctgatcttctcatattcgggaaggagctcagtgctctaggctctgacacaacccctctgccctcctgggctgctctgcacctcagcacgtggggctccctgaagcaagcactcaagggcctatccgtggagtttgcactgcttgcagacaaggctgctcagcagggaaaaaggaagagaatgatgtggtggagaagctgaacctcttcttggatttactccagtcctacaaagacctgtgtgagcggcatgagaagggtgtgcttcacaagcatcagcgggcgctgcataagtacggactgatgaagaggcagatgatgagcgctgcacatagccgagagcccgagtccgtggagcagctcgagtcacgcatagtggagcaggagaatgtgatccagaccatggagctccgaaactacttctccctgtactgcctgcaccaggagacgcagcttgtccacgtctacctgcctctcacctcgcatatcctgggggcctttgtgaactcccagatacaagggcacaaggagatgagcaaggtatggaatgacctgaagccgaagctgagctgtctctttgctggacctcacagcgtgttgacgccaccgcgatccccgcaggaggatggcgtgtgtccccactagtggcaagacccacgacagagctccctgtggcctcactaaaacctctttgcaaacagtgtgtccctggctgattccctccaggcagcagccattgccctaagctgcctgtgggctgtgctggtggtttctgtgtctctctgctcctgggcaggaggtcaatgtgctcccagtctgccccatggcctgttgatcaggtcggcagtgggaaattagggtgctttggaatggattgtatccaatgcccacaatgcttagggccttttgtagtcagcaagtggtgtctgggggaggagtgcacagtggtttggtgctttggaggacatgtttcactccagtgctggctgtggagtcctggtccaaggcccttcagggtccacagtgggtgagggctcagggtcctttcttgtgttgggttttggagggtgggaatgaggaggggtttgtggaggagcactggagatgggcatccctgttgggtgctcaggcctcaggtagtgctctaaggcccccgagcccagaagtagagcctgtcttttctcacatagtcactccttgcctgggctgtgggtgcctgactccaatcttgaggttccatccctagggtgaaaaggagccaagagtccctgtaccccttctggcatcctgctgcccaagcctatatgccataccaccatgtttggggctgccagaaagagggactctgggctgaggggtcaggaagctggtcctgtgggattggggctggatgaatgaagcactttatggactgcgggaatcagttactgccacacccaataaactggaagtgtttaaaaaaaaaaaaaaaaaaaaaaaaaaaaaaaaaaaaaaaa

SEQ ID NO: 1587 - DNA, 2213 bp, Cricetulus griseus
  modified_base (1485)..(1485): a, c, t, g, unknown or other
cctccaggatccaagggagactgtggcttgccgggtccccctgggctgccaggattacctggatctccaggtgcacgaggtcctcggggtcctcctgggccatatgggaaccccaggcccacctggccctcctggagccaaaaggacagaaaggggacccaggactctcaccaggacaggctcatgatggggcaaagggtaacatgggcttgcctgggctctccggaaatccaggacccttgggacggaagggacacaagggtcatcctggagcagcagggcaccctggagaacagggccagccaggacctgagggcagtccaggggccaaaggttaccctggcaggcaggggttccctggacctgtaggagatcctggtcccaaaggcagccggggttacattggactcccggggctcttcggcctgccggggtcggatggagagcggggcctccctggtgttcctggcaagaggggcgagatgggtaggccgggcttccctggagattttggggaaagaggcccccctggactggatgggaaccctggagaaattggcctgccagggccaccaggagtccccggcctcattggtgacatgggagcactaggttccattggctacccaggacccaaaggcatgaagggactgatgggcggcgggagatcggggtcctgtgggagatcgaggagaccgtggggagccaggtgaccctggataccctggtcaagagggagttcaaggcctccgtggaaagccgggccagcagggccagcctgggcatccaggaccccggggacagcccagggcctaaaaggatcaaaaaggcgaagagggcccaaagggaaagcctggcaaccaggtgtggctggcttaccttcaagcacaggggcctccaggattcaagggtgaaagtgggttacctgggcaactgggttcccctggaaagcgagggacagaaggtggaacaggacttccgggaaaccagggggagccaggatccaaaggccaaccgggtgactctggtgagatgggcttcccaggagtagctggcctctttggacccaagggcccccctggagacattggcttcaaaggcatccaaggccctcgggggcctcctggcttgatgggaaaggaaggtatcattgggccccctggaatgctaggaccttctggactcccgggtcccaagggtgacagaggcagccgaggggactggggactgcaaggcccaaagggtcctcctggtccgacgggggcggcccggggtccaccgggtctccttggcatcctgtccagtttcagcaagatgaccttggggcagctttccagacatggatggatgctcacagagcagtcagaccagagcaggggtacagctatccggaccagctggtgctggaccagggaggagagatcttcaaaaccttacactacctcagcaacctcatccagagcattaagaacctgctcagttctnaggggacgacagcacatcacaatccattgcctgaacctgacggtgtggcaggaggggcccacgggcgcccctcctgccaggcaagccgtgcgcttccgtgcctggaatggacaggtcttcgaagctgggggtcagttcaggccagaggtgtctgtggatggctgcaaggtccacgatggccgctggcaccagacactgttcaccttccgaacccaggacccacagcagctgcccattgtcagcgtggacaacctcccaccagtctcatcagggaagcagtaccgcctggaagttggacctgcatgcttcctctgacctctgacctctaggctcctccaagccttgtggggaagggaagaggctgggaccagctagtcccagatatgggaccctgccttagggctgacccccaggctggggtgctgtatgctacctcccactgtgaaatcgctggtgctcacaattgtctcttgtaatgtatgtgattttttttaagaagaaaaaaaaacttatttaagattctgaaggtgctactatttttgttgccacaggctttgaagaaactttttgagtgggaccttgtccacagtctttctctcctccaaatggggatttaacaatgtgactagcattaccccctgtaatcttccgaggaggacaaaaaggaaaaagaaaaaaaggaaaagaaaaaaaaaaataaaaaaaaaaaaaaaacaaaacaaacaaaa

SEQ ID NO: 1588 - DNA, 2212 bp, Cricetulus griseus
agccctaccaagcccaggagtactgacctcccaagccctatcacagggttcagagccaagctccgagaacgccaatgacaccattattttgcgcaacctgaacccacacagcaccatggactccatcctgggggccctagcaccctatgcggtgctgtcctcctccaatgtgcgtgttataaaggacaagcagacccagctgaaccgaggcttcgccttcatccagctctccacccatcgtggaggcagcccagctgctgcagatcctgcaggccctgcaccctccgctcaccatcgatggcaagaccatcaacgtggagtttgccaagggttctaagagggatatggcctccaatgaaggcagtcgaatcaatgctgcctctgtggccagcactgccattgctgctgcccagtgggcgaatctcacaggccgtcccagggtggaggagagtgcctgggctgcccccgaggagactccagttgactacagctactatcaacaggatgaaggctatggcagcagccagggcacagattccctctatgcccatggctaccttaaaaacagcaagggccctggcatgactgggaccaaaggagacccagctgctgcaggtcctgaggcctcccttgagactggggcagactctgtgtcactgcaggctttctcccgagcccagcctggtgctgcccctgggctttatcagcaatcagcagagggaagcagtagtcagggtacaacttccaacagccaatcatataccatcatgtcacctgctgtgctcaagtctgagcttcagagtcctactcatcccagctctgccttaccaccagccaccagtcccactgccccagagtcctacagccagtaccccgttcctgatgtctctacttaccaatatgatgagacatctggctactactatgacccccagactggtctatactatgaccccaactcccagtattactacaatgctcagagccaacagtatctttactgggatggagagcggcggacctacatacctgccttggagcagtctgctgatggacataaggagacggggccatcatccaaggagggaaaagagaagaaagagaagcataagacaaagacggcccaacagattgcgaaggacatggagcggtgggcccgcagtctcaacaagcaaaaagaaaacttcaaaaacagcttccagcctattagtgccctacgagatgatgagaggcgggaatcggccactgcagatgcaggctatgctatccttgagaagaagggagcgctagctgaaagacagcacaccagcatggatctcccaaagttggccaatgatgatcgtccaagcccacctcgagggctggtggcagcctacagcggggagagtgacagtgaggaggagcaggagcgagggggtcctgagcgggaagaaaagctcacagactggcagaagctagcctgcctgctctgccgccgccagtttcccagcaaggaggcactcatccggcaccagcagctctctgggctccacaagcaaaaccttgagattcatcggcgagcccacttgtcagaaaatgaattagaagcactagaaaagaatgacatggagcaaatgaagtaccgagaccgtgcagctgaacgcagggagaagtatggtatccctgagccaccagagcccaaaaggaggaaatacggtggcatatctacagcttctgttgactttgaacagcccactcgggatggattaggcagtgacaacattggcagtcgcatgctccaggccatgggctggaaagaaggcagtggtctgggtcgcaagaaacagggcattgtgacacccattgaggctcagacacgggttcgagggtctggcctgggtgcccggggcagttcctatggggtcacctcaacagaatcttacaaggaaacactgcacaagacaatggtgacccgcttcaatgaggcccagtgaacagctttgacagcagtttctacagatgtggggtgtccatccaggaacagagaagatgaggtgtggagcggtctaagaaaggcttatctatttaccaacctactccccagccagagaagctctcaccaaattagacttggagttggtgacttttgctgggaaattgggctcaaatcatgttccttttgtaataaaatctgaaaagcctgacaaaaaaaaaaaaaaaaaaaaaaaaaaaa

SEQ ID NO: 1589 - DNA, 2211 bp, Cricetulus griseus
gcccgttgacccccacgcgacctgagcttgggctggcctactgcctcgagccccaggtccccagtgcccaagatttctccgactgctgtggacagaagcccgcaggacctgctgggcctctcatccagaatgtccatgcttccaagcgcatcctcttttccatcgtccatgacaagtcagagaagtgggacgtcttcatcaaggagatggaggacatcaacacattgcgggagtgcgtgcagatcctgtttaacagcagatacgcggaagccctgggcctggaccacatggtccctgtcccctatcggaagattgcctgtgaccctgaggctgtggagattgtgggcatcccggacaagatccccttcaaacgaccgtgtacttatggggtgcccaagctgaagcggattctggaagagcgacacagcattcacttcataatcaagaggatgtttgatgaacgcattttcacagggaacaagtttaccaaagaccccatgaagctggagccagccagcccaccagaagacacttccacagaggtctgtagggacactatgctggacctggctgggactgcttggtcagacaagagcagtgtctctgaagactgtgggccaggaacctcaggagaactaggaatgttgaggcccatcaaaattgagccagaggagctagacatcattcaggttactgtcccagatccttcaccaacttctgaggagatggccgactcactacctggacacctgccctcggaggattctggttatgggatggaaataccggctgacaaaggccccagtgaggagccctggcaggaggagaagccagcagaagaaagccctggtgatgtgatccggcccttgcggaagcaggtagagatgctgttcaacacaaaatatgccaaagccattggtacctcggagccagtcaaggtgccctactccaagttcctgatgcaccccgaggagctgttcgtactgggactgcctgaaggcatctctcttcgcagacccaattgctttgggattgccaagcttcggaagattctggaagctagcaacagtatccagtttgtcatcaagagacccgaactgctcactgacggtgtcaaagaacaagttgtggatactgcagagagggactcctgggaccgtcttgtggacgagaccccgaagagacagggccttcaagaaaattatgacaccagactctcaaggattgacatcgccaacacacttagggaacaagtccaagacctgtttaacaagaaatatggtgaagccttgggcatcaaatacccagtgcaggtcccctacaagcgaatcaaaagcaatccaggttcagtcctcatcgagggcctgcctcctgggatcccattccgcaaaccctgcacctttggctcccagaacctggaacggatcctcgctgtggctgacaagatcaagttcacagtcaccaggccattccaaggactcatcccaaagcctgaagcctgatgaggatgacgccaacaggctcggtgagaaggtgatcctccgagagcaggtgaaggagctcttcaatgagaaatacggtgaggccctgggactgaatcggcctgtgttggtcccttacaaactgatccgtgacagcccagatgctgtggaagtgaaaggcctcccggatgacattcccttccggaaccccaacacctatgatatccatcggctggagaagatcctgaaggccagggagaatgtacggatggttatcatcaaccaactccaaccttttgcagaagtctgcaatgatgccaaggtgccagggagccgagagcaggtgaaggagctcttcaatgagaaatacggtgaggccctgggactgaatcggcctgtgttggtcccttacaaactgatccgtgacagcccagatgctgtggaagtgaaaggcctcccggatgacattcccttccggaaccccaacacctatgatatccatcggctggagaagatcctgaaggccagggagaatgtacggatggttatcatcaaccaactccaaccttttgcagaagtctgcaatgatgccaaggtgccagccaaagacattcccaagcgcaagagaaagcgggtctcggaaggcaactcggtctcctcctcttcctcttcttcatcctcgtcctctaacccagagtctgtggcatccaccaaccagatctccctcgtg

SEQ ID NO: 1590 - DNA, 2211 bp, Cricetulus griseus
caacaccccgtgccccctcgagctggtggactttggggacttgcaccccagaggtcgttttgggagctggtcttcaatggctgcattctgttcggcgtcgagttcagctacgccatggagacggcgtacgtgactccggttctcctgcagatgggcctgcccgaccagctctacagcctggtgtggttcatcagccccatcctcggattcctgctgcagcctctgttgggtgcctggagtgaccgatgtacctcaaggtttggaaggagacgccctttcattcttgtcctggcgataggggcattgctgggcctgtcactcttgctcaatggaagggacattgggatggccctggctgacacagccaccgaccacaagtggggcatcctcctgactgtgtgtggggtggtgctgatggacttcagcgcagactcagcggataaccccagccacgcttacatgatggatgtgtgtggcccggtggaccaggaccgaggcctgaacatccatgccctcatggcgggtcttggcggagggttcggctacgtggtcgggggtatccactgggacaaaaccggcttcgggagggccctggggggtcagctccgagtcatctacatcttcacagccatcaccctgagtgtcaccactgtgctcaccctgattagcatccctgagaggcccctgcggcccctggcagagaagaggacagctatgaagagccccagcctcccgctgcccccctccccgcccgtcctgttggaggagggggccggtgacaccctaccttctactacagccaccagcttgtacaccagtttctccagccccatctcgcctcccagccccctcacccccaagtacggcagcttcatcagcagggacagctccctcacaggcctcaacgagtttgcctcatcctttggcacctccaacatagacagcgtgctcatcgactgcttcacggccggccatgacaactacctggcgctgcccagcagcgcccccagacaggccatcagtgtcagctttccccgggcccccgatggcttctactgccaggagagggggctgctggagaggagagagggggccctgacctcgggctcagatggagatgtgctaagggtgggctctctggacacctctaagccacgggcctcggggattctgaagaggccccagaccttggctctcccggatgtggctagaggaaatggtcccgaaaccagcaggagaaggaacgtgaccttcagtcagcaggtggccaacatcctcctgaatggtgtgaaatacgagagcgagttgaccggctccagcgagcagtcagaacagccactgtccctgcgacgcctctgttccaccatctataacatgcccaaggcactgcgaaatctctgtgtcaaccactttctggggtggctctcatttgagggtatgctgctcttttacacggacttcatgggcgaggtggtgttccagggcgacccgaaggcaccccacacgtcggaggcctatcagaagtacaacagcggtgtgaccatgggctgctggggcatgtgtatctacgcgttcagtgccgccttctactcagctatcctggagaaactggaggactgcctgagcgtccgtaccctgtacttcatcgcctacctctccttcggcctgggcacggggttggccacactctccaggaacctgtatgtggtcctgtccctctgcaccacctatggcatcttgttctccacgctctgcaccctgccctactccctgctctgcgattactaccagagtaagaagtttgcagggtccagcgcagacggcactcggcgtggcatgggaatggacatctcgctacttagctgccagtactttctggctcagatccttgtctctctggtcttggggcccctgacctcagctgtgggcagtgccaacggtgtgatgtacttctccagcctcgtgtccttccttggctgcctctactcctccctgtgtgtcacctacgaaattcccactggtgaaacagctgacgaggaacaccagcccctcctgttaaatgtctgatgtctcagaatctcgactttggacttgaaggtggtcagtctgctgcaggctggccactgagaaaccaaaggccttggcagccagccagacttccaatgtaaatatgtggtaaataaacgacagcagcaaacaaaaaaaaaaaaa

SEQ ID NO: 1591 - DNA, 2211 bp, Cricetulus griseus
ctacagactattcctcagagagcaaaaacaagaaaacaagaagaaaaggaaattagcagcacgctatgacagtgatggtgagaagagtgatgacaacttagtggttgatgtgtccaatgaggatccatcatcccctcgaggaagcccagcacattccccaagggagaatggcctggacaagacacgcctcctcaagaaagatgcccccatcagccccgcctctgttgcatcttctagcagtactcggataacactgtgaggtcctgggacctgcgtgaagggcggcagctgcaacagcatgacttcacctctcagatcttttctttgggctattgcccaactggagagtggcttgcagtggggatggagaatagcaatgtggaagtgttacatgtcaccaagccagacaagtaccagttgcatcttcatgagagctgtgtgctgtcactcaagtttgcccactgtggcaaatggtttgtaagcactggaaaggacaaccttctaaatgcttggagaacaccttatggggccagcatattccagtccaaagaatcctcatcggtgcttagctgtgacatctctgtggatgacaagtatattgtcactggctctggggacaagaaggctacggtttatgaagttatttattaaggacaaatcttcgtgcaaactggactcctccttgtagcactttgcgctgttgttatttttaaaaccgaggatttccaatactcattgcagttgtggagtttaatccctttccatagccccacttcttccttgctattgaattgtgaatactcatttaagaacctgtgataccaaatcttcagctatcgacttggaagaacatggaatacctaacagtgaatggaatctttaattatgtattatatctgtaatatatttatttgtttaaagaaggctttctaacaatgactgactaaataaagctgtccgctcctgcattgataatgaaggtgcattgtatttgatgctctaccccctcacttttggtaagggaggggaaaggaaggtttaaaataactgatttaaaatgtcactaaatgtagactattgactgtatagagacatgaaatgtataattacacatggaagcaatatgttgctgtattgttatgaggttattttgttttttcatatattaaaaacatttggaaatttggctgactgaacaagtagaatatgataggccaagtactattcctttgagtctatttgggcaactttaaccaatatgtctataactttagattatattaaaaataattgataatattctttttttttttttacttgttgacaagtatctttgtaatatgttttaattcccctttttattgtattataggcagataaacaaattaaattgggcctcaaagagagaacttaatttcttctaaatattgttgccaaatttactggcagagggagctgtgtgtctctgggcagttgtgttgctgtgagacgtggcaggctattttgtggcatgctctttaggagctgcaggtgcaggagtgctgcctgcctaccgctgtgcagggcaagtctttcacaaaaagaggccaacagaggaggcattacagagcccaccctctgaaagccacaaaaaagaggctctcctggatgatgacttgctttctttacctctggttctttccatgtcttagttggatgtccctgaaatggacacaggctgtgccattgtgccagaaacattgtgttatcttttatgttgttgttgttgctgttaaactataacatgtgactttttttattattattttttgtttgaatgctttaaaaagatcttttaagtctgtggatctgctgatgtacagtgcctttgctgctatggatcaaaatcaaaagaactgtgtagataaactttattgtataagtagaaaatcacttaatttcatactagaaatggatggatgctgcaagttgaaatggactgtcattgacgttcttcgtgtggtagacaaaaacaaatggagtcttaagtgcttagtgtttgatgtcattaacagtttcaataaaactctacagtgtaagaaagattttgatactaaactgtgcattgtacattagttctaacgcattgtattggctgccagttacttctatgatggtagattgtttgtgcattcagtacttttaagcaattaaaacataaataacttacta

SEQ ID NO: 1592 - DNA, 2210 bp, Cricetulus griseus
acgccgcgatgcaagggcggtcggcgcagcccagggactgacttcagccgggcagtcggggcttcttggcaggtgatggcgccccccgtggcctgaaagtccagcgccctcggcaagcggcagacaggccctctctcccgtgtgtctttgtcaagtctccgggctactttgaacatgctggtgcggctagccaagctgtcctgccctgtgtatcagtgcttccatgaccttaaaattaagaaaaatgcctacctctgtgtgctacaagatggtcttcaacttctgttgtacctcaaattactacccactacactgttcatccccgggaaaagacaaaagatgggaaggagtgaatatggagagatttgcagaagaagcagatgtggtaatagttggcgctggccctgcagggctctctgcagctattcgtctaaagcagctggctactgaacaaggaaaagacatccgtgtgtgtctggtggagaaagctgctcagataggagctcacacgctctcaggggcttgccttgatccagctgcttttaaagagcttttcccagactggaaggagaagggggctccacttaacactcctgtaacggaagacagatttgcaattttaacagagaaacatagaattcctgtgccaattcttccaggtcttccgatgaacaatcatggcaactacattgtacgcctaggacatctagtgagctggatgggggaacaggcagaggctcttggagttgaagtgtaccctggatatgctgctgctgaggtcctttatcatgaagacggtagtgtaaaaggaattgccactaatgacgtaggaatacaaaaggatggtgcaccaaagtcaacatttgagaggggactagaactgcacgccaaagtcacagtctttgcagagggttgccatggacacctagccaagcagctttataagaagtttgatttgagggccagctgtgatccccagacctatggaattggtttgaaagagttatggattattgatgaaaagaagtggaaacctgggagagtagatcacactgttggttggcctttggacagacatacttatggaggctctttcctttatcatttaaatgaaggtgaacctctagtagctgttggttttgtggttggtctagactatcagaatccatacctaagtcctttcagagagttccaacggtggaagcaccaccccagcatccagcccacactggagggtgggaagaggatagcctatggagcccgggcactcaatgaaggcggcttgcagtctataccaaaacttacttttcctggtggcttactaattggttgtagccctggtttcatgaatgttcccaagatcaaaggtacccatacagcaatgaaaagtggaagtttggcagcagaatcaatttttaatcaattaactagtgaaaatctccaatcaaagacaacaggactccatgtaaccgagtatgaggataatttgaagaaatcttgggtatggaaagagctacatgctgttaggaatataaggccatcctgccatgggatactgggagtatatggagggatgatttacactggaatattttactggatattgagaggaatggagccatggactctaaaacataaaggctcagactctgatcagctcaaaccagctaaggactgtacacccattgaatatccaaaacccgacggacagatcagttttgatctcttatcatctgtggctttgagtggtactaatcatgaacatgatcagccagcacatttaaccttaaaggatgacagcgtgcctgttaatagaaatctgtccatatatgatgggcctgagcagcgattctgccctgcaggagtttatgaatttgttcctttggaacaaggtgatggatttcgattacagataaatgctcagaactgtgtgcattgtaaaacatgtgatatcaaagacccaagtcagaatattaactgggtggtgccagaaggtggaggaggacctgcttacaatggcatgtaaaacacaagcgccttcatttactggcacgtgtgatagccagtttctataaaactgtaagtgtatgccaaaccaattgttttagaaaacttcttgaacaagtgttccttaaacattactgaagtaaaaactttatatctaaagctgtccataaaatcatgaactatttctcataaataaaacttta

SEQ ID NO: 1593 - DNA, 2210 bp, Cricetulus griseus
gagaggagcttctgcggcgaaacttatccacgatggctgcctgctctggaagacagccacaggtcgtttcaaagatgtgctgctattgctgatgacagatgtgctggtgtttctccaggaaaaaggaccagaagtacatctttcctgccctggacaagccttcggtgatatccttacaaaatctgatcgtgagagacattgccaaccaggcgaaagggatgtttttgatcagtgctggcccgcctgagatgtatgaggtgcacacagcgtcccgagatgaccgtagtacctggatccgtgtcattcagcagagcgtgcgcgtatgtccatctagggaggacttccctctgattgagacggaggatgaggcctacctccggaggatcaaagatggagctgcagcagaaggaccgggcgctggtagagctgctgcaggagaaggttgggctgtttgccgagatgacccacttccaggcaaaaaaagatggtgtcagtgggatgccccctcccgccctgcccaggggccttttccgttccgagtcccttgagtcccctcgaggcgaacggctcttgcgagatgccatccgtgaagtggaaggcctgaaagacttgctggtggggcctggtgccgacctgcttttgacaccccgagaaccagctttacctttggaatctgacagtggtaacaccagtcctggggtcactgccaatggagaggccagaaccttcaatggctccatcgagctctgcagagcagactcagattccagccaaaaggatcggaatggaaatcagttgaggtcaccccaggaggagacgttacagcgattggtcaatctctatggacttttacatggccttcaggctgctgtggcccagcaggacactttgatggaagcccgattccctgagggtcctgaacggtgggaaaaggtatcccgagccaactctcgggatggtgaaactggccgggcagcggttgctcctgtggctcctgagaagcaggccacagagttgtcactgctgcagcgccaacacactctgctgcaggatgaactgcgacgctgtcgtcggctggctgaagagcgggcagctgaagctagcaacctggaagtccggcttcgagagagtgagcaagctcgggccgtgctggagcgggaggctgaagaggcccgccgacagctggcagccttgggtcaaaatgagccacttccagcagaggccccctgggctcgccggcctctggaccctcggcgccgcagccttccagcaggcgatgctctctacttgagcttcaatccccctcagcccagtcgaggccatgaccgcctggatatgcctgtgactgttcgttcccttcaccgaccctttgaagatcgagagaggcaggagcttggtagccccgaggagcggctgcaggacagcagtgaccctgacacaggcagtgaggaggaaggcagtagccgattgtctccaccccacagtccacgagacttcacgagaatgcaggacatcccggaggagacagaaagccgagatggggagactacggcttcagacagctaaggggaccccaccccctgcctgctgccccactgaagaacattagttaaagggggcaaaccttgagcctaatacccactctagtgacacccatttgtggccacagagcctactggccctttaaggagggctgtgggtaggaccgtgtccctttccccactttcctcagccccctcctgctgttctttcttctcttcatcctccatggaaacctggctccttggagttgatggagtagaggctagggtggccatgatgtcttgggtgggggaggaaaaaaatccacagggaccagaatgttttgtttttgttttcttttcttcttttgtaccaaagccaactgcacgtgttttatatttttaaaagaagattgtaggcacttctagagctccatgtttttgaacttgaggaattggggagagagtgacttctttcacctacagtcagggggctcctattcagaattcttcctcaaccatttgaaagaagctccaaggtgggttgggaaacctctacggaccctcacctcatctcccaccatggcaactacggttgaaatgtaagcaagaattggggggggttcagtgcaaccctaatacccaccagcaatagccatttgtctgccaatttaattgttaaaaaaaaaa

SEQ ID NO: 1594 - DNA, 2210 bp, Cricetulus griseus
atgaccgatggcatgctgctgagagagtgcctgattgaccctgacctcacccagtacgctatcatcatcgttggacgaggctcacgagaggaccattcacacggatgtgctcttcggaattgttaaagaagacagttcaaaaaacgacaagacatgaagctgattgtcacctcagccaccttggatgcggtgaagttttctcagtacttctatgaagctcccatcttcaccatccctggtcggacctatccagtggaaatactgtacacaaaggagcccgagacagactatttggacgccagcctgatcactgttatgcagatccatttaacagagccaccaggtgatatcttggttttcttgactggtcaggaagaaattgatactgcttgtgagatcctgtatgaaagaatgaaatctctgggacctgatgtcccggagttaatcatcctcccagtttactctgccctgcccagtgagatgcagacccgaatctttgacccagctcctcctggcagcagaaaggtcgtgattgccaccaacatcgcagagacatcactgaccatcgacggcatctactatgtagttgaccctggatttgtgaaacagaaagtttacaattctaaaacagggattgaccagcttgtggtgacacctatctctcaggctcaggcaaagcagagagctggcagagctgggcgaaccggcccagggaagtgttacaggctgtacactgaacgtgcctaccgagatgaaatgctgaccaccaatgtgccggaaatccagagaaccaacctggccagtacagtgctgtctctcaaggccatgggcattaatgacctgctgtcctttgacttcatggatgccccaccgatggaaactctgatcacagccatggagcagctgtatacactgggggccctggatgatgagggcctgctcactcgcttgggccgcaggatggcagagtttcctctggagccaatgctctgcaaaatgctcatcatgtctgtacatctgggctgtagtgaagagatgctgactatcgtgtccatgttgtctgtgcagaatgtcttctaccgacccaaggataaacaggcccttgcagatcagaagaaggccaaattccaccagacagaaggggaccatcttaccttgctggctgtgtacaactcctggaagaacaataaattctccaacccatggtgctatgagaattttatccaggctcgttccctacgccgggcccaggacattcgcaagcagatgttaggcataatggacaggcacaagctggatgtagtctcctgtggtaagtccacagtccgagtgcagaaggccatctgcagtggcttcttccggaatgctgccaagaaggacccgcaggagggctaccgaacactaattgaccagcaggtggtctacatccatccttccagtgcgctcttcaacagacagccagaatgggtggtataccatgaactggtgctgaccaccaaggaatacatgcgtgaggtcactaccatcgacccccggtggcttgtggagtttgctccagctttcttcaaggtctccgacccaaccaagctcagcaagcagaagaagcagcagcgcctggagcctctgtataatcgctatgaggagccgaatgcctggagaatctccagagccttccggcggcgctgaaagtcagacccactcactctcctctcccgcagcatgtggcttcctctgcctgatgacaagctgatcctgtgatgacctatctcataccaacattttccaaacctaactgtcttcatagtgtaagatagaaacagatttaagcagggctttggccggagcctttaatcccagcactcaggaggcagaggcaggtggatctctgagttggaggccagcctgctctacagagcgagtgccaggacagccaggcctacacagagaaatgctgtcttgaaaaatcatacacacacaacacacacagattggacaagttatgcatcctgggatgggaagggggagtgtctgtgatgtatgacacacagcaagggccctgataccccagctcatgcttgctgaaggaatgaactgtgacactcatgaaccatgttggcctcactccctactccctccccagtctctgtacttggattttttacctcctggaaatatttatttgcttaaggaaaaaaaaaaaaaaaaaaaaa

SEQ ID NO: 1595 - DNA, 2209 bp, Cricetulus griseus
cgccgatggcctcacctacaacgacttcctgatcctcccagggttcatagacttcatagctgatgaagtggacctaacatcagccctgacccggaagatcacactgaagacaccactgatctcttctcctatggacaccgtgacagaggcagacatggccattgcgatggctctcatgggaggaattggtttcattcaccacaactgcaccccagagttccaggccaatgaagtacggaaggtcaagaagtttgaacaaggcttcatcacagaccctgtggtcctgagcccttcacataccgtgggtgatgttctcgaggccaagatacgacatggattctctggcatccccatcactgctacgggcaccatgggtagcaagctggtgggcatcgttacctcccgagacatcgactttctggctgaaaaggaccacactaccctcctcagtgaggtgatgacaccacggatcgagctggtggtggccccagcaggggtgacgttgaaagaggcaaatgagatcttgcagcgcagcaagaaagggaagctgcccatagtcaacgatcaagatgaattggtagccatcattgcacgcacagatctgaagaagaacagagactaccctctggcctccaaggactcccacaaacagctgttgtgtggggcagctgtgggcacccgggaagatgacaaataccgcctggacctgctcactcaggctggcgctgatgtcatagtgctagattcttcccaggggaactcagtgtatcagatcgccatggtacattatatcaagcagaagtacccccacctccaggtgattggaggaaatgtggtgacagcagctcaggccaagaacctgattgatgctggtgtggacgggcttcgtgtgggcatgggctgtggctccatctgcatcactcaggaagtgatggcctgcggacggccccagggcacggccgtctacaaggtggctgagtatgcccggcgctttggggtgccggtaatagctgatggtggcatccagaccgtgggccacgtggtcaaggccctggcacttggagcctccacagtgatgatgggctccctgctggctgccaccacggaggcccctggcgaatacttcttctcagatggggtgaggcttaagaagtaccggggcatgggctctctggacgccatggagaagagcagcagcagccagaaacgatacttcagtgagggggataaggtgaagattgcacagggtgtctcgggctccatccaggataaaggctccattcagaagtttgtgccctacctcatagcggggatccagcatggctgccaggatattggggcccagagcctgtctgtcctgcgatccatgatgtactcaggagagctcaagtttgagaagcggaccatgtcagcccagatagaaggcggcgtgcacggcttacactcttacgagaagcggctgtactgaggacagcagtggaggccaaggcagtggagggaacgaacctcggggtcccactccaggaacagcctccctccataactgagtggtccacggacttgcactatgggttccccagctcctttccagggagaggagtggagtccctgaggggactgtggcccctctctgggcaaccccacagagtcaggtagcttcctgtgccaggctgccccatgagatcctctggggtcccccttcttcagccccctgagcccagccagccttggctcacaggcccggtgcctgcctcaggtctctctcgctgcagcctgctctggcctaaagtccagctctgacccctggggaaggtggctcctcctggcttctcctatagggcacctctcttgctgccccttttccccaggaaatggtgctctcctgaccctgcctctggcccacccttggacttctgtcctcagccatgtggcactttgggttctggacttaggccagagggaggtctctgcccccttctctggcttgaggctcccatgggccctgctcctcagcccgctaccctatctctgaacctggggagggcctaattatgaccacctgcccttcattcccgagtcaccatcatccccaggtgtaccgttcctgccctctcctctcagctgcagttgaaggctttaactttgcacactttggagtcacaattccgtcattgtatattaaataatctgaatacatcaagcagttatc

SEQ ID NO: 1596 - DNA, 2209 bp, Cricetulus griseus
ctgctccttcccaagtaactaatttcaaaggatgcatggtcaccaccctccccccatcccccactgtggcccccagagcgctgagcagaaaggagccactggagccagcctcaggatcctcctgcagggctgtgatgactagcgtgatccgtcacactggggagggtcctgcttctacgtgttttctaactgccccagctcaagagcaacaactgcctagcagcagagaaggacaagtagagttgctgggccatcgtgaagctttgcaagacactcgcttggcagatggtttacttgtttctaactcagtttcctgtcagccttgcttacacaagtctggtgttccattccccacctaccaaggccagcagacaggatggcccgctgccattcagacccgctcaccaaagaattctgaaagtgactcgtcaaggaaaaccacccctctgatttctgtccctgtctccactccccccgtcctttgccaaatgatccccgtggctgcacaaaacggcatgttctcagcctttttgaagcctcctccccagttgtctgcagggactgtcaagcccatcctaccccaagctgctgcggtgccccagcctgtgttcatgggcccatctatgcctcagggaactgtgatgctggtcttgccacagagccaccttcccccagcctgccacctgcccatcccagtcgtcactggccatcgggaataccaagctgttgccccttgcccctgcaccaatgttcatcgcctccagccagaactgtgcccctcaggtagacttttcccgaaggaggaactatgtttgcaattttcccaggttgccggaagacttacttcaaaagttcccatcttaaggcccatcttcgcacccatacaggggagaagccctttacatgcagctgggacggctgtgataaaaagttcgcaaggtcagatgaactgtctcgccaccgcagaactcacactggggagaagaagtttgtgtgtcctgtgtgtgaccgacgcttcatgaggagcgaccacctgacaaagcacgcccggcgccacatgacaaccaagaagatcccaggctggcaggcagaggtgggcaaactgaatagactcaccttggcagagaagtctgggagcatccttgagcccttgccggcctccggctgagacggttccctgatgaccgtcacctgtgggcttcttcaaactcctcttcaggagtggggaatgggacctgtgtgttcctctccaaaaatctgtgtgtctctgtcattctgtctgtccctctcctctctctcttttgtaaggaaatggaagaaatttgatctaaatcaccagcattcaaacaaataattcggcaataaagtttacagagtctagtctttttttttttttgttagaaatgagacagggtactaacttttatactttttttataaaaatatttatattgtgctcaaatcaccaatttctggatagacagttttacaaccttcttttccaatgttttataacaaagttttgtaatgaccctgctttaagtactcttggtagttaggaaaaaaacaaatcaaaatcacaaatttgttaccagtcttttatagcaaatgttttagatcagaactggttgaataaagagctcttaaaaggggaaaaaaaaataaatggcatccaatgggaatgtctttgttcattgtgacatgcagagtgtgatgttcttgtcctggtgtctctgtgggtaacggaatgtcttggagtgtttagtcgctcatcatatagaatttcattctctgaccagtattgtttctaaagtaatcaatgtgttgaaataccattagggttccatttcctgagtagatgtagaaaccccttctgtggaaaacccccaccatttgtctactgaaagacttaagttggaaaacagttcctgtgaagaggactcctgaaccccagagcccagggggggcactgctcccttgagagtgctccccaaacccccccccatggtgaggcacccccagtgcactttatcgcttgagcagttctgcttgattttttttaccttgttgagtccttttagtagtttcagtaataaaaatttaaatgtttaaaacttatgtttcatgtaacagactttgacttatttaaatgagtatgtgtaattaactttttttttctttgaatcatataaaactttcttggtttgca

SEQ ID NO: 1597 - DNA, 2208 bp, Cricetulus griseus
  modified_base (2189)..(2189): a, c, t, g, unknown or other
  modified_base (2191)..(2191): a, c, t, g, unknown or other
gatatctcgttctggttgttcctaaagacagagttgctttatcaaacatgaatgtaattgaccggaaaccatatcctgatgatgaaaatttagtagaagtgaagtttgcccgaacacctgttatgtctacgtatctggtggcatttgttgtgggtgaatatgactttgtagaaacaaggtcaaaagacggtgtgtgtgtccgtgtttacaccccagttggcaaagcagagcaaggaaaatttgcacttgaggttgctgctaaaaccttgcctttttataaagactacttcaatgttccttatcctctacctaaaattgatctcattgctattgctgactttgcagctggtgccatggagaactggggccttgttacttatagggagaccgcattgcttattgatccaaaaaactcctgttcttcatcacgccagtgggttgctctggttgtgggacatgaactcgcccatcaatggtttggaatcttgttactatggaatggtggactcatctgtggttgaatgaaggctttgcatcctggattgagtatctttgtgtagaccattgctttccagagtacgatatctggactcagtttgtttctgcagattatactcgtgcccaggaacttgacgccttagataacagccatcctattgaagtcagtgtgggccatccatctgaggttgatgagatatttgatgctatatcgtatagcaaaggtgcatctgttatccgaatgctacatgactacatcggcgataaggactttaagaaaggaatgaacatgtatttaacaaagttccaacaaaagaatgctgcaacagaggatctctgggaaagtttggaaaatgccagtggtaaacctatagctgctgtgatgaatacctggaccaaacaaatgggattccctctcatttatgtggaagcagaacaggtagaagatgacagagtgctgaggctgtctcaaaagaaattctgtgccagtggaccatatgtcggtgaagactgtcctcagtggatggttcctatcacaatctcaactagtgaagatcccagccaagctaaactaaaaatactaatggataagcgagagatgaatgtagtcttgaaaaatgtcaaaccagaccaatgggtaaagttaaatctgggaacagttgggttttatcggacccagtacagctctgccatgctggaaagtttattaccaggcatccgtgacctttcactgcccccagtggatcgacttggattacagaatgacctcttttctctggctcgagctggaatcattagcactgtagaggttctaaaagtcatggaggcttttgtgaatgagcccaattatactgtatggagcgacctgagctgtaacctggggattctttcaactctcttgtcccacacagacttctatgatgaaatccaggagtttgtgaaagatgtcttttcacctataggagagagactgggctgggaccccaaacctggagaaggtcatctagatgcactcctgaggggcttggtgctgggcaaactgggaaaagcagggcatatggcaacattggaagaagcccgtcgtcggtttaaggagcacgtggaaggaaaacagattctttctgctgatctaagaagtcctgtctatcttactgttttaaagcatggggatggcagcaccttagatattatgctaaagcttcacaaacaagctgatatgcaagaagagaaaaaccgaattgaaagagttcttggggctactctttcacctgaattgattcaaaaagtcctcacttttgcactttcagaagaggtacgtccacaggacactgtgtcagtaattggtggagtagctggaggcagcaagcaagggaggaaagctgcttggaaattcataaaggacaactgggaagagctttataatcgataccagggagggttcttaatatccagactaataaagctttctgttgagggttttgcgcttgataaaatggctggagaagttaaggctttcttcgagagtcatccagctccttcagctgagaggaccatccagcagtgttgtgaaaatatcttgctgaatgctgcttggctaaagcgagatgctgataacattcaagagtacctcctccagcggagagcctcccaaccctcagtgtgaagcctccgcccacctgctttaaaacaananaacaaaacaaaaaaaaa

SEQ ID NO: 1598 - DNA, 2208 bp, Cricetulus griseus
agaagttgatttgctgaccaaggagctagaggactttgagatgaagaaagcggctgctcgagccgtcaccggcgtcctggcctctcaccccaacagcactgacgtccacatcatcaacctttcactgacctttcatggtcaagagctgctcagtgacaccaaactggaactcaactcaggccgtcgttatggtctcattggcttaaatggaattgggaaatccatgctgctctctgctattggctagcgagaaaaccccttggagtgttgtgatggaggtggacacagagcgagccatgctggagagggaggccgagcggttagctcacgaggatgcggagtgtgagaagctcatggaactctatgagcggctggaagagctggatgctgacaaagcggagatgagggcctcaaggatcttacatgggctgggtttcacacctgccatgcagcgcaagaagctgaaagacttcagtggtggctggcggatgagagttgctcttgccagagccctctttattcggcccttcatgctgcttctggatgagcctaccaaccacctggacctggatgcttgtgtgtggctggaagaggaacttaagactttcaagcgcatcctggtccttgtgtcacattcccaggactttctgaatggagtctgtaccaatatcatccacatgcacaacaagaaacttaagtattacacgggtaattatgatcagtatgtgaagacgcggctggagctggaggagaaccagatgaagaggtttcactgggagcaggaccagatcgcacacatgaagaactacattgccaggtttggccatggcagtgccaagctggcccggcaggctcagagcaaagagaaaacgctacagaaaatgatggcatcaggactaacagaaagggttgtgagtgacaagacgctgtcattttatttcccaccgtgtggtaaaatcccaccgcctgtcatcatggtgcagaacgtgagcttcaagtacacaaaagacggaccttgcatctacaataatctagaatttggcattgaccttgatacacgggtggctctggtaggacctaatggtgcagggaagtccactcttttgaagctgctcactggagagcttctacccacagatggaatgatccggaagcattctcatgtcaagatagggcgttaccatcagcacttacaggagcagctggacctggacctttcgccattggagtatatgatgaaatgctacccggagatcaaggaaaaggaggagatgaggaagatcattgggagatatggccttactgggaagcagcaggtgagcccaatccggaacctgtcggatgggcagaagtgtcgagtgtgtttggcctggctggcctggcagaaccctcacatgctctttctggacgagcctaccaatcacctggacatcgagaccattgatgcactggcagatgccatcaatgagtttgagggtggtatgatgctagtcagccatgacttcagactcatccagcaggttgcacaggagatttgggtctgtgagaagcagacaatcactaaatggcctggagacatccttgcctacaaggagcacctcaaatccaaactggtagatgaggagccccagctcaccaagaggacccacaacgtgtgagccctcagccaggcttgggtcaggaatgccacctggagactgccagctgacacctgaccagccactcaggacaggaccctggggctgcactcccgcactgctgcaatactgccccagcctctcccctcagcctgcctttgctgcatcttatctccagctggacagcacatgtccgtttcccatcttcttccttccgtttgggtctgtctgtgtctggacttggctggctgttccctccagacccttgctggttaccttgccctaagagatgcagccaagggtccctgggttaacccaagggcccaagccctggtctgaccctggaaggattcacagagtcttgggttatgggttttggtgatgttggaagagtactgccagctcatcaccccatcccttattgcttctggtttggaaccctgggtcagggctgtagtcctggtcggtattttaataattatttaactgtagatctgtgtgtcatctacaaagtgtccaataaagaggaagccacagtccctccaaaaaaaaaaaaaaaaaaaaaaaaaaa

SEQ ID NO: 1599 - DNA, 2208 bp, Cricetulus griseus
gcttgagcagtttagtgaggtcaaaggactggatgctgttattctgggcctgctcattctagatggtgaatccatctacagcctgacctcaaagcccatactgctgttaatagcacgcattattctagtgaacatcagacataaattaacagctctccagagcttgccgtggtggactttgagatatgtgaatattcaccagcagttgcttgaggagcgctcgcctcagctttttgctcttgctgaaaactgtattgatgaagtgatgaaagtagagaatttatttgaaggtgattcaggtcgacttttagctattcaattccatctggaatgtgcacatgtatttttatattattatgaatataaagaagcaaaagaccaattcagtactgctaaagacatcagcaagttacaggttgatctgacaggagctttgggaaaaaggacacggttccaggaaaacttcgtggcacagctgattctagatgtcaggagagaagaggacatcccttccaggagtgagttcagcccagcaccaccccccacggagtaattaaccaagaatcttgagctcaatgatgatactgttctgaatgaaataaagttaagcagacagtgaacagtttcagatgcctgacctgtgtgctgaagaacttgctgtcatccttggagtctgcacaaatttccagaagaacaacccagttcataagctaacagaggaggagctgctggccttcacatcatgtttactttcacaaccaaagttctgggccattcagacgtcagccttgatcctccggacaaagcttgaaagaggaagcacacggcgagtggaacgggccatgaggcagacacaggctcttgcagaccaatttgaagataaaagtacatctgtactggaacgcctgaagattttctattgttgtccagtaccccctcactgggctattcagcgccagcttgcaggcttgctctttgagttgggctgcagcacttcagcccttcagatatttgagaagctggagatgtgggaagacgtgaccatctgttacgaaagggcggggcagcatgggaaggcagaagaaatcctcaggcgggaactggagaaaaaggaaaccccaagtttatactgcttgcttggagatgtcctgcaggaccactcctgctatgacaaggcctgggagctgtcacgacaccggagtgcacgtgcccagcgctccaaagccctcctccatcttcggaacaaggagtttcggaagtgtgtggagtgctttgaacgctccgtgaagattaatcccatgcagcttggagtctggttttctctagggtgtgcctacttggccttggaagactacatgggctcagcaaaggcgtttcagcgttgtgtgaccctggaacctgataatgctgaggcttggaacaatttgtccacttcttatattcgattaaaacaaaaagtcaaagcttttagaactttacaagaagctctgaaatgcaactacgaacactggcaaatctgggaaaactatattctcaccagcactgatgttggggagttttcagaagccattaaagcttaccaccggctcctggaccttcgagacaaatacaaagatactcaggtccttaaaattctggtcagggcagtggttaatggtgtgactgatcgaagcggagacattgcctccagcctcaaaggcaagctgcaggagttgttcggcagagtgacgtcaagagtgaccaacgatggagaaatctggagactatatgcccaagtacatggaaatgggcggagtgaaaagcctgaagagaatgaaaaggcattccagtgtctcttgaaggcatacaagtgtgacacacagtccaattgttgggagaaagatgctacaacatttaaggaagttgttcaaagagccataggactcgcacatgtggctataaaatgcagcgagagcaagtccagtccccaggaagctgtccaggcactttcttcagttcggctcaatttacagggcttgttatccaaagtaaagcaaaattttacagatgtggcaactggagaagtctttggagacctaaccaatgaaataacagctatggctgctttgttggctgagctacaagacctaagcaaccggcttcgaaaccagtactgactgtaccaagcagtttgtggcaaaggcactctggccttcttgaattcctcca

SEQ ID NO: 1600 - DNA, 2208 bp, Cricetulus griseus
gctcagctcgcggtcatggaggcgccggtcggcttgctgctgccgctgctgctgctgtggttcggggccttggccccggcgcccggcagcgcctcttcggaggctccgccgctggtcaacgaggacgtgaagcgcacggtggatctgagcagccacctggccaaggtgacggctgaggtggtcctggcgcacccgggcggcggctccacatcacgagccagctctttcgttctggccctggagccggaactcgagtcgaggctggcgcacctcggcgtgcaggtaaagggagaggatgaggaagacggcaacctagaagtccgagaaaccaaaattaaagggaaaagtgggagatttttcacagtcaagcttccagttgctcttgatcctggatccaagatctcagttgttgtggaaactgtctacacccatgtgcttcatccatatccgactcagataactcagtcagagaaacagtttgtggtatttgagggcaaccattatttctactctccctatccaacaaagacccagaccatgcgagtgaaacttgcctcccgaaatgtggaaagctacaccaaactggggaaccccacacgatctgaggatgtcttggattatggacctttcaaagacacccctgcctatagtcaggatacttttaaggtacactatgagaacaacagccctttcctgaccatcaccagtatgacccgggtcatcgaggtttctcattggggtaatattgctgtggaagagaatgtggacttgaagcacacaggtgcggtgctgaaggggcctttctcccgctatgattaccagagacagcctgatagtggcatctcctccatccgttcttttaagaccatccttcctgctgctgcccaggatgtgtattaccgggatgagattggtaatgtttccaccagccacctcctaattttggatgactccgtggaaatggaaatccggcctcgatttcctctctttggaggatggaagacacactacattgttggctacaacctcccaagctatgaatacctctacaatctgggtgaccaatatgcactgaagatgcggtttgtggaccacgtgtttgatgagcaagtgatagattctctgacagtgaagatcatcttgcctgagggagccaagaacatccaggtagacagtccctacgatattagccgtgctgcagatgagctgcactacacctacctagacacatttggccgcccagtgattgttgcctacaagaaaaatctggttgagcagcacattcaggatattgtggtgcactacaccttcaacaaggtgctcatgctgcaggaacctctgctggtcgtggctgccttctacattctgttcttcaccgtcattgtctatgtccgtctggacttttccatcaccaaggatccagctgcagaagccaggatgaaagtggcctgtatcacagagcaggtcttaaccctagtcaacaagaggttaggcctctaccgtcactttgacgagaccatcaataggtacaagcagtcccgggatgtctctactctcaatagtggcaaaaagagcctggagacggagcacaaagctgtgaccagtgagattgctgtgctgcagtctaggctgaagacagaaggctctgacctgtgcgacagagtgagcgaaatgcagaagctggatgcgcaggtcaaggagctggtgctgaagtcggcaatggaggcagagaggctggtggctggaaagctcaagaaggacacatacatcgagaatgaaaagctcagctcaggaaaacgccaggagctggtcaccaagatcgatcacatcctggacgctctgtagctcttgtctccagggcaggcctaggttgcctacacttcagatacagcacataggtagagggaggaggttgtgattagcaaaaggcctcaagagaagcttgtcccttatttctgaatggttcccttttttaaaaaaaaaaaaaaaaaaaacaaaaaatcctgtataaaaaacaaatatggtttgttttgaacaaaggccagcatttcagttgatttgtttgttctgaggtctggggcgtttcttccatgtgtatgtcctgttttatgcccttctgattcctaatttttggttcttttgtgagtgtatgcatgtttttttaaagtgtgtatgaccaaatgaaaataaaggagggacttcaacatt

SEQ ID NO: 1601 - DNA, 2208 bp, Cricetulus griseus
gtcttgttttctgttttggcatcattttctgccgagcctaccatgcatggggagatcctgtcccctaactatcctcaggcgtaccccaatgagatcgagaaaacgtgggacatagaagtcccagaagggtttgggattcgcctctacttcacccatctggacatggagctgtcagagaactgcgaatatgactcggtgcagataatctcaggaggcgtcgaggaagggagactctgtgggcagaggaccagcaagaatgccaactcccccattgtggaagagtttcaaatgccatacaataaactccaggtgatctttaggtcagacttctccaacgaagagcggtttactggctttgctgcatattacgctgccgtagatataaatgaatgcacagattttacagatgtcccttgcagccacttctgcaataatttcattggtggttacttctgctcctgtcccccagaatacttcctccacgatgacatgaggaactgcggagtcaattgtagtgggaatgtattcactgccctgattggggagatttcaagccccaattatcccagtccataccccgagaactcaaggtgtgaataccagattttgctggaggaggggttccaagtggtggtgactatccggagagaagattttgatgtggaaccagctgactcggaggggaactgccaggacagtttactctttgctgcaaaaaatcaactatttggtccttactgtggcaatgggttccctgggccactaactattgaaacccacagtaacactcttgacattgtctttcaaacggacctaacagagcaaagaaaaggctggaagcttcgttaccatggagacccaatcccttgtcccaaggaaatcactgccaattctgtttgggtgcctgaaaaggcaaaatatgtgtttaaagatgtggtgaagatatcctgtgtggacggatttgaagttgtagagggaaatgttggctcagcattcttctattctacttgtcaaagcaatggacagtggagtaattccagactacaatgtcagcctgtggactgtggtattccggaacccattcagaatggtaaagttgacgatccagaaaacactgtgtttggcctctgtcatccagtactcgtgcgaggagccatattactacatggaacatgaagaacacgccgggagtatcgctgcgctgctaatgggagctgggtgaatgacgaactgggcatagagctcccaaaatgtgttccagtctgtggggtacccactgagcccattgcattacagcagaggatatttggaggattccctgcaaagatccagagttttccttggcaagtcttctttgagtcccaacgggcccgtggggctcttattgacgagtactgggtgttgacagccgctcatgttgtggagggaaactctgacccatctatgtatgtggggaccacatttgtgagaatggaacatctggcgaatgcccagaggctcaccgctgaacgtgtgattattcatccaggctggaagccagcggatgacctagaaacacggacaaattttgacaatgacattgcactggtgcagctgaaagaccccgtgaaaatggggcccactgtctcccccatctgcctgccaggtacctcctcagagtacaacccctcaaagaatgacctgggactgatctcagggtggggccgaacagagaagagaaatattgttccccaactcaaaggggcaaagttacctgtgacctctttagagaagtgccaacaggtgaaaggggagaactccaaagtgagggcggatgactacgttttcaccagcaacatgatctgtgctggagagaaaggtgttgatagctgtcagggggacagtggtggggcttttgctttgcaggtccccaatgtaaaggaccccaaattctatgtggcaggcctagtgtcctgggggaaaaagtgtgggacctatggaatctacacaaaggtaaagaactacatggattggatcgtgaagacgatgcaggagaatagtgtccccagtaaggactaacccatacatacggccagaccctcccaccagtgcatgctctcagacccttatgatagtcccattatctcacaatgatggagagaagatgcaggagtacgattaacacggaacttgattgccaagacacctggatggaaggagggtctgatc

SEQ ID NO: 1602 - DNA, 2207 bp, Cricetulus griseus
ccttcaatacgaaagggtgttctaccaagaatgcttgaagtaaattttgaagacttagattcatggtgaagcagtcaatgaaggcttacaagcaagacagagccctgtcacgaatgcttaatgcacgtcagctaggactaaagctgatagcaaatgtcacatttggctatacatctgctaatttctctgggagaatgccatgcattgaggttggcgatagcattgttcacaaagccagagaaacgttggaacgagcaattaaactagtaaatgataccaagaaatggggtgctagagttgtttatggtgatactgacagtatgtaacaaaaaaaagaataacgtgggttacgatgtatgaaaccctggatcagaaggacccggtatttgatgcaaaaggaatagaaacagtcagaagagattcttgccctgctgtttctaagatacttgagtgttctctaaagctgctgtttgaaacaagagatataagtctaattaaacagtatgtacagcgacaatgtatgaaacttgtggaaggaaaggccagcatacaagattttatctttgccaaggagtacagaggaagtttttcttacagacctggagcttgtgttccagctcttgaacttacaaggaaaatgcttacgtatgaccggcgctctgagcctcgagttggagaacgagtgccatatgttattatttatgggacccctggactgccccttatccagctgataagacgcccatcagaagtcctgcaggatccgactctgagactgaatgccacctactatatcaccaagcaaattcttccacccttggcaagaatcttctctcttattggtattgatgtcttcagctggtatcatgaattaccaaggatccagaaagctaccagctcctccagaagtgaacttgaagggcggaaaggcactatctcccagtatttcacgactttacactgtcctgtgtgcgatgacctgactcaacatggtatctgtagcaaatgtcgaagccagcctcagcatgtagcagtcatcctcaaccaagaaatccgagaattggagcgcaaacaggagcaacttgtaaagatatgcaggaactgtacgggttcctttgaccgacatatcccatgtgtttcactcaactgcccagtacttttcaaactctcacgagtaaacagagaattatccaaggcaccatatcttcggcagttactggaccagttttaagttaacagtatcacagaactccaggtgctatttgttcagtgtttaccactcaactcctctgcatggtgctttttcaacttccatcaagtcaaagatgttcattgtctgtcatcaaagactatgaagacttctgctaactgaattaaaaagtatacatgttgatatctgaatagctcacttcttacaatgtacaaattcctcattctctcaccttttaaccttgttttataataatacaggtgttgaatttgctccagtttatgtaccatcttgtaaatccatttgagcagatcatgtttacttccctgtggaaaggaatattgaaaacctcttaaagtcatttgtgtgtattccttaaactgtctgtatcaagatgtgttgcttagagatatccactcactttataattttgactgcaaaatattttgtaaatacacttttttacttttcaaacaactgagtaaaataatgtgcaatgaattttatacaatgattttcacgttgttggtatatctcctctaggttttgcttgactcaagggtagatttgttactttgatcaaactgtgcaaatagtaccatgtgtagcattttttgaaacattcttttctaaagactgctgtcttgctttagctactaacggggcattgtgaggaactgtgcaaagacatttttgttacaaacctgtgggcctgttgcaatactttaaaaataaaataaaaatttattccattttgcttgttttgtatagacatttctattgcttctaaatatgcttaaaatattctttccttatgtactgtacagttaatcttatttgccatcccttgaacacaaatgtgtatttaggatatttgtataactgtataaaatgaaaaaggaattatgtggtcagtgcattgttttttaaactggaaatcattttgttttaagagttaataatggaaaccaaattaaaaattgaataaaatatgaaa

SEQ ID NO: 1603 - DNA, 2207 bp, Cricetulus griseus
gaggtgaaggactccttggacatggaagtgaagcagaacttcatcgaccccccttcagaatcttcatgacaaggatctgagggagattcagcatcacctagaaaaaagttaggaaaggccggcgcttggactttgattataagaagaaacgacaaaggcaagattccagatgaagaacttcgccaagccagctggaataccacaaactaggcagtgcagatcctgcagcaagtcactgtcaggctggaggaaagaataagacaagcttcatctcagccaagaagggaatatcagccaaaaccacgaatgagcctagagtttgccactggagacagtactcagcccaacgggggtctctcccacacaggcacacccaaacctggaggtgcccaaatggaccagccctgctgccgtgccctgtatgactttgaacctgaaaatgaaggggaactgggttttaaagagggtgatatcatcacactcactaatcaaattgatgagaactggtatgaggggatgcttcatggccagtctggctttttccccatcaactatgtagaaattctggttgctctgccccattaggatcttatgctggctggctcacctccttctgacccagatagttaagtttaaccactgctttggtaatgctgcttccaacacatcatgaaggccgcagtggatgagtcatcaagcccacacatgtcctgggttgacctgtgtgctcctacagttgacctggtgatagacggtatcttccaaggccagtgggtctggcacatgctttaaaactccatctgagactagccagtggttacagaactgctcttcacacagttctcaggagggtgcggtttttgataataaatctgtgagccacctcacagaaaaactctcctcactgaagatattgtctctcacccaggggccatttcaaggtctggagttccccatgtacagaggagaaagtcctttctgttgcactttcccttcctaaatgtgtgagtcacagaattgttggtgaagcatcccccaccagcaaattgtctgctggcctaaacaacttggacttttgatgccatcagcaaaagtattaattgtccaaagcacttttgttctcatccatctatctatctatctatctatctatctatctatctatccatctatctatctatctatctatctatctatctatctatctatcaatcatctatctatctatctatctatctatctatctatctatctatctatctatctatctatctatctatctatctatctatcaatcatctatctatctatcatctatctatccatctatctatctatctatccatctagctatctatccatccatctctctatcatctatctatctatctatctatctatctatctatctatcatctatctcctacttctgagacataccagttttcttccctcccttctgttaaagcactagagaggtggcgttcccacttatttctgagtgagttggtgagcattgtgtatattgtctgaaaagaaaaaaattctccaggatgaattgggaagaatctgatctccaagctcagattccttgctgtatagaagctgtatatatacgtagcccatttctgaaggatacaggaagggggaacagctgtcttcccttctctgtttatttacccaggaatcagtccatttcctgagtccctctgccacaaaaacataggagagaaacactagtaagcatttcccacatcttcatagaacaagacatagtgaccgttgctccttcccacttttatcttgtttgtgttccttgaacatcatttgtgtatattctgccctcaatgaggaccaaataaagatgatttttgtgcttagcagtttaagtatgtggctgcatataaaaccctttcacactttagtcattactttaacccttctatcgcatcttcattttgtgtgtacagtgctgtgcaagctgatcagtgttgttcagtcatggaagtcctgttaggcacccagagttctatttatctagctgtacaggctatttcagaggtttaatgtgctgcttccgatatgccacttgcagtagtggttcatgtggagtgaaaaggtaaatcttcctgcttaaatgtataaactcaccatgggaagcgttgctgtttccaataaatattgctgaagatagaaaaaaaaaaaaa

SEQ ID NO: 1604 - DNA, 2207 bp, Cricetulus griseus
tcttctggacagactggggccacattgccaagattgaacgggcaaaacctgggatggctctgagcggaaggtcctcatcaacacagacctcggctggcccaatggacttaccttggactatgatatccgcaggatctactgggtggatgcacatctggatcggatcgagagtgctgacctcaatgggaagctgcggcaggttttggtcagccacgtgtcccacccctttgccctcacacagcaggacaggtggatctactggacagactggcagaccaaatccatccagcgtgtcgataagtactcaggccgaaacaaggagacagtgctggccaatgtggagggactcatggatatcatcgtggtgtcccctcagcgggtgtgcctgtcctgatgagccagacagtcagccctcgctcccttgtacctggcctagtgcctcccattcccagagctaccagcatgagtgaaaagaagcccacgtgttacccaaccacaatgcccaccaccttgcgttcttctaccaccaggacccgcacatctctggagggaagcagaaggaagatgctctgaaagggatgcccagctgggcctctgtgtccattctaatgaggctgtacctgctgctccaggtgaaggacttcacatcagctatgccatcggtggactcctcagtcttctcttggttttggtggtgattgcagttttgatgttgtacagacacagaaaatccaaattcacggatcctgggatggggaacctgacctacagcaacgcccccataccagaacctccactcaggaagtgaaaattgaagcagttcccaaaccagccatgtataatcaactttcctataagaaagagggtggacctgaccacaattacaccaaggagaagatcaaaattgtagagggaatttgcctcctctctggagatgatgctgaatgggatgacctcaagcaactgcgaagctcccgtgggggccttctacgggatcatgtatgcatgaagacagacacagtgtccatccaggccagctctggctccctggatgacacagagacagagcagctgctgcaagaagagcagtctgagtgtagcagtgtccacactgcagccactccggaaagacggggctctctgccagacacgggctggaaacatgaacccaagctctcctcagagagccaggtctaaagtgcccacattctcttccctgcctgcccgatccttctcctctatggacttctgatccttgagctcacgtaacagcacggccccgttccatgtgctcgtcttcctcctcccacccaaactcgcttccacggcccccagacgaacctgttacttacctgacgtccatgggctcagcatgattcctggtcagcgtagagctccgtctctccttcccttggcaccctccgtgcctgccccgcagcaccactgcaattgatgatgtaacactctttctcatcacagctgacatgatggttcctctgtgaactggcctgctaggggctgggactagcgaccacaggtaaaacgtaatggacagaggttgagagaaaaagggagaatcatcccagctggtctgggtgtttgggaaacctccagcctcgtgtgttggtaatcatgaaaagcttttgtggggtactttcgccctggtgtcttgtccattgctggcagtggacattcttctcacccaggagtcacagctttgtcagctgtgatacaggtgaagtgtgggtgtggcttaagctgttcatgctcctgccggaatgtctggggccatttctaccttggataactggaggcccctgtcatggcaactcactaataggaactccctcctggtgctgctactggccagtcctcttcccaagcctttagctatgttgtgagcttgagtgaacaacgggtgggccttggagactagacctctaagaagtttaagaagctgtgcatacatttagcacagtatcctacctgagcttcattgttgtgacttttctgtctcccattctctgggatcctaagagaagcaattctgtaatagccttccaaagaatgactagacattttcctaaatggctaggaagagcaactagagagtcacaagatatatccagggcctcaggagaagtattatgaggttgcaactcttgagttcattctctaagtgctcagggacacaagttcatggacac

SEQ ID NO: 1605 - DNA, 2206 bp, Cricetulus griseus
cagccacagccacagtcacagcctcagcgaccaagtcaactggcggaaagtcttggagaaatgcagagctatggtagacatcccattccgaagcaagggacttggccgattgtgtgaagaacttaatggcgaagcactggagtctcaacagaagccaagaaataggaaggctaagcctgatggaatggtactaggcagcaaccaagggagagaccccaggaagcataaaagaaaacccctggggtgggctattctgccagaaaatcacctctttatgataactgctttctccaagcccctgatgggcagcctctatgcacctgtgaccggaggaaagctcagtggtacctggacaaaggcattggagagctggtgagtaaagaaccttttgtggtcaggctacagtttgaacctgcaggaagacctgaatccccaggagattattacttgatggttaaagagaacctgtgtgttgtatgtggcaagacagatacctacatccggaaaaatatcattccacatgagtacagaaagcattttcctattgagatgaaggaccacaactcccatgatgtgctgttgctctgcacctcctgccatgccatctccaactactatgacaaccatctgaagcaacagctggccaaggagttccaggctcccattggatcagaggagggcttacgcctgctggaagatctagagcgtaggcaggtgcgttctggagccagagccctgctcaacgcagaaagcctgcctgcccatcggaaagaagagctgctgcatgcactcagggagttttataacacagatactgttacagaggagatgctccaagaggctgccagcctggagaccagaatatacaatgaaagctatattcctcatgggctgaaggtggtacagcgtcacacggagggtgggctgcgctccctcatgcaactggagagccgctggcgtcagcacttcctggactccatgcagcctaagcaccttccccagcagtggtcagtggaccataaccatcagaagctgctccggaagtacggggatgaccttcccatcaagttgtcgtgattgctgcttcctgcaggtcaggacaggtgggaagctggagccaaggttaaattacctcctgctgtttaatgtcattggtggaagcccagatgactggctcatagtgctaagttacactaaccccaggtacttctgatggagcaaggctgttgttttaaggggagcccatggtttggaattttaattgaggagtttattctttctcctcctttctcccctatttctgtgtgcaagggaagcttggactttattttcactcttcctctctgcttttcatgttaagagggagaacaaagatgtctctctggagtaactttgtcaggctctgagagacgtttgtacttctctccactgcattgctttctctggggcagggagaaaacttccttctggagttgaagaagtgacccagagtcagattcatattcctaattcaacctcatgattttaatctttcttgcttttccatattcatttattagggtctatcccaactttattacttggatttattttacatgcttggaaatgttcccactttgcatataggaccaaagcccagcttactgccatgtgcttcttccttgtcacaggggaagtccttttctggaaatgagttttcagctgggtgggtcccaagtatacaaccattcctaggagagctttgatacgttgttcagcctctcctcctctggatatctctgctcgttgcctgtctcctgtcctgcttctgggagctgtcacttcctccgtcagtgttcatgttcggttgcttttgcgatactgacctctccttaacacttaattcactcccagagccatttggccagggtgaggacgtcacctcccctggagcctgggacactgagattaactgatgcattgcaagtttaaaagggtaatgtttcatctttcaaaatgttagactactactttgagtatgaaatcaatttattagcaattagtattttttctaaactattagggaaactttcttattttataagctcttaataagcttgagcagaattttatggccagaatccaaaaagagttctattttggaattgtacccaagttggttataaccgatctgacattgataaataaaacaacttcaaagcacaaa

SEQ ID NO: 1606 - DNA, 2206 bp, Cricetulus griseus
cgatggccctgtgcaacggagattccaagccagagaatgctggaggagacctaaaggatggctgtcacgagtatgaaggagctgttgtcattctggatgctggggctcaatatggcaaagtcatcgatcgaagagtgcgggagctctttgtgcagtctgaaatcttccccttggaaacaccagccttcgccataaaggagcaaggatttcgggctattatcatatctggaggacctaattctgtgtatgcagaggatgctccctggtttgatccagcaatatttaccattggcaagcctgttcttggaatttgctatggcatgcagatgatgaataaggtttttggaggcactgtgcataagaaaagtgttagagaagatggagttttcaatattacaatggacaatacatgctcactgttcaggggtcttcagaaggaagaaattgttttacttacacatggagacagtgtagacaaagtagctgatggattcaaggttgtagcgcgctctgggaatattgtggcaggtatagccaatgaatctaaaaagctatatggtgtacagttccaccctgaagttggccttacagaaaatgggaaagtaatactgaagaatttcctgtatgatgttgctggctgcagtgggacctttactgtgcagaaccgagaacttgaatgcattcgagagatcaaagagagagtagggacatcaaaagtattggttttacttagtggtggtgtagattcaactgtttgtacagctttgctgaatcgtgctttgaaccaagatcaggttattgctgtacacattgataatggatttatgagaaaacgagaaagccagtctgttgaagaggccctcaaaaagcttggaattcaggtcaaagtgataaatgctgctcactctttctacaatggaacaaccactctaccaatctcagatgaagacaggaccccacgaaaaagaattagcaaaacattaaatatgactacaagtcctgaggaaaaaagaaaaatcattggtgatacttttgttaagattgccaatgaagtaattggagaaatgagtttgaagccagaggaggtttttcttgcccaaggtactttacggcctgatctaattgaaagtgcatcccttgtggctagtggcaaagctgaactcatcaaaacccaccataatgacacggaacttatcagaaagctaagggaagagggaaaagtaatagaacctctgaaagattttcataaagatgaagtgagaattttaggcagagagcttgacctgccagaagaattggtttccaggcatccttttccaggtcctggcctggcaatcagagtaatatgtgctgaagaaccttatatttgtaaagactttcctgaaaccaacaatattttgaaaatagtagctgacttttctgcaagtgttaagaagcctcataccctgttacaaagagtcaaatcctgcactacagaagaggaccaggagaagctcatgcagattacaagtctccattcactgaacgctttcttgctgccgattaaaactgtgggtgtgcagggtgactgtcgttcctacagttatgtatgcggaatttccagtaaagatgaacctgactgggaatctcttattttccttgccaaacttataccccgaatgtgtcataacattaacagagttgtctatatctttggcccaccagttaaagaacctcctacagacgttactcccactttcttgacaacgggggtgctcagtactttgcgccaagctgattttgtggcccataacattctcagggagtctgggtatgctgggaaaatcagccagatgccagtgattttgactccattacattttgatcgagatccacttcagaagcagccttcctgccagagatctgtggttattcgaaccttcattactagtgacttcatgactggtatagctgcaacacctggcaatgagatacctgtagaggtggtactaaagatggtcactgagataaagaagattcctggaatttctagagttatgtatgacctaacatcaaagcccccgggaaccactgagtgggagtaataaatgtgttgttgaagaactgtgtgcagtggaggctcaattaaaaaccacttgtcaatgccaattttatttttagttttttttattttaactttttttttttttttttttttttgtgtgtc

SEQ ID NO: 1607 - DNA, 2206 bp, Cricetulus griseus
tggttcacgtgcacgattccaaggcaagcccaagaagtatggcggagactacctgcaggcccgaattcactcgccaaaactgcaggcgggggctgtgggcagagtggtagactaccagaatggcctttacaaagtgttttttaccctgctctggcctggcagagttagagtgtccatatctctggttcaccccagcgaagggattagagttcttcagtacctgcaggaagccaaaccagacagggtctatttcaagagtctcttccgctccggaaggatttcggaaacaatgaagtgcaacgtgtgtctcccgggaagtcttcccctgtgcaactttacagacctctacaccggggagccctggttctgcttcaaaccaaagaagctgccctgcagcagcagaatcaaccacttcaagggcggctacacgaagggtcttctcactgctgccgacagtgctttctttcagagtggtgtcaatatcaaaatgccgatcaactccagtggacctgactgggtgactgtgatttccaggagagtaaaagaaactaacaacctggatgtttctcaaggttcaggaacttttccttctggatatttctacaaagaccagtggagacccaggaggtttaagatgcgccattttaatgaccctgataacattacagaatgcttacagagaaaaatggtgtatttatttggtgactcaacaatcaggcagtggtttgaatacctcactatgtttgtcccagatttggtggagtttaacttggggagtcccaagaacgttggtcctttcctcgcagtggaccagaagcacaacatcttgctcaaatatcgctgccacggtccacccatccgattcacgagcgtcttcagtaatgagcttcattatgtggcaaatgaactgaatgggattgtgggagggaagaacacagtggtggccatagctgtatggtctcactttagcaccttccccttggaagtatatattcgcaggctcaggaacatccgacgagcagtggtccagctcctggaccgaagccctaagactgtggttgtcatccggacaggcaatgcccaagagctggggcctgaggtgagccttttcaacagtgactggtacaactttcaactggacactgttcttcggaggatgttctcaggggttggagtctatcttgttgatgcctgggagatgaccttggcccatcatctaccccacaagctgcatccagatgaagtgattgtgaagaaccaattagacatgttcttatcttatgtatgccccttggagacctaactatcttcaagtacactaaaggaatcacattcagtgactttccaattgactggtagtatagaaaggttgtgattgactccattgtgagatggatactatcaatatgtttgacatttcagaaaagagctgtacttgcataatgacttgtaaagaacttaggcagtgtagactgctttgagtaaacagaatggatagatttggttggctgtcctatgtttgccacttacctagtaaaggaaatgggacatgtctttatgaatagcacaagggtctctcctcaggaatagagagtgtttttattgtcagaggtttcttggccacgctgaagactgctgtatctcaggagtttctattgactttttttccccctgaattacttgtaaaggccaatgtgtgtggtcagaattttgtaataaggatactaccaatttcctgcttttatctaggaaagaagcaaaaacagaagagcataaaatctgtgctttggattggtgttcgcatttgataattatttcttacttgattcagctaagttttatgtgatgaatacttattctggaataaccacttttggaaataaatatgtgaacagacgtttatttttatgttctggagcttgtgggttttaagaattgacttttatgtgaagaatgctgccaactatcataaaattgtagagtttctcccatcagcaattccaagtctctctcttttagctgtcatgaagtatatgccaaaattagacattacaccagatcagaagttaataaaattagataattaaaattatgtcaggtgtggaggcacacacctttaatcccagcactctggaggctgagacatggatctctgtgagtctgaggctagcctggtctacatagtgagttccaggacagccagggc

SEQ ID NO: 1608 - DNA, 2206 bp, Cricetulus griseus
gctggttgccttccagcgggccttgaaggactttgtggcctccattgatgctacctatgccaaacagtatgaggagttctacataggactggagggcagcttcggctcaaagcacgtttctccccggactctcacgtcttgctttctcagctgtgtggtctgtgtggaaggcattgttactaaatgttctctagttcgtcccaaagttgttcgaagtgttcactactgccccgctacgaaaaagaccatagagcggcgctactctgatctcactaccctggtggctttcccgtcaagttctgtttatcccacgaaggatgaggagaacaaccccctggagacagagtatggcctctctgtctacaaggaccaccagaccattaccatccaggagatgccggagaaggcccccgctggccagcttcctcgctctgtggacgtcattctagacgatgatctggtggataaagtgaaacccggtgacagaatacaggtggtggggacctaccgctgtcttccagggaagaagggcggctacacctcagggaccttcaggaccgtcctgattgcctgtaatgtgaagcagatgagcaaggatctgcagcctgcattctctgctgacgacatagccaagatcaagaagttcagcaaaacacgttccaaggatgtctttgaccagttggcccgctcattggcccctagcattcatgggcatgactacgtgaagaaggcaatcctctgtttgctcctgggaggggtggaacgagagcttgaaaacggcagccacatccgtggagacatcaatattctcctcataggtgacccctctgtcgccaagtcccagcttctgcggtatgtgctttgcaccgcgcccagggccattcccaccacgggccggggctcgtctggagtgggtctcacggctgctgtcactacagaccaggaaacaggggagcgtcgcctggaagctggtgccatggtcctggctgaccgaggagttgtttgcatcgatgagtttgacaagatgtctgacatggaccgtacagccatccacgaggtgatggagcagggccgagtgactattgcgaaagctggcatccatgctcgactgaatgcccgctgcagtgttttggcagctgccaatccggtatatggcaggtatgatcagtataagactcctatggagaacattgggctgcaggactcgctgctgtcacgatttgacctgctcttcatcatgctggatcagatggatcctgaacaggatagggagatctcagaccacgtccttaggatgcaccaatacagagccccaggggagcaggatggtgatgctttgccgttgggtagttcagtggatatcctggccacagatgatcccgactttgcccaggatgaccagcaggatacccggatttatgagaagcatgacagccttctacatgggagcaagaagaaaaaggagaagatggtgagtgcagctttcatgaagaaatacatccacgtggccaaaatcatcaagcccgtcctgataccagagtcagcagcctacattgcggaagaatactcacgcctgcgcagtcaggacagcatgagctcagacactgccaggacatctccagttacagcacggacattggaaactctgattcgactggccacagcccatgcgaaggcccgtatgagcaagactgtggaactacaggatgcggaggaagccgtggagctggttcagtatgcttacttcaagaaggttctggagaaggagaagaaacgtaagaagccaagtgaggatgaatcagacctggaagatgaagaggagaagagccaggaagaccccgagcagaagcggaagaggaggaagactgatgccacggatggggagtcctttgacccttataacttcagtgaagcagagaaggaaacgccacaagtgcacactccgaagaccgacgagatgattctcaggagaccagggaatcccagaaagtggagctgagtgagtccaggttgaaggctttcaaggcggccctcttggacgtgttccaagaagcccacgcacagtctgtgagcatgagacacctcacagaatccattaaccgggataaagaagagcccttctcagaggaggagatccaggcttccctgagcaggatgcaagatgacaaccaggtcatggtgtctgagggcatcatcttcctcatct

SEQ ID NO: 1609 - DNA, 2206 bp, Cricetulus griseus
ttacctactatcaagactcacagtctcttgtggttttctagatacatgttttgtagagcgcaactggtttcacttgattggcataacctgtggactagctatctacaactccactgtggttgatctccacttcccactggctctctacaagaagctactgaatgtaaagcctggcttggaagatttaaaggagctgtcaccaactgaaggaaggagtcttcaagaacttctagattacccgggtgaagatgttgaggagactttctgcctcaatttcacggtgtgccgagaaagctatggggtgattaaacagaagaagttgatacctgggggagaccgagtggccgtgcgcaaggacaacaggcaagaatttgtggatgcttatgttaattatgttttccaagtctccgttcatgagtggtatacagccttctccagtggcttcctgaaggtctgtgggggcaaagtcctggagctcttccagcctgcagaactacgggccatgatggtggggagtagcaactacaactgggaagaactggaagagactgccgtctacaggggcgattattcaggcacacatcccactgtgaaactaattttgggtaggacattccatgagttccctctagagaagaagaagaagtttctcttgttcctgacaggcagtgaccggattcccatctatggaatggccagtcttgcagattgtcatccagtccacaatccatggggaggagtacttacctgtggcccacacctgctacaacctgcttgacctccctaaatatagcagcaaagagattatgaaggctaggctgacccaggccctcgacaattatgaaggttttagtttggcctgaggctccccagctcacccaggatgtccttcccttcctcagtgaccacattgcagcggatacaaaatatcatggggatgatttctatttttttatttctaagtagatggagacttttgaatcctaaatcccagtcagtgtgtttctgtagttcagtagtaaacttggctttagtatgggagtggattggattttgctttgttttgttttacaccaaggtacctgttgtcccttgtctgtgaatgtgttgggatctgctggattaaactgcagtagattgtaagcttttgtttccaaaatgcatctgagccccggtgtttcttctccatgcttccctgctcttttcctagcttctgtctctgctgccgagatgactgattgacatatcccttcttgcctgccatgcagagtgtccctttctctgcagctttggaaatgcatggcttgttgtagcccagtccagcccacagtggaatgactgcccactgcctaggcctcccgaaagacacatacaacagcctcagatggcaggtgggctgcatgtgtgttgttagccatgatacctggatagacaatgaattagtagacccatttaccttgcttttgaagcaagttgcattttcttgtctacatattgcccaagaatggtataattaataacaccgcggtcccgttattactttatgtctactgctctttctttcttaccttttctttcctatgttccccaaccctcctttcctctgctctcttattcttccttgtctttgctacttgaattaattctccacttccttctgctagtggatgcatgctgtcttttttattttaaattttgtaagattttttttaacttctgtctctaactgttaaagtatgaagatactctttatgatagagtttttgtttatcacatttgaaatgttcatttacagtgggatttcagcaggggaattatgtttaagtcaaataaatacatgtgtctcaaaaatgacgtgtctaactgcttagcattcgataagaaaatcctacatgatcaaagaactcatgtaatgctgattttaaatatgtagtagctagagaaaagatttatttatataaaatgaagtacatatagattgtgatgcagccttgagtcttgatggaaggaatgtagatttttgctttttctttttctttttaaaagttactccaattgctaaaattggtagtttttcagtccttataaatacaacatttaaaaaagatacacaattatatgaaatgtttattttctatgtgtgtgcatatagttcactattatccaataaatttggtagttttaaacttaaaagtaaaaaaaaaaa

SEQ ID NO: 1610 - DNA, 2205 bp, Cricetulus griseus
caacacagaacccctgcaggagcgcatgggccacagctatgcggaaatggagcagaccattgtactggacaacagtgaaggattttcagtacttcaagaggagctctgtgttgcccggcataagcagaaagaggagcaagcagcttccaaagaaagcgagtccagcgatcacccacccatggtctctgaagaagacatttctgttggttattccacatttcaagattgtatccccaaaactgagggagacagcccagccgcaacactttctccccaaatgcacccggagccagctcaacaggatttctcagggaaaatgcaagaccagcaggaatactatgtgacaacaccaggggcagaaggggcagagactcaaaaagccacagaagttcctgactctctctgtaagactcctgaggacatcagtacccctgcagaggaagcaaagtcttgtctccagaccccagtgactagcgagcgtggttctcccatcgtgcaagaacccgaggaagctcctgagcccaatgaggagaagtctccaaggaaaaccagcctggtgatagtggagtcagcagatgaccagcctcaggtcttgggaggactggacagtgacacagcttttcaaaagggagatgatatgcctgacataccccagaaactgtctcagaagaggaatatgtcgatgagaatggacacaccgtggtgaagaaggtcaccggaaatcattaggcggtacgtgagaaggaggagattacaatgcagggaacgccacaggagccagtcaacattgaggatggggacagttattccaaagtgataaagcgtgtggtattgaagagtgacacccagcaatcagaggtgaccttgtctgaacccagcattttgtccagtacctcacagtttcaggctgaaccagtagaaggccgtagagtcagcaaagttgttaaaacaacagtggtacatggagaaaggatggagaaaagcctgggggactctagcttagccactgaccttccttcagccaaagatgactttgaagaggaacaacaatgaagtaaagccagtacacagaagagggctgtggtgaaggaccagcagggaaaacgcatcaaacttggtagtctacctggaggatgttcctggagcactagaccaagacgacctccagagagatctccaccaactccttcggcatttctgcaaggagaacacaaagcaagaggcccaatgaggagctgcccagttcttaccagaaaccacatacccactcaatatgcaacttcccatttcctgtcaggagtgacccaagtggcctaattactgggatcctgtgacatttccactcttggcaaatacaaggcattttctttgcttccttctcccccaccctctctaactataagctaatttgtgaccaaagatagcatccttcattctggatgctgtatccactattctgagcatctgtgctaacctgggaactggcgcctccattgttctttgcttctgctcaggctccatgaaaatcagaagaacttcacctgcagacttcttcaagtgacagaggggaatgtttccgaggatatccatgtataatgtatatagctgacattctcagacgaacaacagaagtaaaatttaaaccactgcctgtcataatttcactaaagggtaacacagttctatgaaaggaacacttcagaccttgacatgtccttagtacttccagagtagccattgctcctaaaaaaagctataactactgtagttttccagtgttcatcgctgctttagcaaaccacgctgtcttactggtggtactttcttctggccactgcactgtagataattcattggaaacaagatttatgcaccacacaaaatgttaaatgatgtcaccatgttggagtggtttcttttgctttttttttttcttttgcttttttttacccccacctccaggtgtatctcttctctaatacctgcatgtggcattacacacacacacacacacacacacacacacacacacacacacacactgagtgatccccatgccctgtgtctaatccctctagtggttgaagctgtgtagcattttaacatatatatatatagtcacaaatatattcatataaacagtatacgttttgaatcagttatttgttaaaagaaaagtatattcaatgaagatgaagtaaaaaa

SEQ ID NO: 1611 - DNA, 2205 bp, Cricetulus griseus
cgagccgcttgacctaaagctgagcatcaccaagctccgggcggcgagagagaagcgggagaggacattgggtgtggcccggcaccatactttgcatagggagctagggctggtggatgatagccccacacctggctccccaggctcccccccaccaggctttctgctgaaccccaagttccctgagaaggtggatggacgcttttccacggcccccctggtagacctcagcttgtcaccaccgtctggactggactctccaaatggcagcagctccttgtcccccgagcgccagggcaatggagacctgcctccactgcctaatgctgtggatttccagccacttcgctatctggatggtgttcccagctccttccaattcttcttgccctgggctctgggggagctttgcacctaccagcttcctccttcctcacacccaccaaggacaagtgcctctcaccggagctgcccttggccaagcagcttgtgtgtcgatgggccaagtgtaaccagctctttgagctcctccaagacctggttgaccatgtcaatgaccaccatgtcaagccggaacaggatgctcggtactgctgccattgggagggctgtgcccgccacggccgtggcttcaatgccaggtacaagatgctcatccacatccggacacacaccaatgagaagccacaccgctgccccacctgcaacaagagcttctcccgcctggagaacctgaagatccacaaccgctcccacacagggtggaggtgggggtgggggcatgggtcctgggctgccaggctctgttctgcccctcaatctggccaagaacccactgttgccctcaccctttggggctggtggactaggcctgcctgtggtctctctcctgggtggttctgctggtagcaaggctgaaggggaaaaaggtcgtgggtcagtgcctgccagggtcctgggcctggaggaccacaagactcccctggagaggacggagcacagccgctcccggccaagccctgatggactccccttgctaccaggcactgtattggacctgtccacaggcaactcagcagccagcagtccagaggcgctaactcctggctgggtagtcatcccgccagggtctgtgctgctcaaaccagctgtggtaaactgaacctgggctaccccacctaccagctgtgacagtccagctacctactgtgggctcatcccctgacgaacagaaactcttctgcaaaatagcaataatatcctactgctccagggggtagcaaggatggtgctagaaggtcttcagtggcttcctggctccagagtgaggtcttggcttggacctgctgtccaaggaggccatgctcttgggtgctaaggcctcactcacctccacttccctagcccatagtttgggtgaggccttcctctgcctgtcctccaaggaccctccatcctgcctcttgttctggtgcattcctctccatgagcagtcagggcaggttgccattcctccctgccttacctacttatcaactgggaatcctcagtgatcagaagcccatgcttgggaattccttagacccctttccctctggcctgcccgctggagggagagcaagacagagctctgtggttttttgagcagctctgcctattctttttcccagactgcccttctgtttcagaagggtcaccctgacctgatctgacctgcccgactgctgggctttaggaccccagccctgatagggctcggctgtgctggctctaccccttgaaggggctgtgagcaagttaaggagctggtctcctgtcttcgggtctacccacgatccaatcaacctcctggctccgttagggccctaggccctaagtccctggccaggggattgggtttgaggctcaagcccaagagcagaggaatagggcactggaaggtgacattagctcagcatgtgattcagtgatagaccaggcttggaagggccggtatacttgtcagtttgttgcacattccaggacatcagtattttaacaggttctaagtgcctttctattgtagcttatgtttttcctccttttggctccattgctgttagcatagaagtttaaaaaaaaaaaataagctaatgactataacaatatattcctccatgtgagaggaagtttataaagaaacaataaaagtgagttgcaaagatg

SEQ ID NO: 1612 - DNA, 2205 bp, Cricetulus griseus
gatcaggcccacttctctgcgcttgtgtccatggagcagaaggacagtgccaaggaacaagccgtgatcccgctcacagattcagagcataagctgctgcccctgcactttgctgtggacccaggaaagggctgggagtggggcaaagatgacagtgacaatgttcgactggccagtgtaactctgtccctggaggtcaaattacatctgctgcatatctatatgaatgtgaagtggatcccgctgtcatctgacgcacaggctcctctggcccagcctgagtcccccacagcctcagctggagacgagcccaggtccactcctgagtctggggaatcggacaaggagtcagttggcagcagttctacaggcaatgagggcaacaggcaggaaggagaagtcaaagcgagacagagagaaggacaagaagagagcagattgaagagctggaaaggcagcaaggaggaggcagctggggatgggccggcgtcggagaagccctcgtctgagtctgttggcaatggagggagcaagtatagccaggaggtgatgcaaagcctgagcattatgagggtcgcaatgcaagggaggcaaatttattttgttggaaccctgaagatgggccaccggcaccaatatcaggaggagatgatccagcgctaccttgcagatgctgaggagagactggcagagcagaagcagaaggaagctgaaaggaagatcatgaatggagggttagttagtgggcctcctccagccaaaaagccagagccagatggtggagaggaccagcccagtgactcgaactgcagcttctatggacaccccgagacaaacaacttctgctcttgctgttacagggaagaactgaggaggcgggaacgggagcccggtggggaactgctgcacaggttctgaatggtagaacctcagccgggaaggggctaaacaaagaacgttaacctcacctctggctcatcaagacccagcccccgtagtgatggggcaagtgcaggaatgtttgtgggagctggagagctggcagactagagagagcaggacagggctagcacagagtttgactggagactacacgacagaaggggaagactgtgtcctaacgtcttgcggcccggtcccagggcccaagggaaagtaggaaaataattggtgtgtgtgggtgggaggtgggtggaatcttgagggaggagcctggaaataaggttctcagtcagctaagaaaaaaatagaccaaagttcattgactttagaaaaaaaaaaagcacacggtggtggagtttgggagtatagtgcgaatctgagatattgagcaatttttgatcttggtttgaactaggtagatgtcaggcttgggtaaattctcccttccggaggggtcaggcagtgtgtgcctggcctagttagggtattttaaaccccagtgagtgaaataggagagggaggaacttgaaggggggattctttgtcctagtaagttttatgttcttctagatagtcatctgtcatccatcctagtgttagaggagattgcctgttgccctaaaaacccagagtgaccaacaacatcaaaatcttgggataaaacaggaatggtattaaggtgaaagaagtgagccccaaattgaacaagtatgaggacaaatcctgtctatttacattttgctatgttcataaagtttgttcttttttttcattttttgatttttaaaaaatattgcatcaagatagtatttatcatgattcatgtgttttaagcactccttcagtttttctcccaaggtgaatgaatgccttgtgccttgttctcatcacctttagacttgtcccagtttctggagttggaatgacactggtgaaacccgcaccagatgagccccctcccttcctgacactgcagactccctggtgtgtactttattccacaagacatcgaggtgtgtggtgtggtgatggggttcggcagccttttggacttctacagtcaggcttgtgggcccccttgctagcaagtacatacctgtttgttccagactgactctgctcgtgctagcttcactatttccacagttgcagccaacacagggaactttggaagctgaggctggaaggatgtgtgcttggggaagggagtattgaatgtcacaaccccccacctaaggattgctgcctctgtacagactcaaa

SEQ ID NO: 1613 - DNA, 2205 bp, Cricetulus griseus
ggttcctgcgctcctgaagggcgggcgcggaagtaaagacggcctcaggcggattcttactggcggcgagatcgggaagagccaccaggcggtgaccgctttgcttctgcagctcgggtcagctcattccgttaccccagccttcgcgggctgcacagaggaggaccaagttacctttgggtcttgagaccttggggagcggggcccaaactcgggaccaactcctcatcccccttgccctccctctcctgcatctcttccattgcacgcacggaatcgcttgtgcctttgggctggcctcctcagccgtgcctggagacttaagttcgggtcggtaaaggtaaccgtgggaaaagcggccccccagtggacaaaggcagaggcagggatagagcaggccctacgggccgcgggcggtgtgcataggcagttgaggaggtgagccagaagaaaagagtactgcggatttagaaggcactgtgaaggacttgttgcgcgatggaagaatctgactccgagaaaaagacggagaaagaaaatctgggccctggagtgcagcctccactcggggaaccggaaggatcgcttgggtggacaatgccaaatgcatccatgaagaaaaaggtgctgttgatgggtaaaagtggatctggtaagaccagcatgaggtctattatctttgcaaattacattgccagagactacacgtcgccttggtacaacaatacaattgatgtagaacattctcatgttcgatttctgggaaacctggttttgaacctgtgggattgtggtggacaagacaccttcatggaaaattatttcactagccagcgtgacaacatctttcgaaatgttgaggttctgatttatgtctttgatgtggagagccgcgaacttgagaaggacatgcactactatcagtcatgtcttgaggccattctgcagaattctccagaagccaaaatcttttgcttggtacacaaaatggatttggtacaggaggatcaacgagacttgatttttaaagaacgagaagaagacttaaggcgtttatctcgtccattagaatgttcttgtttccgaacatctatctgggatgaaactctgtataaggcttggtccagcattgtttatcagctgattcccaatgttcaacaactggaaatgaacctacggaattttgctgaaattattgaagctgatgaagtgcttctgtttgagagagctacctttctggtcatttctcattatcagtgtaaagaacagcgtgatgcccacagatttgagaaaatcagcaacattattaagcagttcaagctgagctgtagcaagctggctgcctctttccagagtatggaagtgaggaactctaactttgctgctttcattgacatattcacatccaacacttacgtcatggtcgtgatgtctgatccatccattccttctgcagctactctgatcaacatccgcaatgccaggaaacactttgaaaagctggagagagtggatggaccaaaacagtgtcttctcatgcgctaaacattgccgaatattgtttcacacaaaaaattgaaacactgtttctttattgttgtactcctatgtgtagactctaaaatactgtgatgcttaccacttctgtatttcttctctactccccagtcttaccgtttaactttgaatgctatttattcaaatagccagtgaggagttacaagatcgggtgtccatgaagttggtgtaacgtatacgtaggtgataatatgtaagtgttctgataacatgattctaatagatagtgtttgtgttctgataacctgcttccaatagttgtgtatgccaaagtccttcccagcatcctcttgtattcattatcaaatatatacttgtaagtttaaagtattactgttttctcagcatgaactaaaaatattccgtaactcagctaggcatggtagttcatgcctataatcccagcatttgggaagcagaggcaagaggattgctgtaagtttgaggccagcctgtctgcatagggaggtccaggccagccagggatatatatcaaggtcttgtctaaaaaaatcatatatatgtgtgtgtatgtatacagatacatacacatatatatgtattccttaactctgattgtaaataaatgtttgctgttagggaaaaaaaaaaaaaaaaaaaaaaaaa

SEQ ID NO: 1614 - DNA, 2204 bp, Cricetulus griseus
gcagctcatcgaaaaccgcaagctcattgaaacgcaaatggaacggttcaaagttgtggaacgagagaccaaaaccaaagcttatagcaaggagggcctaggtctggctcagaaggtggaccctgcccagaaggagaaggaagaggttggccagtggcttacgaacaccattgacaccctaaatatgcaggtggaccagtttgagagtgaggtggagtcactgtcggtgcagacacgcaagaagaagggcgacaaggataagcaggaccgcattgagggcctgaagcggcacatcgagaagcaccgataccacgtgcgcatgctcgagaccatcctgcgcatgctggacaacgactccatcctggtggacgccatccgcaagatcaaggacgacgtggagtactacgtcgactcctcccaggaccccgacttcgaggagaacgagttcctctacgacgacctggacctcgaggacattccacaggcgctggtcgccacctccccacccagccacagccacatggaggacgagatcttcaaccagtccagcagcacgcccacctcaacaacttccagctctcccatcccacccagcccagctaactgcactacggaaaactctgaagatgataagaagaggggccgctccacagacagtgaagtcagtcagtctccagccaaaacggctccaagcctgtccacagcaaccagcacccccagtccccagctgtgccgcccacctacccctctggccccccatctgccacttctgccttgagctccacccctggcaacaatggggcctctaccccagcagcacctccaagtgccctgggccccaaggccagtccagctcccagccacaactcgggtactcctgccccctatgcccaggctgtggccccacccaatgccggcggggccagcagtgcccagccccggcccccagcgcccagccgagcgggggaagtggtggcagcggcggcgggagcagcagcagcagtaacagtggtgcagggcggaggaggggccggcaagcagaacggcgccaccagctacagttcggttgtcgcggacagccctgcagaggtggccctgagcagcagcggggggagcagttgccagcagccaagccctggggcccgcttcgggccctcacaacccagctcccatcacctcaaaggaatccagtacggcagccccaacgggggctgggagtgcggcttcaggctcagggaacaactcagggggacccagcctcttggtgccactgcctgtgaatccccccagttctccaacacccagcttcagtgaggccaaggcagctgggaccctgctcaatggtcctccacagttcagcaccaccccagagatcaaggcccccgaaccgctgagctctctgaaatccatggcagaacgggcagctatcagctctggcattgaggaccctgtgccaacgttacacctgacagagcgagacatcatcctgagcagcacatcagcacccccacctcagcccagccacccctgcagctgtcagaggtgaacataccattgtcactgggcgtgtgtccactggggccagtgtccctcaccaaggagcagctctaccagcaggccatggaagaggccgcctggcaccacatgccccacccctctgactccgagcgcattcggcagtacctcccccggaacccttgcccgacgcccccctaccaccaccagatgccacccccacactcggacaccgtggagttctaccagcgcctgtcaaccgagacactcttcttcatcttctactatctggagggaaccaaggcgcagtacttggcagccaaggccctgaagaagcagtcctggagattccacaccaagtacatgatgtggtttcagaggcatgaggagcccaagaccatcacagatgagtttgagcagggcacctacatctactttgactacgagaagtggggccagcggaagaaagaaggcttcacctttgagtaccgctacctggaggaccgggacctccagtgacaccggccccctctacccgacccctcccccgcatgctgatccccctgccccaggtgagggccctgccctggaagactgggggaggcccaaggccatggggcaccctcccccccaggaagcagggaaagggcagggaggtttctcttcctctctgccctaccctgggggcc

SEQ ID NO: 1615 - DNA, 2204 bp, Cricetulus griseus
cacatctgtgcccaaaggcaggtaaaagcttttgagtttgcctggagacaggtttttctggagtgagaccgatgtcatccaagcaacggaggactttgaccaaagccaccaaatcagtgaggggacctttgctgatatctactgggggcaaaggcatggtgtggcctttgccttcaagaagctcagggagatggttagctcaagtccagggtccatggacagattcctgcaagcagagatgcagctttgcctcaggtgctgccaccccaatgtcctacctctgctgggcttctgcactggaagacagttccacagcctcatctacccctacatggcaaatggctctctgcaggacagactccaggctaagggtgactcagacctgctgccctggccccagcgtgctagcatctgcacagggttgcttcaagctgtcgaatacctgcatagcctggacatcatccatagcaatgttaagagtgccaacgttttgctggatcagcatcttaaccccaagctggctcatcctgtggctcatccatgtcctgctgataaaaagaccaaatacactgtaatgaagactcacctgttccaggcctcagctgcatatttgcctgagaacttcatcagggtggggcagctgaccaagcaagtggacatcttcagctgtggaattgtattagctgaggccctcactggcatccctgcgatggacaaggatcgaagtccagtttacctgaaggatttgcttcttagtgagattccgagcagtactgcctcgctggactccaggaagacagccatggggaaggtggtggcgaaagagatctgtcagaagcacatggagaggagagccgggctactgcctgaggcctgtgctgaagcctgggcctcctctgtatgtctctgcctgcggaggcgcaatgccagcttggaggaggcacgagtctccatggctggggtggtggagcagctccgaggtcagccgtccctcccttggagccgggtttctgagggcacaggcctgtcttccaataccccagaggaaacagatgacgttgacaattccagcctcagtgtctcctcttctgtgatggtggcgtcatgtacaagggttgcctcctctccgctctctggggaaaatggaatagtacagccatccgccagtggaagagtggaggttgactcctcctcagaggcccgcacaggcccacagccaccccaggacgctacggagacttcatggaaaattgagatcaatgaggccaagaggaaactgatggagaacatcctactctacaaagaggagaagctggacagcattgagctttttggaccctgatgaccaaagcacagctgaggacccttttcctcaactgggtggacacttgtccattcaaggaaaaggtctttggcagcccaaggtctgtcaggacccatacaacctaaataccagcctgagcagaaggaaacctgttttaatcagtgttgagttgcagggagacagggcaggggacctcaacttacacagacaacaaactccaggaaacattcttcctttgtgagacttctggccttccataccaggccaggaatggaacacctggtatgtgacccaaggatttgggtggttttgtggttccagggagatcatgttgattatcatcccaataggtgctgttgctccagcagcaagcactcctccacaactgacaagaacaaccctgcagcacccatggtgtttccagagttatcatctgtctgtcatatttgctgacagctttctgcaaatctcaagttcaagattacaaaagcaagacacttggcaaaggacttagtgggctttctatttcttcagttaataatcttgtaagccactggtatttatgaactgcttgctttgcacctttatcttcctagcacaccaatgtcccactttttacagagactccaagactgtgtgttatttatagctgggtgaagaatcacgagaactagtctcatgtttgattctgctgctagttaagtcaatcactcaatgtataggaactcagtatccttgtaaggtatcccctgctctattctctctgctttttttttttgttttttttttgttttttctggcctagaactcacagagatccgcctgcctctgcctcccgagtgctgggattaaaggcgtgcgccaccaatgcccggcaaca

SEQ ID NO: 1616 - DNA, 2204 bp, Cricetulus griseus
ggagtctcaccagtgctccctggactggctgctgctgggcccggcagctccacctcgccaggaggcttttcgcctctgtggctcagccatcccgcccgccttcatctcggcccgtgaccatgtctggatcttctttcactcagacgcctccagctccggccaggcccagggcttccgcctctcctatatccgaggaaagctgggccaggcatcctgtcagacagatgagttccgttgtgacaacggcaagtgcctgcctggtccttggcagtgcaacgcggtggatgagtgtggagacggctcggatgagggtaactgttcagcccctgcctcggagccaccaggcagcttgtcgcccgggggcaccttcccgtgcagtggagctcgctccacacgctgccggttgagaggcgctgtgacgggacccaggactgtggcgatgggtctgacgaggctggctgccccgacctagcatgtggccggaggctgggcagcttctatggttccttcgcctccccagacctgttcggcgctgcccgcgggccttcggaccttcactgcacatggctggtggacacccaggacactcgccgtgtgttactgcagctggagctacggctgggttacgatgactatgtgcaagtgtatgaggggctgggcgagcgtggggaccgtctgctgcaaacgctttcctaccgcagcaaccaccggcctgtgagcctggaggcagcacagggccgcctcaccgtggcttaccacgctcgcgcccgcagtgctggtcacggcttcaatgccacctaccaggtgaagggctactgccttccgtgggagcagccgtgtgggggcaacggcgagggagatgataggagcgcgggggagcagggctgcttctcagagccacagcgctgtgacggctggtggcactgtgcaagtggccgcgatgaacagggctgcccagcgtgccctccagaccagtatccctgcgagggtggcagcggcctgtgctatgcacctgcggatcgttgcaacaaccagaaaagttgccccgatggcgccgatgagaagaactgcttttcctgccagccgggcaccttccactgtggcaccaacctgtgcatctttgagacatggcgctgcgatggccaggaggactgccaagacggcagtgatgagcacggctgcctggccgccgtgccccgcaaggtcatcaccgccgccctcattggcagcctggtgtgcggattgctgctggtcatcgccctaggctgtgccttcaaactctactccctgcgcacgcaggagtacagggcctttgagacccaaatgacacgtttagaggcagagtttgtgcggcgggaagcgcccccatcctacggtcagctcatcgcgcagggtctcatccctcccgttgaggattttcccgtctacagcgcaacccaggcttcagtgctacagaaccttcgcacagccatgagaaggcagatgcgtcgccatgcctcccgcaggggtccatcccgccgcaggctcggtcgcctctggaacaggctcttccaccgcccccgggcacctcgaggccagatcccgctgctgacggctgcgaggacctcacagaccgtgctgggtgatgggcttctccaggcagcgccaggagcggtccccgatgccccccggcaccccacacagacacaggcagccccagggaagctggagatgggcctcctcccggtggccttggccacgtgccggaagtggggccttcaatgccacctccgcccttgaacctgcaagacccagagtacagaccagaggacaaggagagaaaggtctgtgaggaggagcctcgggaagacagcccagctcctgtggacacgcctccagagccctgcttggcccaagacccctacccccagactcctgctgccagcagcacccaagatccccactcaccggagccattgggggtctgcaggagccccccaccaacctgctccccaatattggaggctagtgacgatgaggccctgctggtctgctgacccattggacacgctggtgactgccacagcccgctttgtaaccagggaatacacagtcctttctaccctgcctctgcgttctttcttacaaacagaggcccacctggcagccctggtggaaagcctgggcgctcggccagtgggctactctgcaagcctatagctctg

SEQ ID NO: 1617 - DNA, 2203 bp, Cricetulus griseus
gtgttggctttggggctgggcatctatattggaaaacgactgagcacaccttctgccagcacctactgagggaaatgaaaagcccctggaaatgcgcgtggcctgtgaagtggtgtgttgtagtttgcatttgagacctattgtaagcatgattcccaaccacagccctatttttacatacccaattccagtaactctcagatgcagtgttgtactcagactctgctgagacaatttactaaccttgtcccctttggcctgtgagacactttagagattcctaacagagtttcctgtcgtttagaaatttgcaagggctttttttcagcaatgccaccagcagattataatcttgtcaccaatgccatggtctcctcatagtaccacagagtcacacctgcatcatttatgctagaagctgtattctagccatgcgactacatctctttctaaataaggtcaggtttgcaaacaacaacaactataaaagcttttgtttagttttttgtttgttttccaggtacaaaaacaagcttaacctaagcttgaatttatagttaactaaaaacaaaagaaaaccaaaaaaaaaaaaaaaaaaaagaaagacaaagaacaacaaatgctatcttttctatgatagagaatctttatttctaaggaatgcctcaggcctagacatacatgaaattgcttttgagatttttttgtgcatttggtgttttcatgtgttacctgcatgggaatttctcatgacttttttttttttttttcttaagaagagacttggaacgagtctgattcatggtgttaatagaggcttcttgttttaggaagctttacttacacctgaagcctttacactctaaagaataacttcagagttattccaagcacctgtgcaactgcgacaagcagacccggggttgtgggagcagttgacaaagctctggaagataccattcattctctagtcccttacttggctgagtgtgtccccagtgtgtccctaggatctcccaggccctagtgactttctcacatagttgttttttcagtgctgtcagaaaattctttgaatgacagactttcttttgtctgtttctaaaatgtgaagctttaggaccaaattgttagacagcatcaggattgcagattatctcaagtagactttgttggatttcagaacatagcatgactctgaaggattctatgttttatatataattaattgctgtttatgatacagactgtgctgtagttgcagaaccattgtgaatttcaaagctagcaacctgcacggtgcaccaggttgacttgaataaatatggcaaccaggtttgctagcatgtagaaactaactcctctctcacataaagggttataaaattggtgtgttatatggaaatggaaagtaacatggatagaaagacatttctatcatttttcaagaacatagctgtttatctttaagaaagataatatatccaaagtagtttttgtgagctattttctttctggcatttaatgtctaaatgattgtgggcgtcttttgcccttttcctgtcttgcttttaaacctggtgacgcttgatttgccttctcacctatttatttcaagtgtttatatttgaatttctttaggaagaaagtaaatctgatggcctatttgtttgtttttgaaaagcctgaatcaaattggcaaggctgctgaggctaaactacagcacagttcacaatgctggtgtgtgatcaagcagagcaaatcgctcattaagtgacctcacaggcagacgtcaccttcttttataaattcagtagcagtttatcagcagtgccatcaaactgtggggacacttctatgattttgtttcaacattaaaactaaatttagttttgccttttttgaaatatcagtaatatcatggaacatggtcacaatacaactgtctatcagtgagcttgtgcggtgttgatttgcagccctgacataaaggatgtttatgctcctacagagattcttgttgagtgcaaacagattgtcctattgcaaaccagaattcaaccaagagttgaaatttaagataatgtttaaaaagctttattcctgtttacaatttggaatgaaaagcaggcttcattttaagcttgatgaaaactggctcagatgtttgtaagtcaagaggaaagcagcaccgagaacagc

SEQ ID NO: 1618 - DNA, 2203 bp, Cricetulus griseus
gggataagatggcggcgatggcagtcggaggtgccggtggcagccgcgtgtccagcgggagggacctgaattgcgtccccgaaatagctgacacactgggtgctgtggccaagcaggggtttgatttcctctgcatgcctgtcttccacccgcgtttcaagagggagttcactcaggaacctgctaagaatcgacctggcccccagacacgatcagacctactgctgtcaggaagggactggaatacgctaattgtgggaaagctttctccgtggattcgtccagactccaaagtggagaggatccgaaggaactctgaagcggctatgttacaggagctgaatttcggggcatatctgggtcttccagcttttctgttgcccctgaatcaggaagataacacaaacctggccagagttttgaccaaccacatccatactggccaccactcttccatgttctggatgagggtgcccttggtggctccagaggacctgagagatgatgtcattgagaatgtcccaactacacacacagaggagtacagtggggaagagaagacgtggatgtggtggcataacttcaggactctgtgtgattatagcaagagaattgcagtagctcttgaaattggggctgacctcccatctaatcacgtcattgaccgctggcttggagagcccatcaaagcagccatcctccccaccagcattttcctaaccaacaagaagggatttcctgttctttctaagatgcagcaaaggctgatcttccgactcctcaagttggaagtgcagtttatcatcacgggcaccaaccaccactcagagaaggagttctgctcctacctccagtacttggaatacttaagccaaaattgtcctccacccaatgcttatgaactctttgccaaaggctatgaagactacctgcagtccccacttcagccactgatggacaatctggaatctcagacatacgaagtatttgaaaaggaccccatcaaatactctcaatatcagcaggctatctacaaatgtttgctcgaccgagtgccagaagaggaaaaggagaccaatgtccaggtactgatggtgttgggcgcaggccgaggccctctggtgaatgcgtctctccgggcagccaagcaggctgaccggcggataaggctgtatgctgtggagaagaaccccaatgctgtggtgacgctagagaattggcagtttgaagaatgggggagccaggtgacggttgtttcttcagacatgcgggaatgggtggctcccgagaaagcagacatcattgtcagtgagcttctgggctcctttgctgacaacgagctgtcgcctgagtgtctggatggagcacagcacttcctgaaagatgatggtgtgagcatccctggagaatatacctccttcctggctcccatttcttcctctaagttgtacaatgaggtccgagcctgtcgggaaaaggatcgtgaccctgaggcacagtttgagatgccttacgtggttcggctgcacaacttccaccagttgtctgcaccccagccctgtttcaccttcagccatcccaaccgagatcctatgattgacaacaaccgctactgtaccttggagtttcctgtggaggtgaacacggtgctgcatggctttgcaggctactttgagactgtactttatcgggacatcactctgagtatccgtccagagacccactctcctgggatgttctcgtggttccccattctctttccccttaagcaacccatcacggtgcgtgaaggccagagcatctgtgtgcgtttctggcgatgcagcaattctaagaaggtgtggtacgagtgggcggtgacagcaccagtttgttcttctattcacaaccccactggccgctcctacaccattggcctctagtgctgtgtgcaatgctgagccttggaagcgctttgagttctgttcttacagcacaaaaggtgcagaacagctcctggtacagtttatctgtgagaccctcacccgtcagagaggaacggttcagtctgctttcctaccttgtgccatggtgggcaaggggtaggcattccaggactgccaagcatggtggtgcacacctctaatcccagcactctggagtcagagtcagagacaggtggatctctgtgaattcgaggctaggctggtctacctaacaagtt

SEQ ID NO: 1619 - DNA, 2203 bp, Cricetulus griseus
tcacaggcgagcaagaagcaacagagtacagcacttcaggcatcaaccctggcccctgccagtctattgcccaaagctgtgcacttggccaacttgaacctggtcccccacagtgttgccgcatctgtgactgccaagtcctcagcacagagacggagccagcctcaggtcacgcaaatgacagtgcccctggtccaccaggtgaaaaaggccgcccctctaattgtggaggtcttcaacaaggtcctccacagctctaaccctgtgcccctctatgcgccaaatctcagcccacctgcagacagcagaatccatgtgccggccagtgggtactgctgcctggagtgtggagacgcgtttgccttagagaagagcctgagccagcattacagccggcggagcgtccacattgaggtgctgtgcactctgtgctccaagacgctgctcttcttcaacaagtgcagcctgctgcgccacgcccgtgaccacaagagcaagggcctagtcatgcagtgctctcagctgcttgtgaagccgatctctgcggaccagagtgaggctcatccggtaatggaaccaaatgtcctgaatgtcacaagcagatgcgagactatatggtcctggctgcacatttccagaggacaacagaggaaactgaggggctgacttgccaggtatgccagatgttgctgccaaaccaatgtagtttctgtgcacaccaacggattcatgcacacaagtctccctactgctgcccggagtgtggtgtcctctgtcgctctgcctacttccagacacatgtaaaggagaattgcctgcactatgctcgaaaagtgggctacaggtgcatccactgtggtgtcatccacctgactttggccttgctgaaaagccacatccaggagcgaacactgccaggttttccacaaatgtgccatctgaaaagaccaatcagcagaatggcagatgctccgggcactagcaatggtgcgactgtttcctctaccaaaaggcacaagtccctatttcagtgtgcaaaatgcagctttgccacagactcagagcccgagttccagagccacatacctcagcaccaggtggacagctccacagcccagtgtctcctctgtggcttgtgctacacatctgccagttccctcaaccgccacctgttcatagtccacaaagtgagagaccaggaggaggaagaggaggaggagattgtggaagtgaaggtggaagccacagacccagaggcatgctctggagaggaggtggccatggaaactagagagaacggactggaagaatgtgccagtgagcctttggtggctgatctagagccaaggagatcactaggcctgtccctggaggaaaacagtgcccagggcccccagaattcaccacaggcctctcaggaccagaacagccatgcactatctcctcaggtgtgaccagaggctttgtagccatcagtcaggctgtggcaccctccacctgctatgcagactgtgtgaaataaaaagctctgccccagtgtgtgtggccactgtgctctggagcagtatctatcctgagctgcaaattctgggcatctcccagccccagacattgtgggtcacccagaatcccttacagctctgaatttgcttctgttatttatggctttatgctgcttcttggtacccccattctcatccatgtccttccagccccaggctacttaggtagtgcagccctaatgctgttgccttcagagcccaaggaggagggaggaaattgaaggatgctggctgttccactggaactctgccctagcctggcttggtgaggtcccttgcttaccttttccttctgtcttctctcattctttgccccagaaacatcatgaggacttcacgtgtcacactggctgatcatgtctctgtgggtgggagaaatgtcagtacactcctgtttggaactgaggaaatcatgaagtatggccaaggcaggcaggtgccgagagccagacccctcttgggagctgtgggaaggtcctgctgctgctgctgtcctgcagtccctgacaggtggggcgtgggttacacagacattgggatgtttgtattcttgctcctgtgccattagagaggctgctgcctcaggcaggccagccctctcctactctcagctacattcttgttgctcagactattatttc

SEQ ID NO: 1620 - DNA, 2202 bp, Cricetulus griseus
ggtggccgccactacgggacctgggaatatactagcaactggggcggcggacgcagccttgtctcgaaagccatggcggcgctcggccggcccttcagcggcctccctctgagaggcagcgcggacttcctgcagccatcgccgggcttcgcgggccgggccttcccgccaggagccaccggccctgacctggccccgcggccgggctcccgcgttgcgccaagcagcccgagcgggagaactgcgcgcggacgtgttcccattcactgtagaaaaaaacacaagcgattggcggaggatgatgagtgtcccataagaaagaagagactgactgaagctgaactctgcgtggttgctaatgaatgggttcttgacacacaccagggtatagaaggtcatggggtaaacacatgtcctagtggcctttctgtacccagtatgctagatgctatctgtgaagaaatggatcaaacaactgcagaaccacagtgtgaacttgcccgaaggaggcttcaggagattgaggtttgaagagggaatttgatgaagtcttcacaaagaagatgattgagtctatgagccgtccttctatggaacttgtgctctggaaacctctccctgaaatcctttctgagaagccaaagccatcatctaaccctaagaactacctgggagagagccaaatgaagcgtacagctgccggcactgcctttccacagagaactgaagtgttgctggaacctcggcacacagacacgccactttaccatagtctggagacagctgctagcacagaggaagagatggaactctagagaccagttctgctccagcttggcaagttctagaaggctcctgtgttcagtaatgagcctgcctgtatagtatagggacctgaaagttttatgaaacgggtgtaatatctccacctgtgatttggggtgggtctttcattgtgggtagccatttattgaattcaactttttgccaaggaagcttatctcaagggaaatgcagttttctagcaggcttatccaagaaatgttacagtctctttaaagacaaccatagacgctggatgtattatggtgactgaaatcatctgtcacattgttgaagccattcattcttaagatgctttaataaaagaggaatgctcctaattgccactgcaacctgacagctgagtcatgtattgagcttcttgtagtggtaactgtacgcaatggggaaaggggagggaagaaagcagtagtttgagtctcttgcaaaggaattaaacaggcaaggaaacctgtgttggcgtcaggtccgtgtagccattattactcaagcagtagcctttggtctgtaaattgcctgtgagagaagtgtcttttcatgaatcctgaggacatgcggggtcagctaaacccagcattgatagcttctagagtttaaaaagggaaggttgtacttgtatcagcaagttgagttttttaatgctggttttgaaaacagtgaattagctgagaataaaacgggcagatatcttagagatttactgaaatagctcattgtctggtgcttaagctattgtacagtaagcctaaaagttagtggaagatggcctcctaccagcaggaaatctttacccttggagtaccagaaccaggctcaaggtgttctttgggaataaccagggtaaaaggttttaatttctcaggaagagctcttcagcatggcaggatgtgtaatgaaggcttggcaactccttcagcactgtagagcagtctgtgtaagatagcgggtgagtgtggtggctcttccacagcagagcacctcagttcagttttcactttctgggtttcttctccctttgtaagtccttatctgacatgatctttatttctgcagaaagtgatgtttcatgctcctttttggactttatcttcttgcacatgtttgtcaaagtcatcccctctttccatccttgtggtgctgactcatctgactctccacagccctgatgcctctgcagtctattttcttttctagcataagccttttgctttgccttaaggttttcctaaagaattaacaggtctttccgtcttgtatagtttttgaagcatggatcagacattggctcagtatgctaatgtgtggaggtcaagcaattctctaaaagcaggtgaggttttaacttttaaaaaaaaaaaa

SEQ ID NO: 1621 - DNA, 2202 bp, Cricetulus griseus
ttagacgtgaagaaaaaaaagttcaatggtgatagcaaagtttgcatttcatttgaaaactatcggaaagtacatccttttgaagacagtgacagctctgaagacgaggttgactggcaggacactcgtgatgacccctacagaccagcaaagccagtacctactccaaaaaagggctttattggaaaaggaaaagacatcaccactaagcatgatgaagtggtctgtggaagaaagaacacagcaagaatggaaaattttgcacctggctttcaggtaggagatggaattggaatggatttaaaacatccaatcatgttttcaatgaccttaaaacaacatgcctactcggaagagcgtcgaagtgcccgtctccacgagaagaaggagcattctactgctgaaaaagcagttgatcctaagacacgcttgcttatgtataaaatggtcaactctggagtgctggagacaatcactggctgtattagtacaggaaaagaatctgttgtttttcatgcgtatggagggagcctagaggatgacaaggaagatggtaaagctataccagccgaatgtgccatcaaggtatttaaaacaacccttaatgagtttaagaatcgtgacaaatacattaaagatgatttcaggtttaaagatcgcttcagtaaactaaatccacgtaagatcatccgcatgtgggcagagaaagaaatgcacaatcttacaagaatgcagaaggctggaattccttgtccaaacagttgtactacttaagaagcacattttagttatgtctttcattggtcatgatcaagttccagcccctaaactaaaagaagtacagcttagtagtgaagaaatgaaagatgcctactatcagactctccatttgatgcagcaattatataatgagtgtaaacttgtgcacgctgacctcagcgagtataacatgttgtggcatgctggaaaggtctggttgattgatgtcagtcagtctgtagaaccaactcatcctcatggcctggagttcttattccgtgactgtaggaatgtttcacagtttttccagaaaggaggagtgaaggaagcccttaacgagcgggagctgttcaatgctgtttctggcctgaacatctcagcagacaacgaagctgatttcttagctgagatagaagctctggaaaaaatgaatgaagaccacgtgcagaagaacggaaggaaagcatccgcgtttctgaaagatgatggaggtccacctgtgctgtatgcagaatagcagctgccggtagccaaccagtgtgggtgacgtgaaataccaaagcaggagtggacagtgccgcccctgtgcttctcacttgtaacccacgtgccagatatgtggaatttttaactcggcattgaaagaataaaatgtcactacctctcatctcataaaaaggataatataattctttaacaggtgtaatgtctaattgaaggagtttggattttacacaactcatgatctgaaatatcttgatgaggattttaaacataggtagtatttctgaatgtgggggagctgtgaggcatttacaggggaggttgctggctgcaccgtgctccattaccccaggtccaggagtcagactggatccactaaacagcctaactctatctggttataaagattaaaaatgtaatttatgtttgaaagattttaacattattttaaaatgtcaaatatgttctttgtaggactatttattttgtttctgttatactgcttttagttgcatttctgaggagtgtgactttaggtggcttgtcccacctgagatatttgctactctgcaaacaaagatttaaatgatgactaattattggctatacagaaattctagagaactcacttgaaacaatcatttaaaactttgttttctttcttgatatattcattttcaaaccattgcttggagtgtgctgtgaatttgcctttcaagaaattaaaaatgggatcattttagaagttttggtttttcttgttttgtgagtttgtttgtttgtttgtttgtttttcaagacagggtgtcaatgtgtagttttggagcctatcctggcactccctctggagaacaggctggcctcaaaactcacagagatccgcctgcctctgcctccagagtgctgggattaaaggcatatgccaccaactgcccagca

SEQ ID NO: 1622 - DNA, 2201 bp, Cricetulus griseus
  modified_base (1210)..(1210): a, c, t, g, unknown or other
  modified_base (1863)..(1863): a, c, t, g, unknown or other
  modified_base (2162)..(2162): a, c, t, g, unknown or other
aaagtttaccacgccgactgtctcaatctgaccaagcgacccgcagggaaatgggagtgtccttggcaccagtgtgacgtctgtgggaaggaagcagcctccttttgtgagatgtgccccagctccttttgcaagcagcatcgagaagggatgcttttcatttccaagctcgatgggcgtttgtcttgtactgagcatgacccctgtgggcccaaccctctggagccaggggagatccgtgagtatgtgcctcccccagtgccactgtctccaagccccagcacccaactgacagagcagtcaatcagggatggctactcaggggcccaagacgtctgatcagcccacctactaatgccactcagaggctgccagtctccaagaaagccctgacagggacttgtcagaggccaatgctacctgaaagacctgagagaactgagtctagttccccctttcagatagggtcagagaccttgctggatcagggaccaaatcccagtccttggtatccagccagaggccacaggacaggccacctactaaagaaggaccaagacctcagccatccgacaaatcctctccaatgaccaagccaagctccttaccctcagtcaggtccctgccactggaaagacctctgggaatgattgacccaaggctggataaatccataggtgctgccagcccaaagtcccagtcagtggagaaaaccccagcccccactggcgtgagactttcaccaccagacagactgctgaccaccagcagtcccaagtcccaggtttctgacaggcccccagaccaaatcccatgcctctttgacccagagacttccccctcctgagaaagtactatctgctgtggtccagtctctggtagctaaagaaaaagcactcaggcctgtggaccagaacactcagtcaaagcacagagcctctctagtgatggacctcgccagaaggagcgggctgcgtctcctcatgacatcacaccacaggctgatgagaagacgcccgtactggaatcaagcccatggccatccagcaaaggtctggggcatatgccacgggctgtggagaaaagcagtgtgtcagattccctcctgccagccgggaaagcagcagctccttcagaacacccttggcaagctgttaaatcactcacccaggccagacttctttctccaccttctgccaaggctttttanatgaatcgagcaactcaagcctcaggaagagctcctgtgggagctgagcagaccccaggacctcccaactcagcaccaggcctgattaaacaggtgaagcagctatctagaggacttactgccgagagtgggcagtccttcaggtctcttgggaagatcccagcttctcttcccaatgaagagaagaagttgacaaccacagaacagagtccctggggccttgggaaagcctcaccaggggcagggctttggcccatagtggctggacaaacactagcccaggcttgctggtctgctgggggcacacagacattggcacaaacttgctggtcccttggaagagggcaagaccccaaaccagagcaaaatacagttcaagctcttaaccaggctccttctagtcgcaaatgcgcagagtcagaaaagaaataatacagtaaataccacataaccaggcaagctgaccccagggtaccgttttggggaggtaaatcttcctttttccttcttgaaaacagacatattcccaacacttccactgttcttctttccttataccccccaacactcagaactctagtgacattagcccatggggacttgtggttttgtgtgtaaccatgtatggaaattcgtcgggccccagtcaaggngacagacacagggagctgagtagaagccaagggtgctgggtgttttccaggatggcaggaggtggtctccaggttgtggtgttgccgccttacgtgtgtaggtgagtgtgggaagttggggtgagtgcagcccctaggagctcgtggaaaagcagcttcttaggtcttggcgaagaaagctgactacaaagctctattttttaaatgggaaaagtgttcagccaagggtccatcactgttctctcacctcccaacagactgtcagctggaagtgaacctcctagtgaaaaagagggganccctgcactaggagtccccataaacatgtactgtaattc

SEQ ID NO: 1623 - DNA, 2201 bp, Cricetulus griseus
ccgccgccgccgcacgacgggacccggcgtggcccggctccctcaggttttaagtattgtttaaactgcatcaatggagcacatacagggagcttggaagtcgatcagcaatggctttggactcaaagatgcggtatttgatggctccagctgcatctctccaacaattgttcagcagtttggctatcagcgccgggcgtcagatgatggcaaactcacggattcatctaagacaagcaacactattcgagttttcttgccgaataagcaaaggacagtggtcaatgtgcggaatctacaagtttcatgagcactgtagctaccaagtacctactatgtgtgtggactggagtaatatcagacagctcttgctgtttccaaattccactgttggtgatagcggagtcccagcactaccttctttgacaatgcgtcggatgcgagagtctgtttcccggatgcctgctagttcccagcacagatactccacacctcatgccttcactttcaacacctccagcccttcctctgaaggttccctctcccagaggcagaggtcaacgtccactcccaatgttcacatggtcagcaccaccttgcctgtggacagcaggatgattgaggatgcaattcgaagtcacagtgaatcagcctcaccttcagccctgtccagcagccccaacaacctgagcccaacaggatggtcgcagcctaaaacccctgtgccagcacaaagagaacgggcaccaggatctgggacccaggaaaaaacaaaattaggcctcgtgggcagagagattcaagctattactgggaaatagaagccagtgaggtgatgctgtccactcggattggatcgggctcctttggcactgtgtacaagggcaagtggcacggagatgttgcagtaaagatcctaaaagtggttgacccaaccccagagcagcttcaggccttcaggaacgaggtggctgtcttgcgcaaaacacggcatgttaatatcctgctgttcatgggctatatgacaaaggacaacctggccattgtgacccagtggtgtgaaggcagcagtctctataaacacctacatgtccaggagaccaaattccagatgttccagctaattgacattgcccgacagacagctcagggaatggactatttgcatgcgaagaacatcatccacagagacatgaaatccaacaatatatttctccatgaaggcctcacggtgaaaattggagattttggtttggcaacagtgaagtcacgctggagtggttctcagcaggttgaacagcccaccggctctgtgctatggatggccccagaagtaatccgaatgcaggataacaacccgtttagcttccagtctgacgtctactcctatggcattgtgctgtatgagctgatgacgggggagcttccctactcgcacatcaacaatcgagaccagatcatcttcatggtgggccgtggatatgcttccccagatcttagcaggctctacaagaactgccccaaggcaatgaagagattggtggccgactgtgtgaagaaagtaaaggaagagaggcctctgtttccccagatcctgtcttccatcgagctgcttcagcactctctgccgaaaatcaacaggagcgcctctgagccctctctgcatcgggcggcccacactgaggacatcaatgcttgcactctgaccacatccccgaggctacctgtcttctagctgatgatgtagctgttcttaggccaccaggggaggaagaagagtcagcaggcaccactgtttcctggggggcagaatgcatgttttcagagaagctgctgctaaggacctagactactcacaaggccttaacttcatgttgccttcttttctacccctcctgccctggaaaatgaaaaggaagctgtccaccatgctagcctgatcttctccagaggtatacaagtcagctgaatattttgagggcaagaaaatggccttggagagaagtaggatggctttccaagcacggtgctccaccttcgggcagcctcccacacgctgaatctgtcttccaggagctgcccctatggggtgggctgcagcccagcctatctctagccacatccttgtctgtaagaaaagccaggaatactaggttttctttaatgtattttgggtttttaattttgttttttattgcgcc

SEQ ID NO: 1624 - DNA, 2201 bp, Cricetulus griseus
attcatggaggtgccatcagtcgggagtggccggattgctgttggtgactgcattttgtctattaatgaagaatcaaccatcagtttaaccaatgcccaggcaagagccatgttgagaagacattctctaattggacctgacataaaaattacttacgtgcctgcagaacatttggaagagttcagaataagttttggtcaacaatctggaggaataatggcactggatatttttttcttcatacactggcagagacattccagaactcccagagcgggaagaaggagaaggggaagaaagtgaactgcagaatgcaggctacagcagctggagtcagccccggagggtggaactttggagagaaccaagcaagtccttgggcatcagcattgttgggggtcgaggaatggggagccgcctcagcaatggtgaagtaatgaggggcatattcatcaaacatgttcttgaagacagtccggctggcaaaaacggaccttgaagcctggagacagaataattgaggtggatggaatggacctcagagatgcaagccatgaacaagctgttgtcaaaggaggcattgcagatgctgatgggagattgatgcagggggaccagattttaatggtgaatggagaagatgtccggaatgccacccaggaagcagttgctgccctattaaagtgttccctaggcacagtaaccctggaagttggaagaatcaaaagctggtcctttccactcagagaggaggccttctcaaagtagccaggtgagtgacagtagcctgtcatccttcactcttccactttctggaataaatgcatctgaatcactggaaagtaactcgaagaagaatgcactagcatctgaaattcagggattaagaacagttgaaataaaaaagggaccttcggactcgctgggaatcagcattgctggaggagtgggcagcccacttggtgatgttcctatatttattgcaatgatgcatccaaacggtgttgcagctcaaacccagaaactccgagttggggataggattgttaccatctgtggcacatccacggaagggatgactcatacccaagcagttaacttgatgaaaaatgcccctggctccattgaaatgcaggtggttgctgggggagatgtgagtgtggtcacaggtcatcagcaagagcttgccaacccgtgtcttgctttcactgggctaacatcaagcagtatatttccggatgacttaggacctccacagtgtaagactataacactagaccgaggaccagatggcttaggcttcagcattgtaggaggatatggcagccctcatggagacttaccaatttatgtgaaaacagtatttgcaaagggagcagccgcagaagacgggcgtctaaaaaggggcgatcagatcattgctgtcaacgggcagagtctagaaggagtaacccatgaagaagctgttgccatccttaagcggacaaaaggcactgtcacccttgtggttctctcctgaacaggttgccagagctgaaccagcccagccacttgctcacctgctgtaacagagtggacctgtttagcagtcttactaagctttaaaaagaaatcgtgtttaatgcatatcttggtgttcattttcagtttttgacctgctatgttttcacgttgttataactaaaataatgctgttaccctgtgttggctacagttcttcaggaaaacaaccatccagccatggaagacataggaaggagccccgaactttctagtgctgatttaacatactgacacaacactgaaaatatgttagtgtactgtgctattgtttttccattagtattaatcttaatgacagagaaaaaggcagtgcgttagtaattattttggttgtacaccattaataaattgacagaaaaattaagggggttaacataacttcattgctgtgtattaacatcttataatacaatagtttaagactaaaggaaacagatggagctgtttactgagacaactggtgaggaattatcatgtgttcaatcccattttagagcgtgaaactcctacattagaatatataaagtcactttaaatattatctatatttgtaacaggagtagtgtacagatattttattatagcattcttgtgtaaatgtaaagtgaataaataagtttctgtggtgcacaacaaa

SEQ ID NO: 1625 - DNA, 2201 bp, Cricetulus griseus
  modified_base (1195)..(1195): a, c, t, g, unknown or other
ggggtggttggggtgagggagagaatcctgctttttaatttaagatttttatttgtcaaaagagttctatggatactgggttattttgtaagttaatatgtctttgggggggatgctgcgagcggcatagtaagaattatttaaatcatccataggaaaagacagctgtctttgcaggggagcagggtggatcatccctgatttatagaagtggaaactgtaacaccgtcaccaaggtgtccttgtgttctggtgaattccacaaactatgcgtcccataaagtctaaggattcttatttatagttatttaaacgtggtctctcaagtggcccagagagtccatgaccctagaaaatttgcatttttctacagctcaaatttgaaaaccacacatttggatcagtcaccttaactagctcagtgacttaagttcattgcccaacacaagaaatggcagaaaccttattgatcatgtatgtctactgcactatcttggtagtagatgcctgtaagcctcagtattcttcagacacaaatcgaggagtgtggtgattgattacgttgacctggtctgccttgggtaaaggaaggggaacatttttcaagtgcctcctactgtggtcgccagtacacctcttctcctgcctgccatgtaaaagagtgtactgcatatgtttggagatttgcaaagatcaggcatgaaggtcaaaggtggactgttggtacccacaggcacgtgcacaccctcccatgtcctgcattggcagagcatccaggacctccctctcatccagaacactggaaaccggtgtttcctgttcttgctgatcaacacccagacctagtcctcatttctagtcatttctgaggcttctcagttgacatttgagccacactcccattacagccagtgtgcaggtgggtaggagatgctgtatataatagttctaatgataggggagggagtgggtgtacattttgctttctgtattttagttggttttgtttgtttgttttgttttgatgcagtacagagtgaaggggtgagagtattctgaaaaacaaaaaatgaataatttattcacagaaactattaaaatggtattgttaggctcacatcgagcctgagagcagcatctgctgctctgtctcattgaggaaatttattttatttaatatgaggtggtcacatancttaggaacaaataagtcaggttctctctgcaggacttttcagagccttcaagtacattgtctgccttgtgaatctgggagaatgcagcatttccgggctgcatgacctgggtgtcctgtatagcagatgtgtcttagccggcatttcacacagtagccttcagtgagggtgatctagcctgtctgaggtctgcaaagattagcaactgcctcctagacccctccacaaaaaaatgttgaaatgactttctcttgcatgcctgtcatgcttagctaggaaaaggagctgccggtatcccggctctgagccactgttcaaaggtgcagctgtgtttttaggaccaggtacagtcaagtagaatgacaaggacatgactacttagctgcctctttttggaaatgtctagaataccacaggggtccctgcctacagcctctccagcctcccctgcctcagtgcccctctcagctggtctgagagacagggcagcccgttgaacacatgcacagtagaatgtgcacacacacatacacaaatcaccccagcctgtgtcctggcccacctctccgtcagcaggactgactcgtcactcccccaggttctgcccaccagcatccccagcttttcccatccacagctaaacagaccctcggaataggcaacagggccttctagaaccagctggacccttggacagcagcaggcaaattttggtctgctctcatcaggtacaaaaggcagtatctgtattctcttctgagcatgctcagtaaggcatatggacatagaatttaacatctttgtggagtgtgtgttttttacatatttgtatgcagtcgagggcctgttgtagaattctctccctgtatcttactatactgttaaagaagttgaattccatgttgccaacagacgcgtgaaatgttcctccaggaaaagccattcaagcctgattattttctaagtaacttcaattaaataagaaaaagaagaaaaaaaaaaaaa

SEQ ID NO: 1626 - DNA, 2201 bp, Cricetulus griseus
gcacgatgtgaatgatggatggcggttctgccgtgtccacgacgttcctgacggacagtttggagctggagctgggcacggagtggtgcaagccccctcgcttttcttgcgctttcgacaagagagaaggagcgttgttttctggagagtcctaccttgccagtggcgctcttaagcggttgattttaaatcttgatccattaccaactaactttgaagaggatacagtagaactatttggcatccagtgggttaccgaaacagcattagcaacttcatgtcgagagctctttcatttattcaggcaacagctattcaacttggaatccttagttcaagtcaactgtgattttgggaagatagccaccttacactccaaagcagacagtattaggcagcgatgtgtaacatttctccactacattaaagttttcatcttcaggtgcctgaaagtacaagacaccgagagccacaatcttcatgtccatccctatgaggctttggaagctcagcttccttcgatgttggttgatgaacttcgtggattgcttctgtatattggacatctagctgaacttcccagtgtaactctaggagcatttgtaaaatcaaaaaccagattaagatgccaaacacagcaccttcagatctgcagcctcagccagttatatcaataattcagctttttggttgggatgatatcatctggcctcaagttgtggcaagatatttaagtcatttgctacaaaatagcacagtgtgtgaagcactttctcagtcaagctgtgtatcttttcaatcctttactataagatcatgggtccgttgtgttttgcaaatgcacataaaacacctctctgaacctgacttgctaattggtatgaatgctgaacaggcagtggaaaaagagtacatggaacaactagctgaaatgacaaggttactatttaaactctcagaagtaaagaatatcttctctaaggctcaaattgaagattttcccagcccagaagaccccaaagaagcacttattcggttcctagaggctgttggtaccacttacgaaactctccagacattttctgataaatctgccatggtcacaaagtccttagaatacgttggtgaagtattaaaatacataaagccttatttgggaaaaaatttccagtgcagggttgcagctggcgtatgggatcatgggaattcttgttaagtcctgggcacacatctttgtcacctctaaagcacagaagttactgtttcggatcatagactgtttactgcttccgcacacagtgctacagcaggagaaggagttgcctgcaccaatgctgactgcaattcagaagagccttcctctgtatctccagggcatatgtattgtgtgctgtcagtctcaaaattccaatgcctacttgaaccagttgctgaggaatgtcattgagcagtatattgggcggtttctccctcctcactgtgtatctcagatcttgggcagcatcctgttcttttggcactgagaagtccagcctctcttccagtgatgacggcgctaaggaagcatattgtccatgctatacggaaatcctatcttgagtttaaaggctcctcacctcctcctcgattagcacccatactggccttcatcctccagctcttcagggacaccagcatgggtgtttgtgaccttgagctactccttcctgccatcttaaaatgtctggtgttggtcagtgaacttcaagttaaaaagctggccacagagaacctgcaatgcatgataaaaacctgccaagtggggtcagaaggagaacttgccacccagctgacttctctgttgaggcagttcatccaggactatggtatgcaatacagttaccaagtgtataacatcctcgagacagtagcaaccctgaatcagcacattgtcacccacttgattcctaccctcactcagtctctgaaggattcagagctcaaatggggccttggcagaaacatcgcccaaagggaagcatatagcaaacttttatctcacctaggccaggtgggacaggatgagaagcagagactggaaagtgacgtgtgtgtgtgtgtgtgtgtgtgtgtgtacgtgtgtgtgtgtacatgtgtgtgtgcatgtgcgagtgatttcttaattaaatttaagttttgtgaaacaaaaaaaaaaaaaaaaa

SEQ ID NO: 1627 - DNA, 2199 bp, Cricetulus griseus
  modified_base (2195)..(2195): a, c, t, g, unknown or other
agcaacctggatgctcctgagccctatcgcattggtcggataaaagcgattcattgtggcaagaagaatggcaaggccaatgagggctggacatcaagatcaggatcaacaagttctacaggcctgagaacacccacagatccgcctcggccttctacggtacagacatcaacctgctgttctggagtgatgaggaagctgtggtggacttcagtgacgtgcaaggccgttgtactgtggagtttgaggatgacctgcttgagaacctccaggattactcgaagggcgggcctgaccgcttctacttctctgaggcctacaatgcaaagagcaaaaaatttgaagaccctccaaaccacgcccgtaaccctctgaacaaagggaaagggaaggggaaagggaaagggaatgcaaagtgtcaggtatcagagcccaaagagcctgagacagccatcaaattgcctaagctgcggaccctggacgtgttttctggctgtggagggttgtcagaaggattccatcaagcaggcatctcagagacactgtgggccatcgagatgtgggacccggcagcccaagcatttcggctgaacaaccctagctccacggtgttcacagaggactgcaacgtgctgcttaagctggtcatggctggcaagctgaccaactccctgggccagaggctgccacagaagggcgatgtggagatgctgtgtggtggaccaccctgccagggtttcagtggcatgaaccgtttcaactcccgtacttactccacattcaaaaactccctggtggtctccttcctcagttactgcgactactaccggccacgcttcttcctgttggagaatgtaaggaactttgtgtccttcaagcgctccatggtgctgaagcttacgctgcgctgcttagtccgcatgggttaccagtgcacctttggtgtgctgcaggctggacagtatggtgtggcccagacacggaggcgagccatcatcttggctgcagccccaggagagaagctgcctctgtttcctgagcctctgcatgtatttgcacctcgtgcttgccagctgagtgttgtggtggacgacaagaagtttgttagcaacattactaggctaacctcgggcccctaccggaccatcaccgtgcgggataccatgtctgacctccctgagatccagaacggagcctcggcacctgagatctcctacagtggagagccgcagtcttggttccagaggcagctgcgggactcggcctaccaacccatcctcagggaccatatctgcaaggacatgagcccattggtggctgcccgaatgaagaacattccacggtccccaggatcagattggcgtgacctgcccaatatagaagtgctgctgtcagatggcgttagaacaaagaagcttcgctacaacttccatgacaagaagaatggccgtagcagcaccggcgccatgcgtggggtctgttcctgtgtggaagctggcaagctctgcgacccctcggccaaacagttcaacaccctcatcccctggtgcctgccgcacactgggaaccggcacaaccattgggccggcctctatgggcgcctggagtgggatggcttcttcagcaccactgtcaccaaccctgagcccatgggcaagcagggccgtgtgctccacccagagcagcaccgggtggtgagcgtgagggagtgtgcccgctcccagggctttcgggacacctaccggttcttcggcagcatcctggacagacaccggcaggtgggtaatgctgtgccgccaccactggccaaagccattggcctcgagataaagctctgtatgttggccagagctcaggagatggcctcagctgcagttaaagtacaggaaactgctgagacggaatagttctgctctacccagagccccacatgcactggtgtttttaacctgttcagctccatcatttgaaatgttgtacacagtgactttggccatggctgacactaagctgtttgtgtgaggtttgctttgtgactaagccgtgcagtacttcgtgcattctggatttgtaagtctcttggtttttattctatcagatctgcccctcgtgggtggcaagcaagacttgatgtagtttttattatgttgcatatttcttcaataaaagtagctctgtaaagacaaaaaaaaaanaaaa

SEQ ID NO: 1628 - DNA, 2198 bp, Cricetulus griseus
acattataaagggaaagtttcagaatgctttgaaacaaagtaagaacgaagtcttgcttctagccaagtaagttgacatctttgtaggcaggagacgtaacattggtaaatatttactgcaggattcttaaccagggaaaactctggcatgttcttcgaggagtaaatgttttacatgcgaggcgagatctgcgtgggcctctgtgtcctttccaagtgacttctggagacgcttttagatgactggctaagacaaaatgccctagtgattccccaagctgcagccagattgttggtaccatgtctagcacacaaaggaaagaagacggccacctgttcgccagtttgggcacgtgtcagctgaaagcgcagaaggaccagcaacagcaagaaaaatatgtcattgctcaaccagtatttgtttttgaaaaaggagaacacactttcaagagacctgcagaagacagcctggacgaaacagcagaacgtgaactcagtgttttctcaagaaagcgtgtaaggtcttcgtctgtcacgcttcatactacagattctcagtctccaggagtggcagctttgtctcagacgcgcctgaggtcttcatcattcactgaggtcccaaccttccccccttctgggccagtgaggaaaaacaatgtttttatgacatcaagtctggtgcaaaggaatattgacatgaacagtggagagcaaggtcctgtgagaccttccgagcatgttttaagacctgctattctgcagccacctcaagctcaaaagctgtgaaaacataagcaaaacatttggtcacagtgcatccaaatcctgcaaaattaaggaaaataccaagcacaagatacctgagtggaactctagtttgctaagtgaaaatttaccacacacaagaagttcagtccagctgtctgctggtctacacacctcagaggcaacatcgagatgccaaccaaaggaagataactgttcttttaaaagctgcagttctgactttgtttttggagaaaacatggtagaaagagttttgggaactcaaaagttcacccagcctccacttcaaaaccattcatatgccaaggaaaaaacattcagatctgttctgaaatatcctgatgccgaagcttcagatccaaactctattaaaaatatatccctcattgaatcagctgctgctttttcttccaaaccatcacaaaaatgcttgcttgagaaaattgatgttgtaacaggagaagaaatggaacataatgtgttaaagatcaactgcaagatctttgtattcaccaaaataacccaatcctggactgaaagaggcagaggacttttgagactgaatgacatagcaagcagtgactgtggaacactacagtcaagactaatcatgcgtaaccaaggtagtctgaggctgatcctcaacagcagactctggactcagatgaagattcagagagcaaatcacaaaaatttgcggataactgcgactgatttagaagacgatggtataaaagtgtttttaattcaggctagtgccaatgacataggctatctgtatgctgcaatacatcaccgtcttgttgcccttcgaagcctccagaagcaggctgatggtgatccagcagaaagccagtcggatacagtcctcccagcagttcagctgtgatgaggatgaggatgacttcatacaagtcactaaagatggatcagatccttcaaggtggaatcacagacagtcagttgtgtgttcatagcactttctcccgtaaacatgacatctacagaatctggtcactcactctacagaaataccaaaccatcctaactgagaagatgctacacataccttgaagaattttatttttaaattaaagaaacacaatttcttgcaattaaaggatttacgttttacagtttgattattttggacaaaatttaagaaatgaacttcagaattttttttttttgttgttgtcgtttgttggtttgttttgtttgttttttcgagacagggtttctctgtgtagctttggagcctatcctggcactcgctctggagaccaggctggcctcgaactcacagagatctgcctgcctctgcctcccgagtgctgggattaaaggcgtgcgccaccaacgcccggctgcagtcacattatcctcctaacaaaaaaaaaaaaaaaaaaaaa

SEQ ID NO: 1629 - DNA, 2198 bp, Cricetulus griseus
gtacagaggccctgccagctgagcagttgaggtgtcagtcctgcctgtggaacaactgtgggcaccccacacacaccttccacccaccccctgccacactgccctccctacctgggctctgccccttagggcagctgggcctggtcatagtttggggcctcccatctcagccttgtcagggacagaggacaccaagtcttgggaaggggatgcccccaagggtgccagtccagccagctgccccacccttcaggcttggcctggccctccaaaaccccaaattgtggtgccccaatcagccctgtgggcagacatccaccaccatggccgagcacctggagctgctggcagagatgcccatggtaggcaggatgagcacccaggagcggctgaagcatgcccagaagcggcgtgcccagcaggtaaagatgtgggcccaggctgagaaggaagcccaaggcaagaagggccatagggagcgaccatggaaggaggtgtctggcctaaagcctcggaagcatgtcctcttccctcccagcgttgctcttctggaggctgctgcccgaaacgacttggaggaagtccgtcagttccttagcagtggggttagccccaacctggccaatgaggatggcttgactgcactgcaccagtgctgcattgatgacttccaagagatggcacaacagctcctggaggctggggctgatgtcaatgctcgcgatagtgagtgctggacacctctgcatgctgcagccacctgtggccatctgcatctggtagaactcctcatttcacgtggtgcaaatctcctggcagtcaatactgatgggaacatgccctatgacctttgtgaggatgaacagacactggattgcctcgagactgccatggccaatcatggtatcacccaggacagcattgaggaggcccgggcagtgccagagctgtgcatgctgaatgacctccagagcctgctgcatgctggggccaacctcaatgaccctttggaccatggggccactctgctgcacatcgccgctgctaatgggttcagtgaggtggctaccctgcttctggagcaaggagccagcccgagcgctaaggaccatgatggctgggagcctctgcatgctgcagcctactggggccaggtgcacctggtagaattgcttgtggcccatggggctgatctgaatggaaaatccctggtggacgagacgcccctcgacttgtgtggtgatgaggaggtaagagccaaactgctagaactcaagcacaaacaagatgcactcctgcgggcccagggccgccagcgctccctgctgcaccggcggacatcaagtgccggcagccgtggaaaggtggtgagacgagtgagcctgacacatcgcaccaacctgtatcgcaaggagcatgcccaagaggccatcgtgtggcagcagtcaccgctcaccagcccagagcctcaagaggatgaggaccggcagacagacgctgagctccggctgcagcccccagaggaagacagctctgaggtgaccagaccacacaatggccaagtagggggccccccagggagggcacctgtactccaagcgtctagatcggagtgtctcctatcagttgagtcctgtggagaacaatgcccctgatgccctcgtccgggacaaggcacaccacacactggcagaacttaaacggcagcgagcagctgcaaaacttcagcgacccacccctgaagggcctgagaccttggagcctggcctgtctgttgacactgagacctcccagcctgactgtggcttcagaacaactggggacccacccctgctcaagctcactgccccctcagaggaggctgctgtggagaagaggccatgctgtttgctcatgtgaaatgtgactcctcaatatggcaaggttcaatcccatgccagccagaggcttcctcatgatctctggcctggtgacccactccagcacatgcctcagtgctataggggagccaatacaagagccctgtacccacttccagcccaggacactggcccccttgctcagggatggactatgcagagctgtacctatgggcctcaggccacagactgcttaccctgtgactcttgataaaggctgtttgccaactaaaaaaaaaaaaaaaaaaaaaaaaaaaaaaaaaaaaaaaaaaaaaaaaa

SEQ ID NO: 1630 - DNA, 2198 bp, Cricetulus griseus
ctggtctatgagcgcatctactccatgtgtgcggaccagccgaagcgccttaccagatcatttccccagagaacgtgaacgacacggctaaggaaacatgcctgaatggtttttcaagatcgcttctatccgggaactcattcctagattttatgtggaagcatccatcttgaagtgtaacaaattcctctccaaaacggggatttcagagtgcctgccccgactaacctgcatgatcagaggaattggggacccgctcgtgtccgtgtatgcccgggcctacttgtgtcgggtggggatggaagtggccccacacctcaaggaaagcctcaacaagaacttctttgacttcctgcttacatttaaacagattcacggagacactgtccagaaccagctggtggcccaaggtgtggagctgttgtcctatctccctctgtactcgcccgccatgggttggattttccagtgtgtctcctaccatgcccctgaggctttgctgacggagatgatggagagatgtaagaaactaggcaacaatgctttgctcttgaactccgtgatgtcagctttcagggctgagttcgttgccaccaggtctatggacttcattggcatgattaaagagtgtgacgagtctggcttccccaagcatctcctttttcgttcgctggggctaaacttggcactggctgatcctcctgagaatgatcgacttcagattctcaatgaagcttggaaagtcattactaaattgaagaatcctcaggactacattaactgtgctgaggtatgggtagagtacacctgcaggcatttcacgaaacgagaagtgaacactgttctggctgacgttatcaagcacatgactccggatcgagcatttgaggactcctacccccagctccagtcaataattaagaaagtcatagctcacttccacgatttctcagttcttttctcggtggaaaagtttctgccgtttctggacatgttccagaaagagagtgttcgggtagaagtttgcaaatgcatcatggaagcctttatcaagcaccagcaagagccaaccaaggaccctgtcatcctgaatgcccttatgcacatttgcaagaccatgcacgactctgtgaatgctctcactctggaggacgaaaagaggatgctggcccacttgatcaatggatttataaaaatggtctccttcggccgtgattttgaacagcagctcagcttttatgttgagtccaggtcgatgttttgcaacctggaacctgttcttgtgcaattgatccatagtgtgaaccggttggcaatggaaacaagaaaagtcatgaaggggaaccactccagaaagacggctgcatttgtccgggcctgtgtagcttactgcttcatcaccatcccctccctggtggggatcttcacccgcctcaacctctacctgcattctggtcaggttgccttggccaaccagtgcctctcccaagctgatgcttttttcaaagctgctattggcctcattccagaagtcccaaagacgataagcattgatgggaagctgcggccatcggagcccttcctcctggagttcctgtgcaatttcttctctacattactgattgtgccggatcatccagaacatggagtcctatttctggttcgagaacttctcaacgtgatccaggactacacctgggaggacaatagtgatgacaaaatccgaatctacacctctgtcctgcacctgctgtctgccatgagccaggacacctatctttaccacatagacaaagttgactccaatgacagcctgtacgggggagactccaagttcctggctgagaacagcaagttgtgtgaggcagtgatggctcagatcctggaacacctaaaaaccctggccaaggacgaggccctgaagcgccagagctctctgggcctctccttcttcaatagcattctagcccatggggaccttcgtaacaacaagctgaaccaactctctgtcaacctgtggcacctggcacagaggcatggctgtgcagacacaaggaccatggtgaagactctggactacatcaagaagcgcagcaaacaacctgacatgaatcatctgacagagctggccctgaggctccctctgcaaaccaggacctgagtacttgcccttgggggccccagtgccactgtcctgg

SEQ ID NO: 1631 - DNA, 2197 bp, Cricetulus griseus
ggctacgtttacctccgagctcctcgcagctcgaagcgccgcaaagttttgacgttttggcggcggagacgcgcgctggctctctcgggctgacggctgtggcggcggccgactctcgagggccactcaagtctcaagtcctaggcgctcccgccgcctggagtccggcggccacgaggccccgccgcgtcctcccgcgctcgccctcccggaggctgcagccatgtctcgggggccggaggaggtgaaccggctcacggagaacacgtaccgcaatgttatggaacaattcaatcctggcctacgaaacttaataaacctaggaaaaaattatgaaaaagcggtgaatgctatgattctagcaggaaaagcctactacgatggagtggccaagattggagagattgccactgggtctcctgtgtcaacagagctgggccgtgtcctcatagagatttccatcacccataagaaactcaatgaaactctcgatgaaaatttcaaaaaattccataaggagattatccatgaactggagaagaagacagaacttgacgtaaagtatatgaatgccactcttcaaatatgagcacaaagaaattgagtatgtggagactgttacttctcgccagagtgaaatccagaagttcattgcagatggctgcaaagaagccctgcttgaggaaaaaaggcgcttctgctttctggtggacaagcactgtagctttgccaatcacatacactactatcaccttcagtctgcagaattacttaattccaagctgccccggtggcaggaaacctgttgtgatgccacaaaagtaccagagaaaatcatgaacatgatagaagagataaaaacgcccatctccacaccagtgtctgggacgccacagccttcacccatgatcgagagaagcaagatgattgggaaagattatgacaccctttctaaatacccaccaaagatgcccccagctccttcagtcaaagcctataccagccctttgattgatatgttcaataatccagcaacagctgcacagagtttagaaaagataaacaactcagcagacacttcagaagatcccagcttacaaagatcagtttctgttgcaactggactgaacatgatgaagaagcaaaaagtgaagaccatcttccctcacactgctggcaacaacaagaccttacttagctttgcccagggggacatcatcacactgctcatccccgaggagaaggacggctggctctatggagagcatgacaccaccaaagcgaggggttggttcccatcatcatatacaaagttgctggaagaaaataggaaggaagcagtgtctgtgcctccaccaagccctgtaccagtgagaagcatcagtactgtggatctgactgagaagagcagtgttatcatcccacctcctgactatctggagtgcctgaccatgggagccacttcagacaagagggcagatgctcccaagactgcttctacttctaccttcaaagccccagtgtccagaccagatgccacacccacgtctcctagtaatgcaaacgggactgcaaagccaccattcctcagtggagaaaacccctttgctactgtgaaactccggccaacagtgacaaatgaccgatcagcaccaatcattcgatgaaggtggaaaggatcctgctagtccctctacctgaggtcttacctgcaagacgatgttgctggacgggtgcaggcactatcgaaatttcagaggatgcctgatttcaatgaaccccacttgagcaaatcaatttattttctcagtttaacagagctgggtttacacatttttatctttaaggtaaatgaatagcttagtgaatagatcaatcatttgaaatattttttctattcaaaaagcagtaaattgggttcaagttcttatttttatttttaaggaaatagccagaataagggataagtcttatctatgcttttgtgcctggcttcctgtagctgaatgcaaaaagaccagagtttttattttataaagcctgtgctcttaagaagcattatgatgctcatctaaagaaaatatgtaagtttgcatcagagcatgcctatacagtaagcaatataaattatgaaaactatattaaatataatttttcagtgacccaattttaaccttttctctgtccaatccatacc

SEQ ID NO: 1632 - DNA, 2197 bp, Cricetulus griseus
gggcagttggcggtggcggttgtcgggcccggaccagcgggacatggagcagccgtggccgccgccgggcccctgaagcttcccgaggactggcggggaggccgaggaggagagcgacgtggacgtgtccccctcttcttcccacttcccgccggtgcctggcggcggcgcccagatgtatagtgatgggattgagctggcttgccaaaagcagaaagaatttgtgaagagctctgtggcgtgcaaatggaatcttgctgaagcccagcagaaacttggcagcttagctctgcataactctgagtccttggatcaggaacatgccaaagctcagactgcagtgtcagaactgaggcagcgggaggaagaatggcgacagaaagaggaggctctggtccaaagagagaggatgtgtctctggaacatggatgccattagcaaggatgtttttaataagagttttattaatcaagataaaagaaaaacagaagatgaagataaatcacaatcatttatgcagaaatatgagcaaaaaatccgacattttggtatgttgagtcggtgggatgatagtcagaggtttctgtctgaccacccataccttgtatgcgaagaaactgctaaatatcttattttatggtgttttcacctagaagctgagcagaaaggtgctctaatggaacaaatagcacatcaagctgtggtaatgcagtttattatggaaatggaccaaaaactctaatgtggatccaagaggctgttttcgtttgtttttccagaaagccaaagcagaggaagaaggttattttgaagcattcaaaaatgaacttgaagctttcaagtcaagagtaagactttacgctcaatcacaaagctttcaacctgtgacggttcagaatcatgttccccattctggagttggatgcataggctccttagaacccttatcacagaatccagattatcttcagtattctatcaatacacctctctgcagtttaaactcagtggtacataaagaagatgacgacaaaatgatggacactgtgtaattcagttaagactgctgaggccaaggactattttgttacaagaaaggaagagcttggctattttcttgacacttttatgggtgctgcactttatttttgtttggtttttgatgggagggaaaagagtactgaaatgttttgcaactttttttatgtgctgctagggttttttgttgttttgttttgtttctgaagggaggagcggtaccatacattgcaggaagtcaaactggactctccccacccctcagttactaaatttgcctttaactgttgttaattttggaatcaaagtatgaaaatctgcacaatgcaatgtttacaagactggactgaggagacatctgctacagagtcttttaaatgtggatatgtacatgtccgacttgatggaaacaattaaagataaaagtgtgcttgtcccactgctgtcaaagttcagctgtcagatctggtgttcgtcacattaaaagcaataaatcagtagtggtaacctactttactaataagtaaactgggtggcacaaattattgttttaaggtaatatttacatttgtattttcggcaccaccagttaactccttcactatatagttggtattaaaaacatgacattgacccctcaagtagtctcaaaactgttcaggagttgactttgtcctgatgactgttaaaatgttaaggagtgtaacatgtgtaggaagtgatacaattttctggttttccaacaagatgaactgcaagcttactctgaactctttacttgacatagtctgggacctctcagggagtaagttttaaaagaatagagcagcctgtaagaacaaacagtaagagcttcctgttaagtcactgagatccaccaggatatttgatgattctttgtatttagagttagatgacagtgccaattatgatgtctttattatttgagggttaatcttccgacttacaggaacggtagctgtggttatttttgagtgtaatctttggctcagtacccacttcaattcgtagcagttataaagtcagtacctgcggttgggcacgcaggtcacagtttgagtaagaaatcacacggagcggcctgcatgggctagagctgtgacatgggcttcatctgttttcttccagccaatggggc

SEQ ID NO: 1633 - DNA, 2197 bp, Cricetulus griseus
tgaccaacaacccttgggaagaaggtgacatccccagaagcaatccacctgtggcttttacagaggtcctccagacaccagccatcaggattcttccatctacccgtggccttcgtggcccacccaaggaccaggcctcagggcccgatgcaagtgatagagccactgggcccttcctggaacccagtcagcaccaggtggaggccacgtgggaaagtggagtgggtcgaaaggcccccacagtgggcgctatgacagatgagccggctcggggtctggagattgtgagtgggttggaggagttgcttggtgaaggacaccattgaccaggagttggagcagctctacctgtctcacctgagccgcttgcgggctgtggcatcaggggctggtggggagggccatcccctgggcatacttacggaccgtgacttgatcttgaagtggcctggccctgagagggccctgaacagtgccctggccgaggagataacactgcactatgcgcgcctgggatgtggtgtggagctcatcaaggacactgaggaccctgatgatgagggggagggcgaagaggggctctccatcactccctctagccctgaaggagacacccctaaggaatcacctccagaaattgtctctggggcacgctcggtggtagctatgggagatgtgtggcttccatgggctgagggctagggctctggatgtgacagccctgtgggttaggtgggaacacagggacagttttactgagaatccagagaaagggatggacaaggacatcaactctttacacatgaataggcccataggatgggggtgggccagatccccaggggaggctgggactgaagccccgatggaggttcctactgagtgggcaggcagcttgatacctatttctgataaagagccgcctgcaccagttctgccagagcagagtccttctctccttagtcccccagggactgaagtctgtctgtctagtgtagccaaccctcatgtgacctcccaggacgaagagggcggaagcctaaatcttgagtccccagagagatctcccatgccagcagccccggcagaatgtgtatgtggattatctcctcagcttcggggacccttgacccagactctgggtgtcctggctgggctaattgtggtccctgtggctttgaacagtggtatgtcccttttggtgcttgtgctgtgcctctctctggcctggttctcgtaggggctacccgcgtaggggcagcagatttcctcctctttggggtctgaagatttgtagtccctctattaccccaaagagttgagatgagatctctgagctctctagtcagcaccaggcttcctacagtagtatttgtagcgtgaaaaagaatggtggatggtgtgaaatattttagaatggaaccaggcatgccccccaacaaccccccccccaagcctgtatttatttttctataattctctggatgagggagagtggtcatgagctggtcttggggcacaattacccagagatatatttattaacagccaatctgtgcaacctgctggagctttatttttaatttaatttatatagagtacctattattatatgccacaatagagctctatgagaaatgatgtgtcttgctgtgctggtctcctgtttggacctgagtgtatagtgtggtcatattctggggaatgaccatggtccatggtgggagtggagatggccatggccatgcctactgctgcctcctcaatgtgttcttgaggatctgtatctctttgccttgtggtcctaacctaatatatgtggtcctttggtcgtgcacattttgtttgtgggagcttgtgtctgtgtatatgggtggttgtggtgggagccaaggggaagtcaactgtaaatatggagacatggattagccacaaggttttgaggttactgaaaaaagccagcttttgacaccagcagggagacccctcaaacccccaaatggggaaggccccagaaaggaattaatgtactgtgaaaaatttgtatcagatttgttgtccacagacattgcatttctactccaaacaggaaattcagatgctttagaagaaaggttagatacatttattgcatgcaaataaaaactcttggcatagcaaaataaaacacattatatttatttacgtccctttgcag

SEQ ID NO: 1634 - DNA, 2197 bp, Cricetulus griseus
acagctgctgttgccctcagcttgatcaaggggatcttccaagacctctgttgtcaccagatgaaagagactccgatcgttctatgaaaccattgttttttcttcaaaggaagattctcatactgcagattgtgagaacaaaacttttagtaatcagctacatcacttgaagaatacagaacgacaaacaaaatgcactggggaaatgcgaggcttctctcgttgacaaagtgcatttgctttttgaccaagagcttgagtcagcatccccaaaaatggaagatgtttgtaaaagccccaagctgctacttctgaaatctgatagggcagcaaacagtgtacagagacatactccacggaccaagatgaggcctgtaagtttgcctgtagaccggctgctgcttcttgcaagttctcctactgagaggaacagcaggaatataggaaatggagagtcagacaagtttggtaagaatcctgcctttgaaggacttcatagaaaagacaactcaaatactacttgttccaaagttaatggctttgacccacaaaatctacagaaatcctgggataaacaatatgaacggaacagttttattgccaagactacaatggttgtgcccagtgcacaccctgagaagggactgacagcaaacattggcaatacagagccggccaggtcagcaagagacacgtcagagcggaggtcctctgattgctgtcctgtggctactgtcagagcacccagaacactgcagccccagcactggacaacattttacaaaccacccaatcccaccttcagtgtcagggggactgaggagaaaacagcagtaccctcagcagctgtgtctcctgtcctggtgcgtgttccccaggttcctgtggcaaaaccagacccagactcaagggtcacgtcggcttgttctgtgcagccaagtggtcaacctaaagagaactctgaggagcctggcttgcctgaggggactccggcctgccagagaccacgactaaaacgaatgcagcagtttgaagaccttgaagatgaaatcccacaatttgtgtagggttgtcaaaatgcagattttctgtttgttttgttttgttttgttttgtgagaggaatgtttggacagggcccttttgtataggattgccaaagctatttgtcattatgtcgtctgttgatcatgtaagatggcagagtgttctgacaaggctgcattcatgcctcactggaatgatctttgaagttgtaaagaaaatgtgtgtattcctgttttttagaatgattttccccacaaaatgatacattataatttttagcaggaggtgcagtaggggaaaatcagcatggagtgagatcaagtgcatatttataaagtatttctgaacactagttgctggaagatgtcatgtgctgtgatttccccacagtttcacagggcatctttaaccattgtgcttctgtggttgtatgtaagcttttattttcaattggaaattcaccttttaatatttacataacggccaaggggtttgccaatctgtatttaattatgtttaattgtaccccaaaaatgcacttaaacctgaactatttagttccgttaccttttatttggctttagatgtttttaatacatttggtagggatttgagggttttgttttatctcctagttttgtctctgtaaacttttgtttttcaacagttctgaacttttaaatattttatacagtggtccagaaaagatgctattttcagaagtttttaaattcagcacatttcctcattttattgcccagctcttgtttaaactgttccttttataagaaatgttttaacttacaaattattttgtattctttttctacctgactttcaaccattggaaatgtatagttcattcaaatgagtgaatttagaaatttcagagaaggtgtaggtgatcggctctatttctttgaaagaaacaaaaccaaaaaacctagtttcagaatttgtgcattcctgttactttctgtgccattgttttgtctaaaataggatgtaaaagggacaagtacagtagccttttgtatgtgtgaattatattatgcttttgtatgaccttgttatatttgataaatatatgtacatattcacttcttaaaaaaaaaaaaaaaaaaaaaaaaaaaaaaaaaaaaaaaaaaaaa

SEQ ID NO: 1635 - DNA, 2196 bp, Cricetulus griseus
acagccccagccccgccctcctgaggggagagctgtcagcaatgaacctgaggaggaggagctggctaccctgtcagaggaggacatcctcatggctgtgactgcttgggaaaagggcatgggaagcttgcccccacttcagccacagcagcatccagtgttgcctgtggctggagagaggaatgtgctcatcacgagtgccctcccttacgtcaacaatgtccctcatcttggaaacatcattggctgtgtgctcagtgctgatgtctttgcaaggtactcccgcctccgccagtggaataccctctatctatgtggtacagatgagtatggtacagcgacagagaccaaggctatggaagagggtctcaccccacaggaaatctgtgacaaataccatgccattcacgctgacgtctaccgctggtttaatatctcatttgatacttttggtcgcaccaccactccacaccagaccaaaatcacccaggacatcttccaaaggttgctgacacggggttttgtgctgcaagatactgttgagcagctgcggtgtgagcagtgtgcgcgcttccttgctgaccgctttgtggagggcgtgtgtcccttctgtggctatgaagaggcccgaggtgaccagtgtgacaagtgtggcaagctcatcaatgccattgaacttaagaagccgcaatgcaaagtctgccggtcacgccctgtggtgaggtcctctcagcacctgtttctggacttacctaagttggaaaagcgactggaagactggctagggaagacattgcctggcagtgactggacacccaacgctcggtttattactcgttcttggcttcgagatggcctcaagccacgatgcataaccagagacctcaaatggggaacacctgtgcccttggaaggtttcaaggacaaggtattttatgtctggtttgatgccaccattggctacctgtccatcacagccaactatacagaccagtgggagagatggtggaagaatccagaacaagtggacctttaccagttcatggcgaaagacaatgttcccttccatggtatagtctttccttgttcggctctaggagctgaggacaattacaccttagtgaagaacctcattgctacagagtacctgaattatgaggatgggaaattctctaagagccgggggataggagtgtttggagacatggcccaggatacagggatccctgctgacatctggcgcttttatctgctgtacattcggcctgagggccaggacagtgccttctcctggacagacatgatgattaaaaacaattctgagctgctcaacaacctgggcaacttcatcaacagagctggcatgtttgtgtctaagtttttgggggctgcgtgcctgagatggtgcttacccaggatgacagacgtctgctggcccatatctcctgggaactccagcactatcaccagctgctggaaaaggttcggatccgagatgccttgcgcagtatccttaccatatctcgacatggcaaccaatacattcaagtgaatgagccctggaaacggattaaaggaagtgaggtggacaggcagcgggcaggcacagtgacaggtgtggcagtaaacatagctgccttgctgtctgtcatgctccagccttacatgccaacagttagcgccaccatccagacccagctacagcttccactgctagcctgccgcgtccttgtcacaaacttcatttgtaccttaacagcaggtcatcagattggcacagtcagtcctttgttccaaaaattggaaaatgaccagattgaaaatttgaggcagcgctttggagggggccagactaaaggatcccccaagccagcagttgtggaggaagttacaacagctgggccacagcagatacaaatgctgatggatgaagtgaccaaacagggcaacattgtccgagaactgaaagcacaaaaggcagacaagaaccaggttgctgcacaggtgactaaactcttggagctaaagaaacagttggctttggctgaagggaaacccattgaaactcctaaaggcaagaagaaaaagtgagaggacctgtttatataaagtcactttactgggtatggacaataataaagaatgtacaatatatatacaaaaaaaaaaaaaaaaaaaaaaaaaaaaaaaaaaaaa

SEQ ID NO: 1636 - DNA, 2196 bp, Cricetulus griseus
  modified_base (163)..(163): a, c, t, g, unknown or other
cgggctgacggctcggtgctcgaggacaacatcatcgtgtccgaggtgcagttcgtggagaacagcggcggcggctcgtcggcggtcggccagttcgtgtcgctggacggtgctggcaaaaccccaacctaggcggtggattccatgtgaacttgggaaaggngtcacgagcacagaacgctacagaatggtcggcgccacatccaccacctggggagccagctgcagctgaaccagcactgcctggacacagccttcaacttctttaagatggccgtgagcaagcacctgacccgagggcggaaaatggcccatgtgatcgctgcctgcctctacttggtttgccgaactgaaggcacacctcacatgcttcttgacctcagcgacctgctccaggtgaatgtgtacgtgctggggaagacgttcctgctcttggcgagggagctctgcatcaacgcaccggctatagacccgtgcttgacattccacgctttgctcaatctcctggaatttggggagaagaaccatgaggtgtccatgacagccctgaggcttctgcagagaatgaagagggattggatgcacacaggccgtcgcccctctggcctctgtggagcagcacttttggttgcagccaggatgcatgacttccggagaaccgtcaaagaggtcatcagtgtggtcaaagtgtgtgagtccacactgcggaagaggctcacagaattcgaagacactccaaccagtcagctcaccattgacgagtttatgaagattgacctggaagaggaatgtgaccctccctcgtacacagctggacagaggaagctgcgtatgaagcagctggaacaggtcctgtcaaaaaagctagaagaagttgaaggtgagatatccagttaccaggatgccattgaaattgagctagaaaacagccggccaaaggcaaaaggggctcttgccaacttgtcaaaggatggctccggtgaggactccacacccagcccgttctgtgaggaggacacagaggatgaagagctggaggctgctgccagccacatgaacaaggacttttaccgggagctcctgggggatggtggcggctccgaaggaacgggagaccctgatgggggcagcaggccccttgccctggagtctttacttggccccttgcccacagcagccagcctgggcatctccgactccatccgggagtgcatctcctccccaagtggggaccccaaagacacttcaggggacggggagctggatctcagtggcatcgacgaccttgagatcgacagatacatcctgaacgagtcagaagcccgggtaaaagccgagttgtggatgcgggagaatgctgagtaccttcgggagcagaaggagaaagaagcaagaatagcaaaggagaaggagctggggatctataaggagcacaagcctaagaagtcttgcaaacgccgggagccaatcctggccagcaccgctggggaggctatcgagaagatgctggaacagaagaaaatctccagcaagatcaactacagtgtgcttcgggaccttaacagcaagggtgggagtagcccacccagggaggactcacagcccccagagcaagccagcaccaagaagctgtcacggaggaaaagagcagccagcaggagcagtgctgaccctgggacaagcatcgggaagaggttgagacctctggtgtctacacatccagctaagaaggcagctgtgggagaggccttgctcttaagttcccctaccctgggagctgagcccatcaagccatcagctgtcttggtggagagtggccctgtgtcgtaccatcctgacgaagatgcagatgaggaggacgctgaagaagaggatggagagccttgcgtcagcgctctgcagatgatgggtggcaatgattacggctgtgacggtgacgaagatgacggctactaagtggaactcaaggccaggcagcatcctggtgctggactccaagcgtatctgtcttataggggtcagatgggccctggggccacggctcacgggcatgatttgtggggctctgccagtcaagtaccaccctgcttgatttgaagctttcttccatggccacattgtggcctccatcacacttactgttgggaatcattgttttgagcaatgtaaggaattatttttgcccagcaacggaaa

SEQ ID NO: 1637 - DNA, 2194 bp, Cricetulus griseus
  modified_base (734)..(734): a, c, t, g, unknown or other
gaacatagctgaagctagaaaacaggaaagctggaggcaaggaagagccttgaatcttgaagttgggacgttgactctaagatgtccttgagcagtggagcctccggaagggaaaggagtggatgcaaacccggttgagacatacgacagtggggatgaatgggacattggagtagggaatctcatcattgatctggacgccgatctggaaaaggccagcagaaactggaaatgtcaggctcgaaggaggtgggataccagctccaatgctgtggccacactaccagacaacatcaaagtttgtgaccccagtgccaggtcctcagcctctgacagcaaagggaccagcaacaacagcaaaaccagagcaggagccaatatatggcagcaaggtatcaggtggcgaggatgctgacaaggcgcgtgccgagccccaatgtgagctgtaaagccagctcagagtccaaagccctggacatcttgcagcaacatgccagtcactacaaaagcaagtctcccacgataagtgataaaaattctcaggagagagatcggggaggctgtggggtagttgggggtggtggcagctgtagcagtgttggggaacagggaggtggtgacaggagtgtcgaccggccccgcaccttccccttcccagcgcctgatgtccacacaccaccaccaccatcacttgggctactccttgcctcccagcacattatacacccaagccngagtgcacttggtgggatgaggctttgaggtgcagacatttctctgttctcctgagttgcaaggttgtgtgctgggaaagtgatgacccagctttatcagtcacttcttcccatgatgtgggatggtttttagctctctgctattgcagggtatcatccctttgttaccttcccctcctgtctttaccctctagactgcaagagagagaaagatccacagattccagcctaggctaacagggagcttgtgacaagaatgtcagaaatgacagtttgagagcaggaaggtagatggctctgacttctttgggagagtgagatgggtgggagacagtaagcacaaagcccaggagaaggtggtttccaaggacccatgagcccctccctatacatagacaggcttggggctcttagcacctctgacccacaaacctttcctgtttccaagtaacttatttttcccccaagattcagctgggcagctagctggcccataattctgggcctttgtcatttattactagggcatcctaggaaactttccagtgattccctgccatggccctcccaggccttgtccccagcccctcctgccccagtccacccgcttgccttggtgctcagccctcccattgggagcaggttggggcaagctggaggcccgggctgaaggggcagtgttgctgttcatagcttttgttccattggcgttgctctgttggatttaatttcagtcttcctgattcttcccttctgtaaagtgtacattaccaagttccttgttttttttatatatatatatataaatatatatatatacaaactgtacttctttttgtcctttgtacattcaggcaagaagagaaaataaatctttttaagagacaatcacaaatctgtgagggctgctggttatttctcctggagtttgctgctgagctgctgcctcctcccctagctgttctgtccccctcagcttccctgtctctagtcctgctccatatgcaccctcagcttcactttccctggctgacagcaagctgttgaatccagtgtgcagactaccttccccctgagccttttcctgcccagcattgttttcttttctggcttggccactggctgatcctgtatcctggcctcctctttttacccttggatcccattcaccaaagtggctttcaacccctgggtactctgggacctacctctcagaggccctggctttgaacattcattcatctatgaaactatgcagctgggaactctctgcctgagattttgcactacttaaacctgcctgggagttagaatggaaggtttttaggaacaagtgggaaatcccctttgtctttacttccttttcttaattggctttggaattgaagtatatttttaaattatttgttgtatttattgaataaagttttaaatgtcccctgttcttaaaaaaaaaaaaa

SEQ ID NO: 1638 - DNA, 2194 bp, Cricetulus griseus
gacaaagaaaacatttacattctcttggaatactgcagtagacggtccatggctcacatcttgaaagcaagaaaggtgttgacagagccagaagtccgatactacctcaggcagattgtgtctggactcaagtaccttcacgaacaagaaatcttgcacagagatctcaagctagggaactttttcattaatgaagccatggaactgaaggttggcgactttggtttggcagccagactggaaccactggaacatagaagaagaacaatatgtggtaccccaaattatctctcccctgaagtcctcaacaacaaggacatggctgtgaatcagacatctgggccttaggctgtgtgatgtatacgatgctgctgggaaggcctccattcgaaaccacaaatctgaaagaaacatacaggtgcataagggaagcaaggtatacaatgccatcttcattgctggcccctgctaagcacttgatagctagcatgctgtccaaaaacccagaggaccgtcccagtttggatgacatcattcggcatgacttctttctgcagggcttcactccagacaggctctcttctagctgttgccatacagttccagtatttccacttatcaagcccagctaagaatttctttaaagaaagctgctgctgctcttttcggtggcaaaaaagcaaagcaagatataatgacacacacaataaagtgtccaaagaagatgaagacatttacaagcttaggcatgatttgaaaaagacttcaataactcagcaacccagcaaacacagaacagatgaggagctccagccgcctaccactacagttgccagatctggaacatccgcagtggaaaacaaacagcagattggggatgcgattcggatgatagtcagagggacgcttggcagctgcagcagcagcagtgaatgccttgaagatagtaccatgggaagtgttgcagacacagtggcaagagtccttcgaggatgtctagaaaatatgccggaagctgactgtattcccaaagagcagctgaccacgtcctttcagtgggtcaccaaatgggtcgattactccaacaaatatggctttgggtaccagctctcagaccacactgttggagtccttttcaacaatggcgcccacatgagcctccttccagacaagaaaacagtccactattatgcggaacttggccaatgttctgttttcccagcgacagatgcccctgaacaatttattagtcaagtgacggtgctgaaatacttttctcattacatggaggagaacctcatggatggtggcgatctccctagtgttactgatattcgaagacctcggctctacctcctccagtggttaaaatctgataaagccttaatgatgctcttcaatgatggcacatttcaggtgaatttctaccatgatcatacaaaaataatcatctgtaaccaaaatgaagaataccttctcacatacatcaatgaggacaggatatccacaactttcagactgacaactctgttgatgtctggctgttccttagaattaaaaaatcgaatggaatatgccctgaacatgctcttacagagatgtaactgaaaattttgagtggaccctatgggactcttttccactgtgagatcaacaggaagccagcggcgggatacagagcatgttggagaagatggacaggtggtggtacgactgactgtagttcctcagtggcctgctggactgctggaaccagaccagcctaaggtgtacagttgactttggacaatccaagagtggagcagaatgcaattttccttgaagtacctgtcttgaaaaggcttattggacaattttgcagaaagatgcattgactcttaggttctctctgtggagagtgctttcaacctgaggacttggaactgtgaatatacttcctgaaggggagggagaagggaggatgctcccttgttgtttaaaggctacaatcagagcagcttttggctgcttaactgtgaactatggccatacattttttttttttggtatttttgaattacacttgtggctggaaaagtgcattccttgttaataaacgttttatttattacagccccaagagcagtatttattatcaagatgttctttttttttattgttgtaccattttgtaactcttggcaataaagaagta

SEQ ID NO: 1639 - DNA, 2194 bp, Cricetulus griseus
gggttggctttgcaagggaaagatgtgcttggagctgccaagactggatctggcaagactttggcttttcttattccagtgttggaagccttataccgccttcagtggacatcagctgatggcctgggggttctgataatttcacctactcgagaactggcctatcagacatttgaggttttacgcaaagtaggaaagaatcatgatttttcagctggcctcatcattggtggaaaggatttgaaacacgaagctgagaggatcaacaacataaatatactcgtttgcacaccaggtcgacttcttcaacacatggatgaaacaatatgttttcatgccaccaatcttcagatgctagttcttgatgaagcagatagaatcttggacatgggctttgctgacaccatgaatgctattattgaaaatcttcccaagaaacgccagactttacttttctcagccacacagaccaaatctgtaaaggacctggcacgcttgagtttgaaagatcctgagtacatttgggttcatgaaaaagcaaaatacagcacccctgctacattggaacagaactatatagtttgtgagctgcaccagaaaatcagtgtgctgttttcctttttgagaagccacctaaagaagaagagtattgtgtttttctccagttgcaaagaggttcagtacctgtacagggttttctgccggctgcgcccaggcatctctatccttgctctccatggccggcaacagcagatgagaagaatggaagtctacaatgaattttttactaccttcagaagaacaaaggcatggtgcagcagcttctccagaagaaagtacctgtgaaggagatcaaaatcaatccagaaaaacttattgatgttcagaaaaaattagaatcgtttttagcccaagaccaagatttaaaagaaagagctcaaaggtgttttgtctcctatatacgttcagtatatcttatgaaggataaagaagtatttaatgtgagcaagttacctattactgaatatgcactgtctcttggtcttgctgtggcaccacggataaggtttcttcagaaaatggagaatcagcccaccaaaggattggtaaggaatcaagccactgaagcaatccagcccagggctccctccctcaccaatgatgaggtagaagaatttcgagcttatttcagtgagaaaatgtccattcttcacaaaagtggaagaagactagaagagacagaatgcaccttggccagtggtgatagtgaagaacaggatgaagacacagaagatgaagaaatggaaaagcagctgagaaaagcaggagctcctcgcactgaacctgttctcaatattgaggaggcccagaaggaggccaaggaagttcctgtgcagttcttcgacagagatgatgatgatgaagatgggcctgatactgatttcctcacagtgaagcggcgtgatgtgtttgggttggatcttaaagagaatgaagcattatcgaaaaaggaaccttctaaatccagtgtcaagaaaaaattaacaaaagttgcagaagcgaaaaaaatagtgaagagaaattttaaagtgaataagaaaataacatttactgatgaaggggagctggttcagcagtggccacagattcagaaatctgctacgaacgatgtggaggaagaagatgacactggtggtatcaacttagacaaggcaaaggaaaggcttcaggaagaggacaagttcgacaaagaagagtataggaagaaaattaaggcaaagcatcgggaaagacgtctaaaagaaaaagaagccagaagagaagacaacaaaagacaaacaaaggccagagatgaagaggaagcctttctggactggagtgatgaagaagatggtggatttgatccaagcacacttccagatcctgataagtacagaagttctgaggaatctgagagtgaagacataaaacagaatatgagtgacaccaagaagaagcaaggaatgaggaaaaggaacaacactgaagaggacttggacgatgtacaaccaagaagtcggcatggaaagaaagccaagtgggaaacgttagagcctttggatacaggcctgtctttagcagaggatgaagagctggtgttacacttactcaaaagtcaaaactaaatattctctgtgccttcatggactttgat

SEQ ID NO: 1640 - DNA, 2194 bp, Cricetulus griseus
ggcttctggtacagtttttactgcaactgatgtggcactggggcaagaggttgctattaagcagattaatttacagaaacaaccaaagaaggaattgatcattaatgaaattctggtgatgaaggaattaaagaatcccaacatagttaacttcttggacagttacctggtaggagatgagttgtttgtggtgatggagtaccttgctggtgggtcactcactgatgttgtaacagaaacctgcatggacgaagcacagattgcagctgtgtgcagagagtgtttacaggccttggagttcttgcatgctaatcaagtgatccacagagacatcaaaagtgacaacgtgcttttgggaatggaaggctcagttaaacttactgacggagatggatgtggagaaaaggggttcagccaaagaactgttacagcatcccttcctgaaactggccaaaccattatctagcttgacgccactgatcctggcagctaaagaagcaatgaagagcaaccgctaacatcactgaggcctcatagtcttttatccattttctaaaagaattttttttaaaacatgaaattgttactctgaggggtataaagagacagtctgcatcacatggagaaaaacaagcaaactactattttctaaagatgaccaagagaaattgcagtaagagaattatgacttccagatgagcccctgctttagggtccaaaaggagtcgtggactgcatcgctagccttacatttccagcagacagcgcttgatgtttgcatactgttgtgatgactctgtcactacagtagatcctgttggttgtctccttggggtatttccatacttgaatgtcagattcgagtttttctgagtattttgtctgctggtcttctctccccttcgtagccttcccttcccttaacccgttccttctgaattgttgctttgagtttttcttgtgcctaaattcaaggcaagtgtgataggaattatgtagctctttatattggcaaaggagcttgacatgttttaactttttatagaagttaggaccagctgttgtacatgtagtatttcagtttagagcttaaactgaaaggggaaagtatgtgatttttaccttttttaacaaatgtgaaagagtcaactttagaaattcatggtagtgagtttgacatttgttacatgtatagaaagaggactaataatctatatttataactaaatcattgatacagagcaagaatcccactgactgtatgttcttaccgtttttgtcttctcttatgcctgtttctcctcagatttggctttaggaaccaaagtgatctattcttcttccgctcgggctttatgcctttagtgccgcccactcacttcccttctcttcccttggaaacgagtgtctgtatatgctgcgattttaggtgttggtttttgtttgaatcaaccctattttgcatccacccctccaccctctagggcaagtaataaccattgaattttcaggatttaaaagttaagaacttttttctatttaaaaggaaaaatatttgggagtagcagaaaccaagagagatttgaaccttggtaagttctaggctagttgtaataatgaaatgtcaatattgtagagatgaagctcatggcagtaaactgtaaagatttatctggtttacagtgttcccaacccattattgatgttttactgtgagggatgaaatagcaaagtacatggtgggtcatttgaggtgttgggggtactttagtttttgttttaacaagtgagtagaatattcatgtaaaaaagagaccacgtgggacacatgccaatgccccgccttatgctgtgactccacaagggcttttccctcaacagaagcagtttggggtttgtagttaacaatttcttggatggttatttgcatgtccattgctggcgacggactttgtcattcaaacctgactccgaggttaagggggctgcactgttgtttattctctcctgacctggataaactaacctgtaatagttaatagtaatggttcattttgagatgtgtcatttttaaacaaaataatcttttaaagcaatatagaattgtgatttattagttaattttaaattaaaatgttgagattctgttgaaagacaaaaaaaaaaaaaaaaaaaaaaaaaaaaaaaaaaaaaa

SEQ ID NO: 1641 - DNA, 2193 bp, Cricetulus griseus
catcgctgcagtcccttctcactatcgaaaggccttggttcccaagttaaaggcaaagcccatcaggactgccagtgggattgctgttgtggctgtgatgtgcaaaaccccacagatgtccacacatcagttttacagggaatatatgtgtatactgccctggaggacctgactcagattttgagtactcatcccagtcttacacaggctatgagccaacttccatgagagctatccgtgctagatacgacccttatctgcagacaagacagcggttagagcagctaaagcagcttggtcacactgtggataaggtggagttcattgtgatgggtggaacattcatggcccttccagaagaaatacagagattatttttatccgaaaatttgcatgatgctttatcaggccacacttcaaacaatatttacgaggcaatcaagtattctgagagaagcttcacaaagtgtgttggaattacaattgagaccagacctgattattgcatgaagcgacacctgagcgacatgttgacttacggatgcacgaggctggagattggggtgcagagtgtctatgaagatgtggccagagacaccaacaggggccacactgtgaaggcaacatgtgaatcattccaactggccaaagattgtggttttaaagtggtagctcatatgatgcctgacctgccaaatgtgggactagaaagagacattgagcagtttatagaattttttgagaaccctgcttttcgtcctgatggtttgaagctgtatcctaccctggtgatccgtggaactgggctgtatgagctgtggaaatcaggaagatacaggagctattctcccagtgacctggtcgagctggtggctcggatcctcgccctcgtgcccccatggactcgtgtgtaccgagtgcagagagacattccgatgccccttgtcagctcaggagtagagcatggcaacctgcgagagttggcatttgcaagaatgaaagatcttggaatacagtgccgagatgtgagaaccagggaggttggaatccaagaaattcatcacaaagtccggccataccaggttgagttggtacggagagattatgttgccaatggaggctgggaaaccttcctgtcctatgaagatcctgatcaggacattctgattggcctcctgaggctacggaaatgctctgaggagaccttccgatttgaattgggtggaggcgtttccatagttcgagagctgcatgtgtatggaagtgtagttccagtgagcagccgggatccctctaaatttcagcatcaggggttcggcatgctgctcatggaagaagcagaaagaatagctctagaagagcatggatcggggaaaatcgcagtgatatcaggggttggcaccaggaactactaccgaaagatgggctacagattacaaggcccctacatggtaaagatgctaaaataatggccacggcaatctaccttcttgcagcatcctccctggcagaagaccctccccctgtggctgttagctcccaactctagcctctgctgacagaggccagagataccctctttgtgtgcccatgtagtcacttctggttttgagacttaaatgatttcccagtttctaaattctgcatgaaggctgcaggtgacccatttgggctcagacactgtgacaaaagcagatcaactcctttggccatcatcatttgtgattgtcatctgagggacagcctcaggagaagattatttatatacccggaagatgaaagctggactgcagcacagaaaagctgtggacatgattctgccctttaaccacaggcacattcaccctggaatggagaaaatgagatttgcactgggagtcatttggtgactgtgctcatgtcttgaaatgtgctgtgtttaggaaaggaagagctgaggatgtgggttgtattgataagcttggcgccagccgtctgccagccagttctgtcctgagcagacatggtccactgtgcatagccagagcctcagggccctggtcaatactagtccatcctcagtagattgtgttgatggtgctgtatggaggagtctaggctactgagagagcctgcctcacctgcgcatctgccatttccagcagtgtttaatgaaaagctgttctctgaaaggtctgaaaaataaagtcttta

SEQ ID NO: 1642 - DNA, 2193 bp, Cricetulus griseus
  modified_base (654)..(654): a, c, t, g, unknown or other
  modified_base (662)..(662): a, c, t, g, unknown or other
ctgccctatgatgtgaccccggagcaagccttgtcccatgaagaagtgaagacaaggctagacaactccatcaggaacatgagggccgtgacagacaaattcctctcagcaatcatcagctctgtggacaagaatcccttacgggatgcgcttcattgccaaagtgctgaaggattcgctgcatgagaagttccctgacgctggtgagggatgagctgctgaagattgttggtaacttgctgtactaccgatacatgaacccagctaccgtggctccagatgcctttgacatcattgacctgtccgcagggggtcagctcaccacagaccagcgcagaaatctgggctccattgcaaagatgctccagcatctctcagtcgtaccagaaattcagacggtttttccaaactgcttgtgacgtcccagagctgcaggataaatttaacgtggacgagtattctgatctagtcaccctcaccaagccggttatctacattttccattggtgaaatcatcaacacccacactctcctgttggaccatcaggacgccattgctccagagcacaacgaccccatccatgagctgctggatgaccttggcgaggtgcccaccatcgagtccctgataggggaaagttgtggcaatttaangacccaanaggagcactggctaagacagaagtatctctcacgttgaccatgaaggaggataacaacctcagccttcaggagaagaaagagaaaattcagactggcctaaagaagctaacagagcttgggaccgtggacccaaagaacaaataccaggaactcatcaacgacattgccaaggatatccggaatcagcggagataccggcagagaaggaaagctgagctggtaaaactgcagcagacgtactcagctctgaactctaaggccaccttctatggagagcaggtggattactacaagagctatatcaaaacctgcttggataacttggccagcaagggcaaggtctccaaaaagcctagggaaatgaaaggcaagaaaagcaaaaagatttctctgaagtacacagcagcaagactacatgaaaagggcgttcttctggaaattgaggatctccaagcaaatcagtttaaaaatgttatctttgaaatcagtccaacagaagaagttggagactttgaagtgaaagccaagttcatgggagttcaaatggagactttcatgctgcactatcaggacttgctgcagctacagtatgaaggggttgcagtcatgaagttatttgacagagctaaagttaatgtcaacctcctgatcttccttctcaacaaaaagttctatgggaagtaactggtcgtttgctgccagtccagaagaattcaaaacggcaacgcctcgctgctgcctttataggatcctccattactccttggaagtaaagacctggtccagcagtgcctcagtctcacattccctcttaagtggtaattgctactttgtaaaacattggtgtttgttatgcttgtattctgagaagcctggatggttgggctccaactaacaaagaccgttcagtttcaggcattgaatttggaaacctttgttcttggattaaaagttataaacttaaaaaaaaatactgtttatccaaaagaataggtaaatcatgctactgagccttcaatttctttggttcaatattcttgcataaaacataaaattaaactaatattacagagtttactgatgtgtgtattgaaggccaataagctattttaattagggacagatcttttttttttattttttttaaagacgagggtgccttaagatgtctcagttaactgtaaggatgctctttcctgaataccagttagaactgcgccaaatgcccttggagaccttttcacagctgctgtggagtcccaccctaagcagcactgaggtcacctggcgagcctcggcttggcacactgatgtcctgccacgctcgtgttatttattagctgcagccatctctgtcttggctctctcctcgtcctctgaccttctctctgaccagccatcatgacatttactatgaatttacttcctcccaagaatttggactggccgtcaaattgttgctacacacaattgcctttgtatctctgtatgaaataaaaggtcatttgttcctgaaaaaaaaaaaaaaaa

SEQ ID NO: 1643 - DNA, 2193 bp, Cricetulus griseus
cattgcttggcacaaggatgcgggccttcctgtctatgctcacatccgtcctagagatgtggaggccattcccaaagccactaccaatccaggtaaccgcaaagtgcgagcccttgcattcagcaacagaaaccaggagctgggagctgtgtctctggatggctacttccacctgtggaaagcccggagcaacctgtccaggctgctgtccctgaggctgccctactgccgggagaacgtgtgtctcacctactgtgaagatttggccctgtatgctgtgggatcccagtctcatgtttcattcctggatctgcgccaaggccagcaaaacatcccaccactgtgctcccgagagggaggcactggcgtgcgttctctgagtgtccaccagcacatcatcaccgtgggcacaggccacgggtctctgctcttctatgacatccgtgcccagaagttccttgaggagaggtctgcaaccggtccagacttctttcctgcgccctctggaaggaagctcaagctcacctgtggcagcggctggatcaaccaggatgacctcctagagaattacgttgccggtgtggaggatttccccaatgccctctacactcactgctacaactggccagagatgaagctgttcgtgggtgggggcccgctggcctcaggcctccacggcaactatgcaggcctctggagctaaggtggaaccagccctgataaaccagtgtgcttcttagcagagagagagagagaaatggagctgtcagaagtcgctttgagaaattttctgcacctgtcctcccttctttggactatccatacaaatactttccactaattcttagctgtgttgtctttgagtgagtgatccatatagtctaaaatacattccgtattccagattgcctacttttggaaatccgtcattcattaattgtgatcatggtgtatatagtttgtctgttgttggtgcaaaacgcacttttctagacgtttattatctgaaagtagttgtcatagaatcttgggtctatatccaaatctcagttgatgaggacggtttaggtattcaagtgttctactaattggaactttcaaaattcatccaaaaataagtgtttttctttcaagccttatttgactttttaatgctctgtcttcttattgagggaagaatgtacttgttttcacttcttgccttagtactatcaccacttgtggatagatttgaatgtttgtggttggagtaacttacagagtttcagtgccatcattcgatgcagggatattaagtataaatatagaatgtatggcagacggggtggaaaataccctgctctgaggtatagactggatatttttgctgttgctattttaataccaaatattatatttcagcatattttaaactttcaaaaatctgtttgagttaagttaaaagaaaaaaatgcaaaggaagaaaatgagcccacccagctcactgtgcaagaaacccccatctttataggctccaaagtaattcgattttattttgtgaactaaaaagatccatacttaaagtagaagtatgtgttcctaaaggctctgcttctatgttttcagatagaggagctggggatttaaaagctaggtgtgattgaagaactttgccattcagataaatagaggtaatgggatgctagacaggtgtattggacttgttcataggtgggaatactgaatgtgagaaaggagccaggccttgctcaaaactgggcaggatgtgttaggcctggaatgtgactgagccatgtttccttttccataaacatctggcatgcatttgcattggtgttgctacactacatgttgttcagtaccaaacctaaattgctgaaaggatttaaaggagacttaggagtatgtaatgatcagattttactttatagagattatgcaggtttatttcacaaattatagagttttcctacatatctgtgcattttttgcttgcatgtatgtttcaaactctgttataagtgatttgagagcagagattgtaaactgccatcttttatttctttatctgtatgctaaggccgaacaaaggcaatcagttattatttacttaattttttttgccagtggaaacctgcacttcaaattgtaataaatatttgctgttgcataataaagaaacttgctgtgtgt

SEQ ID NO: 1644 - DNA, 2193 bp, Cricetulus griseus
caagagctaccccatgacccacccccttctcccacagtggacgagcccaaggtgcttgctgggaaaaataaatttgacgattccttggtccacatcaatatattcttggtggataaaaagcatccagaattctcttccagttacaatcgcattaaccggagcatcgacgttgacttcaactgcttggatgtgctgatcaccctgcaaacctgggtggtgatgtggcttgcatgggctggtcgttcaggccaaaggagggctttctggattgtttgatggcgctgaagttgttcttggtcctgactcatctgttgagctgttgggaccagttccaccagaacaacagtttgtgaaccaaaaaatgagacctggttctggaatgttgtccatcagagtcatccccgatggaccgactcgagcactgcagatagcagacttctgccagcggaaaaatgagcgctcattatatgacacggaagaacttcccgttacagagcaaggaacttcggaaactgagaaatccagacacacagcaggagctggaagtgcttgtgcggttggaaggtggaattgggtgtcttactttaaattaataaaagtcccagaagaattggtctttgcgagccttacgggaatcaacgtccactacacccagctggcagctagtcacatgcttgagctcagcatacaggatgtgcaggtggataaccagctcattggtactactcagcccttcatgctctatgtgacacccctgagcaatgagaacgaggtcattgagacaggccctgctgtgcaggtcaatgccgtgaagttccccagtaagagcgcgctgaccaacatctacaagaggagaaactgctgctcaagctactaagtttctttggctatgaccaggcagaatcagaggtggaaaaatatgatgaaaacctccatgaaaagacagtggagcagggggggaccccaactcgatactactttgagaatctcaagatcagcatcccccaaatcaagttgagtgtgttcacttccaacaaactgcccctggacctcaaggccctgaaaagcaccctgggattcccactcattcggtttgaagatgctgtgatcaatctggacccattcactcgggtgcacccctatgagaccaaggagttcatcatcaatgacatccttaaacacttccaagaggaactcctcagccaggcagctcggatcttaggatcagtagacttccttggcaatcccatgggtctcttaaatgatgtttctgaaggggtcactggactgataaagtatggaaatgttgggggcctcataagaaacgttacccatggagtgtcaaattctgctgccaagtttgcagggacattatcagatggcctggggaagacaatggacaatcggcaccagtctgagcgagaatacatcaggtaccatgcagccaccagtggcgaacaccttgtggccggcatccatggcctggcgcatggtatcattggtgggttgaccagtgtcataacgtcaacagtggaaggtgtgaaaacagaaggaggtgtcagcggcttcatatctggccttggcaaaggactcgtgggcactgtgaccaagccagtggcaggtgctctggactttgcatctgaaacagcccaggcggtgagagacacagccacactcagcggtcccaggacccaagcccagagggttcggaaaccacgttgctgcactggcccacaggggctgcttcctcgatattctgagagccaggcagaaggacaggagcagctcttcaagctgacagacaacatccaagatgagttcttcatagccgtggagaacatggacagctactgtgtgctcatctcatccaaggccgtgtacttcctgaagagtggggactacgtagaccgagaggccattttcctcgaggtcaaatatgacgacctctaccactgccttgtctccaaagaccatgggaaggtgtatgtgcaggtgaccaagaaagctgccaactccagcagcggcgtgtccatcccaggcccgtcccaccagaagccaatggtgcatgtgaaatcggaggtccttgctgtcaaattatcacaagaaattaactatgcaaagagcctctactatgaacagcagctcatgttaagactcagtgagaatcaagagcagttggagctggactcctga

SEQ ID NO: 1645 - DNA, 2193 bp, Cricetulus griseus
cctaacgtccgggtggccaacgacgcccgagaactggtcgtgaactgctgcactgaattcattcaccttatatcctcggaagccaacgagatttgcaacaagtcggaaaagaaaacgatttcgccggagcacgtcatacaagcactagaaagtttgggctttggctcttacatcagtgaagtaaaagaagtcttacaagaatgcaagacagtagcactaaaaagaagaaaggccagttctcgtttggaaaaccttggcattcctgaagaagaattgttgagacagcaacaggaattatttgcaaaagctagacagcagcaagcagaattggctcagcaggaatggcttcaaatgcagcaagccgcccaacaagcccagctggctgcagcctcagccagtgcatccaatcaggcagggtcttctcaagacgaagaagatgatgacgacatctgaaattcaccatcttggctttaagaaaacagtgaaagaagtgcttctctgtaactgtatatgcatctcggtggacttaccattggtattctagagtcgtctgctgttcaggtttcaactactctgctatacttgtaaaactgtctctttgaactattgaaaatttgaggttcagtgtaagatcagctttgaatttgtaatggtgtttctggaatcgaagagcagtgtgaaccctttatttggtcagtgaacagtattacagaaagcatcaggttataaaaatacagtgacatttacacagatctcttcatctgtatttgcatcttctctgcccttttaactgaactaaaactgagtaattttatattgagatgaggcatggtgtgaggcagaatactttgaatcaggttggtggaaaaagttcagttctgtatagtacttaaatgtttttgtcttttaaactgagtgtatatgcaggcaacaattatatatgctcagataaataaatatacttgctaagagaaaaactcaaagaagacattcaaaaactaagaaggaaatgtattcactggtagttgtataaatttgatgagtttatgtttttgattttgttactcttttgtgtatcagtaaaaactagttttattatagtataatttatctacactatgccatttcagagactggctaatcttgaagattgtcatgattcttactatttcactccagttcagtaaaattgttcatagtattacttgcttcagtctttgagtatataggtaggacttgtgaaacagttgcttgggttccgttggtttaactgaggctcatggatattcagacctttgctaagggaaataaatgaaagctaatgaatatgattgctatgaaagagggctttaaaaatattatttaacatgtagtttacttattgtttggttttagcataacatttacattttcttgactaggtggcctaaagagcccagtgctaacttttgatatgacatcattgtccccatcatcataattgagtgatagctttaaaagttttgtgtttgattaaaaagtgtcataactgaccagccctatatgaagtgttaacttgctgttaaaagtgagcagctttaatttggcttcagtgactaaagtatggtagtgtttgtgagagggttccaatgttaattgcagaaataaatgccacctaaggtaataggaagtcattaagttcctgtgtcagttgccaagtcatttaaacttctgtattcaccaaagccccaagagattctagctgccaggattttaattttatttggagagctaagtaaagtttataagtattagatttcttaatattcatattttgcagtttttagaaaaagggaatattgttatgcatttatcagatagatatacttccccagtataacagaaaaaggtagtaattttttcaaaaaggttaagtaccaaaggtaggtaggtagtttagtctacaaaaataagttagtcactgttggcttttctaatttgtactgtaacattcttttactttgttttaagtgtatgtttctcaagtaaacaacttaggtatttttccatacctttttctttctgatgcagacttcaggttaattaatatttactgcatcgggtaatgtattctgtgtttgaagcctagtgacttttcattttgatgttcttgtgatttcatatgctgtattctccaagcaataaaattctgat

SEQ ID NO: 1646 - DNA, 2192 bp, Cricetulus griseus
ggaggaaataatgctggccacacagttgttgtagattctgtggaatatgactttcatcttttacctagtggaataattaacccaaacgttactgccttcattggaaatggagtggtaattcatcttcctggattgttcgaagaagctgagaaaaatgttcaaaagggaaaaggtctggatggctgggaaaaaaggcttatcatatcagacagagctcatattgtatttgattttcaccaagcagctgatggcatccaggaacagcagagacaagaacaagcaggaaaaaatttgggtaccacaaaaaagggcatcggcccagtgtattcctccaaagctgctcggagtggacttcgaatgtgcgatcttgtttctgactttgatggcttctctgagaggttcaaagttctagctaaccagtacaaatctatataccctactttggagatagacattgaaggtgaattacagaaacttaagggttatatggaaaggattaaaccgatggtgagagatggagtttatttcctatatgaggccctccatggaccacccaagaaaatcttggtagaaggtgcaaatgcagcattgttagatattgattttggaacttacccttttgtaacctcatcaaactgtactgttggaggtgtttgtacaggtttgggtatgccacctcaaaatgttggtgaagtatatggagttgtaaaagcttataccactagagttggtattggtgcctttcccacagagcaagacaatgaaattggagagttattacaaacaaggggtagagaatttggagtaactactgggaggaaaagaagatgcggctggttggaccttgttttactcaaatacgcccatatgatcaacgggtttaccgcgttggcccttaccaagttggatattttggatatgtttacagaaatcaaagttggcgttgcttacaaattagatggggaaatcatacctcatttcccagcgaaccaagaagtcttaaataaagtggaagttcagtataagactctcccaggatggaacacagatatatctaatgcaaggacatttaaggagctccctgtcaatgcccaaaattatgttcggtttattgaagatgagcttcaaataccagttaagtggattggtgtaggtaaatccagagagtccatgattcagctcttctaaggattgccagcagcgcacgagacactccttgagagggagggaaaatacttaagcatttctctattatctgcaaattcaagaataaagacatggaatgagttttaagctggcattggttgcagtctctgacagacggctgtcatggacagactggcgccctcccatccagcttctcagctggcatggccgccgcctctgttgctcctgctgctcatggtgccacagttccttcccgtgttcagtaactgtataatccctgttgtttgaaatctaaaacttccagtgcagtttttcttcattattgtcatcgtgtttgagtttttatcccaaatagatggtgagaacaattaatgcagttttgcacagatatttttacattctgatcattcagttctgtcattgtaatctttgctgttagaaaaaaaaaagaaaagataggggttctgtcaacttttgtaatgctattaattctgtttaaattgtgaactgattattttctgctgagaccattgtaaaactgagctttggttgggagggggagtatgttcatgggacctttaatttgtatagaatgcagaacctagttctctctacaattatttaatacaatgaacatttaaatttagtgttcaaaaagagatgtttccctacaatagcaatcttaatgttaaaaattaattattaaaaaaaatcttgtgatatttggtggatatttttctttgctttcagatacgagctcaaatgtatatctttcttttttttttattttttaagtatactgttatttctgagaacagtgggttggtcttcaacattgtgcctgccggtatgtctataaaatgacccataagtacccacatgaaccctaattgccaattgtcagccataattctgatcatgccttcatctttcctcccttgaaaataaagaggtattacttagcccttaggctttatattgtgctgtagattatccttccatgaactataactgtttaaattagg

SEQ ID NO: 1647 - DNA, 2192 bp, Cricetulus griseus
caagcagaatctggttgcaaattcagattgcctcagagagttctgggatccagagaggccctgtgtacttaccggaaccccagaaagtattgaacaagccaaacggctcctggggcagattgtggaccgctgtcggaatggacctggctttcacaatgacatagatggcaacagcacaatccaagagcttctcatccctgcgtctaaagtggggtctgggtcatcggcaaaggaggggaaacaatcaagcagttgcaggagcggacaggtgtgaaaatggtcatgatccaagatggcccattgcccacaggagcagacaagcctctccgcatcactggagatccatttaaagtacagcaagcaagagaaatggtcctagagatcatccgagaaaaagaccaggctgacttccggggtgtgcgtggcgatttcgcctcccgagcaggaggaggtagtatagaggtgtctgtgcctaggtttgagaggccgtggccgtggggactgggagtgtgggcactccgtggtggtgtgcaggagattacgtacacagtgccagctgataagtgtggccttgtaataggcaaagggggtgagaacatcaaaagcatcaaccagcaatcaggtgcacatgtggagcttcagcggaacccccctcctaacaccgaccccaacctgcggatatttaccatcaggggtgctcctcagcagatcgaggtggccaggcatctcatagatgagaaagttggcggtgccggcctcggagcccctgcagcctttggacagagccccttcagccagccaccagctgcgccacatcaaaatgcctttcctcccaggggcttccccaacatcgctgctaaagttaacgggaacccccacagcacccctgtgagtggccctccagcttttctgacccagggctggggcagcacttatcaggcttggcagcagcccacacaagtcccaagccagcagagccagccacagagcagccagcctgactacagcaaggtctgggaggactattacaaaaagcaagagtcataccaccagtgctgccccacaggccagctccccgccagactacacgatggcctgggcagagtactacaggcagcaggcagccttctacggacagactttagggcaggctcaggcccacagccaggcaggagcagtagatgggcgtctgcagcggctcttccccgaaatcagtgtgagagaaacctgtttgttacagagatttttagatttgcaaacctttcaatgaagaacctttgttttgtttctgtgaaacactatatttagattaactgaaattttctaaaaaatcgggaaaattagttactaaacattgctgaataatttctgtgtcatgatttctttgttttgtttgtttctgttttctgttgcaacagaaaaatggcttggaagtcttaggtggtaatgtaacaaattcttttaaaaaaattttaagcagtatttaaatattcataaatgtaaattcattaagtgtttcacctctaatttcttgtatcttggctgtccagttttattgtcgtttttttttttaagctgaactattatgtattgtaattaatgatgtgaattctgaactgagacgggtccttgtgatacgggaggggtgtttgtgggttgtgtcattcctagcattctgagggtaatgcaaagagttgtgtgtctaagacctccaagctggttttaaaaacgaaaagcctttctctattctcagaaatataaatactgttatttttaatattaaaaagaaattcaatataacttttaacaaacactgtggacattaaaccatataaaaatgtagtaactatttttaattccaaggtgttttttgcttttttcttttaaatattttcttaatatttgtcaaattaactagataaataaataaatctagtattaaccacagtatgagttaaataattttgatttaataaaagggataatatgatttccagtgtttactgtagtgtatcttgtacagataacatgtatttttaaagaaaaaaacggaattggagctattttttcttgctttttgaattgaccccgaggaacattccatttgaaatgtactcaagttacagtttctggttctctcgttttccttacaatgcttgaaatgtctaactattaaaaaggcagttggaaat

SEQ ID NO: 1648 - DNA, 2191 bp, Cricetulus griseus
cggcttccccaggatgcgctgagccccgcgacgccgtccgctgccgccggctcccgtccgaggtgtgaatgacagaggtggtgccttccagtgccctcagcgaggtcagcctgcgcctcctctgccacgatgacatagacactgtgaagcacctgtgtggcgactggttccccattgagtacccagactcatggtatcgtgatatcacatccaacaagaagttcttctctcttgctgcaacctacagaggtgccatcgtgggaatgatagtagccgaaataaagaataggaccaaaatacataaagaggatggagatattctagcctccagcttctctgtggatacacaagttgcatacattctaagtactgggagtaagtgaaagaattacagaaaacaacggcataggttcccttttactagaaagtttaaaggatcacatttcaaccactgcccaggaccactgcaaagccatctacctacatgtcctcaccaccaataatacagcaataaacttctatgaaaacagagactttaagcagcatcattatctgccctattactactccatccgaggggtcctcaaagatggtttcacctatgttctctacatcaatggcggccaccctccctggaccatcttagactacatccagcacctgggctcagcactagccaacctgagtccctgctccatcccacacaggatctaccgccaggcccacagcctgctctgcagcttcctgccatggtccagtatctccaccaaaggtggcatcgaatacagccgtaccatgtgataccactggggcagcctcccccaggcctctgtccttagcactctgtggagcctattttcctgtctgtctgacttctgctctcctttgcaaggagctggtgaccacctgccagcccatcggcctgccccagttgcaggcccggtgctatgctggctcagaagcagagtgtatgcctgtccttcaacaggctctccttcccaatggcctggcaggtgttggctacattcactggaaaagggctggccgggcctctcctctgcctcctgctcctttatctttcctacaaaatggactgaactttgctgtgaaaagaatgtggacgcctttgaccctgaagacacaggaacgttagaataaagaggcacagcaaagcgaataccaggtttttatataggaatgccctaaagaaacttagactatggaagcagttctcctccatgaaaggctggagactggggagaaagagtggggctggcccttcatgagaacttaaagtttcaggaatcagccctcaccatagacagttagatggacagttccctgttcctcaggcctcctgctacccacttcctactgtccagaaggatcatcctgcctgttgaatcctggcatgctccatatagctgacctacattgggagctgggccaaggacaggtagctgttggcttctgggttccttccttgctcatccttctagaagctgaaagcttcaaggcctggccaaatgcagacaggaggaggctgaactctgcattgggtatctcttctactggacccatgggacttgggagcagaaggcagttggtgcctgcggaccttcagcctctgaggcagaggctcttgtcagtgccgggaattatacttgcagcaattgctgcagtgtcacaggagccctgacagggtatcctcacagcccctcactgtgccagactgattaggaacagctctattgataggcctcattactgagtgcttccctcccacagcatcctcctcaggccccagagccagcccaaggctgcttggcctcagagaagggtcctcacaaagcagtgaggccaaggcaggaaaagcattccccttcctcaacagaactggccagcaggtggccagtgtcctgactggtttcagttgtgtgctgaggccccagccctgtgaccccctcccttttcagtcaatggtgatcatgtgattttcatttctgccctgtgtggtcaaggaagagccttctaggagtttctgacttggacattcttaaatccaactcaagcctcgacctgtctgtccctccctcctgtcccctaattactgcagtgtccagcccagtgttgaacaaattgtagtgtgtagtctcgttacaacacaaaaaaaataatttcattagtctca

SEQ ID NO: 1649 - DNA, 2191 bp, Cricetulus griseus
agacaccgtgggcttggggtgcacctcagctttgtgcgctcagtgacgatggacaaatggaaggacatcgagcttgagaagatgaaggctggtgggaatgctaagttccgagagttcctggaggcccaggaggactatgagcctaactggtctttgcaggacaagtacagcagcagagccgccgcgctctttagggataaggtggctactttggcagaaggtagagagtggtctctggagtcatcgcctgcacagaactggaccccacctcagcccaagatgctgcagtccactgcccaccgaccctctgggcaaccacagaatatgactgcctctggcgacaaggcttttgaagattggctgaatgatgacctgggttcctatcagggggctcaggagaatcgatacgtagggtttggaaacacagtgccacctcagaagagagaagacgacttcctcaacaatgccatgtcgtccctgtactcgggctggagcagttttaccactggggcgagcaagtttgcttctgcagcaaaggagggtgctacaaaatttggatcccaagcaagtcagaaggcttcggagttgggccacagcctgaatgagaatgttctcaagcctgcacaggagaaggtgaaggagggaaggatttttgatgatgtgtccagtggggtctctcagttggcatccaaggtccagggagttggcagcaagggatggcgtgatgtcactactttcttttcggggaaaacagaggacacttcagatagacccttcgagggccacagctaccaaaacagcagcggagacaactcccagaacagcaccatagaccatagcttctgggagaccttcgggagttctgagccccccaaggccaagtccccaagcagtgacagctggacctatgcagatgcctcaacaggaaggaggagctcggacagctgggatgtttggggctcaggttccgcatccaacaacaagaacagcaatagtgatggctgggagagctgggagggagccagtggggagggcagggccaaggccaccaagaaggccaccccatctacggccactgatgagggctgggacaaccagaactggtaggagccttgctgccccttggccccagatctgctggggactgctgtgtttgcactttgcactttaccctcttgttcctctttcgtgtgaagacagtggctcaggcaggacttgagtcggtgctgcctgcctggtgtggggtggctttctcttaggcctcaggggacatgtcatccatcggcctcttgggtcctctgagcagccttcctggactctgggttcttggggcccaggcactatctctgcagccctggcacagcctgggactgcagtcctgtgcagtgtcagccaagccagacatctgcttttgttgaagtgtcttttaaaacttgaaaggtttgctctagttcttttttttccttgaagaaaatgcctggagtcttaaggctggaaatgaaatgacaaaagcaatactggagcttgcactgccaccgacgtcctcacctaagtccacgtcctgtggcctgtgctgtgaaactcactttgtgaccctctgcctttcctgcatcagcctgtccagccctcagtttcatgggagaacctccacagatggccacacatggcagcttgggctctggcccctccctggacacctgacttgaacttggccagccctggacagctcagaaatgaggaaagagtaaagaggctgggagtgttttcagcatatctgttgctcctgcccagcccaggggagcctgaacatggagggtgggctatggggccaactgcccctgccagggttgggcatcttgatggggagcctccatctaggtagagcacctgttggtgttttgccatgtattgtgtctacgacagttcaggccttctctcagcctgctgagggtgctcagggtcagagcacacttggccatgtctcctcagcatgcagctgtccctccagacagcctcacctaccaccctgtggactttgtggaacactgcagttgagacccatgtgctatcagtggttgttgtgacagccttttcctcccaggattccatgactgctgtgtgctgtggctggagagcccagctgggtctctgtctccttaaacccactcctgtcttgactctcagtttgacc

SEQ ID NO: 1650 - DNA, 2191 bp, Cricetulus griseus
cagccatcttgctcttgccgcgtgctggtgttggaggaccctccccgctgcagatttaccaacagcatgaatcaagaaaagttagccaaacttcaagctcaggtccggatagggggcaagggcacagctcgcagaaagaagaaggtagtacataggacagctactgctgatgacaaaaagcttcagagttctctaaagaaactggctgtgaacaatatagctggtattgaagaggtgaacatgattaaagatgatggaacagtcattcatttcaataaccccaaagtccaagcttccctctccgctaacacctttgcaattactggtcatgcagaagccaaaccgatcacagaaatgcttcctggaatattaagtcagcttggtgctgacagcttaacaagccttagaaagttagctgaacagttcccacgacaagtattggatagtaaagcaccaaaaccagaggacattgatgaagaagatgatgatgttccagatcttgtagaaaattttgatgaagcatcgaaaaatgaagctaactaaaatcctctggggtttggaagctggcatggactagatttaacaatcagctctgttgttccaaagttttacagacacagagaacatcacctgttactagttcagtaatataaatattttgtatattaataatgctgtttgttcagcatttcttggtcatttgattttgcattttgcacttcttcccaggatctattcttccccagggatctattcttttggtcaaaatatgaagtattggtacagtttgagggtggttttttgtttttttgggggggaaaactttttggtgtgtatgtatatgtatgtatgtatgtgggtatgtgtgtacacagtggacagccaattggtaacagttttatctaactcttcccttttccccagtagaaataaaacaaatctttactattttgttaccttttttttcctaatactgcacaaaattgatgaaaagtaagtttctttgatttcagatctgaagagattcctactgttggaattttggttttaatttgctcaattaactttaacattttttacacacttctctggattgaaaatatcttaaaatattttgcccccgggttgctgccagagccgtaagtcaggtacctttggtgtggctgccttagactcacttcttaatcagacccagaaatactccttttattagctttcttcctgctgtccccaccctcctattttggtcttgaaatggactggtcagcctttgataatactcttatctcctgcctagcttgagacagaagttctccatacagagctgagagagtgcctaaccctctttttgttcttcaccttgaacagctccatcttcaatattttatttcccttcacatttgcagtttggtagatttcaaactggaatagctagcatgtgcttgctaaataactttatgccaggcttatcctgtttcttagctgttgtcagtagcaggtgcaagagtgcctcttttttagcaaggctaaaacagggactgtccttttgaatgaaaagaatataggctatagacttatctcctagcataaatgggcattctctgaaatggtactagccccaggagaatttcttcagccactctcctcttcttggccttgaacttacctctgggtagatctgagtggttgtagctgctcatagcaccctcctgcatgcttagaataatgctttggggtgaacagtggtaagacacagtatttatttgcttacctcctttcagaggactaggaggcaagttatattcattcactcaggttttcttcttgctgtctgataaaagcttgtgttttgcatatcagcatttattatagccaatattttaggataaggtttaaagaatctattatttcctggcccatcaccaaaatgactgccccttaaccttgcagcatgtcaacttttgtttcaagctagatatctttccttgatacttaagatgcaagacctaatgagagatctatagacatgaaggcaaagctcctgtgtttttttcatccaaacattttcaatttattttatagattcgttgatttttttcctgttatgttttatataatatatggacttaacaaaataaataatgataataaaataacagtacaaaagaggagactatttcctctagtgctt

SEQ ID NO: 1651 - DNA, 2191 bp, Cricetulus griseus
atttaaacatgcagttgctggatgcatcatatcacttttgtggttttttggccttactctttgtggaccactaaggactttgctgctgtttgaacacagtgatattgtcgttatctcactgctcagtgttttattcactagttctggaggaggaccagcaaagacaaggggggctgcgtttttcattattgctgtgatctgcttactgcttttcgacaatgatgatctcatggctaagatggctgagcaccgctatggatcctttcctatttttattagtgtcgctcctttttggaaatttctggacacatccaataacagatcaactccgggctgtgaacagagcagcacaccaggagggcacagagcatgtcttgtctggaggagtggtagtgagtgccgtgttcttcattttgtctgccaacatcctatcatctccctctaaaagaggacagaaaggtacccttattggatattctcctgaaggaacaccactctatcacttcatgggggatgcttttcagcatagctctcagtccatcccaaggtttattaaggaatcactaaaacagattctcgaggagagtgactctaggcagatcttttacttcttgtgcttgaatctgctttttacctttgtggagctgttctatggtgtattaaccaatagtctaggcctgatctcagatggattccatatgctctttgactgttcagctttggtcatgggactctttgctgccctgatgagtcgatggaaagcaacccggattttctcctatgggtatggccgaatagaaattctctctggatttattaatggacttttcctgatagtgatagctttttttgtgtttatggaatcagtggctagattgattgatcctccggaactagacacaaacatgttgacaccagtctccattggagggctgatagtaaaccttattgggatctgtgcctttagccatgcccacagccatggccatgggacttctcaaggacactgccactcatctgatcatggccattcccatcatactcatggacacggtgatcatggtcacagccacggcttcacaggtggaggcatgaatgccaacatgagaggtgtatttctccatgttttggcagacacactgggcagcattggtgtgattgtttccacagttcttatagagcagtttggatggtttattgccgatcccctgtgttctctttttattgctgtgttaatatttctcagtgttatcccactgattaaagacgcctgtcaagtcttacttctgagactaccacctgaatatgaaaaagaactacatattgctttagaaaagatacagaaaattgaaggattaatatcataccgagaccctcatttttggcgccactctgccaatattatagcaggaacaattcatatacaggtgacctctgatgtgctggaacaaagaattgtacagcaggttactggaatacttaaagatgctggtgtaaacaacttaacaatccaagtggaaaaggaggcatactttcagcatatgtctggcctgagtactggatttcatgatgttctggccatgacaaagcaaatggaatccatgaaatactgcaaagatggtacttacatcatgtgagacgtgtccagatggcatgaacagtgtgaaggttgcagacagttgtacaaaaactcatagagctccctactattggataatggagtcttcttaaaggaaaactgaaatgcaaaatgaagcattaattatataagaaaactatttgttactctgtttgaattatgtgtataggaatcttaaatataaatgaacttgatgtaattgtttcacatcatcttcagaaatggacatataatgatggattctggtgaagaccaaaatttcttctgtgcatttactttctatcagaaagcatctccaatgtaaatatgtatttacatgtttattacaaagacccagatgaagtttttagtcgattttttgcatatctgaaggacaaaatgggaataaaattctatatttatgaattttctgtatataaaactggtttctaattataacttaaatccattaagtaaaagctgtatttccacttgaaatgtaaattattcaggagaaatttcaaccactgatttgagatgaagaattaattaacttttttttatttttggtaa

SEQ ID NO: 1652 - DNA, 2191 bp, Cricetulus griseus
  modified_base (11)..(11): a, c, t, g, unknown or other
  modified_base (1846)..(1846): a, c, t, g, unknown or other
ctttttttttntttttttaaatttttcgagacatctttctggacgatggagtggatgaacaagtcctgatggaactgaaaactttgtgggagaataagttaatgcagtctagggcagtagatggatttcattcagaagagcagcagcttttgttgcaagttcagcagcagcatcaaccccagcagcagcagcagcatcacacacacacacaccaccaccagcaagcgcaacctcagccatcggtacctcagcaagcacagacccagcaggtccttattcctgcatcacagcaagctacggcaccaccaacaagttataccacagatgcagcctggtggagtacaggctcctgttatccagcaggtcttggccccacttcctggagggatttcaccacagacaggtgtcatcatccagccacagcaaatcttatttacaggaaataagactcaggtcatccctactacagtggcagcacccacaccagcacaagcgcagatacctgccgctggccagcagcagccacaggcccagcctgctcaacagcaagccccattggtgctgcaagttgatggaacaggggatacgtcatctgaggaagatgaagatgaggaagaagactatgatgatgatgaggaggaagataaagagaaagatggagctgaagatgggcaggtagaagaagagccctcaacagtgaagatgatgtgagtgacgaggaaggacaggaactctttgacacagaaaatgttgttgtttgccaatacgataagatacacagaagtaaaaataaatggaaatttcacctcaaggatggcattatgaatcttaacggaagagattatatattttccaaagcaattggagatgcagagtggtgaagaattgcttctttccttttataagtaagacaaaagaaacataaaaaagttaaaatggaacggtttgaaaacttgggacatacatcaaccaaaacttcaacttccgcatgtcagaaaagcgcagtagaagcaaagctactggaacaaacaaagctagaccttgacaacatagacactacttctaactggcaagccatggaactgtagcacctgggggttgttgggtggggggagggccttgtgtaggatactgtaactgtcaattttaaatacaggaacctgccattggtaattaggcatgtaaagtttgtctatattcctttctccaagttgggctcagtcagaagatacttgttggaatgacctgaagaaatttcccttttgatagattgaattgaatctgtttattgtatgtgcttatatttggtaacaaaaattgcgtgtgagctttttacagaagggcaagaattatggcgttacatttttacttgttactgtcactcagtaatacatacctcttgcttccctgctgtatgaaacatctacttagatttaaaggatcaatggtcacagtttggagacaaagttgacccaggaatggatgcttgttttaattaggttttcctacttgttaaatgtaacttaaagacttgggtcttacctgtgttgagtagaattaaagcaacagctttaattccatatagaaaaactgtactcccatactttaagaagaaaccccaaatcggctcctcaggaatatgtttttattcacaaaggttaccaccgagctgaaattgtatagtgcacttgatatgtgaagggttttcttgttgggctacagtgtgtgctgagctatgcatttagtctttatgtaacaccgagatggcattctgtacattgatctaagaagcataagggcaggtggtgaggactggactttgtcatgtgcagtttctggagtcaanatggtagggaggcttttatattgggcttttttatttgagatgttcacatttctgttaaatacacaccccatttacactgttgcctttttaaaagtcatgctggcatcaagattcatggagtgtgtgcagtgattgacatgtgttcttgacaagcataatagaatctggctttagaaaacaatgtaaaatgtactagtttttatataaaggctttctgtgctgtattgaaaatcaaggagttttcttttggtggcttgaatggacgaatgcagagttgtctccctctgagaattttttttattattatcttatagcaataatgtcaccacattagagggtaagtat

SEQ ID NO: 1653 - DNA, 2190 bp, Cricetulus griseus
  modified_base (12)..(13): a, c, t, g, unknown or other
ccagaaaagcannagattgagaaccgtgcggcgcattcactgaggagcgaaccaaactggccagtgctgaccagttctacatcctcctcctggacattccctgctaccagctgcgggtggagtgcatgatgctgtgtgagggcaccgccatcgttctggacatggtgcggcccaaggcccagctggcgctcaccgcctgcgagagcctgctcaccagccaacggctgcctgtcttctgccagctgatcctcaagattgggaatttcctcaactatggcagccacacaggagatgcagacggtttcaagattagcacgttgctgaagctcacagagaccaagtcccagcagagtcgggtgacactgctccaccatgtgctggaggaagtggagaaaagccacccagacctcctacagctggcacgggacctggagccaccctctcaagctgcgggaatcaacttggagatcatccgctcagaggccagtggcaacttaaagaagcttctggaaatagaacggaaggtgtctgcctcaatccctgaggtgcaaaaacagtatgctgagcgcctccaggccagcattgaggcctctcgggcactggacaaggtgttcgaggctattgagcagaagaagctggagctggccgactacctgtgcgaagacccccagcagctgtctttagaggacacattcagcaccatgaagaccttccgagacctcttcacccgtgccctgaaggagaacaaggaccggaaggagcagatggcgaaggcagagaagagaaaacagcagttggcagaggaggaggcacggaggccgaggggcgaggacgggaagcctgtcagaaaggggcccgggaaacaagaagaggtatgtgtcatcgatgccctgctggccgacatcaggaagggcttccagctacggaagacagcccggggccgaggggacactgaagcaggcagcagagtgactccaacagatcctccaaaggccacagagcctgcaactgccagcaatgccatacaaagcacaaaccatcctgcctcagagccaagcttggacactacagcagccggggagccacagggctgggaccttgtggacgctgtaacccccagtccccagccctccaaggaggaaggtggtcccccagccttggagaggcgttcttcctggtatgtggatgccagtgacttcctggtccctgaagataacctgaatgcccagccctctgaggggatctggccagtgactctgggagatgatcaagccctgaagcccctcgagttctctagcaataagcctcctggagtcgagagctcaccccagaatgctgtggatcctgaagccttgtggggtgttcgccaagccaaggctgacggcacaagagagggaccagaggatacagctgagcgcggccacagcccccacctcccctgcacaggccctggagaggatgaggaccaggacgacacagctccagagtctgcacttgacacatccctagacaggtccttttctgaggacgcagtgacagattcctcagggtctggcaccctccccagagtccgaggccgggtctcaaaggggacgagcaagcgaaggaagaaacgtccctcaaggaaccaagaagagtgtgcccctgagtctgatgataataaaacaaaaaggctgtgtgtgatccagtgaggcctcaggtccaggcccaaagctaagtgagtgctctcgacggctcagcacagcagcaggtgctccgtttgtgctgtctggagaggctcttcggggccaggctgggactgggcccctgagaaactgaaactctgtgccttacccagccaggagccttgggagtcttggccattgatgctaggacctggcctggcatcaccctgaaccacctgcacgctcatagcctcaccttctgctttgcaagcctctacccacctcccatcgcatgcaccacgggggggaggaagcctcctgtctggctttagggagataggtacaaatacctgcaatgggctgcaacattcccagactgcctccatggctcagttgacctttagctgagtactgttttatgcatctttattctgctgtggctgagttggggacagtgagggagggagggcaggctgggggcaagtgctggtgggtaggtcctggctggtaggccccagggaacaaa

SEQ ID NO: 1654 - DNA, 2190 bp, Cricetulus griseus
gccgcttctcccccgatccgctgcgatcgcagccatgggcaagaagcacaagaagcacaaggccgagtggcgctcgtcgtacgaagattacacagacacaccactggagaagcctctgaaactggtgctcaaggtgggaggaagtgaagtgacagagctctcgggatctggccacgactccagctactatgacgataggtcagaccatgagcgtgagagacacagagaaaagaagaagaaaaagaagaagaagtcagagaaggaaaagcacctcgatgaggaagagaggagaaagcggaaggaagagaagaaacggaagcgggagagggagcactgcgactcggaaggggaggcgtgatgccctttgaccctggaaagaaggtggaggtggaaccacccccagatcgaccagtgagggcctgccgaacacagccagctgagaatgagagcacacccatccagaggcttctggagcacttcctccgccaactacagagaaaagatccgcatggatttttttgcttttcctgtcacggatgcaattgcaaggcagatttcaaattaatgtgtgataatgcgatgacctacaatagaccagacaccgtgtactacaagttagccaagaagatcctgcacgcgggctttaagatgatgagcaaacaggcagccctcttgggcagtgaagacccagcagttgaggaacctgttcccgaggttgtcccagtgcaagtagaaactaccaagaaatcaaaaaagccgagtagagaagttatcagctgcatgtttgagcctgaagggaatgcctgcagcctgacagactccactgcagaggagcatgtgctagccctggtagagcacgcagctgatgaggctcgggacaggattaaccggtttctcccaggtggcaagatggggtacctgaagaagcttggagatggaagtctgctctacagtgtggtgaatgcagctgagcctgatgctgatgaggaggagacacaccctgtggacctgagttcactctctagcaagttgctcccaggttttacgacattgggtttcaaagatgaaagaagaagtaaagttacattcctttccagtgccagcaccgcactttcaatgcagaacaactctgtgtttggggacctgaaagcagatgagatggaacttctgtattcagcatatggagatgagactggtgtacagtgtgcactgagcctgcaggaatttgtgaaggatgctgggagctacagcaagaaaatggtagatgacctcctggaccaaatcacaggtggagatcactcaaggatgatcttccagctgaagcagaggaggagcatccctatgagacccgcagatgaagtgaaggttggggacccactgggagatagtggtggccctgttctggattttatgtcaatgaaatcgtaccctgatgtctctctggatgtgtccatgctcagctctctggggaaagttaagaaggagcttgaccatgatgatagccacttgaacttggacgagacaactaggctcctgcaggatttacatgaagcacaagcagatcgaggaggctcccggccatcctccaaccttagctctctgtccaccgcctctgaaagggagcagcaccctccaggaagtccttctcgcctgagtgttggggagcagccggatgtcacccatgacccttacgaattccttcagtctccagagcctgcagcttctgacaagaactagcttgtgggcttcccagtattttttttttttttaaattttatttgatatacagttctttgtcacaagacagaaacttttgtctcatcctctctggcatgtagcctgaggaagacggtggcctgtctgtactgtcatgtccacagaagaggcccaaaagcaccgagtggtgtcccgaaagttctgagcagtgacaatagaagaggatggagttgtctccctgacaaataatgaaccaccccacattttagaatgaagtattcagagccataaaatgtttcaaaactggatgtgtttgctgagttcctgtttgtatttacaaaagccatgaacacgggtcctaataaaggagatgccgaaggtggtagaaaaaaaaaaaaaaaaaaaaaaaaaaaaaaaaaaaaaaaaaaaaaaaaaaaaaaaaaaaaaaaaaaaaaaaaaaaaaaaaaaaaaaaa

SEQ ID NO: 1655 - DNA, 2190 bp, Cricetulus griseus
aagtccctgggtccagtgcctccgagtgtggagaaaggcctgccaccagccaatcatcattcggtgtatgatgttcctccgtccgtgagcaaggatgtgcccgatggcccctgcagcgagaggagacatatgactgtaccccctgccttcgccaagcccaagccctttggcccaacccgacacccattgatccttgctgcgcctcccacagactccccaccagctgaggatgtctatgatgtgccaccccctgctcctgacctctatgacgtgccccctggtttgaggcgtcctggccctggaacgttgtatgatgtgcctcgtgaacaggtgctccctcctgaggtggctgatgggaatgtaattgatgatggtgtgtatgctgtacctccaccagctgaacgagaggccccaacagatggcaagcgcctgtcggcctctagcacaggcagcacacgcagcagccaatcagtatcttccttggaggtagtggtgccaggccgggagcccctggagctggaggttgctgtggagtcccttgcgcggctgcagctgggtgtaagcaccactgtagcccaccttctggacctggtgggcagtgccagtgggcctgggggctggcgtagcacctctgagcctcaggagcctcctgtgcaggacctcaaagctgcagtggctgcagttcacggggcagtacatgagctcctggagtttgcccgcagtgctgtgagcaatgccacccacacttctgaccgcaccttgcatgccaagcttagccggcaactacagaagatggaggatgtgtaccagaccctggtggtccatggtcaggtccttgacagtggccggggaagcccaggattcacccttgaagacatggaccgcctggtggcctgctcacgggccgtgcctgaggatgccaaacagctggcctcctttttgcatggcaatgcctcactgcttttcagacggaccaaagcccctggcccagggcctgagggaggcagctccctgcaccccaaccccactgataaagccagcagcatccagtcacgccctctgccctcaccccccaagttcacctcccaggactctccagatgggcagtatgagaacagtgaaggaggctggatggaggattatgactacgtccacctgcaggggaaggaggagtttgagaagacacagaaggagctactagaaaaggggaacataatgcggcagggaaaaggccaactggagctgcagcagctgaaacagtttgagcgactggagcaggaggtatctcgtcctatagaccatgacctggccaactggacaccagcccagcccctggtgccagggcggacagggggcctggggccctcagaccgacagctgctgctcttctacttggagcagtgcgaggccaacctgaccacactgacagatgcagtagatgccttcttcactgcagtggccaccaaccagccacccaagatctttgtggcacacagcaagtttgtcatcctcagtgcacataagctggtgttcattggggacacactgtcacggcaggcaaaggcagctgatgtgcgcagccaggtgacccactatagcaacctgctgtgtgacctcctgcgaggcattgtggccaccaccaaggctgctgccttgcagtacccatcaccctctgctgcccaggacatggtagacagggtcaaggagctgggtcacagcactcagcagttccgccgggtcctgggccagctggctgctgcctgagaacagaggactagggtatagaggctggggagtgggcagtgatggtccgagctacccaagcatctgtcttgaaagtgaatatcctgcaggtttggggacaggtaaccccagctctgccttgggcctggtgccctcaactgtccagggatttgtacatatttatagcaaggcaggtgtgggttgcctcctcagaggagctggacaagagtacactgtggactgctaatcaccaggctggggccagggtggaggcacatgggccccacccgcagagctcctcgtgacaggcaagcacagtgtggtgtgcacctctgcaccaagaaaaaaccctaagaactattttcactattgatttttccaatcatttgactaatagtctacatttaataaaattttaaaaataaaaaaaaaaaaaaaaaaaaaaaa

SEQ ID NO: 1656 - DNA, 2189 bp, Cricetulus griseus
gggccccgggcctgggagccgctgctcctgcgcgccacgctccgccgggccgagtgcctgacccagtgcgcggcgcgcaggctgggcccggggggcgcggcgcgactccgcgtggggagcgcgctgcgggatgtcttccgccgacgggagccttacaactacctgcagagggcctactaccagctgaagaagttggacctggcagcttctgcagcacacaccttctttgtggcaaacccaacacacttgcagatgcgggaagacatggcgaagtacagaagaatgtcggggattcgaccccagagcttccaggacctggtgacgcccccatactgggcagcctatgactctggcctggagctcctggggcagcaggaggcagcactggcactgcccaggctagaggaggccctccaggggagcctggcccatgtggagagctgtcgtgctggctgtgaggggcctgaggaacagcagccggctgaagaggaggaagaggaagggagccaggggggcctgtacgaagccattgcaggacactggatccgggttctgcagtgccggcagcactgcgtggcagatacagccacccgccctggtcgcagcttccctgtccccgacttcattcccagccagctgagacggctgcaggaggcttatgctcaggtggggaacgtgtctaaggccatggaaaatgtcctgagtgtcctgctcttctaccctgaggatgaggctgccaaaaaggctctgagccagtaccaaactgagttgggagagccaagacccggcctgggaccacgagaggacatccagcgctttatccttcgatccctcggggagaagagacagctctattatgccatggagcacctgggcactggcttcaaggacccggattcctggaccccagcagctctcatccctgaggcattgagagagaagctcagagaggatcaagagaagaggtcctgggaccaggagcctccacagccgaagtccttgccttactggaaggatgtccttctcctggagggtgtgaccctcacccaggatgcccagcagctgaatgggtcggatcgagccgtgctggatggactgctaactccagccgagtgtggggttctgctgcagctggccaaggatgcagctgaggctggagccaggtctggctatcgtggtcgccgctcccctcatagtcctcatgaacgctttgaggggctcacagtactcaaggctgcccagctggctcgggctgggactgtgagcaagccaggtgctaaattgcttctggaggtgagtgagcgagtacggaccttgacccaggcttacttctccccagaacggccactgcatctttccttcacccacctggtgtgccgaagtgccatagaaggtgagcaagagcagcgtatggacctgagtcatccggtacatgcggacaactgtgtcctggaccctgacactggtgactgctggcgggagcccccagcctacacctatcgagactacagtgggctcctctacctcaatgatgacttcaagggaggcgacctgttcttcacacagcccaatgccctcactgtcacggctcaggttcgtccacgatgtgggcgcctcgtggccttcagctctggtggtgagaatccccacggtgtgtgggctgtgactcggggacggcgctgtgccttagccctgtggcacacatgggcacctgagcacagggagctggagtggacagaagccaaagagctgctgcaggaggaagaggaggaggaagaggaggaagaggaagaagcagagacccttccccagaacccccaagtcacaagcttcagcgggcccaagacaaagctgggaaactacgactccgggtccgagaggaactgtgaccggctgagccagcttcttagggatatggccactcaacttgtgaaggaatcaataagaaggccctgtgtgacatcgggaacagagtagcatgcccatttggggacctacaagggccaccaagccctggactcaagcttactacacagacttagcctagggcccaccaggcctggaagccaggtctggccccagctgagggacctgcagggtccctaggacagacaaaggtcattatgcctcccgaaaggcatggcaacagaggagacaaaaccccatcctctcccaacctgtgtaataaa

SEQ ID NO: 1657 - DNA, 2188 bp, Cricetulus griseus
gctgagagctacaccttcttcccaggctgctgtgacgctcggtggccctaccatgtccagaccccagaccgaggagcaggcagtggattccgagggagactcatccctacacaggagagatgaagaggggacccagagctcccaccgcatgctgggctttagtgatgcactgctatccatcattgccactgtcatgatcctgcctgtgacccacacagagatctcaccagaacagcagtttgacaagagtatacagaaacttctagcaactaggattgctgtctacctgatgacatttctaatcgtaactgtggcatgggcagcacataccagattgttccaggttgttgggaaaatagatgatacacttgccttgctcaacctggcctgtatgatgaccatcacccttctgccctacacattttctctaatggtgacgttccctgatgtgcccctgggtatcttcctgttctgcgtatgtgtgattgccattggatctgtgcaggcactgattgtgggtatgctttccacttcccacacctgctaaatctacagatccagtgctctacatacagggcccagtcccgacggcacatcctgcgcctagtcctccgtggcccagcactgtgttttgttgcagctgtcttttccctctttttcttccccttgtcctatgtgctgatggtgactgtcatcttcctccctcatatcagcaaggctaccacctggtgcaaagacaagctcatgggccacagggagtctccagctcacaatgtggagaccttcagtattgatctgcatgcacctctcagcaaagagcgggtggaagctttcagcgacggtgtctatgccattgtggctacgctcctcatcctggacatctgtgaggacaacgttccggatcccaaggatgtacaagagaaattcagtggcagccttgtggctgccctgggtgcatatgggccgcaattcctggcgtacttcggctccttcgccacagtgggtctgctctggtttgcccatcattcactcttcctgcatgtccggaaggctacacagaccatggggctactcaacatactgtcactggcctttgtgggtggcctccctctggcctaccaacagacctcagcttttgcccgacaaccccgtgatgaacttgagcgtgtgcgtgtcagctgcgccatcatcttctttgccagcatcttccagtttgccatctggactgcagccctgctgcaccaaacagaaacactgcagccagctgtgcgatttggtgggcaggagcatgctttcatgtttgccaagcttgcactgtacccctgtgcaagcctgctggcctttgctgccacctgcctgctgagccgcttcagcacagccatcttccacctcatgcagattgcagtgccctttgccttcctgctgctccggctccttgtgcgccttaccctggcggcccttcaagtcctatggaacctccggccagagcaccctcaaccaggccagggtgaacctgaggcacagtctcagctcttgcctgccccctgctaatgccaaggaagccacatgtgcccattgcaggcataggactgtaaggggtcctatggagatggcttaggagaaatgttgtaaccctggggctatggtttattgacctgagtactgtgcgtattgtgaaataatcaagatctatttcaagagcatgaacatcgttcacattttgcagtgaggggtttcctggaaacaattttattgcttttacccatttattttttcctctttacccccatccccaacactgccaggagaatttacctgtctgactaacctgaataagctgcatggggccatcactaaggtcttatttgaagcagtagtgcccagccaagatgagaagaccatcccttttccttgctgtgacctgcatgtgaccatacaggccaccttgtgctcagaccctttggacagttgagtgtgggctaagtcaggctgagaagctactgtctggctcatatcctcataagtgcagagctcctctttgggactgacagtttatctgcccattcccataccagttgctggacaaagacaagaggcagctacaggacagcaaagctcacaatgtatttggcccagatataagttagatcacattcaggtagtgataaattacacacagagacaggac

SEQ ID NO: 1658 - DNA, 2188 bp, Cricetulus griseus
tgagtcaggctggcttcctaccgggtgagctgggccttagcagccctgggccactatccccatcgggtgtcaagagcagctcccagtattacccctcataccccagcaaccctcggcggagagctgcagacagtggcctggatacacagcccaagaaggtccggaaggttccacctggtctgccctcctccgtgtatccacccagctcaggtgacagctacagcagggatgccgtagcctacccctctgccaagacccccagcagcacctatccctccccattctacgtggcagatggcagcctgcacccctcggcggagctttggagtacccccagccaggcgggctttgggcccatgttagctgatggctcgtcccctctgccccttgcaccaggcagcaattccgtgggcactggtgccttcgggggtctccagcagcaggaacgcatgagctaccagctgcatgggtctgaggtcaacggcacacttgccgctgtgtccagcttctcatctgcccctggcacttacggtgggacttcgggccacacaccacctgtgagcggggccgaaaacctcatgggcacccgagggactgcagccagcagctcaggggatgcacttgggaaggcactggcctcgatctactccccggaccactccagcaataatttctcacctagcccctcaacgcctgtgggttcaccccagggcctgccagggacgtcacagtggccccgagcaggagcgcccagtgccttatctcccggctacgatgggggtctccatggcctgcagagcaagatggaggatcgcttggatgaggccatacatgtccttcgaagccacgctgtgggccctgctagtgatctccatggacttctgcctggccatggggcgttgaccacaagcttccccggccccatgccacttggcggacggcatgcgggcctggttggtggaggtcaccctgaggatggcctcaccagtggtgccagtcttttgcataaccatgccagcctccccagccaacccagctctctccccgacctctcgcagaggccacctgactcttatggcggactcggaagggcaggtgccacagtgggcgcaagtgaaatcaagcgggaagagaaagatgatgaggagaactcgtcggtggccgacgccgaggaggagaagaaggacctgaaggccccacgcacgcgcaccagcagtacggacgaggtgctgtccctggaggagaaggacctgagggaccgggagaggcgcatggccaataacgcacgggagcgggtgcgcgtgcgggacattaacgaggccttccgggagctgggccgcatgtgccagctgcacctcaagtcggataaggcgcagaccaagctgctgatcctgcagcaggcagtgcaggttatcctgggcctggagcagcaggtgcgagagcgcaacctgaaccccaaagcggcctgcttgaagcggcgggaggaagaaaaggtgtctggcgtggtcggggatccccagctggcgctgtcggctgctcaccctggcctgggtgaagctcacaacccgccggggcacctgtgaggtgtcacatgggtctccgtgggaccatggaccaccgcactcttcccggggcgtacccaggacgactctggaggaggcaggtctccagcaaggcgtagcagagggcttgggctccagagacactgtggggcctcagggggccacacagcgccaccatgacagtcctctgaccgaaccccagtgaccaagctgaaggagcttccccctcgattaaccgaaactggaaacgaaagccgcatgctcacttttcagaaaagaaaaaaaagatgccttaactgtggaagacggaagaatcggatgcaccctggcagggtgaccggggctggcttctggttcagagccaccagcacatcgtgcctaagcgtatattttttttttttaaggtagaataaaagaacattagttatcagattttttcctaatgtagacaaaacttaagcaagaacgaggccttccgtgtcttatttttttaagtaagctttcttttgcgtatgttttgttaagcaacaaatttttgttataaaagtctccagtctgttgctgtttctagaactccgcgtcgtatttcatggtctacaaggttaattaaagtagcattcaaaaga

SEQ ID NO: 1659 - DNA, 2188 bp, Cricetulus griseus
agaaggagctgtctcaggtcaaggtgatcgacatgacaggccgggagcagaaggtgtactacagttacagccagatcagccacaagcacagtgtgccggatgaagggctgcctttactggcacagctgcctcccacagccggcaaggaagccaaggtgccaggctttgcactgcccgagctggagcacaacctgcagctgctcattgagcgcacggagcaggagatcatccagagtgaccgtcagctgcagtatgaacgggacatggtggtcagcctgtcccacgagctcgagaagaccgccgaggtcctagcacacgaggagcgtgtcatctccaacctcagcaaggtgctggccctggtagaggagtgtgagcgccgcatgcagcctcatggcaccgaccccctcacgctggatgagtgtgcccacatctttgagacactgcaggacaagtactatgaggagtaccgcctggcagaccgtgcagacctggctgtggccatcgtttatccgcttgtgaaggactacttcaaggattggcaccctcttgaggatggcagctatggcacccagatcatctccaagtggaagagcctcctggagaacgaccaacttctgtctcacagcagccaggacctgtcctcggacgccttccacaggctcatgtgggaggtctggatgccttttgtccggaatgttgtcgcccagtggcagcccaggaactgtgacccgatggtggacttcctggacagctgggcacacatcatccctgtgtggatcctggacaatatcctggaccagctcatcttccccaagctgcagaaggaggtggacaactggaaccccttgacagacaccgttcccatccactcgtggatccacccatggctgcccctcatgcaggcacgcctggagccgctctattcccctgtccgcagcaagctgtccagcgccctgcaaaagtggcaccccagtgatgcttcagctaagctcatcttgcagccctggaaagaggtccttacccctggatcctgggaggccttcatgctcaggaacatcgtgcccaagctgggcatgtgtctgggtgaactcgtcatcaacccccaccagcagcatatggacgccttctattgggtgatggactgggaagggatgatctctgtctcaagcctggtggggctgctggagaagcatttcttccccaagtggcttcaggtgctatgctcctggctcagtaacagccccaattacgaggagatcaccaagtggtacctgggctggaaatccatgttctcagaccaggtgttggcacatccctccgtcaaggacaagttcaacgaagcacttgacatcatgaacagggctgtgtcctccaatgtgggtgcctacatgcagccaggtgcacgagagaatattgcctacctcacccacacggagcgcaggaaggacttccagtatgaggccatgcaggaacgccgtgaggctgagaatatggctcagaggggcatcggtgtggctgccagctctgtgcctatgaacttcaaggacctcattgagaccaaggcagaagagcacaacattgtgttcatgcctgtcattggcaagcggcatgagggcaaacagctctacacctttggccggattgtcatctacatcgaccggggtgtggtatttgtgcagggtgagaagacttgggtgcccacctccctgcagagcctcatagacatggccaagtagacatcagggccctgcaccagtcaggtgtgaataaacagcactttaaactgactttacaaacaatgtctctatttgggagaccaggccaccagagcagaatgtgatgtgataccagcagcctgggctgtatttcttgcctggcaaaggagatggcatggtctgcagcatggctcctggcccaggtggcagatactgtcctgctatgccagctgagctcagcctgtctgtttcctgatgatctccaggtcctcgcagtcctggtagtcaggttcttcctgagatgcccacaggttcctgggaagtccctccagcttcagcagagggaaccagtggacagaagtgtcattaaaggtgtccatgtagcgtggagtctgcggcagtgggaactcctccaggctcttcacaatctgagcagagggtccagacataggcattaggcacaaccctgctct

SEQ ID NO: 1660 - DNA, 2188 bp, Cricetulus griseus
  modified_base (25)..(25): a, c, t, g, unknown or other
  modified_base (2159)..(2159): a, c, t, g, unknown or other
gaagggacatagttcaagatctgcngttttgaagaaaagaagaatcctattgatatatccatggtgatgccttggtcacattcaacaggcgaagccacttctgaaacagttatacatagcctaaatagtccttcaggctcatcagctcagcctagtattcctccttacagggcctaccaccccattatgtctgctgctgcttcacctgagcttcatgctattgatcccatgcagaaacttaaccaacatcttcaagcccaaagactccaaacttcattgacttcaaaagtggtcagaggcagtgaggagccctgtaggccagagttccccagtacaaaaggacttgtccgctcattgacagagcagttccagaagatgcagaatacctctatgagggatgttataggttcccaggatcgaaatttgccaaatggtctaaggaagaactcttctgactttatacctccattaccccagggttcaggaaaagaccactgtcgctgggtaaaactgcagccttctgtagatggcagggaaagactgccctcctgggaagatcctgctgataatcctcttgctgtggactctgggcttcccaatggggaaaccgctggaagaggacagcccagattggctgagccaaatatataccaaggaaagctaccccaagtgacagagactaggtccaaggaactgggtagcagtgtcaacttggggacatctttgtctttggattcctgggtaaatgtcacaagactctgtgattctcaggttacacacaggggccctgggcctggagtcaagccctcttctcatgatacccataaatgtgtaacctatccagagagaaatcacatccttttgcatccacactggaaccaagacaacagcagagatggagcatgctcttcatggatcgagcacagcgcctgtctctcaggattcatcaaacttgaggaaaaagaactttggaaaccgggcaccacttgttccagctcctcctccctccctgtcatccatgaccctcctgtattgctccttgatcctaaactctaccctccccagccacagttcctgccccctgatgttctgatgcccagcgtggcaggggagccctatagatccccaggaacttcgaggggtgtccagcagtttctggctatgtgtgacagggatgaaactccccaaggggtcaagtacacaggaaggactttgaactaccgaagtctaccccatcgttcaagaactgatgcttcctggggactggggtcagagaccaaccagcatgttgggaccagagtcctaactatgccagcatgcaagcctcacctaacctacactgccacactaccagaacgaagccagggcctccaggtcccacatgctcagtcctgggggggtcttgtccattcaccctcccatcctcctcctgttcacccagtgtccccaccatctagcagtcttcatttaccccttgggtcagcttggaattcaggtcctgttctggggtcccgaacacctggccctcgaagaatagatatgcccccagatgatgactggagacagggcagttatccctcccagtttaggcataggaggactggagaggagagaattatgtttattctatccaatgctcctggaagagaacagaatagggtgagattttttatagcacagcaggtggtaaggatcatccctagcttttcctggagtgacacctttctctataaaacctactgtagcagagttgataccttgcattcagttatgctataatcatctcaatgtagaattggcagtttcagtccacatgcttgtaatccctgcagttgggaggtagaggcaggagaatcagcagttccaggccagagactctgggctagaagagactgtaggattctgaccgaattcttatgggaagcccaactgccaagtattatggctgtcagacttccttgtgactcaaactttaggcctagaatgtggagctgccaatatagtatttgcccttctgaacagatggagctgggcttactaacacatcctcccatcctcagcagcagagccattactctcacttgctcagtcactgttgtaaactctcagagtcagctaaactattttagggcaaagcaattactgtttttgtaaagtanttttcatttaataaatctatcagatagtt

SEQ ID NO: 1661 - DNA, 2188 bp, Cricetulus griseus
  modified_base (1418)..(1418): a, c, t, g, unknown or other
tcacaggctaaaaaaatttcctaaaagaagaaagatcagaagcaccatgatggactcagaagcacatgataagaggcccccaatgttgacctcttcaaaccaggatttgtctcctcatattgcgaacgtgggggagataaagcattacttctgtggctgctgcgcagcattcagcaatgtggcgatcacatacccagttcagaagatcctctttcggcagcagctgtatggcatcaaaaccagggatgcaatactccagttgaggagggatgggtttcgaaacttgtatcgtgggatcctgcccccactgatgcagaagtcaaccacactggcactcatgtttggtttgtatgaggtattcctgttcacgttctgctccgtaagcatgtgagcactgctcccgagtttgccaccagaagtgtggcagcagtacttgctgggacaacagaagccattctcactccatttgaaagagttcagactttgctgcaggaccataagcatcatgataaattcacaaacacataccaggccttccgggccctgagatgccatggaattgcagagtattaccgaggcttggtacctatccttttccggaatggattcagcaatgtcctttttttggccttcgagggccaattaaggagcatctgcctactgccactacgaatggtgcgcatttggtcaatgactttatctgtggaggtgtgctgggtgccatgctggggttcttaagcttcccgattaatgttgtgaaagcccgaatacaatctcagattggtgggccattccagtctcttcccatggtcttcaagacaatctgggtagaacgggacaggaatctgatcaatcttttcagaggcgcccatctcaattaccatcgctctctcatctcctggggaataatcaatgcaacttatgagtttttgttgaagattgtatgatgaggtcaccacatgaaatgttattcttgaccaactagacctaaagagaatgcaatttggctttgctcctaattggcttaaatataggttggtgtcattaagtccaggctataataattacagacaaacattgacaaaaacatgactttaagcccttccagaatgtccttgtgcttttactgaattcattgccaaaagatagggtgacctagttagcttctgtcatgggcttcatcctgttaagctgttcactgcactatctactgttttgcttggcttctttgtgctactggtgccagtgtagctgaccagtcggggcattgtcccttgtgagtagtaactgtcatgttcgtcatcctattctctgatactagacttaaaaaaaataaactcttccataaagtctacaaactgaaatccgaccctcaactggagtttgctagaagtttctggggcaggtaatccaaaacngctgttatctgtaactacactaaagctggtaaaataaactttcttccagctgtgaaggttggagcatagtaagcattggggtggcagtaacagagcttgtttctttccactccacgcaggtggtagaggcttcagctgtaaagcactcctaggaagcacatgaggattataagggtaatgctttggcttttactgtctcaattatgtgcattttaaaagaattagaaactttttaatgatttttaacttttaagcatttttgtcactcttcgagctcttgaagactgaactgcagtatattacagagattgctttgtctcctataaatttaagcttgacaaaaaaattcataatttgtaacccactttgtctgaacttttatgctggtatgtaattaatagattctaactagtgtggcgatattttttacaggcaaacctgattaaagaactctgaaaagctttaaagtggcctttctgttacatgtgtggcacaggtggctcatgagtacgggacacttgtgtcctgtgcatcttatctgatgccatcagacacacgagttttgcatttaacacacttgagtgctgtgaaccttcaggactgcaccagtccaacacagcctttgcatggtggcaagttatcttgtttcatttgtggtaagagacagatgtgtgtgactatcaacatccatcttgtggttggccatataatcacttgctacatattgtgaccccgtgcaataaagcagaattatacatatatgtatgtat

SEQ ID NO: 1662 - DNA, 2187 bp, Cricetulus griseus
ccaacaacaacgaacccctgcaatttggtagtgccagtggccctctggtcccagatggcctcattgagaatggaggggaatcaagcaagaaaagaaagagaacaaatactccttcagggagagatcattgctatccggaagagcaaaaagaacttctgtcacattcgctttgctgaagagtatatggtggacaaagccctttacctgtcaggttaccgaatacgcctgggctctagtactgacaagaaggacacaggccggcttcatgttgactttgcccaggctcgggatgacttgtatgagtgggagtgtaaacagcgtatgctggccagagaggagcggcaccgtagacggatggaagaagaaagactgcgtccaccatccccacccccagtggtccactattcagatcatgaatgcagcattgttgctgaaaaactgaaagatgattccaaattctcagaagcggtgcagactttgctcacctggatagagagaggagaagtgaaccgccgcagtgccaaccacttctattccatgatccagtcagccaacagccatgtccgccgcctggtgaatgagaaagctgtgtaccattctgcttccaaacagaaggcatgggaccacttcacaaaagcccagcgtaaaaacatcagtgtttggtgcaaacaagctgaggaaattcgcaacattcataatgatgaattaatgggaatcaggagagaagaagaaatggaaatgtctgacgatgaaatagaagaaacaacagaaacaaaagaaacggaggaatcagccttagtgtcacaggcagaagctctgaaggaggaaaatgacagcctccgctggcagctagatgcctaccggaatgaggtagaactgctcaagcaagaacgaggcaaagcccaccgggaagatgacccaaacaaggaagagcagctgaaacttctgcagcaagccctacaagggatgcaacagcatctgctcaaagtccaagacgagtacaaaaagaaagaagctgaacttgaaaaaatcaaagatgacaagttacaggtggaaaaaatgttggaaaatcttcaagataaggaaaactgtgcttctagactgtgtgcatcgagccaggaaggtgaataccctcttgagaagaccttgaccatcagtcctatcaaatctgagcgtgaagcgctgctagtggggattatctccacattccttcatgttcacccatttggagcaagcattgaatacatctgttcctacttgcaccgtcttgataacaaggatctgcaccggtgatgtggaatgcctcatgagtaggactccagcataccttcagacaggaaaatgaccggagttggagccagcctagagaagaggtggaaattctgtggttttgagggattgaagctgacctgaatctctttatctagcaatttgggatcctgaaaataaatgtgtgctggacaagcttagatgtgattttgtattctcagtggttttcaagtggacattgctttcaatttgtcagttcattcctgaataatcttttaaagttaaaataaggatcctagaacagcacctcaagctacaggtacctaaaaagaaattgacctcaaacctcaagtgctgtaaattcctcctatttctggcaattggtcgtcttttcttataagtagtattgaaaatgttaactgaaatgttttggtgatttgtgcgtggtttgtgtttccagatttcttgtcccatgttgctacttgtacaaaggaatgagaggagtattaggacctctctgtaactgccatttgtctctcttatccacagtaaacagtaaatgaattatccatcagtgtcttctacaaggtgcttcaccagttcacctttaaaacaaaacagcatgaactgtggctttttgtaaaaatactatgaaccaaaagtcaacaaacgttccagtgttattttcttcaatagataaaagtgtttccgaattttaaaacaaaaatctagatggattcacagaaagtctccagtgtgactattgtgtttgtgcttttggggactacttgtaaatagtctgcttttaagagagggcctggttagttttctatgaattgaaaatgcagtcaggcctgggcacacgtgcacacatattggcagaagggatttatttaatagtccattccctctggtctt

SEQ ID NO: 1663 - DNA, 2187 bp, Cricetulus griseus
ggggtctggcctcaggcaatgtagttgccctctttatggagaaccgtaatgagtttgtgggtttgtggctgggcatggccaagctgggcgtggaggcggctctcatcaacaccaaccttagacgtgatgccctcgcgccactgtcttgacacctcaaaggcacgagcccttatctttggcagcgagatggcctcagctatttctgagatccatgcttgcctggacccctcacttagcctcttctgctctggttcctgggatcctagcacagtacctgccaacacagagcatctggaccctctactagaagatgccccaaaacacctgcctagtcaccctgacaagggctttacagataagctcttctatgtctacacatcgggcaccacagggctacccaaagctgccattgtggtgcacagcaggtattaccgtatggctgccctggtgtactatggattccgcatgcggcctgacgacattgtctatgactgtcctccccctctaccactcagcaggaaacatcgtgggggccagtgcctgctccatggcatgactgtggtgatccggaagaagttctcagcctcccggttctgggatgactgtatcaagtacaactgcacaattgtacagtacattggcgagctttgccgatacctcctgaaccagccaccccgtgaggctgagtctcggcacaaggtgcgcatggcactgggcaacggccttcggcagtctatctggaccgacttttccagccgtttccacatcccccaagtggccgagttctatggagccactgagtgcaactgtagcctgggcaactttgatagccaggtgggggcctgtggcttcaatagccgaatcctgtcttttgtgtaccctatccggttggttcgagtcaatgaagatactatggaactgatccgggggcccgatggtgtctgcattccctgccagccaggccaaccgggccagctggtgggtcgaattatccagaaggaccccctgcgccgttttgatggttacctcaaccagggtgccaacaacaagaagattgctaatgatgtcttcaagaagggggaccaagcctacctcactggcgatgtgctggtgatggatgagctgggttacatatacttccgagaccgcacgggagacacgttccgctggaaaggggagaatgtgtctaccactgaagtggagggcacactcagccgcctgctggatatggctgatgtggcggtgtatggtgtggaggtgccaggaactgaaggcagagcaggaatggctgctgtagcaagctccaccagcaattgtgacctgaagagctttgcacagaccttggaaaaggagctgcctctgtatgcccgccccatcttcctgcgctttctgcctgagctgcacaaaacagggaccttcaagttccagaagacagagctgcggaaggagggctttgacccaactgttgtgagagacccactgttctatttggatgcccggaagggttgctatgttgcactggaccaagaggcctatacccgcatccaggcaggcgaggagaagctgtgattttcccctacatccctctgaaggccagagtatgctggattcagagccccagcttctgccccagaggggtcctgggcaatgccagaccaaagctagcagggcccgcacctccacccctaggtgctgactcctccctccctggaccccaggcttactgataggcccctttaggatgatgtcttcagtccaccagggcagtgagtgggagaggggtcagcaggctccctccaaaaggaagggagcttacacatgagagtaaggcaaaagccttcagactcaggaagccaagtagccagagactacagtggctagccatctggtgtccacagaggatcctggtccagagctgccaaagtgtcacctggccctgcctgcatctctggggaaaggaggacagcatgtggccaccgggcccgtgacaagaagtcatgatcacactccttgtttctccaggttccctgcgtccttgtcttggggaaggagagttgtgtctctcagatgcagccttgctgcctgtctgtgagtctgtgttgccttttccacctcagttctagcctgactgagtgcagcaggaatgagggaaaggctcaggggccaataaactctgcctcaactcct

SEQ ID NO: 1664 - DNA, 2187 bp, Cricetulus griseus
ccaccacgcagccacccacagtgggagcagcagctctttgtttggcagctctactccatccccattcactattcggtggctcagcagctcctggcagcggaggctttgggcttggtgctactccaggcaccagctccacctctggaactttcagctttggatctggacagagtggggccacaggcaccaccacctcattggcgcgggatccaagaccccaggggctcgacagcgacttcaggcccgaaggcagcatacccgcaagaagtagtagcctgcctcttgtctctgcccccccatcccttgcccgaatctggacctcagcacctgctaggaagagcctctgacccttcgaatcccatagcaaacctagcccatcaccagggcagaagtggcagcctggccctttctgttctagagaaagtgggtgccccagggaggggcagaagcccaatactttacttgagcagtcacactggtgaggctggagaactggagaaacatctgtacatattgtcctcttgctgccccagcgattgttaatgtgtagcctaggcggccatccccgcaccacttggatccctagcataccttgtgtaggatgggggaatggagtatccctgagctttgcctgcttggcttggccataagaagtggtctcttcctctggttccttcagggtctctcctcatttcttgctgctttgtccttcacctgtctgtcctctgagattcactcctttttaaagggcagtgaatcttgctttgccttggagaccccagtgggcgctgctcgcctcttcttccaagtgtatttatctccagccttccgccagtccagcctccataaaggtggtggctcaggacttagcctggcagagccaggggagggagaagtttgctccaggaagtcctggggcaggcagactgcccaccactgcttctagctgcctcttcacctgcccgacaccccacgggccactttgcctcttcgggattgtattttccaagccttgtattgtgtttgtctgatgttaatgtgtgttgctccttgaatcgagtttggaggaagaattgaattgtatgtgtggcggcatgttggtaatgccggacttaatgtcgcctgggccctcttaggcctagctaattgaatgctgaaagtggcaccgcgtgacagccacagtgctgactcctgaattctcaatagtgtttttttgacttacgggctggcagcccaggggatggagcctatgggagcaaagacttccctctgttggtcctcccccacgtaacaggcaagggcatcttctgcctgtgtttggagttttagattaatggactacacttttaagtttcttatttgttttcccaaaagggtccttcctagcttttctctttcctttccaaaaaccacacccttaggccccagagcctggctgccatgcccatcctctttgggagaagtatgaatgcgtgtgtctaaattaaaagaaaaaaatatttaaacgttttttaacaaaataaaaatttatttttatatttaagctaaattgccttttaaattccttcaagcttggttcactgaggtggttaagtataaatgctattgaatagtaggaattagctgtatagttatgcctgtgtgaaggaggggctcatggctgtccccagcagctctgctaagggggcagagctccttctggacatgttgtataagtgtgagtcttactttataaacaatgtgatgtagctataactggtcccttacctttgtgactggtggcaggggttagactgggttgtatggagctggggagagctggacctcaagtcccaaatgcctgtagggatggggataggtggtggggatcttcacaggaagcctctacttgtgcctcaggtaaggaaggggcctccctgcaattcagtctgagctaattacctcagctccacagcaggcctgcatccagggcccctgaagaggcgtcctggcatagcctcggtgtgtgagcacatttgtccgtgctcacgctggacagggacagggaggctagggcttcccactacagacagactgagttcctgtgagcgtagctgagatttttagtatgaatgtgagattgttcttgcttatgtcattaaaaataaaactgtgatctgtcataaaaaaaaaaaaaaaaaaaaaaaa

SEQ ID NO: 1665 - DNA, 2187 bp, Cricetulus griseus
ggatggctgactgtgcgagcttgcgggtgccgctgtgcacggagcagttcggctcccgagccccgcgcgcctgccgcgctgccgccgacgggagtctgcagtgggacggggctcggcgctggggctggctctccgggaacccggccgcggaacccgggcaggatgcgggtggaggcgggggtccctgggcagcgctgcccgctctctcgggcctcagagccgtgctgctgccgcagggcttcccagacagcgtcagcacggactacctgccctaccagctgtgggattccgtgcaggcctttgcttccagcctctccggctccctagcccacccaggcagttgaaagattccactggcatgttgggccgcatcatctttgcctggtggaaagggagcaaattggactgtaatgcaaagcagtggaggctctttgctgatgtcctcaacgatatagccatgttcttggagattatggctcccatgtaccccatctttttcaccatgactgtcagtatcagcaacctagccaagtgcattgtgggtgtggctggtggggccactcgagcggcactgactatgcaccaggcccgaagaaacaacatggctgatgtatcagccaaggacagcagccaggagacagtggtgaacctagcaggactcctggtcagccttttgatgcttcctctggtatcagattgcccaagcctcagccttggatgcttcatcctcctgaccgctctccacatctatgccaactaccgggcagtccgagcccttgtcctggagaccttgaatgaaagccggctccagctgcttttaaagcacttccttcagagaggagaagtacttgcgcctgcttcagccaatcagatggagccattgtggacaggtttctggccatccctgtctctgtccctgggtgttcctttacaccacttggtctccagtgtctttgagctcgagcagctggttgaagggcatcaagaaccatacctcctttgctggaaccaatcacaaaaccaggtccaggttgctctgagccaagtggcaggccctgaggctgtcttaagggctgccactcatggcctggttcttggagccctgcaggaagatggaccacttccaaaagagctagcagagctgagggagcaggctcgggctggtcctaagaaagaaagctggattctcgtcagggagacacatcaagtattggacacactgttcccaaagttcttgaaaggactgcaggctgctggctggaagactgagaagcaccatctagaagtggatgagtggagggccacatggcccctgtctccagaaaagaaggtctcataagcagcccagctagaggcccagagcccaggacaggagcccagagcccaggacaggagcctggagcaaggacactacagctacaacaggatgttagaagggcaactttatttttgcataggcaaactgctaggaccaattggccaccaccttgtgggaagtggcaaccaatcaaatggactggactccaggcgaagaggaagggaaccagttccttcctaccacaccttcttgccccttttacttttctgggacccactacaaggtccccatcctcactctctgtgaggctcaggcacacccctgttgcagctcatggtactgaacacatttgactttatgcataaaagccccagaggaacacagccacagtcatcatgagcagggcgttgaggttgacgacacgggcccagcgagggtcctcactgatgtcctccagctgcctagttgttgcagccacctcctcactagtaggtggaggacttcctggcccactcttgctcattccacagaaccagagaaggcacctgctgagcaggcttggcgctggggactggacatctggaagaaatggtaattatacagttagtttgaagggagttagctcccctagcttcccaggacactcgctgaagcgtgccttaccttcgatcaccaccgcatgatcctggtacccattctgtacaggggacagggtcgggctttctaactcatcagcatctaggtcttcccgttcctccttgctgtgccggagactgaaaaccaggcggtggagctgggaagttagggagaagggaccaggtgggagctttgctctccaccccaggtccactggcataccaattttgtca

SEQ ID NO: 1666 - DNA, 2186 bp, Cricetulus griseus
tggggtttttttccttctcggttcgctgtggctctgctttcggtttagaggctgcggcgacgggttcctggtcctcgccgctcctgagacagccaggatgtccgcgatccctgcagaggaaagcgaccagctgctgatccgacccctcggtgctgggcaagaagtgggaagatcatgcattattctggagttcaaaggaagaaaaatcatgctggactgtgggatccaccctggcctggaaggaatggatgctctaccttacattgatctcatcgatccagccgagatcgaccttctgctaatcagtcatttccatctggatcactgtggtgctctgccctggttcctccagaagacaagcttcaaaggacggacttttatgacgcatgccacaaaggctatttacagatggcttctctcagactatgtcaaagtcagcaacatatcggcagatgacatgctgtacactgagacagacttggaagaaagtatggacaaaatcgaaaccattaacttccatgaagtgaaagaggtggcaggaatcaagttctggtgctaccatgctggccatgtcctgggagccgccatgtttatgattgagattgcaggtgtgaagctgttgtatacaggtgatttttcgagacaagaagacagacacctaatggctgccgaaattcctaatattaagccagacattcttatcatcgaatctacatatgggacccacatccacgagaagcgtgaagagcgagaagcaaggttctgcaacactgtgcacgacattgtcaacagaggaggcaggggtctcattcctgtctttgctctcggaagagctcaggagctgctgctgattctagatgagtactggcagaaccacccggaactgcatgacattcccatttactatgcgtcgtctctggccaagaagtgcatggcagtgtaccagacctatgtgaacgccatgaatgacaagatccgaaagcagatcaacatcaacaacccctttgttttcaagcacattagcaacctcaagagcatggatcactttgacgacatcggccccagtgttgtaatggcctctccaggcatgatccaaaacggcttatccagagagctgtttgaaagctggtgtacagataagaggaacggcgtcatcatcgcagggtactgtgtagaagggacacttgccaagcacatcatgtctgaacctgaagaaatcaccaccatgtctggacagaagttgccactgaaaatgtcggttgattacatttctttctctgctcatacagattaccagcaaaccagtgaatttatacgtgctctgaagcctcctcatgtgattttagtccatggggaacagaatgaaatggccaggctgaaagcagctctgatcagagaatatgaagataacgatgaagttcacatcgaggttcacaatcctcggaacacggaggcagtgaccctgaacttcaggggggagaagctcgccaaggtcatgggctttttggcagacaagaaaccagaacagggccagcgggtctctggaattcttgttaaaagaaactttaattaccacatactttctccctgtgacctctcaaattacactgacctggccatgagcactgtgaaacagacccaggccatcccttatactgggccctttaatttgctgtattaccagctacagaaattgacaggtgatgtagaagaattagaaattcaagaaaaacctgctctgaaggtgttcaagaatatcactgtcatacaggagccaggcatggtggttctggagtggctggcaaacccctctaacgacatgtatgcggacacagtgaccaccgtgatactggaagttcagtcgaatccaaaaataaggaaaggtgcggtgcagaaggtctctaagaagttagagatgcacgtttatagcaagaggctggaggtcatgctgcaggacatatttggagaagactgtgtcagtgtgaaagatgactctgtcctcagtgtcacagtggacgggaaaacagcgaatattaatttggagactcggattgtagaatgtgaagaaggcagtgaagatgatgagtccctcagagaaatggtggaactggctgcccagaggctgtatgcagccctgacacctgtgcactgactgccttgattcccagcacttggaacttttttac

SEQ ID NO: 1667 - DNA, 2186 bp, Cricetulus griseus
ctgaggaaagctaagaaaagggtctgctggcggttcgcgttgaagacatggagcaaagctacggaggctatggggcatggagtgctgcacctgccaacacccagggtgcatatggaagcggtatggccagctggcaaggttatgaaaactacaactactacaatgcccagaacaccactgccactgtctctgcaggagcgccttatagttatggcccaacctcatgggaggccaccaaggccagtgatggtggcctggcagctgggaactctgccatgcagatgccctcttttgccccagagccgtgcactgacaattccgacacactcattgccaagatcaaccaacgtctggacatgctgtccaaggaaggaggcaggggcgggccagcagcagtgggagggcatgcaggaccgagacagttcctacagcatgatgggcgtgcagggggtgggcacttttggtagcaccatgccttacggatatggccggtcccagactcggatacgggattggcccaggaggagaagggtttgagcgctttggaccagacaacatgggcaggaagcggaagcagtttccaatgtatgaagaacctgatgccaaactggcccgtgctgacagtgacggggacttgtctgaaaatgatgatggagctggtgacttacggtcaggagacgaagagttcaggggggaggatggaactctatgactccaggaagcagagaggagaaaaggaggatgaggacgaggatgtgaagaagagacgagagaaacagaggaggagagaccggatgcgggaccgagcagctgacaggattcagtttgcctgttctgtatgcaagtttcgtagctttgaagatgaagaaatccaaaagcacctgcaaagcaaatttcacaaagagacattgcggtttataagtactaaactgcctgacaagacagtggagttcctccaggagtacatcataaacaggaataagaaaattgaaaagcggcgtcaggaattgttggagaaggaaagccctaaacccaaaccagatccattcaaagggattggccaggagcatttcttcaagaagattgaagcggcgcactgcttggcctgtgacatgctgattcctgcacagcaccagctcctccagcggcatctgcactctgtggaccacaaccataaccggaggttggctgctgaacagttcaagaaaacaagtcttcatgtggctaagagtgttttgaacaacaaacatatagtgaagatgctggaaaaatacctcaagggtgaggatccttttgccagtgagacaggtgatcttgagacagaaggagatgaaaatgtaggaggagagaaggaggagacgccagaggaggtagctgcagaagtcttagcagaggtgattacagcagcggtgagagctgtagagggggaaggagagccagccgcagagcataatgaagtcccagatgaagtggaaggccctgtgaacaccatggagaccagtagtgaccgccacactgaaaagccgctggaagagcgaacctgtgaaacagcgcctgaagacgggaaccctgaagacaaggccagaagtgaggcctttattttagctttggcattgagatagcatgttgcttcccactctggcctcaactcaatcctcctgtctcagcctctggagtactgggaccatgtatattcagccatgctcagctaggctttgctttttataatacactgtattctatgttcctcaccagatatggcagcatcctgttatggatttttgttttgttttttccttaattctgttattcccacctatttagtatttaggaagaaaacatgaaattactccattaatggaaaataaatataaacttccatagctgggatctatctgtaaaaagctcatacagttagtgaagatgtttccatgttcagcaaatagtattcgtttggcagttctgaatcctagaaaggaaggcttagcatgtcttaggtagcattgccaggtttttaggatcagaatggtaaattttctttcccccttttgaaattacaatgctgtgtccgtccttgactgtacacagctcacatcttggaaacatgaaccagtgggaaataactataaaagaggcaataaaatactgcagggattccatcagcactcctgtcaaggagcattact

SEQ ID NO: 1668 - DNA, 2185 bp, Cricetulus griseus
ctgcaccttggcaatgtccattttactgcctcagaagatgaagcccagccctgccaactaatggatggtaccaaggtctctgtcaggacatcagcctcactgctgcacctccaagaggacttgctgctggagactatgcagattcgaaccatcaaggcaggcaagcagcagcaggtattccggaagccctgctcccgagctgagtgtgacacccgcagagactgtctggccaaactgatctatgcacggcttttcaactggctggtatcagtgatcaacagcagcatctgtgcagactccagctcgtggactgccttcataggtctgctagatgtgtatgggtttgagtcattccctgacaacagtctggaacagttgtgcatcaactatgccaatgagaagctacagcagcactttgtggctcactacctcaaggcccagcaggaggaatatgcagttgagggactggagtggtcatttgtcaactaccaagacaaccagacctgtttagatctcctggaggggagccccatcagcatctgttccctcataaatgaggaatgccgcctcaatcggccgagcagtgcagcacaactacagtcacgcatcgagagtgctctggcaggcaagccctgcctcggccataataagctcagccgggagcccagctttgtggttgtgcattttgcaggacctgtacggtaccacacggaaggcctggtggaaaagaacaaggaccctgttccccctgaactgactggactcctgcagcagtcccaagaccctctgctcatgatgctatttcctgataaccctgaagagaagacccaggaggagctgtctggccagagcagggttcctgcattgactgtggtgtccaagttcaaggcctcactggagccacagaccttcctccagaaagaggtcctgagccagttggaggcctgtggccttgtggagaccatccacatcagtgctgctggctttcccatccgggtatctcaccagaactttgtggaacgatataaactgctgagaaggctccgacctcgcacgtcctctggcctccagggcctgtgtcctgccagagggccctctgagcagcctctgtgtgccaaggatgccacgctgccaacccccactacaggacattcctccatgctctgccagctttaattcagacagcaaccactcccagtgacccagctgagaccacacaagtcccactgtactgtggcaggacaaagattttcatgactgactccatgctagagcttctggaatgtgggcgtgcccaaatgttggagcagtgtgcccgctgcatccagtgtggctggaggcggcaccagctccaaaagcagaagaaacagaggcaggccgcagtgctcattcaggcagctattcggtcctggttaactcggaaacacatccaaaggttacacatagctgccacagtcatcaagcgtgcatggcataagtggagaatcagaatggcctgtcttgccgctaaagaactggatggtatggaggagaaacccatgactcaaactcccagttccctgagttcctcgctgcccccagcacacactaacctactgggggcaataatccacctctggcccctgggactggtgctagccaactcagctgtgggtgtgcggggctttcagaggaaactggtggcctatgcctgcctccggcttccctcgagcagccccagcaacaacatccagacagcacaagatcaggctggaatcacatccataagagcactgcctcagggctccattaagtttcactgcagaaagtctccacttcagtatgctgacatctgccctgaaccttcagcctctagtgtttctggttttaatcagattctgctagaaagaaacaggccagtccaagtgtgattcttctacccccacctgcctacgtgatctttagtgcctttgtttctacaaggccatttcctgccagctgccttgccaaagacatctgatcaacacacaactgccaagctattcccacagcgactctgactgcacgcgcaagcaacagttcctgtctgtgagccagggcttggcggtcagaggaccagccagccaggactatggttttagtactggcaggatctgggggggtgacagttaacaaaccaggattggggccacaacgtcccagctta

SEQ ID NO: 1669 - DNA, 2185 bp, Cricetulus griseus
cgggatgctgcgagtgccacgtcccaagtgctacgcggagtcgcggagcgggcggtgcgcgaggcggagcagcgctgagccggccgggccgtacggatcgcccgccgccatgggctcctcgcagagcgtcgagatcccaggcggcggcacggagggctaccacgtcctgagggtacaggagaattccccaggacacagagctggactggagcctttctttgactttatcgtttctattaacggttcaagattaaataaagacaatgacactctcaaggatctactgaaagccaatgttgaaaagcctgtaaaaatgctcatctacagtagcaaaaccctagagcttcgggagacctcagttacaccgagcaacttgtggggtggccagggcttgctgggagtgagcatccgtttctgcagctttgatggggccaacgaaaatgtttggcatgtgctggaagtggaatccaactccccagcggcactggcaggcctgagacctcacagcgattacatcattggagccgacactgtcatgaatgagtctgaagacctgtttagccttatcgagacacacgaagcaaagcccctgaagctctacgtatacaacaccgacactgacaactgtcgagaagtgatcattacaccaaactctgcgtggggtggagaaggcagccttggatgtggcattggctatggttatttgcaccgaatacctacacgcccgtttgaagaaggaaagaaaatttcccttccaggacaaatgactggtacacccattactccccttaaggatgggtttacggaggtccagctgtcctcagttagtcccccatctttgtcaccaccaggaactgcaggaattgagcagagtctgtctggactttctattagctcagctccaccagctgtcagcagtgttctcagtacaggtgtaccaactgtaccattgttgacacaagttaaccagtcccttgcttctgtgccaccagtgaccccagctactacattatcaagtctgatgcctttgccatcagggatgcctaacctccccaacctccccaacctccccaacttcaacctccctgctccacacatcatgccaggggtcggcttgccggagctcgggaacccgggtttgccacctcttcccaccttgcctccccgaaacttatctggcattgcacctctccccatgccgtctgagtttctcccgtcattccctttggttccagagggctcttctgcagccagcgcaggggagccgctgtcttccctccctgccacgggcccaccttctgaccctgtcatgactactgcaaaagcagaggctgcctcctcactcactgtggatatgatgtcccctgcttccaaggtccccagcactgttgaggacagagtcggcgactccactgcaaccaccgagaagcctgtctctgatgcaaatgcttctgagtcttcttaactgggaaccaatcttcacaatcgacgtggtctatttatttaaccgcaggatcatgtctggaaccgcagaccaccattgatttcatactagtttgtaccgtatctgtaggcatcctgtacataattctaaggggaaactacgcaagaggccaagggcttgtctcctaccaagttgggtgaaatcacagccagggaggggtgtgagaatgtgcttgtattttaaacaaccaaaaagttgttatgggtggcttgttgccaggcatctcctgccattctgggatgtacatcttcgggaaagagatggcagggtgcccgctaggttcctatccccactgctactccttgtgtaaggaaatgaaatactttatgcctagtgcccacatgcaacatttcttgtactttgtaaattgtttgcaagaacacagaccacctcactaaactgtaaaaggaaacaagaatttactgttggtctccgtgagtcacatctctattaaggtttacacaaaactccccattggccatgttttgttccagttacacagcacactattaattgaacatctttttattccgcttgtacacggatcttgttctgaactcagaattactcagacaccgtttttgtagctactgctgttgctttagatgcctgtggtaaggtggcatttaaagagagataaaggaggtgctgtgctgtgtagctacttaacagtgtaccgcg

SEQ ID NO: 1670 - DNA, 2185 bp, Cricetulus griseus
agaagagcgagagcggatgatcaagcagctgaaggaggagttgaggctagaggaagctaagctggtcctgttgaagaagctacggcagagtcaaatacaaaaggaaagccatagtgcagaagcctgcagcttcctcagggagcaccgtgaccacccctccccctctagtgcggggtaaccagaacattcctgctggcaagacatcacttcagacctcctctgctcgaatgccgggcagcatcatccctccgccactggtccgaggtgggcagcaggtgtctgccaagctgggaccacaggccagttcccaagtagtcatgccaccacttgtcagaggggcccagattcacaacatcagacagcattcctccacggggccaccacctctcctcctagccccccgtgcctcagtgcccagcatgcaaattcagggacagaggatcatccagcagggactcatccgtgtcgccaatgtccccaataccagtctgcttgttaacatccctcagcccactgcagcctcactgaaggggacaacagttgcctctgctcaggccagctccacccccaccagtgtggcctctgtggttgcatctgctgagtctccagctagtcgacaggctgctgccaagctagcactgcgaaagcaactggagaagactctgctcgagatcccacctcccaagcctcctgctccagagatgaacttcttgcccagtgctgccaacaatgagttcatctacctagtcggcctggaagaggtggtgcagaacctgctggagacacaagcaggcaggatctctgccagcacagctgctgctgtgttatcccgggagccttatatgtgtgttcagtgcaagacggacttcacatgccgctggcgggagaagggcggagttgtcatgtgtgagaactgcatgacgtccaaccaaaagaaggccctcaaggtggaacataccagtcggctgaaggctgcctttgtgaaggcgctgcagcaggagcaggagatggagcagcggctgctgcagcagggtgtgggcaccaccggcacaaaggccgagcctgcagccccacataccacgctgaagcaggtcataaagccccgacgtaagttggcgttccgctcaggagaggcccgtgattggagtaacggggctgtgctacaggcttccagtcagctgtcccggggctcagccacaacacctcgtggtgttctgcacacattcagccagtcacccaaactgcagaatgcagcctcagctacggccctggtaagcaggactgccagacattccgagagagctgtgagcaccagcaagggcaccacttccaactggaaaaagacgaccctgagcacaggtggcacccttgccttcgtcagcccaagcttggcagtgcataagacttcctcagctgtggaccgtcagcgagaatacctcctggacatgatccctccacgctccatcccccagtcagccacgtggaaatagtgtgagcccggcccagctgaggacaggccctctgctctcccgaggcccctggcctaggacacacagaccaccctcctaaccagttgcctgagacagctcaggccttggctatttagccctgcggtgttcagaagagggtgccaccctggtacccgggatcagaaccagggaccctccccgagggccttctccttcctttttgcctttagtttgcccgacaccagcagaaactcggaccttggggccagctctgcctggccagcatgggtaggagctcaccctggacactgtgacatgcccaggccaggctggcacccggagctcccaaagttgagccagggttttgttttcttttggcttttcccgtcttagctccccagtctctgcctcctcatggccatctataggttgaagtttgggttttttgttttttctttttaattggtttcatggtgaaaggcagaagcagcactgtgtgtcaaacctgcccagagcagcctactgctcatctgtagtgactggttgctgtcggatccccaaccagccctggcttccctcgacacaatacagttagggactttaatttaaacccttgttctgcagacacaaccctctgcagacatgcccctgcctcctcctaataaaggctcatttaacccccgtgcctcacttgtgtgcaaatcctccatctctag

SEQ ID NO: 1671 - DNA, 2185 bp, Cricetulus griseus
tggcagtcagagggcatggaggccagcatacttgtggagttggccaagcaggcctcagggcctgtttgcttgctgatggcctccctgctgtccctgctctcagctgcaagtgcttgcaggctgtggaagctgtggccccttcgccttcatcagaagcaagctttccacttgtgaacagcttcagcaccgactccaagcacctctccttcatctttagcacccagaaagcccagagtcccatgcagctgatgaggaaagccaacatgctcgtttctgtgctactggatgtggccctgggcctgctgctgctctcttggctccacagcaataaccgaattggacagctggccaatgccctggtccccgtggctgatcgcgtggctgaggagctccagcatctgctgcagtggctgatgggtgctcctgctgggctcaagatgaatcgggcactggatcaggtgctaggccgctttttcctgtaccacatccatctgtggatcagctatatccaccttatgtccccctttattgagcacatcctgtggcatgtgggcctctcagcctgcctaggactgactgttgccctgtccatcctttccgacatcatcgccctccttaccttccacatctactgcttctatgtctatggtgccaggctgtactgcctgaagatctatggcctctcctcgctctggcgtctgttccgggggaagaagtggaatgttctgcgccagcgggtggattcctgttcctatgatcttgaccagctgttcattgggaccttgctctttaccatcctggtcttcttgctgcctaccaccgctctgtactacctggtatttaccctgctccggctcctggtgatcactgtgcagggcctaatccatcttcttgtggacctcatcaactatactcccttggccttcgactctgccgaccctataggctggctgctggtgtgaagttcagagttctggaacaggaggcaggcaggcccctccgcctcctgatgcagataaaccccctgccctatagccatgtggtgcacacctaccgcctgcctagctgtggctgccaccccaagcactcttggggctccctgtgccgaaagctgttcttcggagagctcatctacccctggaggcagagagaggacaaacaggactgaggagctggacacagccgggccaaccagactctctgtgtgctaaatgtaggcaggccttacctttgagttgctactctggctctcaggccctgtcagcttcagtcctgaactccatctatctagaacaatggctctcaaccttcctaatgctgggactcttagtacagttcctcatgcggtggtgaccccaaccataaaattattttgttgcatttcataactgtaattttgctgttgttatgaatcgtgatgtaagtatggttgagaaccactgctctagcaccagctgtgtggccgccacctggttggttacagtcgttgcactgagcctattgctaggagtgctcagactctgggatatgctggcaggtctccttggctgctttgggtaggaacactcctgggtacctgggtgcactccacaagcctcagcagaacattcccatctggaaaactgaggcagctgctgatcccctgccccagcgaactaatccctcactctgtacttcattgggtttgcttgttgctgctccatggagattgctttgtgaaattgctgctaataagccactgggtgtcctttgcttgaagtaataccatgtggggtaattggatacctgcccaccttagtgccccatgagaggataggccctttggcaaaatattctttcttctctcattgacttcttacaggaccagacagctcccctatggacaggcacttcttttgctcagtgtgtgaatgactttggggaggtggaatggccaggattccctgccacttagtaggattccatgtgagctagtccctagggggtaggaagctttactgccttatggtctagaagtgtccactgtgggcaggaagggcagccagccctgtctgtctcgggcactcaggactatccacactggttcatctgtgcctgcttcccttactgtaggccacagcaacttttaagcacccaatggagggtgttggtgaagatgaatcctgaccctgtggtgacaataaaa

SEQ ID NO: 1672 - DNA, 2185 bp, Cricetulus griseus
cctgtccaccccgtccatcatcccgccggccaccgctcagagcaccttccaccatggccacctcagcaagttcccacttgaacaaaaacatcaagcaaatgtacttgtgcctgccccagggtgagaaagtccaagccatgtatatctgggttgatggtactggagaaggactgcgctgcaaaacccgcaccctggactgtgagcccaagtgtgtagaagagttacctgagtggaattttgatggctctagtacctttcagtctgagggctccaacagtgacatgtatctcagccctgttgccatgtttcgggaccccttccgcagagatcccaacaagctggtgttctgtgaagttttcaagtacaaccggaagcctgcagagaccaatttaaggcactcgtgtaaacggataatggacatggtgagcaaccagcacccctggtttggaatggaacaggagtatactctgatgggaacagatgggcacccttttggttggccttccaatggctttcctgggccccaaggtccgtattactgtggtgtgggcgcagacaaagcctatggcagggatatcgtggaggctcactaccgcgcctgcttgtatgctggggtcaagattacaggaacaaatgctgaggtcatgcctgcccagtgggaattccaaataggaccctgtgaaggaatccgcatgggagatcatctctgggtggcccgtttcatcttgcatcgagtatgtgaagactttggggtaatagcaacctttgaccccaagcccattcctgggaactggaatggtgcaggctgccataccaactttagcaccaaggccatgcgggaggagaatggtctgaagcacatcgaggaggccatcgagaaactaagcaagcggcaccggtaccacattcgagcctacgatcccaaggggggcctggacaatgcccgtcgtctgactgggttccacgaaacgtccaacatcaacgacttttctgctggtgtcgccaatcgcagtgccagcatccgcattccccggactgtcggccaggagaagaaaggttactttgaagaccgccgcccctctgccaattgtgacccctttgcagtgacagaagccatcgtccgcacatgccttctcaatgagactggcgacgagcccttccaatacaaaaactaattagactttgagtgatcttgagcctttcctagttcatccatccccgccccagctgtctcattgtaactcaaaggatggaatatcaaggtctttttattcctcgtgcccagttaatcttgcttttattggtcagaatagaggagtcaagttcttaatccctatacacccaaccctcatttcttttctatttagctttctagtgggggtgggaggggtaggggaagggaacgtaaccactgcttcatctcatcaggaatgcatgtccagtaggcagagctgccacagagtgggtgtatttggtggaggaggcaattttttcttcaggacagttaaaagagcaggtccactgcttggattgacaattcccctataggtagagagctgctagttcttcaggtaaaaccaactttctattccaaatggaagttaggtgaggagttaaaaacaaaagttatatatatggatatgtggatatatgtgtatttctaattgaggaaaccatcctagttactgggtttgccaagtttgaagagcttggttaacaagaaaggatctcttgagtagaggtgggggtgcagtaccaggaaaggtggttatctggggctcagcgctttattactatgtggggtttccctgcccactctgcaggagcagatgctggacaggtagcagggtgggacaccagtgcttgccaccacctgtccctgtgcttaggctaagatgcatatgtatccacacagagttagcaggatggagttggctggtcaacttgaacattgttactgataggggtgggtggggtttatggggtttatttttggtgggactagcatgtcactaaagcaggccttttgatatattaaattttttaaagcaaaacaagttcagcttttaaatcaactttgtagggtttctaactttacagaattgcctgtttgtttctagtgtctccttccacttggctcttggaggaacggaggacaggcagacctggagttaaaacatttgtc

SEQ ID NO: 1673 - DNA, 2184 bp, Cricetulus griseus
ggaaatcccagcaactgtgactgccttctccttgaggacgacactgtgccgctctctcccctcaagtacatggcacagaggcaacagacgtgaaaaacacgatggctgaactcaccaaatacttacatgaaagtgaatgtgccggaggagtctcggaattggggagacgagtccccaaggaccaaaatcacgtggatgaaagcagaagactcctctaaagttagtagtggaacacctatcaaaattgaagatcccaatcagtttgttcctttaaacacgaacccaactgaggtgctggaaaagagaaataagattcgggaacagaaccgatacgacctgaagacagcaggaccacagtctcagctgctcgcaggaattgttgtggacaagcctccttctaccatgcaatttgaagatgatgatcagggcccaccagctcctcctaacccattcagtcatctcacagaaggggaccttgaagaatacacgaagacaatcgaaagaaagcaacgaggcctggacgagaaaaccatgagctgttttccaagagcttcacttccatggacgtgcctgtcatgattgtgaacggcaaggatgagatgcacgatgctgaagatgagcttgctcagcgggtcagtaggttaaccacaagctcgaccatagagagcatcgagatcaccattaagtctccagagagaacccaagaggtcatgtcacctgatggctcgccttcaaagtcaccatccaagaaaaagaagaaattccgcacaccttcttttctcaaaaagagcaaaaaaaaggagaaagttgaggcctaagtagtctttttgtaatttgtatattacaatgtgacattgcacaattaaataccacattttagttcatcgttcatatacagtggtagatcggattggggtatgtagcaaactggacttaaaaaactggaaagaggttttactaaaagaaaaacattatggaaaactttgaaattcatctctttttatatgtccaaaacctaatcagactgtattttatcatggttattattgactgtatcttgggtccctgttgtttcagtgggcactaatggaatgctctaaaagcttctacaacaagaatctgtagctttggtatacactggcatataattttttaaatgttttaagacaagatttgtttggatttttattcatagtatgaaattctctcacctgaagtaactgtttgccaaaaaaagtcattttaataagctataatttttgaagaacttccttttttattagtttagaaagccccttatttttcacagaggggattttgtacacataaatgagttatttggtttaactctgacaaaaataatttttgtatgttgaaatgtttgtgcaccttcagtataaggtgtcatgtgcatctagccaatcagtatttgaaccgtataatgtattctttctcttagttattgctgatggctgaagctgaaaagaagccccggattgctaaaatcctccttctctgccaaaatcaatgtactctgttgatgtttgagttttagagagattaagacgtaccataacttttagaggacagcactagaacaaagcagcaggtctaatcccaccagcaagaaaactaccacttcttgatttttacaaacttaatcttgatttttacaaacttaaaaattcttttaactttctttctactgtaaatacaaatttaaacctaggtttaatatagtgttctccattttcccaagtgatgtcacagatcaatgtaaatggatgatccacaacactttagatctcacgaactactggagtctgttcatctcgtagtggaaactttgagttgctgaactatgtatctgaggattgttttatgttctacatcatttttgttgtattacaatgtgtgtagacacagtaacctgtgaactatccttttccataacttttaaagaatatatatatctaaatgaatgcaatgtgcataaatattttttaaacacaacagtaaactattgcaccttttgctaatgcttctatttacttgctttggcataatgaatgagccagtgaacccagtgtcctgtggagaaatgtgtaaaagttatctgatattgctcttagatgttatgctaattaatgtaaagtcacaaataaacagtattttaaatatatg

SEQ ID NO: 1674 - DNA, 2184 bp, Cricetulus griseus
acctggaagagcaacaatgtcatcagaatccagcaaaaaacggaaacccaaaagtgatccgaagtgatggaaccccaagcgaagggaaacgaaatcgatctgacactgagcaggaaggcaaatactacagtgaggaggctgaggttgacctgcgggaccctggcagagactatgaattgtacaagtatacttgccaggagctacaaaggttaatggccgagatccaggacctgaagagcaagggcagcaaggatgtggctattgaaattgaagaacgaaggatccagagctgtgtgcatttcatgactctaaagaagcttaaccgattagcccacatcaggttaaagaaaggaagagatcagacccatgaggccaagcagaaagttgatgcctaccacctgcagcttcagaacctgctctacgaagtgatgcacctgcagaaggagatcaccaaatgtctagagttcaagtccaagcatgaagaaattgatctggtcagtttagaggaattttattcagaggctccaccaaacatcagcaaggctgaaatcaccatgggagaccctcaccaacagaccttggcacgtttggactgggagctggagcagcggaaaaggctggccgagaagtaccgagaatgtctgtccaacaaggagaagatcctgaaggagattgaggtgaagaaggagtatctgagcagcctccagcctcgactcaacagcatcatgcaggcgtccctcccagtgcaagaatacctgttcatgccatttgaccaggcacacaagcagtatgagactgccaggcatctgccacctcccctctatgtgctgtttgtgcaggccactgcatatgggcaggcctgtgataagacgttgtctgtggcaattgaaggcagtgtggatgaagccaaagctctcttcaagccccctgaggactctcaagatgatgagagcgactccgatgctgaggaggagcagaccacgaaacggcgtcgacccacactggggttcagttggatgacaagcgcaaagagatgctgaaaaggcacccactgtctgtcttacttgatctgaagtgcaaagacaacagtgtgcttcatctgactttctactatctcatgaacctcaacatcatgacagtgaaagccaaagtgacaaccgcggtagagctgatcacccccatcagtgcaggagacttgctgtctcctgactcggtcctgagctgcttgtatcctggagaccatggaaagaaaactccaaatccagccaatcagtatcagtttgataaagttggcatcctgactctgagagactatgtacttgagttaggtcatccctacttgtgggtacagaagctgggtggcctccacttccccaaagagcagccccagcacacagtgatagcagaccactcacagagtgccagccacatggagaccaccatgaaactgctgaagaccagggtacagtctcgcctggctctccacaaacagttcgcatctctagaacacggcattgtgccagttaccagtgactgccagtacctcttccctgccaaggttgtttctcgcctggtaaagtgggtaataattgcccatgaagattacatggagctgcatttcactaaggacatagtagaggctggactggctggggacaccaatctctactacctggcgcttattgaaagggggacagctaaacttcaggctgctgtggtattgaacccgggctactcctccatcccacccattttccgactctgtctaaactggaaaggggagaaaaccaacagcaatgatgacaatattcgggctatggagagtgaagtcaacgtgtgctataaggaactgtgtggccctcggcccagccaccaactcttgaccaaccagctgcagaggctgtgtgtgctgctggatgtctacctggagacggagagccatgatgacagtgtagagggccccaaggaatttccccaggagaagatgtgcctgcggctttttaggggtccaagtaggatgaagccatttaaatataaccatcctcaaggattcttcagccaccgatgatgtccctttctacctctcattccccaaagcccaaccctgggtcctgtgtctctgctctttgctctggccacatgtaattcttgatattttccaaaaacaccagctgattaaaatgt

SEQ ID NO: 1675 - DNA, 2184 bp, Cricetulus griseus
  modified_base (223)..(223): a, c, t, g, unknown or other
tgccaggcctcctctgacagcacgatgggcgacagcgacgacgagtacgatcgaagacgcagggacaaatttcgaagagagcgcagcgactatgaccgttcccgggagagagatgaaagacgccgaggggacgattggaatgaccgagagtgggaccgtggccgggagcgccgcagtcggggtgaatatcgagactatgaccggaatcgaagggaacgtttcncccccctgccacgaacttagccccccacaaaagcgcatgcggagagactgggatgagcacagttctgacccataccacagtggctatgacatgccctatgcgtgggggggggtggggccaggcccggggatgcagagcgtaaggtcaatgataaggaatgaaaagaaagaagacagcaaacaggctgaaaatgacagttctaatgatgataaaactaagaaatctgagggtgatggggacaaggaggagaacaaagaagaggctgagaaggaagccaaaaagagcaagaagcggaacaggaagcacagtggcgatgacagctttgatgagggtagtgtatctgagtccgagtccgagtccgagagtggtcaagctgaggaggagaaagaggagactgaagaagcacttaaagagaaggagaagcccaaggaagaggagagggagaagcctaaggatgcggcgggggcggggctggagtgtaagccccggcccctgcacaagacttgctctctcttcatgcgcaacattgcccccaacatttcaagggcggagatcatttcactttgtaaaagatacccaggctttatgcgcgtggcattgtcggagccccagcccgagaggaggtttttcgccgtggctgggtgacttttgaccgcagtgttaacattaaagagatatgttggaacctgcagaacatccgactccgtgagtgtgaactgagtcctggtgtgaacagagacctgacccgtcgtgtccgcaacatcaacggcatcacgcagcacaagcagatagtgcgcaatgacatcaagctggcagccaagctgatccacacactggatgacaggacccagctctgggcatctgagcctgggacacctcctgtgcccacaagcctgccctcacaaaaccccatcctgaagaacatcactgattacctgattgaggaagtgagtgctgaggaagaggaactactggggagcagtggaggaccccctcctgaggagcctcccaaggaaggcaacccagcagaaatcaatgtggagagggatgagaagctgatcaaggtcttggataaactccttctctatttgcgtattgtgcattctctggattattacaacacttgtgagtaccccaatgaggatgagatgcccaaccgctgtggcataatccatgtccggggacccatgccgcccaaccgaatcagtcacggagaagtgctggagtggcagaagacgtttgaggagaaactaacccccctgctgagtgttcgtgaatccctttctgaggaagaggcccagaagatgggtcgtaaagaccctgaacaggaagtggagaagtttgttacctccaacacacaggaactgggcaaggataagtggctatgtcctctcagtggcaagaaattcaagggccctgagtttgtgcgcaagcacatcttcaataagcacgcggagaagatcgaggaggtgaagaaggaggtagcattttttaacaacttcctcacggatgccaagcgcccagcattgcccgagatgaagccagctcagccacctggccctgcccagatactccccccaggcctgaccccaggacttccctacccacaccagacgccacagggcttgatgccctatggccagccccgccctcccatcttgggctatggagtcccaacaggagggcctccatatccccatggtccgtatggcgctgggcgcgggaactatgacgcttttcgaggccaaggaggatatcctgggaaacctcggaacaggatggttcgaggagacccgcgggccatagtggagtatcgggacctggacgccccagatgatgttgatttcttttgagacatctgccgccctcactctacatctgctgccctctatccccgggaccactttaccccatgagctgacaggttttttgtacgttatttttcctgctagttaaaaaca

SEQ ID NO: 1676 - DNA, 2184 bp, Cricetulus griseus
gaacatggtctctagcgaccggcccgtgtcactggaggacgaggtctcccatagtatgaaggaaatgattggaggctgttgcgtttgctcagacgagagaggctgggccgagaaccccctggtttattgcgacgggcacggctgcagcgtcgcggtgcatcaagcttgctatggcattgttcaagtacctactggaccatggtttttgcaggaaatgtgaatcccaggagagagcagccagagtgagatgtgagctgtgtccccataaagatggagactttaaaaagaacagataatgggggttcctctatattccagaggtacaatttgccaatgtttctacaatggagccaatcgttttacagtctgtccacatgatcgttataataagacttgctatatatgtgatgaacaaggaagagaaagcaaagcagccactggtgcttgtatgacatgtaataaacatggatgtcgacaggctttccatgtaacctgtgctcagtttgctgggctgctttgtgaagaagaagggaatggtgcagacaacgttcagtactgtggctactgtaaataccattttagtaagctgcaggacttcttaagcttcacagattcagatcttcgcaatgacagttacagtcattcccagcagtcatcatcaaccaaagatgtacataaaggagagtctggaagccaggaagggggagtaaatagttttagttctttagtgggtcaccctgtgacctcaactgttacttcacagcccaaaagctttgaaaattcacctggagatttgggaagttccagcctccctacagcggggtataaacgggctcagacttccggtatcgaggaagaggctgtaaagagtggagtgaaggacagcaattttattagaacaggcactcctagtgacattttaggaatgctgaagtcattacaccaacttcaagttgaaaaatcgaagattagaagaacaaattaaaaacttgactgccaaaaaagagcgtctgcagttactgaatgcacagctttccgtgccttttccaacaatagcgaccaatcctagtccaccgcatcagatacacacattttccgcacagactgctcctactactgattcattgaatagcagtaagagccccacatataggaaacagctttttacctgacaattctctccctgtattaaatcaggacttaacttccagtggacaaagcaccagcagttcttctgctctgtctactcccccacctgctgggcagagcccagctcagcaaagcctcaggagttaggtggggttcagcaggtcaatggcgtgacagtaggggcgctagctaccacttggttttattataaaagttggagtatgaaatggggatctcatttgggatagagtgtgcttgttctatggggcagaacctaagttttgagaactgtccaatttcttcttctggagttgtgttcattaaccatgtgattatacagatcctcaactgggctttgcaaatgttgtcttaagaaattcctctgtaatgagatttgtccgttttgtgatcaaattaggatgaagtcacctggtactgctgacagtgatttttctctttcaaaaaaaatgcttttcttattgttaaacctactcttgtaaggctgctgggagaaccagatctattggagtagtcatgctcttgattatgacaatatggcggactggtaggttaaaaaacagttggggatataaccattgatctgtttctgaaatgcatgacttcctagtggaaaagacccagctgcagttggacctccactgtgtgcttagctggaagaacaagctagcactgcagcctgtctcctagtgacgctgcacagttcttacctcacttctgtaaatacggtttgtgaatctgttttgtaatgtgaaaaattcataagataacattgatattttgatttgtaatatttctaattggtagatttaattgaaaagtaaaattaatttattttatatgttcagggggaattttaaagaaagttcaaaccttttgtagataatttaaaagaatcagtgtggtttattttacctgatttaaccactggttgttattctgtaacaatttgtataaatggtaaattttggatgtgctgttattttacttagatgtaaaattcacatgtattaaaat

SEQ ID NO: 1677 - DNA, 2184 bp, Cricetulus griseus
aattattaaagaacaagatgggacggcctggttctggaaggaaagaacacccgtgaagatcgattttcttgcagaagatgaagctttgagtagcatcgctttagagaggcagaagcaaggctagcagcaaagcgggctgcccgggcagaagcaagagacattcgcatgagggaactggaacgacagcaaagagagttggatgaaaagtcggacaaacagtatgctgaaatttacacaagaccttcatctcgaaattctgcctcagcaaccacgcctctaagcggaaactcatctagacggggcagtggagacaccagcagtttagtagacccagacacctcgttaagtgaactgaaggagtctttgtctgaagtagaagagaaatacaagaaggccatggtgtccaacgcacagctagacaacgagaagaacaacctcatctaccaggtagacaccctcaaggatgtcattgaagagcaggaggagcagatggcagagttttacagagaaaatgaagagaaatcaaaggagttagaaaggcagaaacatatgtgcagtgtgctgcaacataaaatggatgaactcaaagaaggccttcggcagagagatgaactcattgagaaacatggcttagttataatcccagacagcactcccaatggtgatgtcaatcatgaacctgtggttggagccattactgctgtgtctcaggaagctgctcaggtcttggagtcggcaggagaagggccactagatgtgaggctacggaaactcgctggagaaaaggaggagctcatgtcacagattagaaaactgaagctgcagttagaggaagaacggcagaagtgttccaggaacgatggcgtatctggggacctggcaggactgcagaatggctcagatttgcagttcatcgagatgcagagagatgccaatagacaaattagtgaatacaaattcaagctttccaaagcagaacaagacataaccaccttggaacaaagtatcagccggcttgaggggcaggtgctgcggtacagaactgctgctgagaacgctgagagaatagaagatgagctgaaagcggaaaagaggaagcttcagcgagagctacggacatcactggacaagatcgaggagatggagatgaccaacagccacctggcaaagcggctagagaagatgaaggccaacaggacggcccttctagcccagcagtaggaaggcggcccttccatctgggcgctcctctaagggccttgcccagagatactgactcttttgtatattgacacaaagcccttcaagtactgtttgagtcttgtcattaaacagccacctttgtattttataatttatgagaatgaagcaggtttgatggtcatgaatttggattttgtttgtagctcacttctacagtgaggactagtctgtgctgttttttagttttcagcattctagaatcacgttttctcaccaccctccaagctgcctccctaactaggcacttgggaggccttggtgtgggttctggaggatggccattctgagtgctgagacacttgttggagacctcaaaacacaagtgccttctccacggtgtgatacgggcttcagagaccagtggccaagattcctactcttcttaccagagcaattatatttcagtgaggaagtattcaggggccaggggagtctgtgtttcacgcaaatttatgtttgcaggaaaaaacttttcttaaaaaattaagatatttaaatttatgtaaaaatgttaggaaaagatatggggagtgtatattaaactttattgcacggggcagagaagtcttttttgtagagacagggtctatgtagcccaggttgcctccacctctagtcatcattgttgggccccttaagtgctgggattccaggcatttaccaccctacttggttctagactaaaaatgcttaagaactttaatttcatctttaaagagcccagtacatgatcctccccctcccctctactgtagccacttcatagggtttgtgattctcttttgtcacaatcaaggtggtttcatgggaatgattattgtagctcaaagtgtttacaaagaaactacatttaggaaaagtctaataaatcaaagcctcttaatctagacttgcaactagataataaagttaactaaaagt

SEQ ID NO: 1678 - DNA, 2183 bp, Cricetulus griseus
cagtgataacgtcaaacactattgtgaggtgccgagcgtgtcggacgtacatcaaccccttcgtgtccttcattgaccagcgtaggtggaaatgcaacctgtgtcatagagttaatgatgttcccgaagagtttctgtacaacccgctgactcggtcttacggagaacctcacaaacggccggaagttcagaattcaactgtggagttcattgcttcctcggactacatgcttcgtcctcctcagcctgcagtctacttgtttgttttagacgtgtctcacaatgcagtggaagctggctatttgtcagttttatgccagtcattactagaaaacttagacaagctccctggggattcacgaacaaggataggattcatgacttttgacagcactattcatttctacaacttacaagaaggcttgtcacagccccaaatgttgattgtgtctgatatagacgacagtattcttgacccttgcttctttggtcatgcatgtccaagtactctgcagggtgcatattctactaccccatccttccactctgctcacaacccttcgcaagcagaaaagttacaaaaagacctcaaacggtacctcaccaggaaaattggatttgaagctgttatgagaataaggtgtactaaaggtctctcaatgcacactttccacgggaacttctttgtccgttccactgacttgctgtctcttgccaacatcaatcctgatgctggatttgcagtgcagctgtcaattgaagagagcctgacagacacttccttagtgtgctttcagacagccctgctctatacgtcaagcaaaggtgaacggagaattagagttcatacactctgcttgccagtggtgagttcactcgcagacgtctatgcaggagtggatgtgcaagccgccatttgccttctggctaacatggctgtggatcgctcggtgtcctcaagcttgtcagatgccagggatgccctggtgaacgctgtggttgaccccctgtctgcctacagctccgcagtgtcaagtgtgccgcgctccgtgctgacagcacccagctccctcaagctgctcccactctatgttttggcgcttctcaaacagaaagcatttagaacaggcacaagcacacgcctggatgatcgtgtgtttgccatgtgccagatgaagtctcagccgcttgttcatctaatgaaaacgattcatcccaacttatacaggatagacaggctgacggatgagggtgccatacatgttaatgacagggtagtacctcagccatcacttcaaaaactgtctgcagagaagctgaccagagagggggctttcctcatggactgtggctcagtcttttacatctggattggcaaaggttgtgacaataactttatagagaatgtgcttgggtaccctgattttgcagcaataccacagaaaatgacacatcttccagaactagacacgctatcatcagagagaactagatcctttataacgtggcttcgagacagccgaccattaagcccagtccttcacatggtcaaagatgagagtcctgccaaaacagagtttttccagcatttgattgaagatcgcacggaggctgcattctcttactatgagtttctgattcacattcagcagcagatttttaagtgaaatccagaagtgcagcagtacagtgctcttctgagagcctgcagactcgaggactgtgtggaatgacatgtcatagtctaaactagataaagtcgtcttcttacaattaacatttctggacttgaactctgacaagagaggccaaagggcagcagtactgtgtcacttgtttgtatgaattactttttaacaggaatgattcatattcatgaaatgaattcaacattttccctgtaaaggcactagagtttcagtacatgagctatagaaaaatatatataatgtacataagtgttacatttgtaaagaaaatataaaatgtaactaagaacatgaattgctaaactgtgctacattgttggatgacaactctttgtcacagctagggaatgaggttgactaatgcatattatgaattgagtccacaaaagaaacacaaaactctttgtaattctgttaaatcttttatgtggatttatttatgatcagcctactaattaaaaatattttgcttga

SEQ ID NO: 1679 - DNA, 2181 bp, Cricetulus griseus
ggttcgtggtgggcagcgccgccttctgccgcaccgccacccgcaccgctcgccccggtcggcggccagagcgaccggctcgcgccccgctccactcccgccgcagccaacggtgcgcccagcggccatgaccgccgaggagatgaaggcggccgagaacggggcgcagtcggcgcccctgcctctcgaaggcgtggacatcagccccaagcaggacgagggcgtgctcaaggtcatcaagagagagggtacaggcacagagacacccatgattggggaccgggtctttgtccactacactggctggctattagatggcacaaagtttgactccagtctggatcgcaaggacaaattctcctttgacctgggaaaaggggaggtcatcaaggcttgggacattgctgtggcaaccatgaaagtgggggaagtctgccatatcacctgcaagccggaatatgcctatggttcagcgggcagccccccaaagatcccccccaacgccacgcttgtattcgaggtagagctgtttgagttcaaaggagaagatcttacagaagatgaagatggtgggatcatccgcagaatacggactcgtggtgaaggctatgccagacccaatgatggtgccatggtagaagtggcactggaaggctactataaggaccagctctttgaccagcgggagctccgctttgaagtcggcgaaggggaaagcctagatctgccctgtgggctggagtcggccattcagcgaatggaaaaaggcgaacgttccattgtatacctcaaacctagctatgcttttggcagtgttgggaaggaaaagtttcagatcccaccacatgctgaactgaggtatgaagtccatctgaagagtttcgagaaggccaaggaatcttgggagatgaactctgaggaaaagctggagcagagcaacatagtgaaagagaggggcactgtatacttcaaggaaggcaagtacaagcaagctttgctgcagtacaagaagattgtgtcttggctagaatacgagtctagtttttccggtgaggaaatgcaaaaggtccatgcccttcgactggcctcacacctcaatctggccatgtgtcacctgaaactgcaggccttctcagctgccatcgaaagctgtaacaaggccctggagctggacagcaacaatgagaagggcctgttccgccggggagaggcacacctggccgtgaatgactttgaccttgcacgagctgacttccaaaaggtcctgcagctctatccaagcaacaaagccgccaaggcccagctggcggtgtgccagcagcggacccgcaggcagcttgcccgggagaagaggctctatgctaacatgtttgagaggctggctgaggaggagcagaaggccaaggcagaggtggctgcaggagaccatcccactgacacagagatgaagggtgagccgaacaatatggcagggaatcagtctcaagtagagacggaagcctagcctgcctctctgcacctgcccacccctgcggctgcctgcctccctgctcccttccctactccaccctgttagttttgtaaaaactgaagaattttgagtgaattagacctttatttttctatctgtttggatgatggttttgggggagggagaagagcaggctgggggtgaactgggggatagttgtagatggtgtcaaccctctttccttccccattacacacgagtgtgcacccttccacacataacgcatcagaaggttaatttatttctccctccctctgttagctccatgtttcaagtggtagaagtgggtgtgatagggatggggtctgataagaagccagggtggggaagttgtcccctgggcagacattttcctcgtatcttccctctctggttgttacccaaacctgcagtctccatgcagatgctaggggcatggggtaaaccactgtgtgtccattgcctcccttgccctgctttcctgagatggtacccctgataatcctctggtatttcggtgatcacctctagacagcaccttccagtatctccgctcctattggtttccctcgtccaggttgtccttgtccccatcccctcagcctctttaatgcacgctgaaggtccaggcacacctcaagtcctgtgcttgagcaataaagtggaaacaa

SEQ ID NO: 1680 - DNA, 2181 bp, Cricetulus griseus
gaaatttaagccaggaaagtggacaattcagtacaacaagctgagcctccagacacctgttccaagtgacattgatatatcacgatcttgcaaaccaaagcccatctgtaacctggcccgagaaattgggctgctcacagaagaggtggaaccatatggggacacaaaggccaaagtcttgctgtccacactgaaacgcctgaagcaccagcctgatgggaaatacgtggtagtggctggaataactccaacacctctgggagaagggaaaagtacaaccacaattgggctggtgcaagcccttggagcccacctgaatcagaatgtttttgcgtgtgtccgacagccttctcagggccccacctttggaataaaaggtggcgctgcaggaggcggctattcccaggtcattcctatggaagagtttaatctccacctcactggtgacatccacgccatcactgcagctaataatctcgtggctgctgccatcgatactcagatatttcatgagctgacccagacagaaaaggctctctttaatcgcttggtaccttcaaaaggaaatggagtaagaaaattctgtgatatccagatccgaaggttacggaggttaggcattgaaaagactgaccccaccacactgacggatgacgagataatcagatttgtaagactggaaattgatccagaaaccataacgtggcagagagtgctggacaccaatgatagattcctgaggaagatcactattggacagtctccaacagagaaaggccacacacgcacggctcagtttgatatctctgtggccagtgaaattatggctgttctggccctcactacttctctgaaagatatgatagagagagtgggcaaaatggtggtggcatccagtaagaaaggcgaacccatcactgttgatgatctgggcgtgagtggagcagtggcggtgctgttgaaggatgcaatcaaacccaatctcatgcagaccttagagggcacaccggtgtttgtccacgctgggccctttgccaacattgcacatgggaattcctccatcattgcagaccggattgcactcaagcttgttggccctgagggcttcgtagtgactgaagcgggattcggagcagacataggaatggaaaagttcttcaacatcaagtgccgatattctgggctccagccacacgtggtggttctcgttgccactgtcagagctcttaaaatgcatggcggcggccccacggtcactgctggactgccccttcccgaggcttacaccaaagagaacctggacctggttgaaaagggcttcagtaacttgaggaaacaaatagaaaatgctaggatgtttggagtgcccgtggtcgtggccatgaatgcattcaagacagatacagacgctgagctggacctcatcgcccgcctctccagagaacacggggcttttgatgctgtcaaatgcacccactgggcagaaggggggcggggagccttagccctggctcaggccgtccagagagcatcacaggcccccagcaacttccggctcctctatgacctcaagctctccattgaggataaaatcaggatcatcgcacagaagatctatggggcagatgacatcgagttgctccccgaagcacagaagaaagcagaagtctacacaaagcagggtttcgggaatctacctatctgcatggccaaaacacacctgtctttgtctcacaacccagagcaaaaaggtgcacctactggcttcattctgcccatccgtgacatccgtgccagcgttggtgctggttttctgtaccctttagttggaacgatgagcacaatgcctggactccctacccggccctgtttttatgatattgatttggaccctgaaactgaacaagtgattggattgttttaaacagatcttctgtctccaagaggctactttgtctggccaagtgtctgttcagacccacagaggaagtgtgcaaaaagaagtccaagaagtcagtccctgccccaaagagcttcagaaatagtgggagtttccgtgaagcttttcacagccttaattcacatcatgtataaattaacataaatcatatcttatttacttagtgaaagtccaaaataaaataattttactaaaaaaaaaaaaaaaaaaaaaaaaaaaaa

SEQ ID NO: 1681 - DNA, 2181 bp, Cricetulus griseus
agttccaccaggtgagaagagtgatgaccatccttttccttactatggttatttcatacttcggttgcatgaaggctgcgcccatgaaagaagcaagcatccatggacaaggcagcttggcctacccaggtgtgcggacccatgggactctggagagcgtgaatgggcccagggcaggttcgagaggtctgtcgacatccctggctgacacttttgaacatgtgatcgaagagctactggatgaggaccagaaggttcggcccaacgaagaaaaccataaggacgcagacttgtattcttcccgggtgatgctcagcagtcaagtgccttttggagcctcctctcctctttctgctagaggaatacaaaaattacctggatgctgcaaacatgtctatgagagtccggcgccactctgacccagcccgccgtggggagctgagcgtgtgtgacagtattagcgagtgggtcacagcggcagataaaaagactgcagtggacatgtcgggtgggactgtcacagtcctggagaaagtcccggtatcaaaaggccaactgaagcaatatttctacgagaccaagtgtaatcccatgggttacacaaaggaaggctgcaggggcatagacaaaaggcactggaactcgcaatgccgaactacccagtcgtatgttcgggcgcttactatggatagcaaaaagagaattggctggcgtttcataaggatagacacttcctgtgtatgtacactgaccattaagaggggaagatagtggatttatgttgtatagattatattgagataaaaattatctatttgtatatatacataacagggtaaattattcagttaagaaaaaataattttatgaactgcatgtataaatgaagtttatacagtacagtggttctacaatctatttattggacatatccatgaccagaaaggaaacagtcatttgcgcacaactttaaaagtctgcattacattcctcgataatgttgtggtttgttgccgttgccaagaattgaaaacaaaaagttaaaaaaaaataaataataaatagcatgctgctttaattgtgaattgataataaactgtccctctttcaaaaaacagaacaaaaaaaaaaaaaacaaaaaaaaaaaaacaaaaaacaaaaaacaaaaaaacccaaccaaaacaatttaccgtttaactaatttaagacactaagtatcttcgttattgttagtactctgttttactgctttcgacttctgatagcgttggaattaaaacaaatgtcaaggtgcataaggcctaacaatgttttgcatgtaaaagtcaccaaatacagccagacacttagatcagagcccgaatccacactgccattgaaatgctactgaatggccctgtggaggctaagtggagctgacataccatttcctggcaatgcaggaggaatttctgagtggccatcctgaggtctaggtggaggtggagaatggtacttgagacattcctaaaaggaaggcacaaagcacccttcagagtaggctctggaatgatgtgtcaagttgcttagacctcctgctttaagtgcctacattacctaacagtgctcaagaggttttcaattggaaaacctcactcaaatccatttatgccctccatccgttcctaaattgtgtagacagttggattaacctggagcgggtttggatccaaatgtgacatttgtgatgatgcaattaatgcaatgatagaaaatgtttgctatgaggatacttatttgttttgtaacctagacttaaggaagccttaggttttgttctggttctgttctgttcttgttttgtttttaagtcttgctgtggtctcttttttggcagaaatgtttcatgcatggcagcagacctgttgcttttttatagtgattcccattgaaactgtaagtaaaatgtctgtggccttgttctctctatggtaaagatattattcaccatgtaaaacaagaaaaatatttattgtattttagtatatttatataattatgttattgaaaaaaaattggcattaaaacttaaccacatcagaagcctattgtaaatacaggatctatttaagtgtaccaattaacatataatatatgttttaaatatagaatttttaatgtttttaaatatattttcaaagt

SEQ ID NO: 1682 - DNA, 2180 bp, Cricetulus griseus
ttgccagagactgatcagctgctgggcagtgccaatgtggtacctgaggctctgcagcgctttgccagggcagctgctgattttgccacacatggcaagcttgggaacctggagtttgctcgggatgcccgtgggcggccagatgtggctgcctttgacttcacaagcatgatgcgggcagagagttctgcgcgtgtgacaagaaaagcatggtgcccgcctactgctggggctggtgggagactgtctggtggagcccttctggcctactgggcactggagtggcccggggctttttggcagccttcgatgcagcctggatggtgaagccctgtatgacgtggtggacaaggagcatgtgcagaggaagggtgacaagaccgactcagggaaggcagccacagggtcagcaggcactgaggagctcctgcgctggtgccagaagcagacagctgggtttcctggagtccatgtcacggacttttcttcctcctgggctgatggacgagctctgtgtgccctggtgcaccgcctacagcctggcctgctggaaccctcagagctgcagggcatgggagctctagaagccaccgcctgggcactgaaggtagcagaacaagagctgggcgtcaccccagtgctatccgcacaggcagtagtggtaggcagtgacccactgggcctcattgcctacctcagccacttccacagtgccttcaagaacatgccccacagctcagcaggccctgtcagccaggctccttctgggacccccaatgctatacttttccttggtaaactgcagaggaccctacaacggacccgggccaaggtagaggctgagactccacgtactgaggagccccctgtctctgagcccagtgtacccccatcactgccatctgaacaccaggaggctggggcagaggatttgtgtgaactttgtgggaaacacctctacatcctggaacgcttctgtgtggatggccatttcttccaccggggctgcttccgctgccatacctgtgaggtcacattgtggccaggtggctataggcaacatccaggagatggacatttctactgtctccagcacctgccccaggagggccaaaaggaggctgacagcgatggaagtccagagaaccaggagctccctacaccagatgaccacagcatgcagccaggcccctcacctcctgtatctcctgtggagagggtcagccctgtcccaagccccagccagcctacccgtcggctgatccgcctctccagtttagaacgcctgcggctgtcctccttggccattatccctgacccaggaacagagcctccacccaagcccccacgaagctgctctgccttggcccgccaggctctggagggcagttttgtgggttggggtgtgccagtccaagcgccacaagttcctgaggccacagaggtggaagaaagtcccttttccagtgaggaagaggaggaggaagaggaagaaatgcctttggagccagacttagagcagactctactgaccattgctaagaactcaggcaccatgactaagtacccgacatggtatcgaaccctcatgcgccgagccaaagaggaggagatgaagaggttttgcaaggcccaggccatccagcgaagactacatgagattgaggctgctatgcgggacctggagacggaaggcacaaagctggagctggccttgaggagacagagcagctctccagaacagcaaaagaaactctggctagagcagctgctacaactcattcagaagaaaaacagcctagtatctgaagaggctgagctcatgattacggttcaggaactggacctggaagagaaacagtggcagctggaccaggagctgcgaggctacatgaatcgggaagaaaccctgaagacagaggccgatcgtcagtccgaggaccgggtcctgaggaagctgttggatgtggtgaaccagcgggatgccctcatccgcttccaggaggaacgaaggctcagtgagatggcttcagaaacgggggcccagggctagaaggtgcttagctctatgcctgctccctgccctgtaagcagacatcatccaagggcagtacctctgccatctggactgtctagtcagaggcttcgttgttgaaaataaacgtgttatggccatagaa

SEQ ID NO: 1683 - DNA, 2180 bp, Cricetulus griseus
ttttttacttcaattggccagatgactgatttgatccatactgagaaagatctggtgacatcactcaaagattatattaaagcagaagaggacaagttagaacaaataaaacaatgggcagagaagttagaccgactgaccaatacagcaaccaaagatccagaagggtttgttgggcatcctgtaaatgcattcaagttaatgaaacgtctgaacactgaatggagcgagctggagaatctggtcctcaaggatatgtcagatggctttatctctaatctgaccattcagaggcaatacttccctaatgatgaagatcaggttggagcggctaaagctctgattcgtctacaagacacctacaatctggacacagacaccatctcaaagggcaatcttccaggagtgaaacacaagtcttttctaacagccgaagactgctttgagttgggcaaagtggcctacacagaagcagattattaccacacggaactgtggatggaacaagcactaatgcagctggaggaaggcgaggtttctaccatagacaaagtctctgtcctagattatttgagctacgccgtgtaccagcagggagacctggataaggcgctttcactcacaaagaagcttcttgaactagatcctgaacatcagagagctaatggtaacttaagatattttgagtatataatgactaaagaaaaagataccaataaatctgcttcagatgacccatctgatcagaaaactacaccaaagaaaaaagggattgctgtggattacctgccagagagacggaagtacgaaatgctgtgccgtggggagggtatcaaaatgactcctcggagacaaaagaagctgttctgccgataccacgatggaaaccggaatcctaaatttattttggcaccagccaaacaggaggatgagtgggacaagcctcgtattattcgtttccatgacattatttctgatgcagaaattgagattgtcaaagacttagcaaaaccaaggctgagccgagctacagtacatgaccctgagacggggaaattgaccacagcacagtacagagtatctaaaagtgcttggctgtctggctatgaagaccctgtggtgtcaagaattaatatgagaatacaagacctcacaggactggatgtttccacagcagaggaattacaggtagcaaactatggagttggaggacagtatgaaccccattttgactttgcacggaaagacgagccagatgctttccaagagcttgggacaggaaatagaattgctacatggctgttctatatgagtgatgtgtctgctggaggagctactgtttttcctgaagtaggagccagtgtttggcccaaaaagggcactgctgtcttctggtataatctgtttgccagtggagaaggagattacagtacacggcatgcagcctgtcccgtgctagttggaaacaaatgggtatccaacaaatggctgcatgaacgtggacaagaatttcgaaggccatgcaccctgtcagaattggaatgacagacaagctcccctcctcgctcctgttgttctctaatccgcctggcacaattgctgattataactttcagaagtttacagctgactaacactccattattaatttggtcatgaacttcatcctgtgttttgactgtggacaatcacttattttgtggggtttttttgtttttaattaacgatcacattatgtaaaattttgcagttcagttatcacaggatacaggacatttaaaatgaagaatcctaattttgttgtttaaaagacttttttattccacgttcataattcttattatttaaagaaactatttttaccaaatttccctcctcaccactggtgaattcaactggtttgagaaaactactttgttcaaaaagtcctgcatagcagaactgcccctcacagctgagatgctcagacttagacgttttcttcaatgactgatcatgtccagagacttgttcagcaggtggtggtgttggcattctgagtaaacactgtgccttaggagactgggagttaaatgtacaggtccttgtaatgatgagtgagggagttgattttaaaagaaatctctttataaaagccttagcaaaaaaaaaaaaaaaaaaaaaaaaaaagttaaaattaa

SEQ ID NO: 1684 - DNA, 2180 bp, Cricetulus griseus
agtcggatctgtctctcatcattgcccagatagtccagaaactcaagggctccaatttgtacgctcagctggaacggcaggcctgggcctgccttcagagacccgaggtcagacttgagtcactcaaagaagatattaaggaattctttaaaatatcaggttgggagaagaaacttcagaatgctgtttatagtgaactgaatgtgtatcctttgcccagtcatccttctgcacctcctgagcatctcaaagaacctttggtgtacatgaggaaagcacagggaagctgggaaaaaaagaatattgaagagtttaaatagtatgtgcactgaactgagtatcccattggcacgaaagagaccggttggagaacagaaagaacttctcaataaatggaatgaaatgggaactgatgagccagatttaagcctttttcgacctgtctatgcacctaaggactttcttgaggtattaattaatctccgcaacccaaattatgaaaatggtgattctcttagttttaggactcatttgggtttaattcaagttcctctgaaagtaaaagacatccctgaattgaaagaatgctttgtagaacttggcttaagtacaggacaactgggtatagatgattctacacaagtgcctcctgaactttttgaaaatgagcatgtgcgtattgggcaaaaagttctattgcagcaggatagcgctgctgcccagcagtacatccgacaaggaagtcccacggcactgagagctgagctctgggcactcattttgaatatctccagtcaacctgaggacatcctgtattatgagcagcttaagaccaacgtgatacagcatgaccttttggtggacagtctaatttataaagatgtgaagctgacagcaagcaacgatgattattattttgtatttgaagattatttatatcaggtattactttgtttttcacgggatacgtccgtactgggtcactttgcatacaacagtgcttcaccaccgaaatcatacatcagaggaaagctagggttagaagaatatgctgtcttttatccaccaaatggtgtaatccctttccatggattttccatgtatgttgcaccactgtgttttctgtatcatgaaccgtacaaattgtatcagatattccgtgagatgtacgtccgctttttcttcagactccactccatctcctctcatccttctggtattgtgtcactctgcttgctgtttgaaactcttcttcaaacatatcttccccaactcttttatcatctgagagaaatcggagctcaaccacttcgtatatcatttaaatggatggttcgagctttttctggatacttagctacagatcaactcttgcttttgtgggatagaatcctaggctacaactctctggaaattcttgctgtgctggcagctgccgtgtttgctttccgagcagtgaacctgatggaggtgacatcactggctgcagctgaagcagttctggctgacctttctactttaaaagttatgcctcttcttcaaatttttctgtttgctactgtcacctgatcttcgaggtcactgacaacacatctagtttttcattagcaactaatcatgaactatgcaaactctgcatacaaccaaaattaaactttgcatataagccaataaagatcatgttccatcctcagttaaagctaagaagtttttcacttttgaaacaataaccctgcacaccaaatactgcgcttgcatgctgattgatgattgtcaagagagaagcaatagacatctcttctgctgagccaagcatcctacaggcacagattcctaacttgtaacaggcacgtaccatatatgcaataagaactaaaggcactataataaacttcaagaggtaacacaacttcttgtcggtttgtaaacttctcctagataatagttctcttttataaattgcccctcactaaagccaatgatgggataggacatgaaaatactgggaaatatataatgtgtttgagtgggaattcaaatgtgtctttggttattttttattaattttatttatgtatggactcactgtgtagcagaggatgactgaattccagatcctcctgcctccatctgccaagagctgggattacatgtgtgttccatcccacctgcctccatct

SEQ ID NO: 1685 - DNA, 2179 bp, Cricetulus griseus
ccaccccgcggggacctgggtgccccacagaaccccaatgccaaggctgctggggtccaggaagatccatttcaactggctgccccctcccggcaagccaatggggtacagggtgaagtactggatccagggcgactctgagtctgaagcccacctgctggacagcaaggtaccctcggtggagctcaccaacctgtatccctattgcgactacgaaatgaaggtgtgcgcctacggggcacagggtgaggggccctacagctccctggtgtcctgccgcacccatcaggaagtacccagcgagccggggcgactggctttcaatgtcgtctcttctacggtgacccagctcagctgggctgagccagctgagaccaatggagagatcacggcctacgaggtctgctacggactggtcaacgaggacaaccggcctattggacccatgaagaaggttctggtggacaaccccaagaaccggatgctgcttattgagaatcttcgagaatcccagccctaccgatacacagtgaaggcgcgaaatggggcaggatggggacccgagagagaggctatcatcaacctggccacacagcccaagcggcccatgtccatccccatcatcccagacattcccattgtggatgcccagggtggcgaagactatgaaagcttcctcatgtacagtgacgacgttctgcggtccccagccagcagccagaggcccagtgtttctgatgacactgagcacctggtgaacggccggatggactttgcctatccaggcagtgccaactctctgcacaggttgaccgcggccaatgctgcctacggcacacatctgagcccacacctgtcccaccgagtgctgagcacatcctccaccctcactcgggactaccactctctgacccgcacagaccactctcgctcaggcacacttccgcgggactactctaccctcacttcagtttcctcccagggcctccctcctatctgggaagataggaggagcaggcttccgctgtcttggacccttgggtcctggagccgggctcagatgaagggtacccccgcatccaggggttcaccagactcaataatcctggctgggcagtcagcagcaccctccaggggtacagagtcccatggggccgtgggtgtgcccgacacacccactcggctggtgttctccgccctggggcctacatctttgaaagtgagctggcaggagccacagtgtgatcgagtactactgggctacagtgtggagtaccaactactaaatggcggcgagttgcatcggctcaacatccctaaccccggccaaacctcagtggtggtggaagacctcctgcccaaccactcctatgtgttccgagtgcgggcccagagccaggagggctggggccgtgagcgagagggtgtcatcaccattgagtcacaggtgcacccgcagagccctctctgccccctgccaggctcaaccttcaccctgagcacccccagtgccccaggcccgctggtgttcactgccctaagcccagactcgctgcagctgagctgggagcggcctcggaggcccaatggagatatccttggctacctggtgacctgtgagatggcccaaggaggaggatcagccaccacattccgggtggatggagacaaccttgagagccggctgacagtacccggtctcagtgagaatgttccttacaagttcaaggtgcaggccaggacaactgagggcttcgggccagagcgtgaaggcatcatcaccattgagtcccaggaaggaggccctttcccgcagttgggcagccactctgggcttttccagaaccctctgcaaggagagtacagcagcataaccaccactcacagcacgaccacggagcctttcctcatagacggactaaccctgggatcccagcgcctcgaagcagggggctccctcacccggcacgtcacccaagaatttgtgagccggacactgaccgccagtggatctctcagcactcacatggaccaacagttcttccaaacctgaaacccccaggaaccacccgggcccctccttgccttctctccctagctccttcttcctctgctgctccacccaccttcatgctgaccacagagccagcccctctagcgagagagcaggggtaggtgc

SEQ ID NO: 1686 - DNA, 2179 bp, Cricetulus griseus
caggcagctcatcagccagattggtaatgctatgggctatataagaatgataagatctggtggtcttcattgtagcagcaatgcccattagattcgtgcctgatcttgaagacattgtgagttttgaagagctagtaaaggaagaagcaaaccaatgaacctacactcagaagagattggaggtctatctacaggaatttgaactgctttatttctcactgagcagtgcaagaattttcttcagagcagacaagactgcggctgaagagaaccaagaaaagaaagagaaggaagaggaaactaaaacaagcagtggagatgtacctgagggctctgtgtctacggatcctgttgtgaaatgatggtatgaaatcatcagaattgtcatacttttccagtgacatggatgatatagactgcttgataaattgtcatttcctgggtcacatcatggaaagttctgtatggcagtactctagagtcaagcccattttatttctaatgctctagttatcaagggctgagaagcagatattaaaattggatctttgtctggagtgtaggctgaagatgcccctgcaagactctttacatgaagctctggaagggaaagtccagattccctgtgtgcttgtcatttgggtgtgtctgtgatccatgttcatctcaaatcatgggaaagtcagtgcatatactgtgtacacagccagtaaatactcgatttaaaagagttgagcttgaaatttatgaaacatctatatcaaagactgtgagtctgcattgatgctagaggtgaggcggggtgaccgtctgtgcagtgtggctaactggtgatccttcctgtgttgttcaattctgtatgactcacatgagctgctgatgtctttgatgagacattttataatagtttacattgttttgggaacatttatccttcaacagttgctttaaatttaagatttacttaatcttcaaagaaaactcagattaagccatagactcccacttgaagcttcactaagtctgaaagcattctgtgatactgggggaaaaaagaatgaattatcctacatccaaactcaggtttcttcattacattaggttgaaattttggtggcagtttagacagattttttttttactttaaatccagtataatctaagacatatgattaaataataactgcactatggcaggcttaatttaccactgtgagaatgagcctagtaagtcactttctgattttaaaagaacgaaagattgtgagtaaattagttcccaacaagctactagctttatttttgtaaagtatgctagtaaatagttaagtggattaatcatggcctttttgaacgtttaataatatgatgccttttggatgaaaagaatggtttaaaactttaaatgtaatgcagacattttttggaaatgcttgtttttctattacatttgcctgcttaaccatttctttggataaaacttgcaaataatcctaacacttagaattctgacattgttccttagttccagcttttggagtggagatatagggctgtgcctggacttactggttaggcttggtaactttcccagcccaagctaaatactatgactgttaggtcagaagaaccagaatagattggaaatggtttttattatataaacgtggcttagagaattatgaacaaaggatggattaaaggcatttaatgtttgtaattgatactaactgtagagatggccctaaagcatgctgcataattaataatttatattttcattattataaatgtttatattaatgatactggatttgattatatcagattagtcaccattttatagtaccagtattttaatgtcactacagtctgggtaaattataataagtttgtgtatttgaaataaaatctctgaagagatttaaatggtgttaaactgcagacagagcaacagggcttcagtgtattcatgcttgagttaatgtatacattggatgatgcttttccttgctaactattttttcacgaatactgtaacttaaatattaacatgagtgttttgttgtaaattcacagaaaacttaatgatgttccaattctcaggaattaagagctaaccataacattgtcagttctaattagattttgtaaaagacagtaagtttgttatctcact

SEQ ID NO: 1687 - DNA, 2179 bp, Cricetulus griseus
ttgccacctagcttcatcagtcaggagatccaggtccttagagtagttaagaattttgagcgcctgaactctgactttgacaggtatcttctgttgatggatctgcaagatagaaatgagaagctcttttatagtgtgctgatgtctaatattgaaaaatttatgcctatcgtatatactcccactgtgggtcttgcatgccagcaatacagtttggcatttcggaagccaagaggcctctttattagcatccacgacaaagggcacattgcttcagttcttaacgcatggccagaagatgttgtgaaggccgttgtggtgactgacggagagcgtattctaggcctgggagaccttggttgtaatgggatgggcatccctgtgggtaaactggccctgtacacagcctgtggaggggtgaatccacagcagtgcttacctgtcattttggatgtgggaacagaaaatgaggagttgcttcaagatccattatacattgggctgcgacagaggagagtgagaggtcctgaatatgacaagtttttggatgaattcatggaggcagtttcttccaaatatggcatgaattgccttattcagtttgaagactttgccaatcggaatgcatttcgtctcctggacaagtatcgaaacaagtattgcacatttaatgatgatattcaaggaacagcgtctgttgcagttgcgggtctccttgcagctcttcgaataaccaagaacaagctctctgatcagacagtgctgttccagggagctggagaggctgccttggggattgctcacctgatcgttatggccatggagaaagaaggtttgtcaaaggagaatgctataaaaagatatggttggttgactcaaaaggattaatagttaagggacgtgcttctctcacagaagagaaggaggtgtttgcccaagaacacgaagaaatgaagaacctggaagccattgttcaaaagataaaaccaactgccctcataggagttgctgcaattggtggtgctttcacagaacaaattctcaaagatatggctgccttcaacgaacggcccatcatttttgctttgagtaatccaaccagcaaagcagagtgttctgcagaacagtgctacaaagtgaccaaggggcgtgcgatctttgccagcggcagtccttttgatccagtcactcttccagatggacagacactctaccctggccaaggcaacaactcctatgtgttccctggagttgctcttggggtggtggcctgtggactgagacacatcactgacaaggtcttcctcaccactgctgaggtcatatctcagcaagtgtcagataagcacctagaagagggccgactctatcctcctttgaatacaattcgagatgtttcattgaaaattgcagtacagattgtgacagatgcatacagagaaaagatggccactgtttaccctgagcccccaaacaaagaagaatttgtctgctcccagatgtacagcacaaattatgaccagatcttacctgattgctattcttggccggaagaagcccaaaaagtgcagaccaaagtcagtcagtaaacacaacagctagaatttttaatttactaataagatcttgaagtttttgtaatttctaagggttggaatcttttatgttgattaatagtatacttagaataaggtgactttagtttaacaatcaaatccttgaaagtatattagagtaagcctcacacttgacggttttgtttcacttactctggttatttatgttttctgttttcattattctctttacaaattctattgaaaagctgttgtacgtgctactgagaaacttatcactgataatgtaggaagctaatggaagatccaaactataataaattaatgtagtgtaacttcatcttgttaatgtctacagttctttcttgaccattttgctaaaatcttttaaaaagtaaagataaacacaaacttaggcatagctgaacttttactaaacagaaacactacttggctgcctagagaaaattcttctccaggtgtagtttttgggaaagattcagaattcctatctatttcttgtctgtttccatgttgtcaaatagttttaactgaatgtatttacctatgcaaaagatttattaaagcatagaaaacatgaa

SEQ ID NO: 1688 - DNA, 2178 bp, Cricetulus griseus
tgtactggcagaccctgggctcggtcccgggcgacggagggtaggatcagccagaggtgggctcgagtcccgcacctcctgcgcagccaccccatgcccgacgggcgtgagagcgggacctggccgaaggtgtgccggggttgaaagaagcggcctgcatgctccgctgggcccccagcccattgcctggaagagcccactctccctggaagaaagaccatccttgaagaggatgactgagacgttatgggccacgcactgtgtgtctgctcccggggaactgtcatcattgataataagcgttacctcttcatccagaaattgggggagggtgggttcagctatgtggacctagtggaggggttacatgatggacacttctacgccctgaagcgaatcctgtgtcatgagcagcaggaccaggacgaggcccagagagaggcggacatgcatcgcctcttccaccatcccaacatccttcgcctcgtggcttactgtttgaaagaacgaggtgctaagcatgaagcctggctcctgctacccttcttcaagagaggtacactgtggaatgagatagaaagactgaaggaccaaggcaacttcctgactgaagaccaaatccttccgttgttgctgggtatctgcagaggccttgaggccattcatgccaaaggttatgcgcacagggacctgaagcccaccaatattttgcttggtgatgaggggcagccagttttaatggacttggggtctatgaatcaagcatgcatccaggtggagggctcacgccaggccctagctctacaggactgggcagcccagcggtgcaccatctcctaccgggcacctgagcttttttctgtgcagagccactgtgtcatcgatgagcggactgatgtctggtccctaggctgtgtgctttatgccatgatgtttggggaaggcccttatgatatggtgttccagaagggtgacagtgtggctcttgctgtgcagaatgaactcagcatcccacaaagccccaggcattcttcggcattgcgacagcttttgggctctatgatgactgtggacccccagcagcgccctcacattcctgtcctcctcagtcagttggaggcaatgcagcctcctgctcctggccagcacaccacccaaatctgatttgggaagatgaccttgatgaagttttcatccttcactggaactccttccattctatccaggatggctgttatagtttaggggcaaggatggtgggtccttgtgttttctgctctcttatcccagtacctgggctaggagcctagggtgagttgggggagagtgaaacaaagtagggctcaaagctggactgctgggcgcacatcatgttctgcctccaaatctggtagcaggagaatacataaacaggagaataaagtaaaaaccgtgtattttaggtcattgtgtctggagagaaaaagaacgaaccgtttagttaccatttccaagggaatagcctgggaagagggactggtgtgatggcaaaggcagatagagttcttaagatttgactgcttggcagcagacaggtctttaagcttcccttggtcaaaaccagagtctccagcttaagctggttttctgcctgtactgagaagtgggaccagggtccctttgaaagcacactccactagttctgtcactcattctgaaggtgggtagcttagaacagcccagcccagcaggtttgccaactccatgacctctggatggaagcccacccctacatgctgacgtcaacctgagtcctagggtgcctattagcgaagtataatttttccctagggtccaggcaggcttccaccccaagcagaggctgaggccaaaggaacacaaacagaggggagacgtcctgacttttaatagcatagctcaagccccagtaagcaagatagacagcaagctctgcaaagctgctggaggtgtgatggcacaaacaaccaggagattgccttgttcccgcccatccccccaagtttgtgagggtggctctatgcccaggaactttgggctggcccagtccccattcctaaaccctcagtgtacaacgaagcttgggccaggccttgcttctaaagctgttgagtgaagcagcagcagcaagagcaaaagcagtcgatcatccaacacaga

SEQ ID NO: 1689 - DNA, 2178 bp, Cricetulus griseus
tctttctgagcctgggccctgcagatgtgctggctgctgggctggtatgccgccaatggcaggctgtatcccgggacgagttcttatggagggagcagttctaccgttactaccaggtggctcgtgatgtgccccgccacccagcggccacatcctggtatgaggagttccgacggctctatgacatggtaccctgtgtggaggtgcagacactgaaggagcacaccgaccaggtcctgcacctcagcttctcccactcagggtaccagttcgcttcctgctccaaggactgcacagtgaagatctggagcaatgacctgaccatctcgctgctgcacagtgcagatatgaggccatacaactggagctacacccagttctcccagttcaaccaagatgactcattgctgctggcctcaggggtgttcctggggccacacaactcctcctcaggcgagatagctgtcatcagcctagactccttcgccctgctgtcccgtgttcgaaacaagccctatgatgtgtttggctgttggctcacagaaaccagcctcatttcggggaacctgcaccgcattggagatatcacctcctgttcagtgctgtggctcaacaatgcctttcaggatgtggagtcagagaatgtcaacgtggtaaagcggctctttaagatccagaacctcaacgctagcaccatccgtacagtaatggtggctgactgcagccgctttgatagcccagaccttctgctggatgctggtgaccaggctgggctcccctgccgagtctttgacctaggtggggacagtgaagaagaggcccctgacccgggtttgcacacctctggttctggccgtgtcaaggaaggtgtgcggcacatgttggataatgtgttggatggacatgcacagctaacagattgtgcactggagaccaaggtggctgagctgctggcccagggccataccaagcccccagagtgtagtgatgctgacaccaggaacaagtacctcatcttcaccactggctgcctcacctactcaccacatcagatcggcatcaaacagatcctgccacaccagatgactacagcagggcctgtgctgggtgagggccggggctccgatgccttctttgatgccctggaccatgtcattgacgtgcacgggcacatcattggcatgggcctgtctcctgataacaggtacctgtatgtgaatagccgtgcctggcctcctggctcagtggtagttgaccccatgcagccaccacccattgcagaggagattgacttgctagtgttcgacctcaagactatgcgggaggtgaagcgggctctgcgagcgcaccatgcctacacgcccaatgatgagtgcttcttcatcttcttagatgtcagcagggattttgtggccagcggggctgaagatcggcatggctatatctgggaccgtcactacaacatctgcctagccaagctgcggcatgaggatgtggtcaactcggtagtctttagcccccaggagcaggagctcttgttgacagccagcgatgatgccactatcaaagcctggcgttcaccacgcactgttcgtgtcctccaggccccacgcccacgcccacgcccacgcccacgccccttcttctcctggtttgccagccataggcgctgaaggcatcagtgacttgagccatttgaacccactggggaaaatgataccccatggttcttcactgcattggggcagagtagctcatagcagtaatgccttaggaggggacagcctgaccccagcacactcacacacacacacacacacgcaacctgctcacttagccatcaggctcagcattagggtagcccttgttggcagcaccagagatcccatgtcagcctcttggccagcttggggtatatgggacaatggaagtcctgttcttcacttaccctcttcccctgggctcacagagctccaggctgaccactacctggttaccttttatgctcagcaaaacccacacccttggatatcccgagtgtaccctgggtgacaggccataggctctggcctctgataatttgatttacgctactgattgagtggcctgctgtggaccaggggtgctgcatgttgcactcattaactgtttgggttaatgaataaacagttggcaaca

SEQ ID NO: 1690 - DNA, 2178 bp, Cricetulus griseus
aggaatgggtgaatttaaggtccatcgagtacgtttctttaattatgttccatcaggcatccgctgtgtggcttacaataaccagtcaaacagattggctgtttcacgaacagatggcacggtggaaatttataacttgtcagcaaactactttcaggaaaagtttttcccaggtcatgagtctcgggctacagaagccctgtgttgggcagaaggacagcggctctttagtgctggactcaatggagaaattcttgagtatgacctacaggcactaaacataaagtatgctctggatgcgtttggaggacctatttggagtatgaccgccagccccagtggctctcaacttgtggttggttgtgaagatggttctgtgaaactatttgaggtcactccagagaaaatccagttttcaagaaattttgatcggcaaaaaagtcggatcctgagtctcagctggcatcctgctggtacccatattgcagctggctccatagactacattagcgtgtttgatgtcaaatcagggagcattattcgtaagatggttttagacaggcaacacctgggagtgacaaagtcaaggtgtatcgtgtggggtgttgccttcttgtctgacggcactgtcataagtgtggactctgttggaaaggtgcagttatgggactcagctactgggacacttgttaagagccatctcatcgcaaatgctgacgtacagtctattgctgtcgctgatcaagaagacagttttgtggtgggtacagccgaaggcacagtattccattttcagctggtctccgtgacttccaacagcagtgagaagcagtgggtacggaccaaaccattccagcatcacactcacgatgtacgcactgtggcccacagcccaacagctctgatatcaggaggcactgacactcaccttgttattcgtcctctcatggagaaagtagaggtgaagaattatgatgctgccctccgaaaaatcacttttccccatcgacgtctcatttcctgttcgaaaagaaggcagcttctcctcttccagtttgctcatcacttggaactttggagactaggatctacacttgcaacaggcaagaacggagatactcttccactctctaaaaatgcagaccatctactgcacctcaagacaaagggtcctgagaacattatctgcagttgtgtttcccagtgtggaagttggatagcctattctacagcatctcggttttttctctatcgattgaaatatgaacatgacaacataagcctccaaagagtttccaaaatgccagcattccttcgctctgccctccatattttgttttctgaagattcaacaaagctctttgtggcatcaaatcaagggtctctgcatatcatccatctgctggaaggaagcttcaagcacttgcatactttccagcctcaatcagggacagtggaagccatgtgtcttttggcagtcagtccagatgggaattggctagctgcatcaggtaccagtgctggagtccacgtgtatgatctgaatcatctaaagcttcactgcacagtacctgcttacaactttccagtgactgctctggccatcgcccccaataccaacaatcttgtcattgcccattctgaccaacaggtatttgagttcagcatcccagacaagcagtatacagagtggagtcgaaatgtccagaagcagggatttcaccagctgtggctccaaagggatactcccatcacacacatcagctttcatcccaagagacctatgcacatcctcctccatgatgcctacatgttctgtatcattgacaagtccttgccacttccaaatgacaaaactgtgctctataatccacttcctcccaaaaatgaatcagatgtcttcctgaggcgcacggcccatgcatttaaaatttctaagatatataagcccttactcttcatggatcttttggatgaaaggacacttgtggctgtagaacgacccctggatgacatcattgctcagctcccaccacccatcaaaaagaagaaatttggaacttaaaacagggcactttctgtgtcttttcttgaactgtctaccctcttttgttgttgtttgtttgtttgtttgtttgtttcccagaatcatgataataaaacaaagttaattcttta

SEQ ID NO: 1691 - DNA, 2177 bp, Cricetulus griseus
  modified_base (2164)..(2164): a, c, t, g, unknown or other
ggtgaggccttcgatgggaggacaattcagaaaatgttcttgtcagtggaagccaaaaggtacaaaatttatcccttagccctgagtcccattttatgaggatgacagctcacaggaggacgtcctatccagcgaggtctctcctggtcaccatggctccacgaaatcaagggagagtgcaaaccagccttcgtctgtcctttccctcctgcagtcggtgtcagaacgcttacagagaaactttagatggaggatgacagacaagtggccgaggatgaggatggaggaagcagcagcagcttcgggaaagggttgagagttgaaaggagggagcgtgtcaccttccacttggcagatccttccatcaccttttatcctgacgatgaacaggaaagtgctggaatctccaagccctatgaggagtgcagtgaaccaacgacctccaatctgcagctcggtctgtggccagagaaggtgtcacttctgcagaaatcggatctcacatctaagttgcactcctccctgaaaagtgcctaccatcagtacttgcagacttccaggacacattcctcaggggctctttgagatttcttgtctagtctagaaatgaaatcactgcatcctctccaaatgggcggactgaaagtggaaatgcctatgaacttaaaggttatcctttatgaaaagtctcacttccgtggacataccaaagaatttagtgaacatgtagactctgtccctaaggttttaaaaatcgataaggacttccgtggcattggatcaattcgtgtcattggtggagtgtgggttgcctatgaaaaggaacacttcaaaggccagcaattcctacttgaagaaggagactttgaagattgcagtgcttgtggggcattaaatggccccatcatgctttccggtacctacaggctaattttatagaatccgctatcacactgtttgaatctgaccttgaaagtgggaagttcattgacattacaaatcaggaaatttcagacttagaagaaattggctttggctgggaaacaagatccatccatgtgaagagtggagtatgggttgcctactgccagaagtttcttctgtggagaccagtacatcttagagaaaggaaaatacaaatgcttttttgattggggaggatcaagtaatacaatcttgtcaatccgaccaatccagctggaaccacttggaataaaatgagcctccacatttgctcaaagccttcagcaaaccgggcttccaaggcgagtgcatagattttataaaagaatgtgctgacctgacctcattcttgccatcctccttcaaggttctccgtggctgctggctcctgtattaccaagaagatgttttctatcaccagtgtgtattagaagaaggcctctacgttgaccttgcttcctgtggctgcccatcagctagagtcagagctctcaagcccattgactacgtttttgaagaaccttccatcagcctttttgccctggagcactgtgagggacgagagttacttcttgaagacgctgtgaattctgttttgaacaaggacctccacttctacacccagtctgtatggataaagagtggattatggatagcttatgaaggatccaatttcttgggaaggcaaatcctccttatgcctaatgaaatccctaactggacagcatttagtgggtggaaaacgattggttctgtccgtcctatgaagcagcctgcagtgtacatcagaataagaaaccgagcccaggatgagtatttgacagtcactgggaacctagctgatgcacgaacaatgtctgtgtgcatttctccctacagcgggaaggacacacagatctggcactactgccgaggactctttaaatccaaggccagtgatacatgtctcgatgtgattggtggccgggacacacctggggccaaggtggccttgtggactgaacatgggcaattcaggcagaagtggagactgaacagaaatggaaccatcagctcttatctcagcgatgaacttgtcctggatgttaaaggaggagactattatgacaagacttatgttattgtcaatcagcccctggagggagaagaaacacagaagtgggacattgaaatcttgtgagatgtcagaagtaaaaaaaanaaaaaaaaaaaaa

SEQ ID NO: 1692 - DNA, 2177 bp, Cricetulus griseus
gaggccgaccgagagcagcttcgagctgacctgctgagggagcgtgaggcccgtgagcacctggagaaggtggtgaaggagcttcaggagcagctgtggcctcggccacggcctgagaacgtgggtggcgagggcagtgctgagctggatccctagcctgggcagtgcctgccactgccacatggacctccatgcgtgcgcagagggcggcgggtatgtggcttcaaaccctaagtgctcgagtgcttagaaatcccctctggtgcttggttgaacaagggaatcacaagaaaatgaaaatgcagagactgaacttgggggtcgttctgtgccttccagcatcttgtacagcaaaccctgacttgtctttttacccccaaaatatcgtcttagcgattgaatctgccactgtcaaaatacgttacttgcatttattccaaataatctcgtttactcttaactgtttatgcaaattgtataaggtttcttatgcccaagcttgaaaaatgatttcccagtagacaagaggccaccacccatcctccaattgtgtttatttacatgagaagatcacacagaagccctctgctctagtcctaacagggcagctaggagctgaggggaggtggagatggcttgtgcaggtacaaacgacctcaaggactgttgcctgcaactggggactgctaagccctgacattcggtgccgaggtcgactgcagggtcttgcccttggtttactgagggggctgggctgctgccggggcccccttctgagtgcaatgcaaaagggacatcatgtatacacagcgtttttctggagtttttcttttggtctttttttccttctcagttatgaaacttgtatgcatggatttcccatctccatagctagacctacccatgggcattatgaccttgtctcctaaagggtcagttttgttacacaacacaaagaatgctgttctcagccttgattttctagagttgtgtttttcagtcatttcttcaaggaaaactaaatgatttagttggagcaaagctttaagtgtgttggtgttgcttctgtgtggctgtccctgttgcctagtaggagatcacagtgattgggcccctttgagccattggttccaggggcacttctcagcagagcctctctttgccacagccctggtcaccatcggtttcctgacctccttaggtctagcactggccccgttatgggaaagaagtgcgctgtctgcaacagagactctcctcacgtgccagaatgacgtgggtctgggaagggcttgtcatctcatgagttattcctcctgggtccctcctccctctgcttcctgtgctgggttttctgtgctgctgccgtggatggcagcttgcttgctgcaggacctgacatggactgaggacaagcaggcagtgcttgcctggctccccattaggaaggctgcagatttcttttcagagaaagggaggagaggtttccatcatgttggctgttgactctccctgtatgttaaaccctttatcagtttactcattatttctatcctgaaagatttctaacgaagggaaaaaccaacagcaataacactcattggtgagcagctaactcggacaccctgcttttcatacagaactagccaatgtaaaaacaactcacatgtaaatactttttccatttcacaccgttgtattatacgtgtatatggtgattccttttccagaaacttttcttacctgctggttgtcttgttttctgggttgtttttaactgaggaaaaattgctcatctgccagaggggacagaagcgtcttgtggcatttcccatgtggtgtcctccatggccacccattgaccccagttcctacttggagtatcctccatggaccctccccacatgcccaccctagggctgggagggggggggggggcgtttgtgttaagtcaagattctcaaatgacattttcatcaattaaaaaaaaacccacctcaaccttcataactgcccaccctccagtcctacgctgctgctaatgacaatacgatggcttactctgctactcaagaactatttttatgtaattaatgtatgctttcttgtttaataaatgcctgaattttaaaaaagaaaaaaaaaaaaaagaaaaaagcttcggcatatttattcta

SEQ ID NO: 1693 - DNA, 2177 bp, Cricetulus griseus
gcgcgcgcgcgcgggtgagaacgggaaacgccgcgagggccaggccgggcggtggagacgacggacggtgaccatggccgcgacagcgggcggcggtccgggagcggcagcaggcgccgcgggtgcagggggtgcggcggcggcctcgggcctggccgtgtaccggaggaaggacgggggcccggccagcaagtttgggagagcccggacacggtgtcccagctggattcggtgcgagtctggctgggcaagcactacaagaagtatgttcatgcagatgctcctaccaataaagcactggctggactggtggtacagcttcttcagttccaagaagatgcctttgggaagcatgtcaccaacccagcttcaccaaactacctgaagaggatgaagagtggttgagaccagtgatgaggaaagataagcaggtgctggtacactggggcttttacccagacagctatgacacttgggtccactgtaatgatgttgatgctgaaattgaagatccaccaattccagaaaagccatggaaggttcatgtaaaatggattttggacactgacgttttcaatgaatggatgaacgaagaggattatgaagtggatgagaacaggaacgccgagtggatgattggaataaagtctcagaacatgttggaagtcgtacacaggatgaatgcatcctccactttttgtaggcttcccattgaggacccataccttgaaaattcggatgcttccccttgggcctctagcttaccagcctgtccctttcagccagtctggaaacccagtgatgagtaccgttgcgtttttagcgtctgtggttgatcctcgtgtggcatctgctgcagcaaaagcggcattggaggagttttctcgggtccgagaagaagtaccactggaattagttgaagcgcacgtcaaaaaagtacaggaagctgcgagagcctctggaaaggtggatccgacctatggcttggagagcagctgtattgcaggcacaggtcctgacgagccagagaagcttgaagggtctgaagaagagaagatgggaaaacaggaagtctgatggtcagcagcaaaaaacaagtgagaaggaacaagatagtgaagttagtgaggatatcaacagaggaaaggagaatgaagagaacaaggaactcactgatacatgtaaagaaagagaaagcgataccgggaagaagaaagtggaacacgagatttctgagggaaatgttgccacagccgcagcagctgctctcgcgtcagctgccaccaaagccaagcacctggctgctgtggaagagagaaagatcaagtccctggtagctctcctggttgagacacagatgaagaaactggagatcaaacttcgacattttgaagagctggaaactattatggacagagagaaagaggctctagaacaacagagacagcagttgcttactgagcgtcagaacttccacatggaacagttgaaatatgctgagctacgagctcgacagcaaatggagcagcagcagcagcacagcagcgcaccagcactctgcgggggcctggccctggccccccttcggtgcagcggcccaccccggcatgatgcaccagcagcagccgcccccctacccctctgatgccaccaccagatgccaccaccccactcctccccagccaggtcagataccgggccctggctccatgatgcctgggcagcccatgccaggccgcatgattcccactgtggcagccagcattcatcctactgggagtggccctgcccctcctggtatgcctccaatgcctggaaacatcttaggacccagggtacccctcacagcaccaaatggcatgtatcctcctccaccacagcagcagccgcagcctccacctgcagacggggtccctcctcctcctgctccaggccctccagcctcggccactccttaacctggaagatacagggagcctccacacccaccacaagctgaaatggggatggcaagacttgtgtctcagcttccttggtttcttttgggatttttttttcacagccccaagcatgagtcccatgtctctccactccccagtactttttgtatcaagtccttagctggtactcagtgagaagcctgtggtgactagtgtgccctgatcatttgaaaagta

SEQ ID NO: 1694 - DNA, 2176 bp, Cricetulus griseus
cattggccatggtgaccttcggggtgtgtgaacctccgggcccttgatattgcagtccagtgggatcaacaccatagaggaagatgccttttcttccctgagcaagcttgaatatttggacctgtctgataatcacttatccaacctatcttcctcctggttcaggcctctttcctctttgaaatacctaaacttgctgggaaatccttataggatactgggggaaacaccactgtttctcaacctcacacatttacagacccttagggtaggaaatgttgccaccttcagtgggatcaggagaacagattttgctggactgacttctcttgatgaacttgaaatcaaagcgctaagtctccagaattatgagcccggaagtctgcagtccattcaaagcatccatcacttaacctttcacctaagtcagtctgatttcctgctgggggtttttgaagatactctgagttctgtgggatatttagaactgagagatgctaacttggacagcttctacttttcagaactgtccacggatgaaatgaattcaccgatgaaaaagctggcattccaaaatgcagatctcactgacgaaagttttaatgaacttctgaagctgttgcgttacactccagaactgttggaggtagaatttgatgactgcaccctcaatggagtgggcgattttcagccctcagagtcagacgtagtgagagagctaggcaaagtagaaacgctaataatacggaggctgcacatccccagattctactcattttatgatctgagtactgtatataccctcctggagaaagttaagagaatcacagtcgagaacagcaaggtttttctggtcccttgtctgttctcacagcatttaaaatcattggaattcttggacctcagcgaaaatttgatggttgaagaatatttgaagaacgcagcctgtgagggcagctggccttccctgcaaactttaattttgaggcagaaccgtttgaaatcaatagaaagaactggaaagattttactgactctgaaaaacctgactgcccttgatatcagccggaacagctttcagtctatgcctgactcttgccagtggccaggaaagatgcgtttcctgaacttgtccagtacagggatacaggcagtaaaaatgtgcatccctcagactctggaggtgttggatgttagtaacaacaatctcatttcgttttctttgtttttgcctctgctccgagagctctatatttccaggaacaagctccacactctcccgatgcctccttgttccctgtgttactggtcatgaagatcagagagaatgccataagtactttctctaaagaccaacttagttcttttcccaaactggtgagtctggaagcaggtggcaaccacttcatctgctcctgtgaactcttgtccttcaccttggagcacccagcactggtccaggtcctggccggctggccagacagttacctgtgtgactctccctcccgcctgcgtggccagagggtccaggatgcccggccctcagtcttggagtgccaccagactctactagtgtctggtgtctgctgtgcccttgtactgttgatcctgctcataggtggcctgtgccaccatttccatgggctatggtacctgcggatgatgtgggcgtggctgcaggccaagaggaagcccaagaaagctccttgcagggacatttgctatgatgcctttgtttcctacagcgagcaggattcctactgggtggagaacctcatggtccagcagttggagaattcggaacctcccttcaagctatgtctccacaagcgggactttgttcctggcaagtggatcattgacaacatcatcgactctattgagaagagccacaaaaccctgtttgtgctttctgagaactttgtgcggagcgagtggtgcaagtatgagctggacttctcccacttcaggctctttgatgagaacaacgacgccggcatcctggttttgctggagcccattgagaagaaagccatcccccagcgcttctgcaagcttcgcaagataatgaacaccaagacctacctggaatggcccttggatgaaggccagcaggaagtgttttgggtaaatctgagaactgctataaagtcctaggttctccacccagttcctg

SEQ ID NO: 1695 - DNA, 2176 bp, Cricetulus griseus
cagaaacacttatttgaagctcgaggtggaatcctctcaatccttcacatgatcatgtcctctgtgactctgctctggagcatcctgcaccaggctgatgcctcagataagatggtggtcgctgcatctgcatccgttaccacaatcaatctgggagccacaaagaacttacgacaacaaatcctggaattattgggacctatttcaatgaatcatggtgttcatttcatggctgccattgcattcgtatggaatgaaagaagacagaacaaaaacccttcccgaaccaaggtgatccctgcagccagtgaagaacaacttttactagtagaactggttcgctccatcagcgtcatgagagcagaaactgttatccagacggttaaagaagttttaaagcagcctccagctatagccaaggacaagaaacatctctctctggaagtctgcatgcttcagtttttctatgcttatatacaaagaattccagtgcccaatttagtggacagttggacatcactattggtccttctaaaagattctatacagcttagtcttccagctccagggcagtttcttatacttggggtcctgaatgagtttattatgaaaaatcctagtttggaaaataaaaaagaccaaagagaccttcaggatgtgactcacaaaatagtggatgctattggtgcaattgctggttcctctctagaacagaccacatggctccgacgaaaccttgaagtcaagccttctcccaaaataatggtggatggaaccaatttggagttctgacgttgaagatatgctgtcacctgcaatggaaacctcaaacataactccctctgtgtatagtgttcatgcactgacattgctttctgaggtattggctcatcttcttggatatggttttcttacagtgatgaaaaagaagcgttgttattcctttactttgtaaacattatgcattatgttgtaccctacctccgaaatcacagtgcacataatgccccgagttaccgagcctgtgtccaactgctcagcagtctaagtggtatcagtatacacggagagcatggaaaaaagaagcctttgaccttttcatggatcccagtttctttcagatggtatgtcttcctgtgttaatcactggagagcaattatggacaacctgatgacacatgataagacgacattcagagatttgatgactcgagtagctgtggcccaaagcagttctctcaatctttttgcaaatcgggatgtggagctagaacagagagccatgcttctcaaaagattggccttcgctatttttagcagtgaaattgatcagtaccagaagtaccttccagacatacaagagaggttggttgagagtctccgtttgccccaggtgccgacccttcactctcaagtgttcctgtttttcagagtattacttttaagaatgtctccacaacaccttacctctctctggcctaccatgatcacagaacttgtgcaggtgttcttactgatggagcaggagcttactgctgatgaagatatttcacggacatcagggccatctgcggctggtctggagacaacctatactggaggtaatggcttctccacgtcctacaacagccagaggtggttaaacctctatctttctgcttgcaagtttttggatttggctctggcattgccctcagaaaatctccctcagtttcagatgtaccgatgggcctttatacctgaagcttcagatgactcaggcttggaggtcagaagacagggcatacatcagagagaatttaagccgtatgttgttcgacttgcaaaacttcttcggaaaaggacaaagaagaatccagaggaagacagttcggggaggacactgggctgggagccggggcacttgttactcaccctctgcacaatgcgaagcatggagcagcttctgcccttcttcaacatcctcagccaagtcttcaacagcaaagtcacaagccggtgcggaggccactcagggagccctgtcctctactcaaactccttcccaaacaagacatgaaactggagaaccacgagtagctaaggcctggaccacacatcctagtgggtacagcacaggactctgtcagtgcaaagaagatgggccacctgccagttctgatgctgctacacaaac

SEQ ID NO: 1696 - DNA, 2176 bp, Cricetulus griseus
cgtgttcggaccaagatggaaagagacatcctggctgatgtgaaccacccattcgtggtgaagctgcactatgccttccagactgagggcaagctctatctcattctggacttcctgcgtggtggtgacctgttcacacgactctcaaaggaggtcatgtttacagaggaggatgtgaagttttacctggctgaactggcactgggcctggaccacctgcacagcttgggcatcatttacagagacctcaagcctgagaatcacgaacacccagagactctccaggcatcccccccagcgccggcgctcatcagctgttccgtggcttcagcttcgtggccactggcctgatggaggatgacggcaagccccgggccactcaggcccccctgcactcggtggtacagcaactccacgggaagaacttagttttcagtgatggctatgtggtaaaggagacggtcggcgtgggctcctactctgtgtgtaagcgctgtgtccacaaggctaccaacatggagtatgctgtcaaggtcatcgacaagagcaaacgggatccctcagaggagattgagattcttctgcggtatgggcagcaccccaacatcatcaccctgaaagatgtgtatgatgatggcaaacacgtgtacctggtgacagagctgatgaggggcggggagctactggataagatcctacggcagaagttcttctcagagcgggaggccagcttcgtcctgcataccatcagcaagactgtggaatacttgcattcccagggggttgtccacagggacctcaaacccagtaacatcctgtatgtggacgagtctgggaaccctgagtgcctgcgcatctgtgactttggctttgcgaagcagcttcgggctgagaatgggcttctcatgacgccttgctacacagccaacttcgtggcccctgaggtgctgaaacgtcaaggctacgatgaaggctgtgacatatggagcctgggcattctgctgtacaccatgctggcaggatatactccatttgccaatgggcccagcgacacaccggaggagatcctcacccggatcggcagtggaaggttcaccctcagcgggggaaactggaacacggtctcagagacagccaaggacttggtatctaagatgctccatgtggacccccaccagcgcctcacagccaagcaggtcctgcagcacccatggatcacccagaaagacaagcttccccagagccagttgtcccaccaagacctgcagcttgtgaagggagccatggcagctacgtactctgcactcaatagctccaaacccaccccccagctgaagccaatcgagtcatctatcctcgcccagcggcgggtgaggaagctgccgtccaccaccctgtgaaccacagtgcagacaaactccttggaggcagagtccttcccagagagagcagacctgggtcacaggaccaagtgaagtggagtctgaaaggaagtagccagcccagatcacccaagagagggtgtgaagtgccttcttccccaggatggactcttctgggctcgggctccgtgtgagaagtccattcactgtacaaactcttttttagggggaaaagaatggcatcttctaccatggatttttacaagatccatttgcctttctaaccattgcagtcccaggaggagcaccgagtcacatggagactgtgtggccaaggttcccttggtcagctttggggccctcccctaagcattggctgtggagccatctacacacgcctccaaacagcccagtgtcacctctcagtcacccactggctattccgcagagcttggccccagctggctcctctccttctattctggggttctagaaccactttctgctacagccaaggacgccaccctgtcagctcttggctccaggcaccagcatccacattgcccatccacaatgggcccctgcagtcggatcggacagccccgtggagaggaggcagagagcacttttcggcagacttcctgcctgccactggacagagttcacaggacaccggggagtgggccacgggggacgagggctttttcatttcctcctcagctggtaactcagggttcatctgtccaaggcctttctaataaacttacaatccagtaaaaaaaaaaaaaaaaaaa

SEQ ID NO: 1697 - DNA, 2176 bp, Cricetulus griseus
cctccaaaagaggtggaagaagatagtgaaagacgaagaaaatgtccgaagatgaagaagatgacagcagtggagaagaggttgtcatccctcaagaaaaaaaggaaaagaaggctacagcaactccagcaaagaaggtggttgtttcacaaacaaaaaagttgcagttcccacaccagctaagaaagctgctgttactccaggtaaaaaggcagcagccacaccagccaagaaggcagttacaccagccaaagcagttgcaacacctggaaaagaaggggagccacacaagcaaaagcattggtagcaacccctggtaaaaaaggggagctgtcactccagccaagggggctaagaatggtaagaatgctaagaaggaagacagtgatgaagatgaagatgacgacgatgatgaagacgacagtgatgaggatgaagaggatgaggaagaggatgaatttgagccaccagtagtgaaaggaaaacaaggaaaggtagctgctgctgctcctgcctcagaggatgaagacgaggaagaggatgaagaggaggaggaggaggatgaagaggaggaggatgactctgaagaagaagaagctatggagatcacacctgccaaaggaaagaaagctcctgcaaaagttgttcctgtgaaagccaagaatgtggctgaggaggaggatgatgatgacgaagaggaggatgaagatgaggaggaggatgaagaagaggaagaagatgaggaggaggaagaggaagaagaggaagagcctgttaaaccagcacctggaaaacggaagaaggaaatgaccaaacagaaagaagttcctgaagcaaagaaacagaaagtggaaggttcagaatcaactacacctttcaatctgttcattggaaaccttaacccaaacaagtctgttgctgaattaaaagttgccatcagtgaactttttgctaaaaatgatcttgctgttgtggatgtcagaactggtacaaataggaaatttggttatgtggactttgagtcagctgaagacctagaaaaggccttggagctcaccggtttgaaagtgtttggcaatgaaattaaactagaaaaaccaaaaggaagagatagtaaaaaagttcgagctgcaaggacacttttagcaaaaaatctttctttcaacatcactgaggatgaattaaaagaagtgtttgaagatgccttggagatcagattggttagccaggatgggaagagtaaagggattgcttatattgaatttaagtctgaagctgatgcagagaaaaacttggaagaaaagcaaggagcagaaattgatgggcgttctgtttcactctactatactggggagaagggacaaaggcaagaaagaactggaaagaatagcacttggagtggtgaatcaaaaactttggttttaagtaacctttcctacagtgcaacagaagaaactcttcaggaagtgtttgagaaagcaacttttatcaaagtgccccagaaccaacagggcaaatctaaagggtatgcgtttatagaatttgcttcatttgaagatgctaaagaagctttaaattcctgtaacaaaatggaaattgagggcagaacaatcaggttggagttacaaggacccaatgcgagaagtcagccatccaaaacactgtttgtcaagggtctgtctgaggataccactgaagagaccttaaaagaatcatttgagggctctgttcgtgcaagaatagtcactgatcgggaaactggttcctctaaagggtttggttttgtagacttcaacagtgaggaagatgccaaagctgccaaggaggccatggaagatggagagattgatgggaataaagttactttggactgggccaaacctaagggtgaaggtggctttggtggccgaggtggaggcagaggaggttttgggggccgaggtggtggaagaggaggaggccgaggtggatttggcggcagaggccggggcggctttggaggtagaggaggcttccgaggtggccgaggaggaggaggagacttcaagccacaaggaaagaagacgaagtttgaataattccttcccaatctttcccacttcgttttaaagaaaggactctggggttttacactgttacctgttaaatgacggagccttttaaggacatttcaaga

SEQ ID NO: 1698 - DNA, 2175 bp, Cricetulus griseus
  modified_base (2167)..(2167): a, c, t, g, unknown or other
ggagtgggccgcggggggtggaggaagcggcctctctcgctgaggagggagcaattgaatttcaaacacaaacaactgcacgagcgcgcccggagccgagccgagccgagcgttgcccaccgcgcccgccccgtccgagcggcgcgcggacgcagacgccgtggctgctccggagctcgcgccgggggccaccatcgaggcgggggccgcgcgagggccggagcgcagcggcgccacaaccgccgcacgcgcaaacttgggctcgcgcttcccggctcggcgcggagcccggggcgcccgcggccccgccatgtcgcgatccaaccggcagaaggagtacaaatgcggggacctggtgtttgcgaagatgaagggatacccacactggccggctcggattgatgagatgcctgaggctgcagtgaaatcaacagccaataaataccaagtctttttttttgggacccatgagacggcgttcctgggccccaaagacctcttcccttatgaggaatccaaggagaagtttggcaagcccaacaagaggaaagggttcagcgaggggctgtgggagattgagaacaaccctacagtcaaggcctctggctaccagtcctcccagaaaaagagttgtgtggaagagcccgagttggagcctgaagcccctgcgggtgatggtgataagaaaggcaatgcagagggtagcagtgatgaggaagggaaactggtcatcgacgagccagccaaggagaagaatgagaaggggatgctgaagaggagagcaggggacatgctggaggactcccctaaacgtcccaaggagtctggagaccatgaggaagaggataaggagatggctaccttggagggtgagaagcccctacctgtagagatggagaagaacagcaccccctctgagccagactctggccagggacctcctccagaggaagaggaggaagaggaggaggccaccaaggaagaggctgaagcccagggcgtcagagatcatgagagcctgtagccaccaatgtttcaagaggagcccctgccccgttcctgctgctgtctgggtgctactggggaaactggccatggcctgcaaactgggaatccttttcccacccaacccactctcctccttcactcactttctcctttttaagcccacccttggagattggcttggccctcacttccaggtccctgtaccctgtgacctaagtcagggccatgtgccctggtatgaaatggggccattatatctccttagacttgtctcctaggactttgtgttggggtctggactgctgtttccacctctcaacacctctggccttctgcaggcattctagacctttgggccgggttggggcaggagtgcggtgatgaaatataaacttgagtgggtttctgagtggcatctcctgagctcctgtctcctgctcccacacttattttcccatttgcctaagttcaagaaaaggggacactatgtgggagagaggctcccatccataaatccttggtgatgaaacaatttttttcctgacctcagggttcaaggaattatagtttaacatcaagacttgggagtttccaagttcttagggccaaggacctggagagagttgataatctgaaggattgactcatccatttgtattaagtaaatgtctctctttagatctcaggtcagagatggggtaatgtgggaagatcctgctgccttctttcctcttcccacaatgctcaaggccagcttctagtcagatatatcacccagacataaaggaaaaagacacattttttaggaaatgtttttaataaaagaaaattacaaaaaaaaaaaaaaaaaacccaagggaggctcccttctgttcgagttgatgactctttggagcctgggctttgatgtccttccagaggttggtcctctggcattgtcacacatccagtttgtaacccactgaatacagggaaaagtgctctctcccagcctcttctggggtttcttatgcccccttccttctcttttactcctatccctccccttgggctctgaaagaaaaattgctgactgtagctttggaagtgtagctctgagaaccatagacaatttgagttctaggaaaataaagccgttgattaactaaaaaaaaaaaanaaaaaaaa

SEQ ID NO: 1699 - DNA, 2175 bp, Cricetulus griseus
gagcggttgtgcgatcagatcgatctaagatggcgactgtggaaccggaaaccacccctactactaatcccccacctgtggaagaggaaaaaacagaatctaatcaggaggttgccaacccagagcactatatcaaacaccctctacagaacaggtgggcactctggttttttaaaaatgataaaagcaaaacttggcaagcaaaccttcggttgatctctaagtttgatactgttgaagacttttgggctttatacaaccatatccagttgtctagtaatttaatgcctggctgtgactactcactttttaaggatggtattgagcctatgtgggaagatgagaagaacaaacggggaggacgatggctaattacattgaacaaacagcagagacgaagtgacctcgatcgcttttggctagagacactgctgtgccttattggagaatcttttgatgactacagtgatgatgtatgtggagctgttgttaatgtcagagctaaaggtgataagatagcaatatggacgactgagtgtgaaaacagagacgcagtcacacacatagggagggtatacaaggaaaggttaggacttcctccaaagatagtgattggttatcagtcccatgcagacacagctacaaagagcggctccaccactaaaaataggtttgttgtttaagaagacacctgagtattctcacaggagactgcgtcacgcaatcgagactgggagctgaaccaaagcctcgtccaagcagagtggactgcactgaagtttgattccatctaaatgttgctaagatataagagaagtctcattcgcctttgtcttgtacctttgtgttcatttcttccctgccctcccccaatttttgctagtgtgtccactatcccaatcaaagaattacagtatctgtcaccccagaacccgcagatgtgttcctggcccgcattgtaacagctggttagaattaccatgatacacacatttgcctttccacagtattcgaaaaagaacttgcatttctgttaccttagcaggaaaagacctgtttctgttccactctgcaggagcatgttttgctggtgagagtctgagtacagttttctagcaacctcatttcctttcccagcattctccttgctgtcctcttgctgatggctgctagagtttaatttatttgcttccctccttgataacattagtgattctgatttcagtttttcatttgttttgtttttgttttttcctcatgtaacattggtgaaggatccaggaatatgacagaaaggtggaataaacattaaatttgtgcattctttggtaatttttttgttttttgtaactacaaagctttgctacaaatttatgcatttcattcaaatcagtgatctatgtctgtgtgatccctaaacataattgtggactataaaaatgtaacaccataattacattcctacctagaattagtatgtctgcttttgtatctttatgctgtactttaacactttgtattacttagtttattttgctttggttacaaatggctcaagtagaaaagcggtcccattcatattaagacagtgtacaaaactgtaaataaaatgtgtacagtgaattgtcttttagacaactagatttgtccttttatttctccatctctgtagaaggaatctgtacttcgtattgccaaggcagtctcttgtgtcttcttatagggtcttccccatgcacagcctaagtttggagcactagtttattattatgtttattacaatttttaataaattgaataggtagtatcacatatgtagttaaactgatgtggctatcttttttaataaagttaaggcacagttttcagtcttaggttaaataatgtactttgaatatgttaaaattcatgagaattgggattttggtgtatcaccatttgataagaacagtggctataaaactaattgttgactttgagatgtttttacttaaaggccagaaaactagcttaaggagaatatagggggacgtgtgttaggatcttagtgttattatatgaataaagcagaataaacaagtattaagagttatttatattggtcaatttgtttcggtctggttttctgtaaacttgagacattgattattctttccttgtatcaatttaaagcaa

SEQ ID NO: 1700 - DNA, 2175 bp, Cricetulus griseus
cagcaaggcccggaagctcatggagttcagcgacaactgtgccattatcctggaagatgaccggtcagacatcagctccacgtgtgccaacaacatcaaccacaacacagagctgctgcccattgagctggacacactggtggggaagggccgctttgcagaggtctacaaggccaagctgaagcaaaacacttcagagcagtttgagaccgtggcggtcaagatcttcccctatgaggagtacacttcctggaagacggagaaggacatcttctcagacatcaacctgaaacacgagaacatcctgcagttcctgactgctgaggagcggaagacagagctgggcaagcagtactggctgatcacagcattccacgccaagggcaacctgcaggaataccttacaaggcatgtcatcagctgggaggacctgcgcaagctgggcagctccctggccaggggcatcgctcatctccacagtgaccacactccttgtgggaggcccaagatgcccatcgttcatagggacctcaagagctccaacatcctcgtgaagaacgatttgacctgttgcctgtgtgactttgggctgtccttgcgcctggacccaactctgtctgtggatgacttggccaacagcggacaggtgggaacagcaagatacatggcccctgaggttctagaatccaggatgaatttggaaaatgtggagtccttcaagcagacagatgtctactccatggctctggtactctgggagatgacatcccgttgcaatgcagtgggagaagtgaaagattatgaacccccatttgggtccaaggtgaaggagcacccctgtgtggagagcatgaaggacaacgtgctgagagatcgaggaaggccggaaatccccagcttctggctcaaccaccagggcatccagatcgtgtgcgagacactgacagagtgctgggaccatgatcctgaggcccgactcaccgcccagtgtgtggcagagcgcttcagtgagctggagcatccggatagactctctgggaggagctgctcccaggagaagattccagaagatggctcgctgaacactaccaaatagctttttctgggcaggctaggccaagcctccagaagctgccctctcaccaaagacagggagctggaagctgtcctgactgatgcttccgggaaaccaaggacttgctccctccttcccccgtagttgctccatgttcagaaacagcagcagcagcagcagcactttattaatgcctgtatgtaaaatatgaatagtatgttttatatctatatatctatatatgtctatatctctatctatagccatactctgcaaggagacaaagaaaaagatcaaaacgttccggggaaatttagcttttattggagagctccagaatggagcagaagggactcgggacagcattagcacttgacaatcattgcatgcgatgccccccagagtggggttgccggggacagttgcatgagaaggatccatgccttacagcctgctttggccacaaaacactctgttttgcaataatcaccctctacatgaggatgctttcggctagggagctaagttccaacctaccactgtgtcccatggcctcccatgtgccttgctttcttcatgatatcatcgacattcaaaccccacatctgacttgtcaccttgtaaatcccccaaacccacttaacaccttagggcttgccgatgccctcccaatagctgttgttcgccgccctctagtggtgagtttgtagaatactggtccactagtgggatttctagggttcaaaagtgatttcacttccaggtcatcatcagaaactggaacacagtgtcatgctactgtggcttgttttgtttgtgtcattttatcttattcaagaaaaagaccaaggaataacattgctgtcattcctaaaaaatgtttgactttgttcactactctgcataaagggaaagttttattcttttatcgaacacttcagccatactcatgtattaaaataggaatgtgaatgcacaatattctttttataccaaaatctaaagcacttattttcattctatgccatttgtcttttatataaataaaaacatctagtagatcaaataaatcaaaagttcatggaaaaaaaaaaaaaaaa

SEQ ID NO: 1701 - DNA, 2174 bp, Cricetulus griseus
gcgcggcgggcgggcggggcggagacgactggccgccccgcacccacctcagcacccctgggcccaccttcccaagctcctccaagcctggtctacactgtggccaccagcaccaccccacctgctgctaccattctgcccaagggcccaccagcctctgccactgccactccagcccccactagtcctttccctagtgccacaggctccatgacctacagcttagtggctcccaaggctcagagggccagcccaaaggcccccagaaggtgaaggcagccatcgccagcattcccgtggggtcttttgagtcaggcaccactgggtcggccttggaccttacaccccgacagtctctggactctggtgcagcccgagaaccagctgccccagaatcagagcttgaggggcagcccccgccccaagtccccccacctcccccagagacctggcctgctgcccggagcagtcccccgccacccctgcctgctgaggagcgacctggcaccaaaggccctgagactgccagcaaattccccagctcatcttcagactggagagtccctgggctgggcctggagagtcgtggggagcctcccgctcctcccagcccagcgcctgctcctgcgacagtccctagtgggagcaacagtggcagcagcgagtggcagtagtgggagggcagctggggacacacctgagcgcaaggaagtgactggttctgtgaagaagatgaaggtgcggcccccacccctgaagaagacctttgactctgtggacaaggtcctgtcagaagtggactttgaagagcggtttgctgagctgcccgagtttcggccagaggaggtgctgccctcacccaccctgcagtctctggccacctcgcctcgggccatccttggctcctatcgcaagaagaggaagaactccactgacctggactcggcgcctgaggaccccacctcgcccaagcgcaagatgaggagacgttcgagctgtagctcggaacccaacaccccgaagagtgccaagtgcgagggtgacatcttcacctttgaccgcacaggcactgagactgaggacgtgctcggggagctggagtatgagaaagtgccctactcctcattgcggcgcaccctggaccaacgcagggccctggtcatgcagctcttccaggaccatggcttcttcccatcagcccaggccacagcagccttccaagcccgctatgcagacatcttcccatccaaggtgtgtctgcagctgaagatccgagaggtccgacagaagatcatgcaggcagccactcccacagagcagccccctggggctgaggcccctctccccggaccacccccaactggcatggctgctactcctgtccccactcccagccctgctgggggtcctgatcccacctctccaggctcggactctggcactgcccaaactgcccctccactgcctccacccccagaacctgggcctggacagcctggctgggagggggctccccaaccctccccacctccctccggcccctccacagctgccacaggcaggtgagaggctcttgaaaagatcccaggacctacagtacccccctcaggatatggacagtagagatggcagggattgggggccagacagtgggatagttacctcctccccagtaagccatttgtcctttccggtctggcgtggactgtggcctgttccccttgtatatgttcttccctccctttgctgggggcagcaggcacagactccctccacagagctcttgtacataacctgaagtgtgtgaccttcagagcttttcccgtgtactttatgcagagtggctcctgtgagggctgcgagctggaggataatagtgtgagccttgggccacagggagatgcctgtggagtagtggggagttcatgcatccccctttttccccagaggggctggactcaggttagtttggggtgggggggctcctgcactttgccacaggcatggggaggattttccccaccctttgccctcccaacttgggttgtactttctaagaaggtgatttcccctccactgtcccccgtccccagaacagaacatgttgatcatgtgcaatatttctttactgtgccgagaagccgcaatgaccgagattaaagccgtttaacaca

SEQ ID NO: 1702 - DNA, 2174 bp, Cricetulus griseus
  modified_base (2168)..(2168): a, c, t, g, unknown or other
gtccccaccagctggagccccatcagatccagggcatggattttattcacatattccctgttgtgcagtggctggtgaagcgagctatagaaacaaaggaagaaatgggtgactacatccgctcctattctatatcccagttccagaagacctacagcctcccggaggatgatgacttcataaagagaaaagacaaggccatcaagaccattattgacctctcagacacctacaagccccgtcgcaagtacagacggcagcagggagcagaggagctgctggacgaggagtcccgagtcccactccacgcttttggaatatggcaggagatatggattcagtcgccacaacaaaacggagaaggctgaggacaagaaaacggctcttgctgcagggctgtcggccaccgagaaaacggaagctcatgaagaagatgagcttcaagcagctgaagagaaacgtatacagtcactgatgaccaagatgactgccatggcaaatgaggagagccgcctcactgcaagctccgtgggccagatcgtgggtctctgttctgctgagatcaagcagattgtgtctgagtacgcaggggaagggaacttctcaacttcatcagcggaaagtcatttccttgaataagcagattctacaaaagaccaaacatctagaagagctgcaaacaaatcattccagcctccaagccaagtacagtgacatgaagaagacactgacagagctgaagaaccatggtgagaaactagacaaagaacaggcagccctggagaaattagaagccaaagctgacccgagcattctacagagtctgagagcactggtagccatgaatgaaaacctgaaaagccaggagcaggagtttaaagcacactgccgggaggagatggctcggctacagcaggaaattgagaccctgaaagctgagagaacaccgggtgagaagactgatggagagccacacggtgccctgacccccaccatgactcacagtgaggacctggacagacggtacaacatggaaaaagagaagctgtataagatccgcttgctacaggcccgaagaaatcgagaaatagcgattttgcatcgcaagattgacgaagtgcccagtcgagccgagctgatacagtatcagaagcgatttattgaactctaccgtcagatttctgcagtacacaaggaaacaaagcagttcttcactttgtataacaccctggacgacaggaaagtttatctggaaaaggagattagcctgcttaactcagttcacgagaacttttcacaagccatggcctcccctgcttcccgggaccagtttttaaggcagatggaacaaatcgtcgaaggcattaaacaaaacaggatgaagatggaaaagaagaagcaggagaacaagatgcgaagggaccagctgaacgatcagtacctggagcttctggagaagcagcggctctacttcaagactgtgaaagagttcaaagaggagggccggaagaatgagctactgctgtccaagatcaaagccaaggcctcctgaaccatgcagtgatggcagagctacaaacctgcagcctccttggaggacaattgaataatatgtataccacaagtccaagccttttgaaccagcagtgccatgtctaggaacttttcttatatacagaaacttttattaaagtaatgtttgtaataacaaaaagttagaaactatcattaattcagaacaggggtgaaaaagcatggcccatctctacaatggggcattttgcagacagttaaaagaatagacctggatatgtattgctgggggatgttcacagatcttggagccacatggttaagtgggggggtggggagagaaaacatgcacaaacatgcatgaaactctagtgtttggaatagagacaaatacgtgtgttgtaggtgtgtgtatgcatatgtgtgtgtgcatatactcacacaaatgcttgtgatacgtctgcctgcccgtgcccagattgtccctggtaggctggcaaccttggttgcctcttggaagaaggtgggaatgacttttcacctacttgtcttttgtattctggtaattttgtaccatggacatgcattatctattcaaaaataatagtttttagaaaagtttaaaaaaaaaaaanaaaaaa

SEQ ID NO: 1703 - DNA, 2174 bp, Cricetulus griseus
  modified_base (14)..(14): a, c, t, g, unknown or other
  modified_base (23)..(23): a, c, t, g, unknown or other
agtcaaggtttctntgtatgctntgccagacaagataaatcaagcagattatgctctggatgctgcagtcactcttctagaattctatgaggattacttcagtattccatatctttacccaagcaagatcttgctgcaattcctgactttcagtctggtgctatggagaactggggcctgaccacatacagagaatcctctctgttatatgataaagaaaagtcttctgcatccagtaaacttggcatcacaatgactgtgtcccatgaacttgctcaccagtggtttgggaatctggtcaccatggaatggtggaatgacctttggctcaatgaaggatttgccaagtttatggagtttgtgtctgtcactgtgacccatcctgaactgaaagttgaagagcatttctttggcaagtgttttaatgcaatggaagtcgatgcattcaactcttcacaccctgtatccacacctgtggagaatcctgcacagattcgggagatgtttgatggtgtttcttatgaaaagggtgcttgtattctgaatatgctaagagattatctgggtgcagacacatttaaaagaggaattgtgcagtatcttcagaagtatagttataaaaacacgaaaaatgaggacctttggaacagcatggcgagtatttgtcccacagatggcatgcaaacaatggatggtttttgctctagaagccagcattcatcatcaacatcacactggcatcaggaaggcatagatgtgaaaaccatgatgaacacatggacactgcagaagggctttcccctgataaccatcaccgtaagagggcgaaatgtgcacatgaagcaagaacattacatgaagggttctgaaagcctcccagagactgggtacctgtggcatgttcctctgacattcattaccagcaggtcaaagtcagtccagaggtttttgctgaagacaaagaccgatgtgctcatcctcccggaagcagtagagtggatcaaatttaatgtgggaatgaatggctattacattgttcactatgaggatgacggttgggactctctgagtggccttttaaaaatcgcacacacgacgatcagcagtaatgaccgggcaagtctcatcaacaatgcatttcagcttgtcagcattgggaagttatccattgaaaaagccctggatttaaccctgtacttgaaagatgaaacagaaattatgcctgtattccaaggtttgaatgaactgatacctatgtataagttaatggagaaaagagatatgaatgaggtggaaactcaatttaaggccttcctactcaggctgctgaaggaccttattgataagcagatatggacagatgagggctctgtatcacagaggatgctcaggagccagctcctcctccttgcatgtgtgcgcaagtatcagccctgtgtgcagagggcagagggctacttcagagagtggaaggcatccaatggaaccatgagtctccctgtcgatgtgaccatggcagtgtttgctgtgggtgcccagaacacagaaggctgggattttctttatagtaaatatcagtcatctttgtctgttactgaaaaaagccaaattgaatttgccctctgcacaagccaagacccagaaaagcttcagtggcttctagacgaaagtttcaagggagatacaataaaaactcaggaatttccacatattctcatactaattggcaggaatccagtgggctatccattggcctggaagtttctgagggaaaattggaataaacttgtacaaaagtttgaacttggctcaacgaccatatcttacatggtactgggaacaacagaccagttttccaccagagcacgtctggaagaggtaaaaggattctttagctccttgaaagaaaatggctctcagctccgatgtgttcaacaaaccattgaggccattgaggaaaacatacgatggatggagaagaatttcgaaaaaatccgattatggctgcaaaaagaaaagctggaaatatgacaatttgtttcttgccaagttcctgtgatttacaatcagcaaaattttgttcaatttgagtattttcaaactaaagatggtggttttgtatctcactgaagatattttcttatttcattgcacttgatcatgtctgagaaaag

SEQ ID NO: 1704 - DNA, 2174 bp, Cricetulus griseus
cacaagcttaagccaaatctgaagtggcgacaggcttttgacaactacttaaaactctgcctccttactacttaataaccaaactagagtcagatcgaatactagcatcagtggggaagaaaccccccaggagattggtatcaaagtgaaaatcattctggaggtggcctgcccctggctcacaataaaaactttagaaagctgttgaaagaaatcataggggaaagtgcaccgagactgacagaactgaataccaagaatttgctggcttccaagtagggctcttcaacaaggatttgaaacctcagacatacagaaatgcttatgatattccacgtagaggacttttagaccagttgaccagaatgagatccaatctactgaaaacacggaagtttattgtgggacaagatgaagattcacttcatagtgttccagttgcacaaatgggcaactatcaggaatatctaaagatgctggcttctccactacgagagattgatccagatcaaccaaaaagactgcatactttcggcaatccgtttaagcaagataagaagggaatgatgattgatgaagcagatgagtttgtagtagggccgcaaaacaaagtgaaacgtcctggagaaccgaacagtcctatgtcatctaagagaaggcggagtatgtccctgctgttgaggaaaccacaaacacctcctactgtaactaaccatgtgggcgttaagggaccactctcagcctcctggttcccatcttgtccagacctcataaaacccacccttgtacatccagatgccactgtcattcatgaaatccatgaagagaagatggaaaatgggcaaagcccagctgatggcttcttattaaaatctgctccagcagactttatgaatgtggcaggagacagccttatatccaaccaattggattctctatctgatgattttgctggcctcaggaaagatggactcattcacaaacctaataataatatacttataggaggagccaaaacctgcactctttctgtagatgatagaaaaatcccaatggcatctgctttggaaactgtgccaaattcaatgcaaatcactcctgcaatggcacaaggcatcaatgctgatataaagcatcagttgatgaaggaggtccgaaagtttggacgaaagtatgaaaggattttcattttgcttgaagaagtgcagggacccctggaaatgaaaaagcagtttgttgagttcactatcaaggaagctgcaaggtttaaaagaagagtcttaattcagtaccttgagaaggtactagaaaaatagattcccaccaccttcttaacaatgtgaatcacatcaacagcagatcatcatgttaatatcaagacaagcaagaaaaaagaacacatggaatgggacctaattaagccctctagaatgtttgagtgaagggaatgacctaactcaggctaagaaaagtgtttgactacagattttaatgattatctggaagtaaaatctgggctttcgccttaagagttataattgaaagtattttttcattttctttttcctttttccaattaggaaaagtgatgttaaatcacaaagcactgctgctcctactacagctaacagagttcagtcatttgaacgttaccattccagatgttttcagagtgggcaggggccacctgcaaggagagcactgcttaatgtccttattgtgtcccatagagcaagtaagcatgtagaatccaagtggtaatcatttctagctgtgccttttaaaccatgcaatattcaggatagttggaatcaaagagtaaaaagctgctatttaggtaacttatttctctctgggaaggggcagggagagtaaccaaccaatctacctccagtgctcttccattttgtctataaacattacaaagtgcacctgaggctgcactatcctctgacatttgttcttgcatgtgacaacggaaagtcttcaggtagacttgtacattttgtgctttggaagcactaaaaggaaaaataatatgtatattttctttgatgtttatataaaagtttatatggagcagtattgttgttttatttgtaaaaatgtaagtgatcaaagagattttcactttgcatatatgaaataaaatcattttattgatttttacaaaa

SEQ ID NO: 1705 - DNA, 2173 bp, Cricetulus griseus
  modified_base (163)..(163): a, c, t, g, unknown or other
gttagaactgactccaccatggaagaggccgatcgaatcctcatccattccttgcgccaggcgggcacggcagttcctccagaagtgcagactctgcgagctttcaccactgagctggtcgtagaggctgtggtccgatgccttcgagtgatcagtcctactntgggctctagcctcagtcacttgctgccaccagccatgtctgcccggttccgcctggctatgagcctggcgtcaggcctgcatggacctgggcgtatcctttggtagcttggctatcagaacttcctctatcccagtgagcctgacctccgagacctgcttctcttcctggctgagcggctacccaccgatgcctctgaggatgcagaccagcctgcaggtgactcggctattttccttcgggccattgggagccaaatccgggaccagctggccgtgccctgggtcccacctctccttcgaactcccaagctgcagtacctccagggctcagccctccagcagtcattccactccaccaggttggttctgccagaactcagttccaaaggagagccatgggagttccaggcaagtcccctgctgctaccagcccctacacaggtgccccagcttgtgcggagagcagcctcactcctcgaacatcatgccatccagctctgccagcatgtgagcagggattgcccgggagatgaagaccgggtgtgctgggcacaccgtctcccatcccaggaggattcccgggctgcacagcaacgactgcacaagcatctggctgaacatcttcgtcaaagctggggcccacttggagcctcgacgcaagtccgagacctaggagagatgctccagccctggggtgttagaaataagactagcacccccaaaggctcccgcttcacccattcagagaagtttaccttccaactggagccccaggcccaggctacccagataccagatgtaccagtcaccctccagaagcctgaacaggacacacgggcagctcaagagcaggagttagagtcccttcgggagcagctgtcgagtgtgaaccacagcattgaaatggttgaagctgacatgaagaccctgggaatcaaccttatgcaggtggaaacagagtgtcgacaaagtgaactcagtgtggctgagcaggagcaggccctacgcttgaagagcagggcagtggaattgctgcctgatggggctgccaaccttgccaagctgcagcttgtggtggagagtagtgcccagcgggtcattcatctagcaagtcagtgggagaaacatcgggtcccgcttcttgccgagtaccgccacctccgaaaactccaggactgcagggagctggaatcatctcgacggctggcagaaatccaggagctgcaccagagtgttcgagcagctgcggaagaggctcgcaggaaggaggaagtctataagcagctggtgtcagagctggagactctgccaaaagatgtgtcccggctggcctacacccagcgcattctggagattgtgggcaacatccggaagcagaaggaagagatcactaagatcttgtcggacacaaaggaacttcagaaggaaatcaactctctctctgggaagctggaccggacatttgcagtgactgatgaactcgtgttcaaggacgctaagaaggatgatgctgttcggaaagcttacaaatatctagctgccctgcatgagaattgcagccagctcatccagaccattgaggacacgggcaccatcatgagggaaattcgagacctggaggagcagattgagacagagatgggcaagaagactctgagcaacctggagaagatctgtgaggactaccgagcccttcgccaggagaatgctggcctcttgggccgggtccgggaggcctagagccccgatggaagtctcctagctacaggcaggaatttgggggtgctggagacagtgcctaaacacttgttctagcacttccttgtgtttgcccccctccccctttatcctgctgggattttaatcccggatgcctgcttatctggtcccatgtttgatcagggtgaatatctagcttggccacagtttattgaatgggcactggggaccaaggcgtcttggatcccaaataaaagagaagttcttctataggtaaaaaaaaaaaaaa

SEQ ID NO: 1706 - DNA, 2173 bp, Cricetulus griseus
gctctgcagctccgaaatcctacaccatggcggacagccgggacccagccagcgaccagatgaagcactggaaggaacagcggtccttgcagaaacccgatgtcctgaccaccggaggacgggaacccaataggagataaacttaatatcatgactgctgggtcccgaggaccccttctggttcaggatgtggttttcactgatgagatggcacattttgacagagagcgaattcccgagagagtggtacatgcaaaaggagcaggtgcctttggatactttgaggtcactcatgacattaccaggtactgtaaggcaaaggtgtttgaacatattggaaagaggactcccattgccgttagattctccacagtcgctggagagtcgggctcagctgacacagttcgtgacccccgtgggtttgcagtgaaattctacactgaagatggtaactgggatcttgtggggaacaacacccctattttcttcatcagggatgccatattgtttccgtccttcatccatagccagaagagaaacccacaaactcacctgaaggaccctgacatggtctgggacttctggagcctccgtccagagtccctccatcaggtttccttcttgttcagtgaccgagggattccagatggacatcggcacatgaatggctacggctcacacacgttcaagctggttaatgcaaacggagaggccgtctattgcaagttccattacaagaccgaccagggcatcaaaaacttgcctgttgcagaggcggcaagacttacccaggaagatcccgattatggcctccgtgatctcttcaatgccattgctcaaggcaactatccatcctggactttttacatccaagtcatgactttcaaggaggcagaaactttcccatttaatccatttgatcttaccaagatttggcctcaccaggactatcctcttataccagttggcaaactggtcttaaacagaaacccagttaattactttgctgaagttgaacagatggcttttgacccaagcaacatgccccctggcattgagcccagccctgacaaaatgcttcagggtcgcctttttgcttatccggacactcaccgccaccgcctggggcccaactatctccagatacctgtgaactgtccctatcgtgctcgagtggccaactaccagcgggatggccccatgtgcatgcacgacaatcagggtggtgctccaaactactaccccaacagcttcagcgcacctgagcagcagcgctcagccctggagcacaggtcccagtgctccacagatgtgcagcgcttcaacagtgctaatgaagacaacgtcactcaggtgcggaatttctatacgaaggtgttaaatgaggaggagaggaaacgcctgtgtgagaacattgctggccacctgaaagatgctcagctgttcattcagaagaaagctgtcaagaatttcactgacgtccaccctgactacggggcccgcatccaggctcttttggacaaatataatgccgagaagcctaagaatgcgattcatacctatacgcaagcgggctctcacttggctgcaaaggaaaaagctaacctgtgaggctcaggtgctcaccttggcctccaccaagatctctcctgaagcagagcacagggtgcacctgtagttacccctggacctgctctcccttctgaagcacaagctcatgctgatgtctttaaagtgataatcgggcttccagagtgaataatagcaatgcttttaatgctgtttcctgatggggaaattaaaggttagggcttagcaatcatttaacagaacatggatctacatagacttctgttcagattattcatttaaaatgacatttaaaatgatgacaagaaaggttttctagccagaaacatgctttgattagataagataaaaatcttggtgaaattgatgttttttcatgttaccttatggcctgatatatatacattacacacacacacacacacacacacacacacacacacacacacacacacacacacacacacacacacacaatcagattcttatttttcacttgaaattatgtttacgctaatacacagtgatttcacataggttgatttgtacttgcttacatttttacaataaaatgatttacatg

SEQ ID NO: 1707 - DNA, 2172 bp, Cricetulus griseus
ggtggaggacctgcagtctgaggagtcagatgaggatgactcatcatcaggagaggaggccaccatcaaggcaacccaggccgagagtccaggctaagcttcagtgacagcgaaagcgacaatagtgctgactcctgcctgcctggccgagagcccccgcccccccacgaagccactccctcccagcagcaaggtgtctggccggaggagccccgagccctgcagcaaacctgaaaagattctgaagaaggctacctacgacaaggcttacacggacgagctggtggagctacaccggaggctgatggctctgcgcgagcgaaatgtgctgcagcagatcgtcaacctgatcgaggagactggccacttcaacgtcaccaacaccaccttcgactttgaccttttctccttggacgagagcaccgttcgcaagctgcagagctgcctggaggccgtggccacatgaccccggccgccactatagagccatggtgggcatgggcacggggaggggctgggcatgagggctggcccgccatggctcccactccccggtaccacccccagctcaaccatggtgccctggtgcccctcagtggttggtgttgaaggggctgtgggccacacgcctgtgcctctctgagtggccaggatgaccacagtcttccatgcagttcacaggcctctctctgctggcctgcctcctagactcaagggtctatcagcgtgatcagggctagccatggacacctggctctgccatgcagccttgtgtattgagtgtactctgggtgtgtccagcagctggggaggcttatgccaccccctgctggaggcacagaggatctcttctctagatcccaggatgccactgcctctcgtggccccaggccagtgaacactacaatgggcacgagtcttgggtccacaagggccacctctgtagccatgtgccagccaagcacccacagttccaaggctggccatgttggcactcctgggccaccattccccatgggccgcctcctctgctctcttgctgatcaagtctttgaactttgaaaacatgagcttttgccaaatatgataggacggtgtgtgcgaggcgggcccagccccagactgcctctgtccctagccacatgtgggccttgagaggctttggacctttgccctgtaaactgccaagggccaagccaacccccttcccatgcccaagcctggagtaccaccccaaccccaactccagttgttgtcagtgtttgtgccccaaccaaggtgtttgaaagaggcctgagcccaagctggcttgtagttgtctctctgatgttgcttcctccccagtgtgggttcacccctggaggcctggcctcccagctccctcccttgtcgaccccagcctctaaggcttcccttaccccagggaaaagagaggcctccccctgccagcccccttcccactccctccagctgggaggaagcagggttctggctccacacctcttcccagacaggccgacaatactctccaccaggcgtactgcagcctcagcctttggtcagaaggccctggcattgtggcagccattggcatccacatggaatgtgccagggccccaaacagcctcagcccagggtgccattcttcctcttgcagtcgccaggggcccagcccttctgctgccctgggccttggtgtccagcccttccagatgtttccaaggtcctcctggaagcacccacccatctcagttacctcctctggccggaaggtcacaccactgtcctccagagccactctggggcccatgctggctgtccagaagcctaaaaaagcagcttgcaaacagagccccgagggctctagggactagtccataggaaggggtggcaccaggactgcccccccttcgtgagtccctgtgctgcagcctcctgaaccagctcatgacactgggtgcaaaaggtattggatacctgtccctccccagggctttacaagacgtgtctccaggaatagacacgtcaccggcccagacgagccctggacagagggacaaagagagccgtgtttgtaatgagctgcagggctgtttgtcccgcattttaaactttttgttaacttgtgaaattatggaggagttttatagaaaataaagtgagatgggagca

SEQ ID NO: 1708 - DNA, 2172 bp, Cricetulus griseus
tcacaggggcgacgatggggagcctcatctgcttcatctgcccagctctgatctataagaaagcccacaagaacgccccctcagcccaggtggtgctctgggtcggcctgggcgtcctggtggtcagcacagtcactaccctgtctgtgagcgaagaagcccctctggacttggcacaagaagctcgaagtggccggcgaggagataccgagggcgggattaaagtggaggcggcccagctgtcagtccaggaccccattgtggttgttgctgaggatagccaggagaagccaaagccgccagaggacaaagaggcactggagcaggcccagattaagggtcctgtagaggtgcctggaggggaggcccccaaggagaagcaagaagccgcacagctggatcgccctggtcaaggcattgctgtccctgtgggcgaggcccaccgccatgagcctccgattcctcatgacaaagtggtggtggatgaaggcagatgaaggagaccctgggggcaaggggcagatggcaccacctgcccccaagtcagagaggaagcaggaagctgagaggggagaggaagggaagagacccgagcaagccctggcagtgggggaggctgaacatccccagaaggttccagaagccaatggccagccacctgtccagcccaggaaggaagagtcgagaccagacaatggagatctgctctctgtggagtccaggctctctgtggagcagaatgcgctggtggcaggtgatggcaaggaggctgcacagaaggcgggaggggtcccaaggaagctcgtggaaattgacccggagagcaacgttggtgagaggtggccttcctgcacaaaggtcagtgcctgcagaggagagggagcgtgaagggaggctgagagaccgaggtggagaccgagggcggggagcgaagagaagccgggagggctgagatgctggaccatgcagtactgctgcaggtgatcaaagagcagcaggtacagcagaagcgcctcctggaccagcaggagaagctgctggctgtgattgaggagcagcacaaggagattcgacagcagcgacaggaggatgaggaggacaaggctaagccagacttgcagccagaacctgggatggcggtactcagaagacaggaggaggaggaggccttggacgagcatgctggggagacagtggaaggtggccctccacagcctttgcagcctgtgcttggagctcccatgggtcgccctgctccaccccaagagatgggccagcaccccctggaggaagccaagccagtgccaggcagagaccttgctgatcttcctgctggtggctctgacacagggccccaaggggcccagactaaactgagagaggaccagaagggtgcttcactcaaggtggctggggctgtgagggacctggctcctagggacttggaaccagtgcccaaggcagactctgctggggcaccacccaagagtccagagaagcaatttgcagaggaagtcgccaggcagcacctagatgcctttggtggaggttcccttgaaaggaaggaaactgcgaaggaagcaatggccgctggtgccgatattccaaaagagcctgcccagcccttggcaagggcagaggctggaggctctcgcacaaagtccaggcaatcagaacccaccatggtcccagttcagccccaggccaggtttcagcaagagccccaggccatccctgacaaaggtcagggttctcacccagaggtaagaagtgaggccccccaaggggttcacatacctgctgaggggcagcacagaggaaatgggggtgctgccatcgaggagaccaacaagaggccagatcctgattctgcgcccaggctagctgtgcctgggggtcagaagccagagaatgccaaacccaaccgagacctgaaagtgcaggctgactctgacctccgcaggagacgacgggatctggcctctcctccagagcaggagctggctcccaaggacagagtcattatcagctttgactccctgcctaacgtacaggtgaatgacctccgcagcgccctggacacccagctccggcaggctgcgggggccgtggtacaggtggtacacagccggcaaattagacagttgcctggagatctagaggaagcgtgag

SEQ ID NO: 1709 - DNA, 2172 bp, Cricetulus griseus
gtcgctcggaactgcggacctgagagcttcccgcagagggccgtcggtgggagcggagtgggtcgggcggggccgagccgggccgtgggccgtgtgggggccaggccgggccggcggacggcaggatgggctgcaccgtgagcgccgaggacaaggcggcagccgagcgctctaagatgatcgacaagaacctgcgggaggacggcgagaaggcggcgcgggaggtgaagttgctgctgttaggtgctggggaatcagggaagagcaccattgtcaagcagatgaagatcatccatgaagatggctattcagaggaagagtgccggcagtatcgtgccgttgtctacagcaacaccatccagtccatcatggctatcgtcaaggccatgggcaacctgcagattgactttgccgacccacagcgtgcggatgatgccaggcagctgtttgcactgtcctgtgctgctgaggaacaagggatgctgcctgaggatctgtccggcgtcatccggaggctctgggctgaccatggtgtacaagcctgctttggtcgctcacgggaataccagcttaatgactcggccgcttattacctgaatgacctggagcgcattgcgcagagtgactacatccctacgcagcaggatgtgctgcggacccgtgtgaaaaccacgggcattgtggaaacacacttcaccttcaaggacttacacttcaagatgtttgatgtcggtggccagcgatccgagcggaagaagtggatccactgttttgagggcgtcaccgccatcatcttctgtgtggccttgagcgcctacgacctggtgctggctgaggatgaggagatgaaccgaatgcacgagagcatgaagctgtttgacagcatctgcaacaacaagtggttcacagacacctccatcatcctcttcctcaacaagaaggacctgtttgaggagaagatcactcagagccctctgaccatctgtttccccgagtacacaggggccagcaagtatgatgaggcagccagctatatccagagcaagtttgaggacctgaataaacgcaaagacaccaaggaaatatacacgcacttcacatgcgccaccgacaccaagaacgtgcagtttgtgtttgatgccgtcactgatgtcatcattaagaacaacctgaaggactgtggcctcttctgaggggcagcaggcctggcaggatgggccaccgccgactctgctccctactccccctgaggaagagggcaagaagaccatgctccctgcctgtccccccccagctgcttctcccatcttttctctgttctcagctcccctgtcccctccctcgactctagacttgggggaggggttgccacaggcctccctgttcgaagcccacccttgtctaaggtgccgggagtggccacggtacacccttcctgggcatctgttctctattttctgatcgttgtcttgttctggggtgagaggggagcgcatgcagagtttcccaaggcctgtgtctggaggggtacccactactccagcctagaccccccggctttgtccaacaccagccctaacccaagtccaaatgtttacagggagcctcctgcctaccctgccctctgccgctcggaggccccaaaggaaaaagcacaagaagcatgagacgccaccattcctggagacgcagtccacctgctcattctcgtagacttaaaaaaaaaagaaaaagaaaaaaaaaggaaaactaagacaaacctaagaaaacttttaagtagaaatctatttaaaactgtcaggtcctgaccagcaccccccaccccaccccgtcccctttccagtgattccgtgccttgagtgtgtctgcgtgtttacacccgtccctctccgggcagccccctgccctgccctccatggaattggattccaagggctgttccagacaactgccaatgtcactgagggccctgccctgaagccctgggcccaggctccattaacctaaatgtagctccttagcgctaatctaggaaccgccgctgcctgctgaggggccaggcccctcatgccctcgccccaggcccgggtccttcagcgttgaacacttccttgcttttttcacatgttttatggaattgttcacatgatttgaaataataaaatgtagaaa

SEQ ID NO: 1710 - DNA, 2172 bp, Cricetulus griseus
cccaagctgaacatggtcaagttcctgcaggtggagggcagaggctgtgactacattgtgttgtggctggactgtgacaaggaaggcgagaatatttgctttgaggtccttgatgccgttcagcctgtcatgaataatgcccacagtggtgagaagacggtgttccgggccaggttcagttccatcactgacacggacatctgtaatgccatgacccgtctgagtgagccagaccacaatgaggcactctcggtggatgcccgccaggagctagacctgcgcatcggctgcgcgttcactaggttccaaacaaatattccagggaaaatatggagatttagatagctctctcatctcctttggaccaaagctcaggtggaggctacaagcaggaaagaaaagaccaagcagagaccacttgccctgaacactgtggagatgctgcgtgtggccagctcagccctggggtatggggaccacagcatgccatgcaaatagctgagaggttatacacacagggctacatcagctacccacggacagaaaccacccacttatcccgagaactttgacctgaagggttctctacgacagcaggccaaccacccttactgggcagactcggtaaagcagttattagcagaaggtatcaaccgcccacggaaaggccatgatgctggtgaccatcctcccatcacacctatgaagtcagctacagaggctgaattagggggtgacgcatggcgactgtatgagtatatcaccagacacttcattgccacagtgagccatgactgcaagtatctccagagcactatctccttcaggatcgggcctgaacactttacatgctcaggaaagacagttatctccccaggcttcacagagatcatgccttggcagagtgtgcccctggaagagagtctacccacatgccagaagggtgacacctttgctgtgggtgaggtgaagatgctggagaagcagacgagcccaccagactatctgactgaggctgagctcatcacactcatggagaagcacggtatcgggactgatgccagtatccctgtgcacatcaacaacatctgccagcgcaactatgtcactgtggagagtggccgccggctcaagcccaccaaccttggcatcgttctggtacatggttactacaagatcgatgcagagctggtactccccaccatccgaagcgcagtggaaaagcagttgaacctgattgctcagggcaaagctgactaccaccaggttctgggccacaccctggatatcttcaagagaaagttccactactttgttgattctattgctggcatggacgagttgatggaggtatccttttcacccctggctgccacgggcaagcccctctcacgttgtgggaagtgccatcgatttatgaagtacatccaggccaagccaagccgcctacactgctcccactgtgacgagacctacaccctcccccagaatggtaccatcaagctctacaaggagctgcggtgtccattggatgactttgaactggtcctgtggtcctcaggctcccggggcaagagctacccactgtgtccctactgctataaccacccacccttccgagacatgaagaaaggcatgggctgtaatgagtgtacacaccctacctgccagcactcactgagcatgctgggcattggccagtgcgtggagtgtgagaacggagtcctggttctggaccccacctcgggtcccaagtggaaggtggcctgcaatacatgcaatgtggtggcacactgctttgaaaatgcccaccgagtacgggtatctgctgacaactgcaacacctgcgaggctgccttgctcgatgtcgacttcaacaaagccaagtctccccttcctggcaacgagacacagcacacaggctgcatcttctgtgaccccgtcttccaagagctggtggagctaaagcatgcagcctcctgccaccctatgcaccgaggtggtcctggtaggaggcagggtcgtgggcgtgcccggggccggaggcctccaggaaagcccaaccccaggcggccaaaagacaagatgtcagccctggctgcttactttgtatgacaacccatcttccccattccagtctctgtaaaaaaagaaaaaaaaaaaaaaaaaaaa

SEQ ID NO: 1711 - DNA, 2172 bp, Cricetulus griseus
gaggaaccggctgcccttcgggagactgggtcatgagcctgggctggtacagctggtgaattactacaagggggcggacaaactgtgccgaaaagcttccttagtgaagctagtcaagaccagtcctgagctgtctgagtcctgcacatggttcccagagtcatatgtgatttatccaactaacctcaagacaccagtcgctccagcccagaatggcatccagcttccggtcagtaactccaggacggatgagagagaattcttcctggcttcttacaacagaaagaaagaggatggggaaggcaacgtttggattgcaaagtcatcagctggtgccaagggtgaaggcatcctcatctcctcggaggcgtcggaacttctggatttcatagacaaccagggtcaagtacacgtgatccagaaatacctcgagcgccctctgctccttgagcctggtcaccgaaagtttgacattcgaagctgggtcctggttgaccatcagtataacatctacctctatagagagggtgtgcttcgaacagcttcagaaccgtatcatgtagataatttccaagataagacctgccatttgaccaaccattgcattcagaaagagttctcaaagaactatgggaaatacgaagaggggaatgaaatgttcttcgaggagttcaaccagtacctaagcagcgctctgaatatcaccttagaaagcggcattttgacgcaaatcaaacacataataaggagctgcctcttgagtgtggagcctgccatcagcaccaggtacctcccttaccagagcttccagctctttggcttcgacttcatggtggacgaggagctgagggtctggctcattgaggtcaacggcgcccctgcgtgtgctcagaagctctatgcagaactgtgccaaggaattgtggacatagccatatccagtgtccttcccacccccggacacagagcaggtgccgcacgcccgctgcgttcatcaagctgtgaagatctcagcccttgagcagtctctggccttgggtggcacaggtagccgagattcctccccaggatgcagcccagagatctctgagtggtgtcatcccacctgctgcagcgttagtgccttagctctgtgtccagtgcagcctcgctggacacagactggaccttagagcattttggaggttgccacatgctccctgcatggtgtcattggcacagatgggcacgcctggcttcccagccagtctttgaggttagtcggtgtaagtgctgcccattgccgggggaggggtgttatttatttggagctattgattccactcctggctctgtcatctgactgcccaatgtcacatgagccaaataacctcgctgtgccttagcttcttatcttgtggaggagatgtccgatgacccaggggctacctcaagagccttttgtgagaacaaaggagagtagaaagaagactcgagggcctttagtcccaaggttctcaatgccaactacatgctataacctcccatgaagttaaaaagaagttgatggcccttcccacctgtggccaactgaatcagaacctcaggtaactatatgtcttgaggtgccttgaaacattactttgggaagcaggacaaacacctttgaagaaagcaaatctgtaagaacaatcatatattgacataaatactcagaataagtattggccgagcagttgctcagtttgtgtctcatccaagcacctggaaaaacaaatgtgctttcatttacacaagcagtttattaagtccttgatagcagatgtaaacagatatgaatctataagtccaataatatgtatcagagttactcattaattatgggagaaaagcccctcccctcacacttgacttcaatggcaattataagtccattttgccaagaatttttaagtgcctctgttctgggctacaggagagcagcagctggcatgcacactagctgactgtgcgtttctgtagctctttggggtgacactcacatgcacagaacattggggagcactggaaatgggctgtgaccatggaaccagccagtgtcaacgacgctataaggtgttttgatgaacagttgtggttgtgttgaaacaaggcaaatactatgaatgttttaaatgcctggagcaattaaag

SEQ ID NO: 1712 - DNA, 2171 bp, Cricetulus griseus
attacccttactacaggactgctgacaagggctggcagaactctatccgacacaacctttctcttaaccgttactttatcaaagtccctcggtcccaggaggagcctgggaagggctctttttggcgaatagaccctgcctccgaagccaaacttgtggaacaagcattccgaaagcggagacaaagaggtgtctcctgcttccgcacccccttcgggcctctgtcctcacggagtgctccagcttcacccacccatcctggactgatgtcccctcgttccagtggcctgcagaccccagagtgcctgtctcggggagggttccccccattccacatgatcccgacttggggtcaaagttagcctctgttccagagtatcgctattcccagagcgccccgggctcccctgtcagcgcccaaccggtgattatggctgtccctccccgaccttccaacttagtggctaagcctgtcgcctacatgccagcttccatagtgacctcacagcagccctcaggccatgctatccatgtggtgcagcaggcccctaccgtcaccatggtgagggtggtaaccacctctgccaactcagccaatgggtacatcctcgctagccagggctcagccgggggatcccacgacacagcaggcacggccgtgttggacctgggcaatgaggcaagaggtttggaagagaaacctaccatagcatttgccacaatccctgctgccagccgagttatccagacagtcgccagccagatggccccaggagtccctggacacacagtcaccatcctacagccagctacaccagtgaccatcgggcagcaccatcttccagtccgggctgtcactcagaacggaaagcatgctgtgcccacgaatagcttaactggcaacgcttatgccctcaccagccccctgcagctcctggcagcccaggcaagttcatccacgccagtggtcatcacccgggtatgtgaggtagggcctgaggagtcaacagcagctgtctcggtggccactaatgccacgccgacccagcaacctccactaccacatctgcctcttccagcggggaacccgagatcaagaggtcccgggtagaggagcccagtgggacagccaccacacagcccacagcaacagcagccactggccctcagggcccaggtaccggtgagtgaagtcacctgcaggaaggtggaggttgggactcacgccacgggtgcccaggtggccagccgctgcagtcaaggacggagggagaacctcacagctgcctgcagctgtgccacaagagtggctgccacacttggacaatttcctttttatctcctgtcctcccatggtttgaaacaaaacacataaacacgttcagacagcttgattgtatagaaggggcatctgggatccctaatattaccttagcttgattcctgggctgggaaaaggtaggggcaagaagaagaggcccaaactgtcttccaggtctccccttgaattctgctgtgtccaggggggaaggggcagcagctgtgcacgtgtgagggaggggctaaagccaatagtgaggtcgttctttttcttaactgaatgataattctgtaaaagtaactgggggggaggattcaggcaggaagtatgtgagtgagtgctcgcatgtgtggttttgtttttgtttttttacagtggctgtttaaagtgtttccatgatatgtttaacacttagtgctttaaaagcagtggtatcctatgcgctggaaatcctgattccagagatgggacatgccccactcagtgggtgaaggtcccacccaagaggcaggggtaagaaaggcctgtggacccacatctaagcagcaccacctgggcgttcatttcagatgggatacacagtatttttttattaacagaaccatccttttttaaaaaaaaaagaatttgacacctgaatgtgatttctaactattattagacgttaatgttttaaatctataacaaagtgggaaatttctacttttctttttcatccatttgaactgttcttttatctattcaattgttgtaagtggggcggggaagctctgttttctcctcttagtgtttgtttctataaccagaaataaaaattatatattaaagagatgtaacccaaaaaaaaaaa

SEQ ID NO: 1713 - DNA, 2171 bp, Cricetulus griseus
ctctctgcccacccggcctctgcagaagggccactatggctctggccggagccggtagccagctggggacccttggtgtggggcgcctgcctgtgcgtcctggtgcacgggcagcaggcgcagccagaacagggctcagacccgggacgctggcgacaactgatccagtgggagaacaacgggcaggtgtacagcctgctcaactcgggctctgagtacgtgcccgcggggccccaaagaggcgagagtagctccagagtgctgctggcaggcgcgccccaaacgtctcagcggcgcagccaggggggaccccggcgtcggcaggcgccatccctgcccctgcctgggcgcgtgggttcggacactgtgcgtggtcaaacgcggcacccattcggcttcggccaggtgcccgacaactggcgagaggtggccgtcggggacagcacaggcatggctcgggcccgcacctctgtctcccagcaacggcacgggggctccacctccacctccgtctcggcctcggccttcgccaccacctaccgccagccatcctcgtaccagcagcagttcccctaccctcaggcgcctttcgtgagccaatatgagaactacgaccccgcatcgcggacctacgaccagggctacgtgtactatcgcggtgcaggcggaggcatgggtgcgggggcggcggctgtagcctcggctggggtcatctatcctttccaaccccgggcacgctacgaggagtatggaggtggcggcgaggagcagcccgagtatccggcccagggcttctacccagccccggagaggccctatgcaccgcagccccagccccagccccagccccagccccagcctcagcctcagcctcaaccctctgacggccttgaccgtcgctactcgcacagcctgtacaatgaaggcacccagggcttcgagcaggcctaccctgatcccagcaccgacggagcacagggctccaccggggcaggtggcacctatgctggtgatccccgcctcggctggtaccctccctatgcagccaatgtgcagcccgaggcctatgtccctccacgagcggtggagccacaacccccgttccgtgtgctggagccgccttacctgcctgtgcgcagttctgatgcgccctcgccgggtggggagaggaacggcgcccagcagggccgtctcagcgtgggtagtgtgtaccgacccaaccagaatggtcgcggcctccctgatttggtcccggaccccaactatgtgcaggcatccacatatgtgcaaagagcccatctgtactccttacgctgtgcggcggaggagaagtgcctggccagcacagcatatgcccctgaggccaccgactacgacctccgagtgttgcttcgcttcccccagcgggtgaaaaaccagggcacagcggactttctccccaaccggccacgccacacctgggagtggcacagctgccaccaacattaccacagcatggatgagttcagccactatgacctgcttgatgcagccacaggcaagaaagtggctgagggacacaaggccagcttctgcctggaggacagcacctgtgactttggcaacctcaagcgctatgcatgcacctctcacacacagggcctgagtccaggctgctatgacacctacaacgcagacattgactgccaatggattgacataactgatgtgcagcctgggaactacatcctcaaggttcatgtgaaccccaagtacattgttttggagtctgacttcaccaacaacgtagtgagatgcaacatccactacacaggtcgctacgtttctacaacaaactgcaaaattgtccagtcctgacctctgagtggacagacccttcttgtctctccttaaaaagcaggccctgctcccaggcagcctctcccaaaaagcccagccccctagcccaagggcaagggcagctggtggctggggcatccctccctgccggcctcagggagtgaacgtggaccaaaaccacagggattctggatgccaggccccattttgtacctaactctcctctacgacatcctttcgtctgttgttggttgttaatttttatattttggccattccacacagcaagattgcccgggtgctgaataaaacaagggttttctagtctagga

SEQ ID NO: 1714 - DNA, 2170 bp, Cricetulus griseus
aagggcttagaaactggctcctcaacagtcatcaacaagacattcctggaaaaccaagttcctcaaagtgtaacagccattgtagcaccagctctttctctactgaagtggaaaaggtcgaagatgtagagctccttgatcaagatgagctagatttgtctgattggttggtgactccccaagaaccctgtgaactgaagaagcctgagaatggcagctgtgaaaccagtgagaagtttaaactcttattccaggtattcaaagagccctacaatgtgaatgattggcttgtcaagcctgactcctgtaccaactgtcagggtaaccagcccaaaggtgtggagattgagaacctgggcaatctgaaatgcctgaatgaccacttggaggccaaaaaaccactgtcagttcccagcatgaccaccgagggctggcttgtccagaaccatcaggacccatgtaaagtagaggaagtatgcaaagccaatgagccctgcacaagttttgccgactgtgtgtgtgatgacaactgtgagaaggaagcgctaaaattgctgattccttccaagtcataaggaacagttctctgtcagaatggcttattgggcccgcatgcaaaggaagaggccctaaggaagtgcctagtactgaagacagagctggcaaagaaatgcttaaaggccctatggccacttcctggtgttcttttaatactgctgactgggtcttaccgggaaagaaagtgggaaacctcagccagttcacctctggagaagataagtggctacttcgaaagaaggcccaggaagtatttcttaattcacccctgcaagaagaggcctcccagcagtttgtgatctctttgcctgtatgcagcttaaagttgataaagacaaatggctgtatagaactcctctacagatgtgaagcaatggactactagaattaagcagcttccctgcagacttcacatctttgagctgagtgactgtgacttgccaaatcattgcttattccaaggactggctagtcagcttaattcctctgccgcttagtttttaactagtaaacagaaatcaccaaattatcagttagtgtgtgaaagaggcttgatgctacggtgtgattcagttccttcttacagaagcactaacttaaccgactcccatactagaaacagcatcttggtacactggcctttaagtaattccatggcagacacttagttttaaaaagtgaaatatttctatatctagtgtgttagtgtctaaatgtctattagttacattgcaactttttatataaaaatttagtctacatgtcatttctaacattttcattcgaaagaaattaagcctcctgtagttgttgcctttattcctttctaagtatccagtgggctctttgaaaaggacttctgcttcaagaccacttttagggcagtcagtgcccccagagtcctacagattttgtctttaaagagccccaggccaactaaaacagaaaggcaagatgtgttaggaatgtagtttttgaccactcatcaccctaaggatttattggtgcatcctgtgtaaatggaggctgagcttgacacctggtgctcttaactagggataaagtcaatgtcctgtcacttcaagcacagcatccggaacctccaaacgtatggtgcagtgacatctcgattaacaggctgtgcgaaacacttgtgccttggagtgtttattgaaacttcatagaatgacatcctcaagttatgcttacattttagaaagtttctctaggatttatgttctacagttctccaggataacttagctgctttctatgctttgaactatgaagcctctgaactgcctatgctattggaattacttgtgggaaaattttatggtcccatagtgacattactatacaactttaccatacttactaaactctgaatcacagctgaaaagagcctcatattttcttatgtccctccagatgccactgagtattatcaagttggtgggtaaaaacaatttaaggagccttcccaacatcttaggttgcagggaactttgtggtttctcttttgaggtctaacacactgtattttacgttattaaaacataattttaagttaatcactatgctaatgatatactaaacattcttttacatt

SEQ ID NO: 1715 - DNA, 2169 bp, Cricetulus griseus
  modified_base (2093)..(2093): a, c, t, g, unknown or other
gagtcgtaggtgcccggcgtaacggcattgcagctgagccacggctctgaggagcgtgaaccgtggccatgaaggaagagaaagatcacaggcctaaggagaagcgagtgaccctgttaacgcctcagggtgccacaggcggcagcgtgggagctactgccgaaggcgccagaggggaagataggcacgatcgcaacagagacaggaaagacgctttgagcaaggtggtaattcgaagattgcctcccactttgaccaaggagcagcttcaggaacatcttcaacctatgcctgagcatgattattttgagttttttgctaatgatactagtctgtatcctcatatgtttgccagagcatatatcaactttaaaaaccaagaagacatccttttattcagggaccgatttgatggctatgtattccttgacaataaaggtcaggaatatcatgctatagtagaattcgcaccgtttcaaaaagctgcgaaaaagaggattaagaaaagagatacaaaagttgggactatcgatgatgatccagaatacagaaaatttttggagacttatgccacagataatgaaaaaatgacatctactcccgagacactgctggaagaaatagaagccaaaaaccgagaattaatagctaaaaggacaaccccacttttgagcttcctgaagaacaagcagagaatgagagaagaaaagagggaagaaaggaggagacgcgaaatagaaaggaaaagacaaagagaagaagagagaagaaaatggaaagaagaggagaaacgaaaaagaaaagatatagaaaagctaaagaagatagaaagagttccagaaagagaaaaaataaaggatgaaccaaagattaagctgctcaagaaaccagaaaaaggagatgaaaaagaacttgataaaagagacaaagcaaagagaccggacaaagagaatctgactgaagaaagagccagtgggcaaagttgtactctgcccaggcgttctgatgttgaactgaaggatgaaaagccaaagaggcttgatgatgagagtatcagagattacagagacagggatcgggattatgaacgagatcaggagcgcatgatgcgagaacgagagaggctgaagcggcaggaagaagaacgccgcaggcagcagcagaaggagcgctatgagaaagagaaggctttacaaacggaaaggaagaggaaatgaggagagagaaagaagcattcgagataaaggaaagaagagtgagaatccagaatcaatatgtgcctcagaacaaaattgaaaagaaagatgaagtgattaagagagaccgcataaggaacaaggatcgtccagcaatgcagctttaccaaccaggagctcgaagccgaagtcgactctgtccccctgatgacaagcctggagattcaccagtggaacaaaaagcaggaaagtggtattagccaatagaaaagaaggaggagaggagtgagaagtcccgatggccataggtgtcctgactgtccaggcagccaaagagcacgtattatgctatccagaagtgccttcagggcaaaggaacagagaacaagaaaacgggtcgactgtgctggtggggtgcactgcagaggagtgtagtgtgtctaagcaggaataagattgcaggctcagaatcagaagaacaatttcattgtcttttgcagttttcacaattttaatgtctcagaaaaagaaggtaggaagagcattgcaagtgaaaaatgtgaagtaaggacttaactttgacaagccaaaaaggagcagggtcgaaaatcaacaggtgttctaaatcctggcttggagtgtcttagttggaatggaggcagaagcacactaagtcttgttgggctctaactattttgcattgttggtgataaccattgacttggtagtgtagaagcaacaagcatgtaattatagcacaagtagagtgcaggatagaacaaattacggctgatggaaaagattaatagtcaaccttacatcctatatcctgtgtctgaagtttttgtaattatagcttgttttgtttacttctgtgaaagtagcatcaaaaaaatntttgtaaatgtcttattttgcctttagctatttttttcattaataggtaaagtgtaatccttgtttagttgctgac

SEQ ID NO: 1716 - DNA, 2169 bp, Cricetulus griseus
cgggaaaaagggctgagcttgatggaggatacaccagagaatgataacactttatgttcaagattgagaaatgccaaagtagaagatttaagaagtttaactaactttttggatcttgcactgaaacttttgttctggctgtcaacattttggatagattcttggctcttatgaaggtgaagccaaagcatttgtcttgcattggagtctgttgtttttgctggcagctagaatggtggaagaagaatgcaacgtcccacccactcatgatgtgatccggatcagtcagtgtaaatgcacagcttctgacattgaacgcatggagaagataatctcagagaaaattgcactacgagttggaagctactactgccttaaactttttgcacttataccacgcaattgtattttgtcatacttcagaaaggaaggaaatactgagccttgataagctagaagctcaactgaaagcttgcagctgccggcttgtcttttcaaaagcaaaaccatctgtattagctctgtgccttctcaatttggaaatagaaacaataaaatccgttgaattgctggaaattctcttgcttgttaaaaaacatttgaagatcagcgacacggaattcttttattggagggaattggtttctaaatgcctagcagagtattcttctcctgaatgctgcaaacctgacctgaagaagctggtttggattgtttcaaggcgcacagcgcaaaacctgcacaacagctactatagtgttcctgagctgccaaccatcccagaggggggctgttttgatggaagtgaaagtgaggactcttgtgaagacatgagttgtggagaggacagtctcagcagctccccgcccagtgatcaagagtgcaccttcttttttgacttcaaagtggctcagacactgtgctttccgtcttagaattcacatggtctgtgtcaggatttaaaggaagtgcacctgtttcaaagcaataaatggggagtaggtagttctctagtacagctcccatctagacaggaattacagactggaatacctaccttctatttattattcaggtcaggtctggcctgttttcatatttaatcctaagccatcaaatgggttagtgcctcttaacagtactttatacattggcactttattttcttgttgactctatctgtggggaggaaggaaggtgctgatacctttgttacttttctaagatttttttaaagatgagtagtgtcgctcatcgtaaactgtagaaccttcaggtatctttatttaacagatcgggagtgtgcaagtgcttccttagcagggacagtagataagcctttcatggtttgtctcggatttctttctccccgttctcagagtagactgtacaggactcttgagtgtcaaacaccaaccttgtttcctaatgctagtatattgtcttatacagatcctacacattaagagttatattgacatgtctgtgaattttagtttctaaatgtcttgagatttctgctaaagcagaaattgtcatcaggctagggctattagttgcattcttaatacctaagtattgtcaaactgtagtattattttgttgttatctaaaatgcatgcacttgtatggaacagagcaggaaatggaattgattagcactgattgagttcatctcactttcttgtattgaaaatctgcatgattgctttctaattgttttgtatctcacatttcatgatgtattgtatatgggtgccaagatttgaatatgaagtgaaagacctctggtgtttctagtattagttcaaagcaattctgtgtggtgatacagccataaggatggggatgtgtacgctctgtacacagaagattttgtacagagaatttttaactttataaacctatgtgaaaatgtaaatctttaaaaatgtacataaaatactgtatttttttaccttgtgtgtgtggtaatctggtcagtgcatgtaaatataatttattgtgtattctatattcccagacattgatgacttactttttactagtaagtcaatacccattgaggtgttttccaaagtagattttttttgaagtcagaataggttgtaattgaaaaataaaaatattaatgaattctaccttaaaaaaaaaaaaagaaaaaaaaaa

SEQ ID NO: 1717 - DNA, 2169 bp, Cricetulus griseus
aagagtggggacgggatgaggcggcggttggtccccgcgcagcgagaggaggcagtcgaggcaaagagccgaaccgggcgcaggtcctgagtgtagagcgctcccgcgggccgcccgagttgcgccgcgcgcgctcccgcgaaggcggtccgagcccgtcgcgcgcgcgcagccatgaacctggcgagccagagcggggaggccggcgccggccagctgctgttcgccaacttcaaccaggataacacgtctctagctgttggtagtaaatccgggtataagtttttctccctttcttctgtggataaactggaacagatctatgaatgcactgacactgaagatgtgtgcattgtggagagattgttctcaagcagcttggtggccatcgtcagcctcaaagctcccaggaagctgaaagtttgccactttaagaaaggaaccgagatttgcaactacagctattccaacacgatcctggctgtgaagctgaacaggcagaggctcatcgtgtgcctggaagagtcgctctatatacacaacatccgggacatgaaggtacttcataccatccgagagacacccccaaaccctgcaggcttgtgtgcactgtctataaacaatgacaactgctacttggcgtatccagggagtgcgaccattggagaggtgcaggtcttcgacaccattaacttgagagctgcaaacatgatcccggctcatgacagtcccttagcagccctggcttttgatgcaagtgggaccaagcttgccactgcttctgagaaggggacagtgatccgtgtattttccattccagaaggacaaaagctgttcgagttccggagaggagtgaagaggtgtgtgagcatctgctccctggccttcagcatggacggcatgttcctctctgcatccagcaacacagaaactgtacacatcttcaaactggaggccgtgagggaaaaacctccagaagagcccaccacctggaccggctactttgggaaggtgctcatggcgtctaccagctacctgccttcacaagtgaccgaaatgttcaaccagggcagggcctttgccactgttcgactaccattctgtggccataaaaacatctgctccttaaccacaattcagaagatccctcggttgctggtaggagcatcagatggctatttatacatgtacaacctggacccgcaggaaggtggcgagtgtgccctgatgcgtcagcacaggctcgatggcagtatggagacgaccagtgaaattgtagactccgcatctcatgactgccccttagtaacgcagacgtatggcacagcagctgccaaaggtgcctatgtgccctcgtccccaacaagacttgctaaaggacaggacgccaacttagaagcctatacagatgatctgggtgccgtggggggcgcatgcctggaggatgaagccagtgccctgcgcctggatgaagacagtgaacatcctcccatgattctccggactgactaatcctgacctgtgaattctggcccggtcgcagagaacactggcctggcagaggacttgtgcattgctgctatgaactttgacctgaattgagggagaggatggcagagatgaaacaaagagattgtagttctagtctatccatactgttgagaaaatacactgttttcaactcagtgacttcaatcctgcttatgaattttagctttttatttcctctcattctttttattttatttttatttttttttttatttttttttttttttttttgtccaaaattaactgtttggtgaagtctgtggcgtctccttgctttgcatgcatgatgtgccaagccagcataggagagcgagtggtcactccatagcaaaccacagtcatcaggtctcatggcaggacacaaatgaagaaggctctgtgtgcagtgattctgcagggataggcccatccgccaactgagaccagccagggagccagtggacagtggcctctgtcaggagccctcttgccctacagccccacctggaccattttccctccatttattatactctttccagattggatcattctgggactagctttctccatggggactgtcgtttgcagtgtgttctccatggggatcttgagagggagagaagctgtctctgctct

SEQ ID NO: 1718 - DNA, 2169 bp, Cricetulus griseus
tccccgaactccgactgtccccagcacacaataacttggacctacagccagtgacctactgtcgagccacgcccttctggtgctccatctcctactacgagctgaaccagcgagttggggagacattccacgcctcacagccatccatgacagtagatggcttcaccgatccctccaactcagagcgcttctgcctgggcctgctgtccaatgtcagtgcggctctactacattggaggggaggtctttgcagagtgtctcagtgacagtgctatttttgttcagtcacccaactgcaaccagcgctatggctggcaccctgccaccgtctgcaagatccctccaggctgcaacctgaagatcttcaacaaccaggaatttgctgccctcctggcccagtctgtcaaccagggctttgaggctgtctaccagttgactcgcatgtgcaccatccgtatgagctttcgtcaaaggctggggagcggagtacaggagacagacagtgaccagtaccccctgctggatcgagctgcacctgaatgggcccttgcagtggcttgacaaggtcctcacccagatgggctcccccagcattcgctgttccagtgtgtcttagagatactaggagtgaagggcgtgggtggggagggtgggcttggggaaaatggccttggaagagaactccatccaacctgatgcatatgctgtgttggtttatggagccagctgcgttaatgaattcacctagcatgggttcttggaaatgtcttttgttttacaaaaacaatcctgggtacgtacattggctggaagaccagagtggacccagcaactgctgcttgccctgaggtttggaaacaagatttacagaagccagttcaccagaaggtaagacatccgaggccgacatgggcaaatgaaaagggctattacaatttttttacaccttgggaaattgcaggcttggtgcagagaggcctgtcatcttcactctgggatgtaagattacccagctttggtaaaagactgccaccgaaaactgctgcagtgatactgtgtaatgagcaccgtgcccagtggcaattacagagaaaacgagtataaattatttcaactggaaaaaaaaagtacccccccgcccggctttttagaacacagcacatgggatcgccacctgcaattggtacttcttggctgctgtttctgttgtgaaatgactatcccatgtctttgctatccgatttcctgccgaagttcctgtcctgttccaagaagggaagaaagtgccaccctccaaggctgttggaagatttccccactgagccacagtgcttacggggcgttgtggtcttgctcttccccaacttgcttttcagaatggggatatattccagggcttgatgttttcactgaaaccacaaaggttttctttaatagtgtgtgtggtcacgcatgtgcctgagctgtctggtgcagaggtgagtatctgacttcattcttagccccaagctgccatttcggggaacatgcttcagcatggctatcacctttgaaacggcccctgcagttggctggtgttaacacaaaagtgatgtttagcattctgctctttccatatttatgtaacaactccttaaaaccattcagacagataactatttaatttcttaaagacagttgtaaaggttctctcccccaggacagtgactcggtagagctgaggcacagccagtcctgaaccctgatcgaggctgcagttggttttttttttggtacaggatccacaaaatcagaccagactgggttaacaagtggtggcatgcacaaacaggccgctctagtcaagcccaggctcttcaacagcatgtcctctgaaccaatgcccctcccttctgggactgaaaacttcacatagaaattggagccatctttgtcccagaagcctttgctgctgccagggcaagtgggctggtgtggactctcatttaggaagctgagattactgtcactattcagccatccagggctttagtatctttgtaaaaagcatgtatttatagtgttttagatttttctaacttttgtatcttacagcattgtaccccaatgttaaggagccgtgtcccctcttataagcgccctcctaataataaacttttcactagtaaa

SEQ ID NO: 1719 - DNA, 2168 bp, Cricetulus griseus
atgggatgtttacagccagctcctttgcaattcatgaacatgcaaaatgtagaatttattgaagtcactttattaatggttcttattcatattgttccaactgtgttttttagacgacaagaattgttactgtggcaaataggctgtgctctgctagagcatggtagtcccaaaatcagatctttagcaattagccttttaactgaactctttgagcttggaggattaccagcacagccagccagcacttttttctagcttattttttttttggaattgctacaacaccttgtaggaatggatgctgaccaattgaaactgtatgaagagccgttgtcaaagctggtaaagacactattcccctttgaagcagaggcttatagaaatattgaacctgtctacttaaacgtgctgttggaaaaactctgtgtcatgtttgaagatagagtgcttatgcggctcaagtctgatttgctgaaagcatctttgtgtcatttactgcagtatttccttaaatttgtgccagctgggtatgaatcggctttacaggtcagaaagatatatgtgacaaatatttgtagagcgcttgtagatgttcttggagttcagaaacatattgggtacttgttgggaccattttatgcagccttgagaatggaaagtatagaaattatcgagggaattcagtgtcaaactcaacaggaaaatctcagcgatcttaatgatgaggtgtcaccaaagaggcgtagactcagctcttctctcaactcttccaaaaggccatccagacagtctgaagaccttaatgcaggagaatcgagacttgccgaactgtatgtggaaagggcaaaatggctgtggtccaagggtgatgttcaccaggcacttattgtacttcagaagggtgttgaattatgttttcctgaaaataaatccccaactgagagtaagcacatgctaatccatggacgagctacactgactaagttggccggtttatggaagaaacagctaattttgaaagcaatgcgattacgaagaaagaaaaaggtggtcgttctgatcgtgtgcaaatgagaagtgatttggctaaaataaatagtgttctcacagagcacacaaatcggttagctccgtatcagtttttgtacttgctttttcttacagttgatttcttcgaatttgttcattctcacgatgaagtttttgttgtcttgatggaaataatagccaaggtattcctggcctaccctcagcaagcaatgtggatgatgacagctgtgtcaaagtcgtcttatcccatgcgtgtgaacagatgcaaggaaattcttactaaaagctaatccatatgaaaaagtctttagaaaagtttgttggagatgcaactcgactaactgaacaagctactagaattgtgcaacaaatcggttgatggaagtaattccaacattaagcatgagcactcactttaaaatgcttaaaaagctggtagaagacccaacatttagtgaaatcctcattcctttgcagtcagtcatgatccctactcttccgtcaattttgggtgcccatgctaatcatgacccatttcctggccattgggcctatcttgtctactgcagtcatgtcaatggttggctatatcctagggcttggagatcggcatggtgaaaacattctttttgattctttcaccggtgaatgtgtacatgtagacttcaactgtctttttaataagggagaaacttttgaagttccagaaattgtaccatttcgcctgactcataatatggttaatggaatgggtcctatgggaacagagggtctgtttcgaagagcatgtgaagttacactgaggctgatgagggatcagagagaacctttaatgagtgtcttaaagacttttctgcatgatcctcttgtggaatggagtaaaccagtgaaaggacattccaaagcaccactgaatgaaactggggaagttgtcaatgaaaaggccaagacccatgttcttgacattgaacaacgactgcaaggtgtaatcaagacccgaaatagagtaacaggattgccattatctattgaaggacatgtgcattacctcatacaagaagctactgatgaaaacttactatgtcagatgtaccttggttggaccccatatatgt

SEQ ID NO: 1720 - DNA, 2167 bp, Cricetulus griseus
ctacaacaacctgtggattatcaagaaacataatacaaacacagatcccctagatccttcattcccagtggagtttgtcagacatggagacatcattcgactagaacacaaagaaacgactcggaacctgcacagtcactatcatgaggcccccctgacccggaagcactatcaggtcactggctatggcataaatgggacaggggactcaaatgatttctggcggattgaagttgtaaacagaaaatttgggaaccggatcaaggtactgagaagtcgaattcgcttcatccatttggtcacaggttgtgtcctggggatcttcaggaaagattctgcccaggtggggctgggagcagttggaagtaacttgcactccgtacctaaaagaaactgctaactccatctggaacatagaagagcatatcaatcccaaactgccaaacatcagcctggatgttctgcagcccagtttttcagagatcttgctggagtcccacatggttatgatccggggaaacaatggcctcaaacccaggacaatgagttcacatccaaccctggcactggcctatcaattatcagggcctgcacttctcaggggccaatgacacagacctcagagtctatctgcttggcaaccctgtggtctggtggctgaatctggtgagcattgtcctctaccttctctctgggagcaccattgccatcgctctgcagagaggggtgcagttgccagcagagttggaagggctgaccagggtgctgcttcgaggaggcggccagctgctgctgggctggatactccattacttccccttcttcctgatgggccggatcctctacttccaccactacttcccagccatgctcttttctaccatgttgacaggtatcctgtgggatacactactgaggctctgtgcctggggcttggcctcttatcccctgggtagcagaatacatgtgatgggaatcctaagcctgcttctggcaactgcctacagcttctacctcttccaccctctggcttatgggatggttggtcccctagcccaggaatctgagagtccaatggcaggactaaggtggctagaatcatgggaattttgaggccactgccaggaccccagcctggatccaggtattgtccagggacacccagctatggagccagatcctgggcccttccaactccaggggagctgcctgaggagcctacagcattctgctaccctcaggaccaaactctgggaaacagacctggatttaataatactaaaaggagccacagccctgtctgcagcacctacacaggacactttacctacagcaccacttggtgccagttccctcctgtgcaacacaaggaaagcgggcgtgagtgtggagggtgcatatgtttaatccccttggagtgtagaccatctaactggagtgaagtgtcttaaattccaagaatggtccaaggttaacaggatattctctggcatctttttacattgaatgtggtttcattggggtttataaggtccataagaaattcttggatctccaggagggctgagtgctgccccacccctcacagtgttacaaagaaaggcacagcaggtgggaccaactctgacagggtcagagctctttaaagcatcttcaggaggtggttgccacggagactggaaattggtctcagggacaggctgtgctacctgcagagtggtggagagggaagcttctggaccctgcttggacattcagctggagcatcattaatgttaatagaggaaatgcagccctgtcaagagcaaggcaaggtagctaattagatctgaggcccactgaccatcctctcccatggctgcactcttttgactcctctcctccccccagcaggaagtgcggcttgtgtgtggagtctgagctgcctgcctaattgcatttctggcagggactgcggagctctgctcccattaaccctccccaacctttgcctgcagcaaccaggccagagcttgttctgagcccagtggggtaccatctgggtagattttcctgaagaggggatgcaggaatctgtgcttggctcttaacaaggagacccatgggggtattggacaggtggctgaattttcttgtgtcttatttctggaggcacttattagaggga

SEQ ID NO: 1721 - DNA, 2167 bp, Cricetulus griseus
tacatctgaaggatctctggttggatggaaatcaactgtcttgaattacctcaggaaatagggaatctgaagagcctgctctgcttagatgtctctgaaaacaggttggagagacttcctgaagaaatcagtggcctgacttctttaacagacttagtcatttcccagaacttactggaaacaattcccgatggcattggaaaactaaagaaactgtcaatcttgaagctggatcagaacaggctcacacagttgcctgaagcaattggggattgtgaaaacctcacagaattagttcttacagaaaaccgtctcctgactctacctaagagcattggaaaacttaagaaattgagcaacttgaatgcagacagaaataaactggtgtctttaccaaaagagatcggcgggtgctgcaacctcactgtgttctgtgtacggaacaacagactgactcgaataccttcagaggtgtcacaggccatggaacttcatgtcctagatgtggcagggaacaggttgcgtcatctgcccctgtcgctgaccaccctgaagttaaaggccttgtggttatctgacaaccagtcacagcctctcctcacgttccagactgacactgaccacaccacaggggagaagattttaacttgtgtcttacttcctcagatgccttccgaacctatctgccaagagagcctgtctcgctgtggtgccctggaaagcctggtgagtgacatctctgaggatgcctggaatgaccgcacagtacacagagttagtgcaatccggtttttggaagatgaaaaggatgaagaggaaaacgaaacgagaacacttcagaggcgagccactccacacccaggagaattaaagaacatgaaaaagtcagtggagaatttacggaacgacatgaatgctgccaaaggactggattcaaacaaaaacgaggtcaaccacacccctgaccgagtgaccacttcagtgtagcattggcctctgagttctacctactgtgtcttccctgctgtagagatgttcctgtgcttgcgtccatccgaggagcctcctgcagtcctcgtgctcaccatccctgtgccaggatgctgctctcgcacaaagtgccttacgcatccctcagtcacttagggtaccagtgggctctcatcctgattgctcctcaatctcagttgttcataatgtgtagaatacactactgtcaacacatctgaccttcgtttttgtcttatgttgggcttagagcaggaaggggaattccagccttcttccctctgttgagtgctcgacagttttgaacctaagttctcatggacctactgatgagaggaagctttatgtatggaaaaaaaaaaagaatacttttttaacttttcatggcagctcagatggtgtaattttaaaattttgtataggtatttcatacaaaaattatgtatttctttgttattttatcttgaagacggtacatatttttcgtatttgtgcagaaaaacagattaggcctaaagtattcgtttttatctgtaccatccactccgtgccttactgtatcctgtcctgtcaaaccagttgtaaacagtggcatccttgagcatcgagatgggaatatgagcgtggtcaatttaaagcagtgttgcatttttagcaagtaatgtaccaatggatttctttgttaaccaaaaagatgaatttatcagtgatttgtaagttttatccagtgatttcttcaaaaaagacgagccggaggattagactgctgatatgtcatttcctatgctttcccttgtcctaagttttaatgagtgcagcatcagactgtgcctgctccaaaggcatgtgccatttgtataatgatgtacagcagaaaagcacagaaaaaaaaaaaactggttcagaaattcaatggatcaataacttatgtattgtagaagaataactcttattgaagaaagctttaaaagttttatacccagataaaaagaccacaataaagcaaaaatagaatataccctaatagaaatgttgctatctttatacaagtgcactttgaattgtaaatagttttaatcaaagcaataacaaaacactgcttcaagtatttactttaaatctgctaagttaaggggtgccagtcactgtggtgtttggg

SEQ ID NO: 1722 - DNA, 2167 bp, Cricetulus griseus
tctccggccgcatctcccaaccccagggccacattcttgggggcttcttcgcttcagctgctgtgttttccgtgacacgatgttccccttctctggctgctggaggactgaactgttactattgctagtcctggctttggctgtgagagaatcctggcaggcagaagaaaagtcttgtgacctggtaggagacaatgataaggagtcaaagcaagagaaggctctcctggagaggctacggccactgtttaacaaaagttttgagagcactgtgggccagggcttagatacatacagctatagattcagagtatgccgggaagctggcaaccactcctctggagcaggcctggtgcagatcagcaaaaacaatgggaaggagacggtggtcgggagaatcaacgagactcacatcttcaatggaagtaattggatcatgctgatatataaagggggtgatgaatatgacaaccactgtggcagagaacagcgtcgagcagtggtgatgatctcctgcaaccgacgcacattagcgggcaattttaacccagtgtctgaggaacggaacaaagtccaagattgtctgtacctcttcgagatggacagcagcgtagcctgttcaccagaggtttcccacctcagtgtgggctctatcttactggtcatatttgtttcattggttgctgtctacattattgggggtttcttataccagcgactggtggtgggagccaagggaatggagcagttcccccatttggccttctggcaagatcttggcaacctggtagctgatggttgtgactttgtgtgccgctccaaaccccgcaacgtgcctgctgcctatcgtggagttggggatgaccagctgggggaagagtcagaagaaagggatgaccatttgctaccaatgtgattgcacttttactgtccagccagctctttattccccacaccaaagcatacacagccagacttctcaagccgcctcttctcatctctcaccttgccgttaatactcttgctttccagttggcttttgatttgaccctaaactgcctccctttgctcatattgtttctcctctgcacaagtacagtggaaagtagacatagggtcttcggggctgactcttgtgccgtcaggaagagcaaggaccgctaaatgggcagaaagccacgagccctgtctaaatattttcacaagttgagacactggatttctttaattaaaaaaaaaagaagttgctttgcagtgcttacctggctgtagcccaaacactgccatttgcctcgagcctggagtgagtcactgaaatgccccttgtatgggattagggcaggaaaaaaaaatgtgaaattccccagctgcaggattctaaggcaccacctaaggtgttttccgatctttctgtgacttgatagctagaattgggctccaagctgtggttttaaagccatatgtagcccaaatgtctaatcaagcagtcctaccctaaaggaaatagacctgtgttcctgaggccccagagcttgtgtgcaggaaaagctggtaaacctgctcttgctcattttgctctactagtacttctcaacttgtgttgcacttttctcacaagtctgtagtttggctttttatatttctcccaatcttatagaaagggaatggaagcagaagtggacatgggtctgcagttctctgctccgggtagggaagactgctgctcctgttcctcctgctggctcagggaagtgtcttacccacgtacctatgagaaaagggtttagcctctcccacttccttctgtttaggccatgtgccagaatcacaggctgatcttcctgtaatagtgaactcctaggccagtaagtaacaacacatctgaacacaggagatgtggaaaaggcagggccatttgttacctttagagaaggacatgaaatgatgtcattctgacttctccgtacccttgtcaatggtagtgggattttttgtttctttctatacaggaaaattaatgttatttttaaaaaggcatctcatttgttgtttgcatagttccccagtgttttaaatgaaaaataatacaccactttttgtacaaaaacataataattaaaaaacaaaaaaccaaaaaaaaaaaaaaaaaaaaaaaaaaaaaaaaaaa

SEQ ID NO: 1723 - DNA, 2167 bp, Cricetulus griseus
gtagatttaggtccgcgggatcagctgactctctgcagtgcagcttgcggagtacgaggccaccatgtacgctctcgccctcttcgccagccttctggtcaccgctctgaccacccctgtccaagacccgaaggtatgtgctgggggctcagcggtgctgtgcagagacctgaagacagcagtggaatgtggggccttgaaacactgccaacagatggtgtggagcaagcccacagcgaaatcccttccatgtgacatatgcgaaactgttgtcactgaagctgggaacttgctgaaaaataatgccacccaggaagagatccttcgttacctggagaaggcctgtgagtggattcatgactctagcctccagaactcgtgcaaggaggcggttgattcttacctgcctgtcatcctggacatgattaagggggagatgagcaaccctggggaagtgtgctctgcactcaacctgtgccagtctctccagaagtatttggctgagcaaaaccaccagaaacagcttgagtccaacaagatcccggaggtggacatgaccagagtggttgcccccttcatggccaatatccctctcctgatgtaccctcaggatcacccccacagccagttccaatccaagatcaacgatgatgtctgccaggactgtgtgaagatggtgactgacatccagactgctgtgaggaccaatgttacctttgtccagggcttagtggagcatgtcaagcaggagtgtgaccgcctggggccaggcatggctgacatgtgcaagaactacgttgaccagtactctgaagttgccattcagatgatgatgcacatgcaacgcaacctaaggaaatctgtgctctggttggcttctgtgatggggtcaagaaagtaccaatgaagactttggtccctgccgcctgcactacccaaacagcctgcattgcgtgccattgtgcctcagaagaagaccggtgggttctgtgaagtgtgcaagaaactggtcagctatttggaacacaacctggagaaaaacagcaccaaggaggagatactggctgcacttgagaagggctgcagctttctgcctgacccctaccagaaggagtgtgatgactttgtgtctgaatatgaacctctgctggtggaaatccttgtgcaagtgatggatccttcctttgtgtgctcgaaaattggggcttgcccttctgcctctaagctgctgctgggaactgagaagtgtgtctggggccctagctactggtgtcagaacatggagactgcagcccggtgcaatgctgtcgaccattgcaaacgccatgtgtggaactaattttccagcttgctgaagttgcagcctatttgtgggtctaggataatgaacacacaagatctatttgacttcattctaagtaggacccctagcattgctgtcttgtaagaggtgctgatggcccctttcagtgttccccttctgcctgaaggatgaggacattcagggcatcagctctccagctgccctttcacccacctgctggagggggtgctgagccagagagcaggaaggccttctgagccctgacttggtgtacggggtggggcttctgtggccacctcctatcttgaagaggttgctgctcaccttcctgtggtaccgaggagttttctatggatgatttgaagcacagggtaatcaggtctttgggttgatggaattgccatcgtcatagcacagatttcagaagcacctgcaggtggcttgcttgggacactgctttctaggtcagccttcccctctgctttcctgtgttccccctgtctaccttgtttggggttctgtgggctagggtggggaggggaaacttctgaatgtaacttgcccatgccatgtgggcctggccttttgttgtgtgagggtcatgaacagtgttgtcagcttggctgtcagggccctgcacgcccctttcctaccttgtagctcttgttgaattgctctcacctcatcatggatgaagcatctgcctggcagcgggcgatgaactgagaggcctctgtgtagcgtagtgtacagctaaatggacctagattttaatttgttttgcactaaagtttctgtgacttaataaaattctgttaaccaagaaaaaaaaaaaaaaaaaaa

SEQ ID NO: 1724 - DNA, 2167 bp, Cricetulus griseus
ggatgatgaggatgatgtgcacagatgtggccgctgccaggtggaattcactgccttggaggactttgtccagcacaagattcagaagacctgccatcgggcccctcaagaggccctgcccaccacccctgctgccactgcactgctgggccaggaggtagtgccaactgcagcagagggaggtccagaagagcccatcactgtggcccacatcgtggtggaagccacctctctggcagcagacatcagccatgctcctgaccttgttggaagtgggcacatcaaagaggtcattgtggctgctgaggcagaaccaggggatggcgagatggcagaggctccaggcagtcctaaccatcaggaacttgggcttattggggagggcgagcaggcccaagtcaagctgctggtgaacaaggaaggccgctacgtgtgcatgctatgtcacaagaccttcaaaacgggcagcatccttaaggcccacatggtaacacacagcagccgcaaggaccatgagtgcaagctctgtggtgcctcctttcggaccaagggctcactcatccgtcaccacaggcgacacactgatgagcgcccttatagatgtgccaagtgtggaaagagcttcagggagtcaggtgcactgactcggcaccttaaatctctcactccatgcacagaaaagatccgcctcagcgtgagcaaggccacatccatgaagtccatgtccagatgcaggagcttcccctgggcatgaaagccctggcccctcgagtccccagaccctgaggagcttccctgttccagtgagaacaaccgtgagaacctgctacatcaggccatgcagaattctggcatcgtcctcgagcgggttgctggggaggagagtactctggagccgtctcctccctctgtgtccagtcaccagtctctgggagaaggacccccagaactgccactgctggagatggaacagatagagacagtggccagtgaagcttcaatggtgcctagggcacacccatgccctcagtgcagtgagactttcccaacagcagccaccttggaggcccacaagagaggtcatatagggccgaggccattcacctgcacacagtgtggcaaggccttccccaaagcctacctgctgaagaagcaccaggaggtgcatgtgcacgagcgccgcttccgttgtggagagtgtgggaagttttataagaccattgcccatgtgcggggccaccgacgtgtccactcagatgagaggcctttcccttgtccccagtgtggcaagcgttacaaaaccaagaatgcccagcaggtgcacttccggacacatctggaagagaagccccacgtgtgccagttctgcagccgaggcttccgagaaaagggctcactggtgcggcacgtgaggcaccacacaggcgagaagcctttcaagtgctacaagtgtggccgtggctttgcagagcatggcacactcaaccggcacctgcgcaccaaagggggttgcctgctggaagtggaggaggtggtggtgtctgaggagagcccctctgcggctgccactgtgcttgcagaagacccccacaccgtgctggtggagttctcatctgtggtggctgatacccaagagtatattattgaggctactgcagatgacacagagaccagtgaagccaccgagatcattgagggcacccagacagaggtggacagtcacatcatgaaggtggtacagcagattgtgcaccaggctggtgctgggcaccagatcatcgtacaaaatgtgaccatggaccaggaggcagcactgggctcagaggcagctgctgctgacacgatcaccattgccactcctgagagtcttactgagcaggtggccatgacactggcttcagcaatcagtgaaggcactgtgctcacagcccgcacaggtccaaacagtactgaacaggccactgtgacaatggtgtcatcagaggacatagagatccttgagcatggaggagagctggtcattgcttcaccagagggcccaattgaggtgcagacagtcatcgtatagctggagggcctctacggtggtaggacgaggacccgagtgcctgcccacacctgtctgttcagaagacgagagagagagagagagagagagagagaacag

SEQ ID NO: 1725 - DNA, 2166 bp, Cricetulus griseus
gaaatgggacccccagatcccatcctgggagttactgaagccttcaagagagacaccaacagcaaaaagatgaacctgggagttggtgcctatcgagatgacaacgggaagccttacgtgctccccagtgtccggaaggctgaggcccagattgctgcaaagaatttggacaaagaatacctgcccatcggggggctggcggaattctgcaaggcttctgcagaattagccctgggagaaaacaacgaagtgctgaaaagtggccggtttgtcactgtgcagactatttccgggactggagccttaaggatcggagccagttttctgcaaagattttttaagttcagccgagatgtctttctgcccaaaccatcctggggaaatcacacacccatcttcagggatgctggcatgcaactacaaggttatcgatactatgaccccaagacttgcggatttgacttctcaggagccatagaagacatttctaaaatcccagagcagagcgttgtcctcctgcatgcctgcgctcacaaccccacaggcgtggaccctcgtccagagcagtggaaggaaatcgcagcagtgatgaagaaaaagaatctctttgcattctttgatatggcctaccaaggctttgccagtggtgatggtgacaaggatgcctgggctgtgcgccacttcatcgagcagggcattaacgtgtgcctctgccaatcatatgccaagaacatgggcctatatggtgagcgtgtgggagccttcactgtggtctgcaaagatgcagatgaagccaaaagagtggagtcacagctgaagatcctgatccgccccatgtattccaacccacctctcaatggtgcccggattgcagcaaccatcctgacctccccagacttgagaaagcaatggttgcaagaagtgaaaggcatggctgaccgcatcattagcatgaggacccagttggtctccaacctgaagaaagaggggtcctcccacaactggcagcacatcaccgaccagattggcatgttttgtttcactggcctaaagcctgagcaggtggagcggctgaccaaggagttctcggtctacatgacaaaggatggccgcatctccgtggcaggagtcacctctggcaatgtgggctaccttgcccatgccattcaccaggtcaccaagtaattaccagggtgcaaaggaacagagaccacctttccttcagcctttgctctcatgagagtcatgtgtgggatgaggggggtggatggtggtgaatagaacctgtttccaaccacaatgcataacagcgactgaatgtgttcctcgggaaagaggtagggcagaggcttccacggctggtgtctggaattttgatggctctaaaccaaactctccctcatccctttgtctcccacttttctgaaagagtttacacaagcaagaaaatcacagcaccaaaaacctgtcagccatggcattggaatagaagctttactgaagcatccgttggtatcaggggttcccctgtggacccaactgagaccactcatattagaggttgtgagaggaaaaaacctagcctagttctgtcatccacagttgtccttgtgtttgccctcccagtatggagcaactgtgtcagcagatcacattacagaaattgtgctttacagaaaccaataagtctgttgccacttcagcgaggacagtaaatgatgttgtgtctggtcagcctgtctcctcttgtcattgctgttctatagagtttcatcccgttctgcttgactgaccattaacctcatcctgtcgggacttacgtaagcatggacagcataactttctgctcaggccagaccctcctttctcagcaaggaaccgtggagagtgggaacctgcattttatttcagtgtccccttcagtgattgattggctcctactgggatggggcctctgcccagctggacctcttccttcatcctggctgcacagcctgtctcctcacatgagtcagacagtacagggtaggatcaggagatattctggggtttgttgctgccagcccggctcagactccgccctttgaaaagataaccaccatctgctctaatcatgtagacttactgccgcctggtttctctgttacaataaaactactatagacc

SEQ ID NO: 1726 - DNA, 2166 bp, Cricetulus griseus
gcgcgcccgctgccgcgcgccgaggatcatgaggtggtaacgggccccggatgaccccgcgtcaccactgtgaggcctacagctctgccggggaggaggaggaggaggaggaagaggaggagaaggtagctacatcaagctgggtggcaggcagatccaaagggatatcatgaagtttccaggacctttggaaaaccagagattgtctttcctattggaaagggcaatctccagggaagcccagatgtggaaggtcaatgtgccgaaaatgcctacaaatcagaacgtttctccatccccagagagatgaagtaattcaatggttggccaaactcaaataccagttcaacctttatccagaaacatttgctctagcaagcagtcttttggacaggtttttagctacagtaaaagcccatccaaaatatttgaattgtattgcaatcagctgttttttctagctgctaaaactgttgaagaagatgagaaaattccagtactaaaggtattggcgagagacagtttctgtggctgttccacatctgagattttgagaatggagagaattattctggataagttgaattgggatcttcacacagccacaccattggatttccttcacattttccatgccattgcggtgtcaactaggcctcagttacttttcagtttgcccaaattgagcccgtctcaacatttggcattcctgaccaagcaactactccactgtatgacctgcagccaacttctgcagttcaaaggatccatgcttgctctggccatggttagtctggaaatggagaaacttattcctgattggcttcctcttacaattgaactgcttcagaaagcacagatggacagctcccagttgatccactgtcgggagctggcagcacatcacctttctgctctgcagtcttccctgcctctaaattccgtttatgtctaccgtcccctcaagcacaccctggtgacctgcgacagaggagcgttcaaattacatccctcctctgtcgcaggcccagatttctccaaggacaacagcaagccagaagtgccagtcagaggtacaacagccttctaccatcatctcccagctgctgctgggtgcaaacatacctctgctaaacgcaaagtggaggaaatggaagtggatgacttctacgatgggatcaagcggctctacaatgaagatagtgcttcagagaatgtgggttctgtgtgtagcactgacttatcaaggcaagaggggcgtgcttctccctgtccacctttgcagcctgtctcagtcatgtagtagtgtcaggtgttaactcctcgtgcacactaaggctgactgctcggaagtgagactagaaaaccaggaaaggctgtagagaagggcttgtgactttatcagactgcgtgaagtgagccaggacaaaaagaaaaacacccttttcctttgtgcggctacttacaattcaacattatttaatataaatgcatatatttatagactcaagagccaagatatatttaaaagacctttttttaaaaagcaattcagtaagcaagttatttttgtctggcagccatctttagtccatggctcaagttcattagtttgaaatgggcactttgaagcaagctatccccacgaatcagcggtaatagaaaaagttctcttactttgtatgtctcatttcagttcttagtttaaaagcaagattactgtcccttttattttaaaccttgaaagtgatatgtaattaggacatttgagcatttttgacatttgttataaagaatttcttataaagttaatatatccgggtgctcaccgaagaaacatgtatgtaacatatacttgggtttttgtaactgatctgttttcgttcatttacaatcagtaggagcaattgtctagatactggggcaaccttgatttgagtctgtaacttataattgagttcagtaccctggctttttagtaagttattaggactttcttggtaacaagttattccccatgtttttctctgagtgacttccggaccctgagctccttttgcagtctgaagaaggcactgcagtcagaaccatgttctggtggtaaagcctctggtagcaataaaatgttgtccttaaccttaaaaaaaaaaaaaaaaaaaaaaaaaa

SEQ ID NO: 1727 - DNA, 2166 bp, Cricetulus griseus
  modified_base (592)..(592): a, c, t, g, unknown or other
ggaatcggatcttaatggagcccagatgaagcttcgagagtatgaggcggcaactaaactctaaggatgcagcgctggctactgcccttggtagacaaaaagagtttagaaggagatttggaggatctgaaagatcagattgcccagctggaagcatccttatctgctgccaaaaagcagttagcagacgaaactttacttaaagtggatttggagaatcgttgtcagagtcttactgaggacttggagtttcgtaaaaatatgtacgaagaggagatcaatgagacgagaaggaagcatgagacacgtttggtggaggtggattccgggcggcagattgagtatgagtacaagctggcgcaggctctgcatgagatgagggagcaacatgatgctcaagtgaggctgtacaaggaagagctggagcagacctaccatgccaagcttgagaatgcccgactgtcctcagagatgaacacttccactgtcaacagtgcccgggaagaactgatggagagccgcatgcgcatcgagagcctgtcctcccagctttctaacctgcagaaagagtctagagcctgtttggaaaagnttcaagaattggaggacatgctggctaaaagagaaagacaactcccgtcgcatgctggagcgagagatggcggagataagggaccagatgcagcagcagctgaatgactacgaacagctgcttgatgtgaagctggccctggacatggagatcagtgcctacaggaaactcttagaaggcgaggaagaacggttaaagctctctccaagtccttcttcccgagtgactgtgtcgagagcatcatccagtcgcagtgttcgcaccactcgaggaaagcggaagagagttgacgtggaggagtcagaggcaagcagtagtgttagcatttcccactctgcctcagccaccgggaatgtgtgcattgaagagatcgatgttgatggcaagtttatccgcctgaagaacacttctgaacaggatcaaccaatgggaggctgggagatgatcagaaaaattggagacacatcagtcagttataaatatacctcaagatacgtgctgaaggcaggccagactgttacaatatgggctgcaaatgctggagtcacagccagtcctccaactgacctcatctggaagaaccagaactcttggggcaccggtgaagatgtgaaggttatactgaaaaattctcagggagaggaggttgctcagagaagtacagtctttaagacaaccatacctgaagaggaggaggaggaggaggaagagcccattggagtggttattgaagaggagcgcttccaccagcagggagccccaagagcgtccaacagaagctgtgccattatgtgaactcgtcaagacatcaagacagaagcatggtaaccctgtatacagtgcagagccttctcagaagcacacgatatttttctatttcctttatgtgaattttttaagctgcgaatctgatggccttaatttcctttttgacactgaaagttttgtaaaagaaatcctatccatacacgttgttgcaagatgtgaattattgacactgaactaactgtactgtttggaaaggggccctcaagtttttggcatttttttttttttatatgtgtgtatgttattatttttttttaagttcttttaaggaagggaggagggtaagtataccactgcgtgtccgggcataattggaagattgctctatctagtcgggcagtctgctcttgttctattctctgctatatataaaacggtgctgttcgggcgggggaaaggcaatttttctaatatattgaactttgtatggaatttttttgtaataagtgatcaaggttacaaaatttttttttaaatagaaaagagaagaacatttttgtaagaaggcaatattaatccagacatcatgtaagcactctggatggaggttccgcaagtctgttgtatgttcagccgtttctcttaaattcttgattcctgagggacggggcaggtggggttaggggtgggggaggggattttcttcaaatgctctagttgtgttttttaagatagtgtaacacgcttacatttcttatgcaacattaacgaataaaaagctgtttaacaaaaaaaaaaaaaaaaaa

SEQ ID NO: 1728 - DNA, 2165 bp, Cricetulus griseus
gataaacaagctagagaaagctgtggcagcagcgcacaccttctttgtgggcaatcctgaacacatggagatgcggcagaacctcgactattaccaaaccatgtctggggtaaaggaggcagacttcaaggatctcgaagccaagccccatatgcatgagtttcggctaggagttcgactctactcggaggagaagccacaggaagctgtgccccacctagaggcagccttgcaagagtactttgtggctgatgaggaatgccgtgccctctgcgaagggccctatgactatgatggctacaactacctagactacagtgctgacctcttccaggccatcacagaccattacgtccaggtcctcagctgtaagcagagctgtgtcacccagctggcttcccacccaagtcgagaaaagccttttgaagacttcctcccttcacattataattatctacaatttgcctactataacattggaaactatacgcaggctattgaatgcgccaagacctacctcctcttcttccccaatgatgaggtgatgagccagaatctggcctactatacagccattcttggagaagaagaagccagctccatcaggccccgggagaatgcccaagattaccgacagcgaagcctgctggaaaaagaactgctcttcttcgcttacgacatttttggaattccttttgtggatccggactcatggactccggaagaggtgattcccaagagactgcaagagaaacagaagtcagaacgagaaaccgcagtccgcatctcccaggagatcggcaaccttatgaaggagattgaaaccctcgtggaggagaagaccaaagagtcattggatgtgagcagactgacacgggaaggtggccccttgctgtatgaaggcatcagtctcactatgaactccaaagtcttgaacggctcccagcgggtggtgatagatggtgtgatctctgatgaggagtgccaggagctgcaaagactgaccaatgcagcagcaacttcaggagatggctaccgaggtcagacctctccacataccccaaatgaaaagttctatggtgtcactgtcctcaaagctctcaagcttgggcaggaagggaaagtccctctgcagagtgcccacatgtactacaatgtgacagagaaggttcggcgtgtcatggagtcctacttccgcctggacacaccgctctacttctcctattcccacctggtgtgccgcactgcaatagaagagtcacaggctgagaggaaggacagtagccacccagtccatgtggataactgcatcctgaatgccgagaccctcgtgtgcatcaaggagcctcctgcctacactttccgggactatagtgccatcctttacctcaatggggactttgatggaggaaacttttacttcactgaactagacgccaagactgtgacagcagaggtgcagccccagtgtggaagggctgtgggattctcttccggtactgagaacccacacggagtgaaggctgtcaccagggggcagcgctgtgccatcgccctgtggttcacgctggatcctcgacacagtgagcgagacagggtgcaggcggatgacctggtgaagatgctgttcagcccagaagaggtggacttctcccagaagcagcccctgcatgaccaacagggctcaccaaaacctggagaagagtctctgtcagacagggagtctcagcacaaagatgagctatgacagcagtgaggtcacacatgggtttcattggacccagggaactctgccctgcagccaggccttcccagcctctcaaggctgcagagtgaggggtacttttgtccgctaacctgccaaaggatcctacccacagccttccccatggtgctactgttcttagagtggacacggcaggacaccactcttctctgggcttggctaaaggctcaggatgcaggcccagaaccaccctgcggcctgtataggcagctgcctgacagcagcatgatatttaagtgtctgtatagacaaccaaagaataaatgactcgtggttttttcatttagtggtttgttccaagagaggacatgtttccattctaccctagaggccatgtttggtagcagttaatctgggcagtgtgtagtggcccgtgcca

SEQ ID NO: 1729 - DNA, 2165 bp, Cricetulus griseus
cttccgggaaaatggcgactcccgctcgcgcgcccgagtcgccgccggccgcggagcctgctcccgccgtgggccccgccggggagccgtgccctccgcgtcagccgcagcccgtgcacaatgttctcgctgccccgcggcttcgagcccccagctcccgaggacttggggcagcggagttcggcggagctgcgggagaggttgaggcgccaggagagacttttgcgcaacgaaaaattcatttgcaaattgcccgacaaaggtaaaaagatttcagacaccgttgccaaactgaaagctgccattgcagaacgtgaagaagttagagggagaagtgaactgtttcatcctgttagtgtagactgtaagctaaggcaaaaagcaaccacacgagttgatatcgacatagacaaggcccagaattctgacctgatgcttgatacttcatcattagttcttgactgttcctctgtagacatcaaatcatctaaaacaacctcagaaacacaaggacctgtacatctcactcacaaaggcaatgaagagactttggaggctgactgcacagtgaacaccggccctgttcccggcagtacagccagggcaccctcatctgaagttaacaaacatctcccccaacgccctgtttcaagtcaagtggaagacatttccagcagcattgacagtctgtttatcactaagttgcagaagatcacaattgtagaccagagtgaaccctcagaagaaaacagcagctctgagaacgtgccggagctccagagtgagacgcctaagaggcctcattacatggaagtgctagaaatgcgagccaagaacccagtgccccctcctcataagtttaagaccaatgtgttacccacacaacagagttactcaccaagtcattgtcagaggggtgagtctcctgcttcctcagaagagcagcgacgcagggctaggcaacatcttgatgacatcacagcagcgcgcctccttccgctccaccacctgcctgcacagctgctctccatagaagagtcgctggccctgcagaaagagcagaagcagaattatgaggagatgcaagcaaagctcgcagcacagaaactagcagagagactgaatattaaaatgcagagctacaatccagaaggggagtcttcagggagataccgagaagtgagggacgaagatgatgcccagtcctcggatgaattctgaagatgatcatgggagttctatctccaaagctgactgttcagccgtcattgcctcatagcaaccttcctatcaagtatcaagatcagtgtcagaccttgttgagggacagcagtttttaaagttacactacggtagctacaaaataagagcccagtttgtctttcagaagatgatcttcatgtgcttgaacagttttaatatttgaacattgtgtttgaccgtattgtattacagttttgcagtatgttgtgcattgttctgatattttagtgtgagtagagcacattttttctttaagatagctgctttttccttattcttattcttatcaaatagcattgcttacatcccttccggtaaagtactttgttatcccaggcacctaaaatcaattaggaagacctggttccttttcttgagaaatgcaagtctagagaatagtacacatgcatgcatgcatggagttcctgagatgttggatgtgaaatactgtggaagacactcgacttatacaacaaatgtttatttgctgttcctgtcttctcttggggtgactgctatcttcctgtgatgaagataggagcaccttgaggaggtgctgggtggggagggtcttctgagctggggtggggagctgctcttggcttccccagctcattgctgtcttggatgataggtcagcgtacagggcgctcatgtttgctaaggaaactggtgtttttctaagagttatggttgaattgtcagtatgttgcttttttcctttttaaacccaaagaggtgtttataggctgcagaaacctcagtctcatatatgtacacatttgtgttgtttaaatgatcatatcatcatctccagcgaaggtaacaatatgttatcaaaaaccctttctttgtctattatgtggaacctgtaaaggagaaataaaataacaatcaaagca

SEQ ID NO: 1730 - DNA, 2165 bp, Cricetulus griseus
gacccattcggcgcgcacgcggaattcaccgcggacgacctagaggaactcgacatccttgcgtcacaggccctgagccagtgtccggtcgcgcctcggaacagcctggccagtgctcataaggtctgccaattagatgggtcatcaaatagtcctatgaggaaaaacaaagaaaatgctccagttaaagatagttttgaattagaagtacttcagacacaatacaaagaacttaaagaaaagctgaaagcaatggaagaagaagtcttaattaagaatggagaaattaaaattttgcgtgactcactgcatcagacagaatcagttctagaagaacagagaagatcacacttccttcttgagcaagagaagactcaagcactggaaaggctcttctgtggctataaaatcagaagcatgctctccacatgtcagaaaatcatctttccctacaaaggagtcttttagtgctaatatgccgctctcccatccctgccagactgaggcaggattcaaacttctggtggaaccagaggttccagataataaaacccacagtctgagagataaccccatgaagcaagatgttcaacagaaaattcttgctgacagctggatgcagagatcaaacactcaaggttctattttgataaatctgcttctgaagcaacctttggtcccagggtcatctctaggtctttgtcacctcctaagcagttgttctgaggttcctatcggcaccctcttgcagccaccagggctcagtagcaccttggctgggatttcaggcctcaggaccatcatttctcgtgatgggtcattttccccctctgccctgagagaagcacagaacttggcattcactggattaaatctggttgccaggagtgagagctcacatgacggagacctagcaaagggaagcaggagagtcttccctctctgccagctccctggagctgtgcacctcctaccacttgtacagtttttcattggcttacactgccaggctctgcaagatttagcctcagctaagaagagtgtggcgcctggggactctccaacacatacttcctgtgtgagctctggggtagagaccagcctggaggactcaatttatcacctggaaagcttctctgtgacttcacttagtgtccttcaacacctggtgtgccacagcggagcagtcgtctgcctgttattgtcaggcttggggacagatgcagctgccagggaaggaaacccagttcagacttgtgcagatacagtctcggcctccagggaggatgctcatgacaaaaaacagcatccactattgaagatgcttcttcaactggtggctttctcttctacagcatcaggtcattttcaagccagtgtcctgagccagtgcctcaaagttttggtgaaattagctgaaaatgcttcctctgatttcttgcccaggttctcctgtgtgttgccgatgttgccacagtgcctcagctcagagctgccactgccgtgtgtgctactggctgttgagctgctctcccttctggtggaccatgacagctttgcacagcagctgtgcttccactcagaaggctgccttctcctgaggctgtacatgtacattacgtcaaggcctgacaaagtggcctcagagacacagtggcttcagctggaacaagaggtggtatggcttttggccaagctgagtgtgcagagtccttccctgccaggcattggttctgactgccaatgcaacgtagaggcagtcagagtgctcactgtgatgttgcacagacaatggctgactgtgcggcgggcaggggggtccaaggaccccccagcagaagcagacgatgcgctgtctgagggacactgtgctgctgctgcatagcctgtctcagaaggacaagttctttactgtgcattgtgtggaggtcctgcatcagtatgaccaggtgatgccaggggtcagcatgctgattcgagcccttcctgatgtagccgattgtgaagaggcagccctggatgacctctgtgctgcggagacagatttggaagactctgaaatggactgtagctgacggcctgagcagccggccacgaaggtggcaccagctcccaccactgtctttgccatatccactgattaaaactgcagttcctgctgagaa

SEQ ID NO: 1731 - DNA, 2165 bp, Cricetulus griseus
cccctttccaaaggaggcgtctctggcccattgccgccccaccacctcctccaggagagcacagcggagttcctttccctcccccacccctccccacccccgggggaaccttagcagcagtggaggggactggtgttccctttgctactccaccccctcctcctccccctgttgaccactctggggttgtacctttccccaactccaccactgccagagcatggagtgactgggcctgtggcagtttttcccaaggaccatagttccctccttcaagggaccctggctgagcattttggggtcctcacaggacccagggacctcaatggccctggtcttagccgtgcacgagagagcctgagcctgccttcccaccctctggagcacttgggccctgcccttggaggaggtgggggaggcaacaccagcagcagtggccttcccttgggtcctgcacacagagacgccatcggccggagtggtatgattttacggagtccccggccagactttcggcctagggaagcttttctcggcagagatccattccacagtttaaagagaccccggccacctttttttttttttttttgttttgttttgttttgttttgtttttttaagggagtggggaagaaaacaatattttatctcatctattggacagataacttacatttgaaataaaacttcggtcagtagaggtaaatagtatgtgcaatgttggggtgtcatttgggtcttggccttgctaacagtagtgggaggatccctgtctccttccctctccagctaagcaactccagtgactggcttggctcccttctctgaattctctgccctgctgaaggccaagaggtatttgcaaaaggacaaaatgtgggcagttttgggcctgccaaggtgtatttgctttattctaaaggcatgttgaaacagagttctttatcttttggtttttcagcatcatcctctgaactattaccaagcagtaaatctgagacagcacaaactttattgtatgtaacagaaagttttctctttctgggtgccaccacacccacaacctcagtgctgggaggcagggcgaagacaacggcaagtttgaggtcagctctccccacaaaaatgcctgataccatgagcttgtgaaggggattgggtatatagcatagcaaagtaaaggaagtgtagttaaatattgagtcttaagacatttgtttagtaaaaaagcatcaaacagaatgggggcgggtggtcagggaattgtgactttcagaattgatttttttttcccccagaaattaagtggggttgtttttcagtctagaataaaagaatgtgaattatttctaccgctcttgtttaagctaaacatactgtttacttgaaaaggctctctgaccatttaattttctaagaaaatatgggagtataaggaaagtggtttctggaatgttgagcaagataattgtcctcaaaagcatagtggccaatccatgacaggagtactttgtccagttcaggagtggactttatgggggttgggtttttgtggggtattttttgttttgttttttgccacaaaatcttcagtgtgtttcagggtggaagtgagaattgtatgatgctgtcggatattttaaggaaatctgtctacaatactaaatgaagacaactgtatatatgtgatatagtgaaacaaaagacatttctgctattcataaagataaaaacaagggattttattctttctgtgtctgtgatttaaactccgtaccatgctctgacttttgtatttcaccctgagttacaaaaaaaaaaaaacaaaatatttttaaagaatgcacaatatagtgtgtcttagcaaggacatgagtcatatgaagcagaatgcgtagttgtcactaaggttcttggtgctcattgtaaaaccacagacaaagaattctatgaagacgctagtatcacacagaacagctttcttactgcagaatatccactcagtcctgttgttactgttgatgcagttaggcttcagctgttaggttttgaagcggctgtaaattactgctccccctccccacctccatatttttaattggtggggttacctgttaagatttttttttaagtagatatgttggattgatattctcacgtgtt

SEQ ID NO: 1732 - DNA, 2164 bp, Cricetulus griseus
cctcctatgtgcctgcctttcagctcatgactacggcagcgggctcttccatcctggaggcttcctgggtggtccagcctccagcttcacccctaagcagcgaagcgctcctgctcagaaggccgagagtgcgtcaactgtggggccacagccacccctctctggcgacgtgatggcaccggccactacctgtgcaacgcctgcgggctctaccacaagatgaacggacagaaccggcccctcatcaagcccaaacggaggctgtctgctgccaggagagcgggcacctgttgtgcaaattgtcagacgacaaccaccaccttatggcgccggaacgccaacggggaccctgtgtgcaacgcctgtggcctctactacaaactgcacaatgttaacagaccactgaccatgaagaaggaagggatccagacccggaaccggaagatgtccagcaagtctaagaagagcaagaaaggggctgaatgctttgaggagctttccaagtgtatgcaggagaagtcgtccccgttcagtgccgctgccctggctggacacatggcgcctgtgggccacctcccacccttcagccactctggacacatcctgcccacgccaacgcccatccacccctcctccagtctctcctttggccacccccacccgtccagcatggtgactgccatgggctaggcacagcttcccactggacagacatggacatcgagggtggctggcagaaccagagcgaggccgggtactccctgggtggaacacacttttggctcccgcccatcccaagagacccacttcctcctgccagcctagcctggccgaaaccacctctccttggaggactcccagccttgtgcagccattactgtgaatgtttctaactgggctacagcttgtgtgcgccctgggtgctgcccagaaaagttttttcacggacagttgcttggagagcaaaacagacaggtttatagcaagaaacagaggagactggggacagaaaaaatgaaaccgtttttaaaaataatttattttgctcttatttcgtacaaggacgtggagacacagaggcatgggctgtttgtgttctctgggttctaccctggggtctactgccaccagccagggctctggagggcagacttacagggcctcagcctgagccttctccccagctgtctggagggtagcccctgccctgacgcagccccagagggcagagacaatcgcaggcggtcctgtgcggattcccaggccagggctgggtcacaggaaggaagcattctctggaaaggggaaatgtctcccagatcattcccttggcttcgagaggccaaagctggtgcgacccaaatggccaagctgcggcctgtgctgttaggccagctggacccctgtaaatacatcttttttctgctaactcctcaactccctcccactctaagataaataagagaatattcaaaaccaaacccaaactgcataagcttaactcactgatgagtggttttatttttaaactcgttttgggtccagtcaattgtacgttgccacagaagacccaccatgaaaaggaataaaacctacaaaccaagactgagcttcacggttctttcttgaatggttcttggatcccatggccctagcaggaggctggggacaagggagatcttatgctcttggttgctgggggacatgggagggcagtggccctgtgatccctggggggttctgttctgttgtggctggctggatccttcaaggtacagctgtacataaatgtctcccaagcttcgattctgtgtgcggtggtggtggtggtggtagtgcagcagccagcaagggggcccctagcccaggaagacaattgtgctgacaagtcaactacgtgcaatattggcgtccaattgctgcagagcaccataaccggaagtaacttattttgtgctagtacccgcataagaaaaagaatcagcagtattttctgtttttatgtttttggctcgttttattttgaattagtgacctaagttattgttaactatgtacaacatttaaatattgtctgtaaaaattgtatgctaccctcctattcctttaaagtgaatactgttaaaaataataaaatactttttgtgaaaaaaaaaaaaaaaaa

SEQ ID NO: 1733 - DNA, 2164 bp, Cricetulus griseus
  modified_base (1206)..(1206): a, c, t, g, unknown or other
  modified_base (1217)..(1217): a, c, t, g, unknown or other
tttttaatgttttctgctgagaaacatttcaagatttattgaccgccccaccccccattttcccctccacactcacacacgcacgctcacactttttatttgccataatgaaccgtccagcccctgtggaaatctcttatgagaacatgcgttttctgataactcacaaccctaccaatgctactctcaacaagttcacagaggaacttaagaagtatggagtgacaactttggttcgagtttgtgatgctacatatgataaagctccagttgaaaaagaaggaatccacgttctagattggccgtttgatgatggagctccaccccctaatcaaatagtagatgattggctaaacctgttaaaaaccaaatttcgtgaagagccaggttgctgtgttgcagtgcattgtgtggcaggattgggaagggctcctgtgctggttgcacttgcgttgattgaatgtggaatgaagtatgaagatgctgttcagtttataagacaaaaaagaaggggagcattcaattccaaacagctgctttacttggagaaataccgacctaagatgcgattacgcttcagagataccaatgggcattgctgtgttcagtagaagtagagaaatgctgactggatcgtggcgttagagggaactcttggtacctggaaatgtgaatctggaatcttacctgtgtcatcaaagtagtgatggattcagtactcctcaactcctaatgattgagaagagagcaaacgataaagaaatccctctataacacgaataaaatgtttaagaaaagaaaaaagaaaggaaaagggattaatttagtgaaagatgattttgctcctagttttgatttctgccaggattgaattatttcaaaatatcctgtgtttttaaaactgttttcaaaatagatgtctgaggaaaaccagcagaatattaaccagtgtggagccagttgttggggagaacacacttccattatgcttggcacataggtctccttgtggtgggatttggaggaggtagattttccccatcttctctctttcttcctgccgccccccccccaatacatgtagatggagtagaaagaagaagcccttgttgcagtagatgtgcgtgtgtctgacagccttaagcccacctgggcacttttaggaaaacaaaaaaaacaccaaaaaaaaaaaaaaaaaaaaaaaanaaaaaaaaaanaaaaaaaaaggtgtgaaaggtagccaggagccttttgttttggtaaatagataggaaatgacatcgtaaagagggtctgtctcctggaacttagctgagagtagaatcctttttcccaacagtggaacaagtgggcatcccagaaactattgaagagaggacttacaggccatcaatagtgtgtctaggagagttaacatatttccacaactgtagaattgtgggctgttgatttgctatctgacagtgtcatggaaaagcaatatcttaacattttaggactgatttcagaaatagaagagcaaacagaatattcaaccagtaattttggtcttgagaaatgaggccaataggatggacagcatctcattgatgatacctcagacgctggcagctttgtgagctgcctttactgttgctggaatcgctctacttttaactacattcgaatctggagtccttcctgccttatcccagaaaatgaaaaataatgcttttttgatgttgtttctagaattttaaagtaaaaagtgatgatacaatccaaagttctcttattccagaacatgacaatagattgctttaacatagactcaagatcagaatatcctaccctctaaatttagattaactgttgactccaggggtttggtcaatgccagcaaaactttttccacttgacatgctcagaatctttgtgtgtgcatgtgtgtttgttttaaataagactaatgttgttctcacaactggactcctttttttttttttccccttcaaaattaaagcttttttcttttgaatttaatgaagtattgctagcggaagccagtttggcatggtgagagatgtcagactcttgaaaggtgtgaagcctgatttaaaaccaaaccctgaacccttttaaagaacaataaagcatattttacaaaaaaaaaaaaaaaaaaaaa

SEQ ID NO: 1734 - DNA, 2164 bp, Cricetulus griseus
gcgaacaagaagatccatatttgagaatctaatgaaatatgcatttcctgtgtctaatggcttgcctctgtttgcttttgagtataaagaagtattccctgaaaatgggtggaaattgtatgacccccttctagagtatcgaaggcagggaattccaaacgaaagctggagaataacaaagataaatgaacgctatgaactttgtgacacatatcctgccctcttggttgtgccagcaaaacattcctgatgaggagctaaaaaagagtagcatctttcaggtcacggggccggatcccggttttatcatggattcatcctgaaagtcaagccacagtcactcgctgcagtcagcccatggtgggagtgagtgggaaacgcagcaaagaggatgagaagtaccttcaggccatcatggactccaatgcccagtctcacaaaatatttatatttgatgctcggccaagtgtcaatgctgttgccaataaggcaaaagggggaggttatgaaagtgaagatgcctatcaaaatgcagaacttgtttttttggatattcacaatattcatgttatgagagaatcattacgaaagcttaaggagattgtgtaccccaacattgaggaaactcactggttgtctaatttggaatctacacactggctggaacacattaagctcattcttgcaggggctcttaggattgctgacaaggtagaatcagggaagacatctgtagtggtacactgcagtgatggctgggatcgcacagctcagctcacttccctggccatgctcatgctagacggatactatcgaacaattcgaggatttgaagtcctcgtggagaaagagtggctaagctttggacatcgattccaactaagagttggccatggagataagaaccatgcagatgcagacagatcacctgttttccttcaatttattgactgtgtctggcagatgacaagacagttccctactgcgtttgaattcaatgaatatttcctcattaccatcctggaccacttgtacagctgtttatttgggacattcctctgtaacagcgaacagcagagggggaaggagaatcttcctaagaggacagtgtcattatggtcctacataaacagccagctggaagatttcaccaatcctctctatggaagctactccaatcatgtcctttacccagtagccagcatgcgccaccttgaactctgggtaggatattacataaggtggaacccccgaatgaaaccacaggaacccatccacaacagatacaaagaacttcttgccaaaagagcagagcttcagagaaaagtagaagaacttcaaagagaaatttccaaccgctcaacctcctcctcagagagagccagctctcctgcacagtgtgtgactcctgttcaaactgttgtatgaaaggactattaggtcaagggcctcactgccaggaacttgacattacagcaccttacgggtagaaagccttccatgtttttaaacccatctatgggagaaaccttcagatgctgtatttatttcaagtctctcttagatgagtttggaaatgtctggtgcaggtgacaatggaaatcatttcatttgtaattaaagtatgacactaacttaagtcacccaaagaatactaaagtactggagtcctatttccacagtggggacacgtttttaattttaaaatgtcttaaaaaccaagcacctggtaagatctctaggtgggagaaaagaaagagcagctgttctaatacccaagagcatatgtctgggccttcatgtaaatgtcagatcaaattactcccttctcagatttctcaatttttgtggtatttaacagtaaaaaccattgttttgagattattactgcataaagtctgactttagtgctatgtttaaatttcacatgaacagtttaccaaagaacacactgcatgtaaggaattacaatctaagtgccagcaagtaaagccttgtttctctattcacctgagttgggtgctggtgtgaacaactgacctcctggtatccattttactctgtataagagccatatgtaatgtactgtaacaaaggagcttattaccacttggtcttttaattaaatgacttacaaaactttaaaaagaaaaaaaaaaaaaaa

SEQ ID NO: 1735 - DNA, 2164 bp, Cricetulus griseus
cggcgggcgagaaaagggcgcgggtgccgtctgagcgcgggaagcggagaaagcggagccatgggggatgctcctagccctgaagagaagctgcaccttatcacccggaacctgcaggaggttcttggggaagagaagctgaaggagatcctgaaggagcgggaacttaaagtttactggggcacagccaccacggggaaaccacatgtggcttactttgtgcccatgtccaagattgctgacttcttgaaggccgggtgtgaggtaacaattctgtttgcggaccttcatgcttacctggacaacatgaaagctccctgggaacttctagaacttcgaaccagttactatgagaatgtgatcaaggcaatgctggagagcattggcgtacccttggagaagctcaagtttatcaaaggcactgactaccagctcagcaaagagtacacactggatgtgtaccgcctgtcctccgtggttacacaacatgatgccaagaaggccggggctgaggtcgtgaagcaggtggaacaccctttactgagtggcctgttgtaccctggactgcaggctttagatgaagaatacttaaaagtagatgcccagtttggtggtgttgaccagaggaagatttttacctttgcagagaagtacctccctgcgcttggctactcaaaacgggtccatctgatgaatcccatggtcccagggttaactgggagcaaaatgagctcctcagaagaggagtctaaaatcgacctccttgatcggaaggaggatgtgaagaaaaagctaaagaaggccttctgtgagccaggcaacgtggagaacaacggggttctgtccttcatcaagcatgtcctctttcctctcaagtctgagtttgtgatcctgagagatgagaagtggggtggaaacaagacctacaccgtttacctggaactggaaaaggactttgctgctgaggttgtgcaccctggagacctaaagaattctgttgaagttgccctgaacaagttgctggaccccattcgagaaaagtttaataccccagccctgaagaagctggccagtgctgcctacccagatcctccaaaacagaagcccactgccaaaggccctgccaagaattcagaaccagaggaaatcatcccgtcccggctggatatccgtgtaggcaaaatcgtcagcgtggagaagcacccagatgcagatagcctgtatgtggagaaaattgacgtcggggaagctgaacccaggactgtggtgagcggcctcgtacagtttgtgcccaaggaagaactacaggacaggctggtggtcgtgctgtgcaatctaaaaccccagaagatgagaggagtggactcccaaggcatgctactgtgtgcttccatagaaggggtgagccgccaggttgaacctctggaccctcccgaaggctctgctcctggcgagcgagtatttgtaaagggctatgagaagggccaaccagacgaggagctcaagcctaagaagaaagtctttgagaagctgcaggccgattttaggatttctgaggagtgcatcgcacagtggaaacaaaccaactttatgaccaagctggggtgcatctcctgtaaatcactaaaagggggtaacattagctagctggcccagcatcctgctcccaccatgctacctaccgtctcagcttgttcatctgtcacccgttcccaggacttggtaagggatagctcaccttcctaccctctgggatcatcccacctgactacaaggaaattgactacttggggtaaggatggctgcccagcagcacctcccttccttggcagctgacttgaaaaatctggtttcaatagaaccaatagaaaaagtttattctgcccatccttgtaattggaaaaacaccggttcccaagtttccgaggggttatccccacagctgtacatctagctgggatctactgcctggtctgggctaattacagtttcttcccaacaggaaattgtgggatttgaaaagaaggggaaacagagcctagaagtctatcaagcttcccagggctggcagcattctaaggcctgcctaccctgaggcttggcaccagtggcaggatctgccccagttctcttggggtttcccttgatcgggctaggttggaca

SEQ ID NO: 1736 - DNA, 2163 bp, Cricetulus griseus
  modified_base (2135)..(2135): a, c, t, g, unknown or other
  modified_base (2141)..(2141): a, c, t, g, unknown or other
aaaatacgtcaaaagaaagaaaaaattacatccagaattcgattcatgcttcaggacgtgatagacctcaggctgtgtaattgggtgtcccgaagagcagatcaggggccaaagactattgaacagattcacaaagaggccaagatagaagaacaagaagagcaaaggaaagtccagcagctaatgaccaaggagaagagaagaccaggcgttcaaagagtggatgaaggtggatggaatactgttcaaggggccaagaacagccgagttctagacccctccaaatttctgaaaatcactaagcccaccattgatgagaaaatccagctggttcctaaggcacagctgggcagctggggcaaaggcagcagcggtggagcaaaggcaagcgaaactgcaccttcagggtccccatcaaccacacctttagagtttgattcccgaagggcattaaccagtcgtgggagcatgggcagggagaagagtgacaagccacttccaactggagcagcccgccccaacactttcctgagaggcagcagcaaagacctgctggacaatcagtcgcaggaggagcagcgtagagagatgctggagacggtgaagcagctgactggaggcgtggatacggagagggccagctctgaggctgaccgaagcaagacgagggagctagtgaaatcagaaatgtgtgcagtgtcaccccctgacaagcctgcactgtcagaagaagaagtggagaggaagtccaagtctatcattgatgagttcctacatatcaatgactttaaggaggccacgcagtgcatagaggaactgagtgcccagggcccactgcatgtttttgtgaaggtgggtgtggaattcaccctggaacggagccagatcaccagggatcacatgggccacttactgtatcagctggtgcagtcagaaaaactcagcaagcaggactttttcaaaggtttctctgaaaccttggaattggcagatgacatggccattgatattccccatatttggttgtacctggctgaactagtcacccccatgttaaaagaaggggggatttccatgagagaacttattgtagaatttagcaagcctttacttcccgttggaagagctggggtcctgctctctgaaatcttgcgccttctatgcaaacagatgagccataagaaagtaggcgccttatggagggaggccgacctcagctggaaggactttctaccagaaggggaagatgtacatcattttctcttggagcagaaattggacttcatagagacagaaagttcctgttcctcggaagcactttcaaagagagagctctctgctgaggagctgtctcagcggctggagaagctcatcatggaggacaaagcagacgacgagcggatctttgactgggtagaggctaatctagacgagagccagatgagttcgcctacattccttagagctttaatgacggccgtttgcaaagcagctattatagctgactgtcctaccttccgagtggacactgccgtgatcaagcagagagtgcccatcttactcaagtacctagactcagacacagagaaggaactgcaagcactttatgcactacaagcgtcaatagtaaaacttgaccaacctgccaatttgctccggatgttttttgattgcctgtatgatgaggaggtgatctcagaggatgccttctacaaatgggagagcagcaaggaccctgcagagcagaacgggaagggcgtggccctcaaatctgtcacagcatttttcacgtggctgcgggaagcggaagaggagtctgaggataactaatacttcaaatacacaaacgaaacaaaagaaacaatttaagtattttttaaaaagtttcacgtcttcgccaatcacagtgcagcaaggccaactctcgcagaaaccccacgtgtgcacgagtgggagagggaaaggaaacaggtgatcatggaggataaaggtgctggaaccaggagacagcagacctgagggcgggagctcggaaaccaaaatacatgtactatttatagaaaatattttctgttttaatcttttctttttaaacgaggactcataacttaaaaaaaaaaaataaaaaaaaaaanaaaaanaaaaaaaaaaaaaaaaaaaaaa

SEQ ID NO: 1737 - DNA, 2163 bp, Cricetulus griseus
ggccagtgagcagcaaggagaaaccaaaagaacgatctcaagatccctgccaagaaggaggtcagtaaaagtccctagaaagaacaaaaagaagaaaacttgaagaagataagagaaaaaagaagacaaggaacgtaagaaaaaggaggaagaaaaggtgaaggcagaggaagaattaaagaagaaggaggaggaagaaaagaagaaacatgaagaggaagagaaaaaaagcaggaagagcaggccaaacggcagcaagaggaagcagctgctcagctaaaagagaaagaagaatcccttcagcttcatcaggaagcttgggaacgacatcagttacgaaaggaactccgtagcaaaaaccaaaatgctccagacaaccgaccagaggaaaatttctttagccgcctagattcgagcttaaagaaaaatactgcttttgtcaagaaactaaaaacgattacggaacaacagagagactccttgtctcatgattttaatggcctgaatatctcaaaagccagctgaggaaagggcccccacttggtggaggggaaggagagacagaatctgcagacacaatgccatttgtcatgttaacaagaaaaggacaataaacagcagtttaagattcttaatgtgcccatgtcatcccaacttgctgcaaatcattggaaccagcaacaagcagaacaagaggagaggatgagaatgaaaaagctcacattagatatcaatgaacgacaagaacaagaagattatcaagaaatgttgcagtctcttgcacaacgcccagctccagccaacaccaatcgtgagcggcggcctcgttaccaacatccaaagggagcacctaatgcagatctaatctttaagactggtgggaggagacgttgatccagcagcacgtgtcatttcattaggtcctgtatctgatgttgtggatagtggagtcctccagcaattgaatgagagcagcggacacatctcagcatgtcggtctagagagttgcgaatctaaacctgggacaggctggggccatgaggcagaaacaccagcctctgccaacaccggaacaagccgacgcttccagacaaggcagaaaggccttttgtaatggaaatcacgtgagggttaatcttctcttgagaatggcagtcaagaaatgagaaggttcacttgactactgagcagttacaccaggaagtgcgtcaatgagatgactgagccggagaagacacggttgagatgggaatggtatgggggaaatgaacttgagttttaaacttgatttaagttacagtgtctctgaattgaacatcccatgttggaagaagatacatttgggggctccaggactacagtagaaaagtatagagcaagcagtaaaatcttctagtaaaaacttaacatgcaggacaacaaaatgatgaaagataaaaaaaatgccagataagccaccaggaaggttctgttaaggagtttgttttgaaaggaacaagggatgaggaagaaaaaccagttttatccatcagagtcagtgatgtaaaattgcctattatagtgaaagaaaatgtgaagactgttaatatgcaaagcattaattgagatggtttagaaaagtctgataccagcctaagaacggggatatagttgagcccattgtaagtatcattgaaaacaaaaggtgccagtgagcatgtcacggaagaaggaaggacaacaagaagtggatcagagtattttgttgaccttcatgggtttacagcctctgtgtctaaacaaaatatggaaacaagtagcgcttttactttgcttttgttttcgtttcattttgttttctccctcccccccctagtagaaatgagggttcttagtctgtttctgacagtctgttaatttattaggataggtatctttcatttgctttcaataggcatagtaatttagttaaagaacacatttgtatgctacaacttgattacatcttttttctattttgcatctttcttttaccatgtttcagtttctgcatgtagatttcaataagaaacaaaacttgtaaagttgtaacatttcacttggaaatgctgcccaatcttcaccagcttcagaaatctgacctttgccgatgctgcaataaagtgttagtaatttggatttgg

SEQ ID NO: 1738 - DNA, 2160 bp, Cricetulus griseus
ttctgtgagacccgggctgagtggatgattgctgcgcaggcatgcttcatgtataacttccagctcgttaccctgtatgctaccctgggaggtccagccattgttcacggactaaatgagacagaggtgaccaacatcattactagttaaagaactcttgcaaacaaagctgaaggatatagtctcgttggtcccacgtctgcgccatatcattactgttgatgggaagcctccaacatggtctgagttccccaagggtgtcattgtacacaccatgactgcagtgcaggctctcggagtgaaggccagcgtggaaaacaaagctcacagcaaaccattgccttcagacattgcagtaatcatgtatacaagtgggtccacaggaattccaaaaggagtcatgatctcccacagcaacatcattgctgctataactgggatggcgagaaggattccaagtctgggagaggaagatgtatacattggatatttgcccctagcccatgttctagaattaagtgccgagcttgtgtgtctttctcatggatgccgaattggctactcttcaccacaaactttagcagatcagtcttcaaaaataaaaaaaggaagcaaaggagacacatctatgttgaagccaacactgatggcagctgttccggaaatcatggatcggatctacaaaaatgtcatgactaaagtgaatgaaatgagtagttttcaacgaaacttgtttattttggcctataattacaagatggaacagatttcaaaagggtgtactactcccctgtgtgaccgctttgttttccggaatgttcgaaggctgctgggtggaaatattcgccttttattgtgtggtggtgctccactttctgcaacaacacagcgattcatgaatatctgtttctgctgtcccgttggtcaggggtatggactcacagaatctactggggctgggaccattacagaagtgtgggactacaataccggcagagtgggagcaccattagtttgctgtgaaatcaaattaaagaactgggaggaaggtggctattttaatactgacaaaccacatcccagaggtgaaattcttattggtggccaaaatgtgacaatggggtactacaaaaatgaagcaaaaacaaatactgatttctttgaagatgaaaatggacagcggtggctctgcacgggagatattggagagtttgaccctgatggttgtctgaagattattgatcgtaaaaaggaccttgtgaaactgcaggcaggagagtatgtttctcttgggaaagtagaggcagctttgaagaacctcccactgattgataacatttgtgcgtatgcaaacagttaccattcttacgtaattggatttgttgtgccaaatcaaaaggaactcacggagctagctagaatgaaaggatttaaggggacctgggaagagctgtgtaacagcagtgaaatggaaaatgaagtccttaaagtgctttctgaagctgctatttcagcatgtctggaaaaatttgaaattccactgaaaattcgtttgagccctgacccatggactcctgaaactggtctggtgacggatgccttcaagttgaaacgcaaagagcttaaaacacattaccaggcagacattgaacggatgtatgggagaaaatgattagtttggcattagtttgctaaagcgagctcagatcaaataggaaaatacttgaaatgtgtgtctcaggccgaggcaaactccattcctcatattaaaccccagctgttacttctcaccacgtcaccatttttaactgacaggattagtaaaatattaagacagcaaacttgtgtctgtctgtttcttccccctcctccagtttgctttggcatctatgactgtgtttgtcaataggagaatttttctgaatcatactggggaagcagtgattttaaacctcaagtttttaaacatgatttatatgttctgtacaattgttcagtttgtaactttttaaagtttggatgtatagaaggataaataggaaatataaaaattggttatttggggggcttttttacttattgtatttaaaaacaagggtatcaatgtgaaattatgtaaatttcaaatgcttatgaatcaagtcactgttgaacaaaaga

SEQ ID NO: 1739 - DNA, 2160 bp, Cricetulus griseus
agctggtacggcctggcgctgcgcttcttcaaaataaaagatggttctaaagcttttcacccaacttatagaagaaaaactgaagtttgtggcactgcataagcaggttctcttgggcccatacaacccagacacatgccctgaagttggattctttgatgtgttggggaatgataggaggagagaatgggcagccctgggaaacatgtccaaagaggacgccatggtggagttcgtgaagcttctgaaccggtgctgtcccctcttcagcatatgttgcttcccacagaatagagaaggaagaagaagaaaaaagaaggaaggcggaggaggagcgaaggcagcgtgaagaggaagagcgagagcgccctgaacgaaaaggaagaagagacgcggaagcgcagtacatgcagcagctgtaccaagtgcagctcgcacagcagcaggcagcattacagaagcaacaagaagtagccgtgactggggcttcattgcctacatcatcaaaagtgaatgcagctggggcaagtgacgtgatgtcagttaatggacaggccagaacccacactgtcaattccgaacaagaaattgagccagaagtggcagaagaagccttggaaaatggaccaaaagaatctcttccagtgatcgcagctccatccatgtggacaagaccacagatcaaagactttaaagaaaagattcggcaggatgcagactctgtgatcacagtacgacgaggagaagtagtcacagttcgagtccccactcatgaagaaggatcatacctcttctgggaatttgctacagacagttatgacattgggtttggggtttattttgaatggacagactctccgaatgctgctgtcagtgtgcatgtcagcgagtccagtgatgacgacgaggaggaggaagaaaatgtcacttgtgaagagaaagccaaaaaaacaacaagcctctgctggatgagattgtgcctgtgtaccggcgggactgtcatgaggaagtgtatgctggcagccaccagtatccaggggaggggggtgtatctcctcaagtttgataactcctactccttgtggaggtccaagtcagtctactacagagtctactatactagataaagctgatgttacagagcctggagtctaaggttagacagaagatgacattaatttcttttgactttgatgacgcattggagtcagtgtttaccttcttgattttgttctgatggtttgtgaactcttgctgggaaccaagatttcctgagactttttagcattgatgctctgaggttaaaagcagttcagaagactcatctagcccttgggtgctgaccaacagagccactagtagatactggagttacgtgagctacgtgctagatattcagtctccaaaataacatcccagcgttgaacccgacctggctggtggttagtccattgctgtctgctccatgtgttagacttcacggattatagtagaaaaagaaatggcctcaacttggtcttacctgagtgatccaggttgtttttgctttggatatagctatttagttagttatgttacagagaattattttctgagagaatgttaaacttagactattcaaactcagtagataattgacacgtaaagatacataggacagctcagcatccttcctcccaggtccctcagactctcaggccttttcgtccacttaccgttcacactactgctaacaaaacgttctcttttggttattaagaaactggatttttttctcctaaccagtgcttaatctgtgttttttgaattttgatccagaagtagtcaaatgtctatgctgttacatccagaatattcattaggctgccccacagctcttctgtatatatagaaaccacagagttaggatttttttttttaatgagaaaaatactgtatttaaaatgtaaaataaacttttaaaaagcaggcactaatatatatttctttcagcctttgattacagttttgtccttgcacatgttaagataaattatcttctaaaatattgttcttgggagcagtgtatgtcacttacatagcagtctctgtcacctgttcatagctgaacatttttggttcttaaacttttttatcgtcctttggcttgttgattagtac

SEQ ID NO: 1740 - DNA, 2160 bp, Cricetulus griseus
atggcgcccagctcgaaatcggagcggaacagcggggccgggagcggcggcggcggccctgggggaacccgggggaagcgggcggcggggcggcggcgggaacacgtcctcaagcagctggagcgggtcaagatcagtgggcagctgtctcctcgtcttttccggaagctgccccccagggtgtgcgtgtccctcaagagcatcgtagacgaggattttctctatgcaggccatatcttcctgggattttccaagtgtggccgctatgtcctctcctacaccagcagcagtggggatgacgacttctccttctacatataccacctctactggtgggagttcaacgtccacagcaagctcaagctggtccggcaggtgcggcttttccaggatgaggagatctacagtgacctgtacctgactgtgtgtgagtgcctagcgacgcttccaaggtcatcgtgtttgggatgctcatgaatatgatgatgatgagtgatgagaaccatcgtgacatctacatcagcactgtggctgtgcctcctcggggtcgctgtgctgcctgccaggatgccagtcgtgcccacccaggggacccaagtgcacagtgcctgcggcacggcttcatgctgcacaccaaataccaggtggtgtaccccttccctaccttccaacccgccttccagctcaagaaggatcaggtggtgctgctcaacaccagctactcgctggtggcctgcgctgtctctgtccactcagcaggtgacagcagtttctgccaaatcctgtatgaccacacagctttgcccccagccccacccagctctccaggaccttggagccctgaggcagtcccccgccttccccagccttggccttgaggtggtcccagctcggtcttctggagcccccgagccctcaccagccattgccaaggccaaggagtttgtagctgacatcttccgaagggccaaagaggccaagggtggtaccttggaagaagctcggctgccctcgggcctggggccctcaagcagccgctgccgcccatcctcagagtcaccagccccaagtggggaagtggcgcccagggacagtcctcctgcttcaggggcgtctgccccagagcctggctacatcaactacaccaagttgcactatgtgttgcggtctggggaagggacagaacctgaggatgaatttgaggatgacaagatctctctgccctttgtggtgactgatctccgtggccgcaacttacggcccatgcgagagcggacagatatgcagggccagtacctgacagtggagcagctcacattggacttcgagtatgtcatcaatgaggttatccgccatgtacctggggtcaccagttctgctctttcagtgactatgacatagttatcctggaggtctgcccagaaaccaaccaggtcctcatcaacattggcctgctgctcctggccttcccagcccccactgaggaaggtcagctccgaccaaagacctatcacaccagtctaaaggtggcctgggaccttaacacgggcatctttgagacagtcagcgtgggtgacctaaccgaggtcaaagggcagaccagtggcagtgtctggagctcctaccgtaagagctgtgtggacatggtcatgaaatggctggtgccagagagcagtggccgctatgtgaacaggatgacgaatgaggcactgcacaaagggggtgctcactgaaggttctggcagacagtgagcggtacacttggattgtgctgtgagggctgggccgccctggaccctgactccaactacctccgcgggcccgggaaaggaccgccttcctgggctggccctacaggggccacaattggcactagtgttaggttgcgggatgggactggtgcagcagcctctggtgacctgagagtctggatgtgtctttatttatgcctatttaagttgggaaagggcagagggatgagcccctcaggcctggcctgcccagcgaagcccagtcctgcttcctgtgctctggccctttcctgggctgcaagtgtgtagccccttaaggaggcccagtggttccagcctccctcatctggggtgggaaccctgtggccacctggccttgttcttcatgtactaaatgctttatttctga

SEQ ID NO: 1741 - DNA, 2160 bp, Cricetulus griseus
tgtttggggttcgccgcatgctgcctctcatctggtctaaggagcctggtgtccgggaagctgtactgaatgcctactgttgttagtggacgcctctgtcggaaccatccagtgtcttgaggaaatcctttgtgagtttgtgcagaaggatgagataaaaccagcagtgacccaactgctctgggagcggaccacggaaaaggtcccctgctctcctctggagcgctgttcctcggtcatgcttcttggcatgatggcacgaggaaaaccagaaattataggaagcaatttagacactctggtgagggtagggctggatgagaagtttccacaggactacaggctggcccagcaggtgtgccttgccatttccaacatctcagataggagaaagccttccctgggtgaacgtgagcctcccttccggctgcctcaggaacacgtgttgtttgaacgacttcgggagatggtcacaaagggctttgcacatccacatcccctctggatcccattcaaagaggtggcagtgagcctgacctaccagctggcagagggccctgaagtgatctgtgcccagatgctgcaaggctgtgcaaagcaagccttggagaagctggagaagaccaccactgaggaggaccccaaggagactgtccccacgctccccacattcctgctgatgaacctgctgtcactggctggggatgtggccctccagcagctggtccatttggaacaagcagtgagtggcgagctgggccggcggcgcgttctgcgggaggagcaggagcacaggaccaaggagcccaaggagaagaacacaagctctgaaacaactatggaggaagagatggggctggtcggggccaccgctgatgacacagaggcagagctaatccatagcatctgtgagaaggaactgctggatggcaaccaggtgctagctgccttcgtcccgctgctgcttaaggtctgcaacaaccctggcctctacaacgacccagccctctgtgccgctgcttcactggcccttggcaagttctgcatgatcagtgcctctttctgtgactcccagcttcgtctactattcaccatgcttgagaagtcttcactccccactgtccgctctaatctcatgattgccactggggatctggctatccgcttccccaacctggtggatccctggactcctcatctctacgcccgcctccgagacccagctcagcaagtgcgaaggacagcgggcctggtgatgacacacctgatcctgaaggacatggtgaaagtgaaggggcaggtgagcgagatggccgtgctgctcatcgaccctgtgcctcagattggtgccctggccaagaatttcttcaatgagctctcccacaagggcaatgcagtctataatctcctccctgatatcatcagccgcctgtcagacccagagtgtggggtggaggaggagcccttccacactatcatgaagcagctcctgtcctacatcaccaaggacaaacagactgagagtttggtggagaagctgtgtcatcggttccgcacagcccgaactgagcggcagtaccgggacctggcctactgtgtgtcccagctgcccctcacagacaaaggccttcacaagatgcttgacaactttgactgctttggagataagctgttagatgaatctgtcttcagtgcctttttgtcagttgtgggcaaactgcgtcggggggccaagcctgagggcaaggctaccatagatgaatttgagcagaagcttcgggcatgtcataccagaggcatggatggaatagaggagcttgaaactggccaagaaggcagccagcaagccctgtctgccaagaaaccctctgctgtctcaaggcgacagcctctgacttctatagattcagacaatgactttgtcacacctaagcctcgacgcaccaaccgtcatcgtccaaacactcagcaacgaaagtccaagaagaaagccaaagttgtcttttcaagtgatgagtccagtgaggatgaactttcagcggaaatgacggaagaagagactcccaagagaaccacccccatccgcagatcatctgcccgaagacacaggtcttaggagttgcctcacctattcccatccctgctgtgcagggtatctta

SEQ ID NO: 1742 - DNA, 2159 bp, Cricetulus griseus
gggacgggctctggggcccggtcggacatgggcaagaagcacaagaagcacaagtcggaccggcacttctacgaggagtacgtggagaagcccctaaagctggtcctcaaagtgggtggcagcgaagtcactgagctctccacgggcagctccgggcgacgactctagcctcttcgaagacagaagcgaccatgacaaacaacaaggacagaaaacggaaaaagaaggaagaaaggagagaaacaggctccgggagaagagaagggaggaaacggagaagagtcaaggaggataaaagaagcgggatcgagaccgtgtggagaacgaggcagaaaagatttccagtgtcatgcccctgtgagattagacttacctcccgagaagcctctcacaagctctctagccagacaagaagaagtagaacagacaccgcttcaggaagctttgaatcaactcatgagacaattgcagagaaaagacccaagtgctttcttttcatttcctgtcacggattttattgctcccggctactctatgataattaaacacccaatggattttagtaccatgaaagaaaaaatcaagaataatgactaccagtccatagaggaactaaaggataacttcaagctaatgtgtactaatgcaatgatttataacaagccagagaccatttattataaagctgcaaagaagctattacactcagggatgaaaattcttagtcaggagagaattcagagcctgaagcagagtatagacttcatggcggacttgcagaaaactcggaagcagaaagatagaacagatgcctctcagagtggggaggacagtggctgctggcaacgagagagggaagactctggagatgctgaaacgcaagccttcagaagccccactaaggacaataaaaagaaagacaaagatgttcttgatgacaaatggagaagcggcaactcagaaagggagcatgagcagattgagcgcgttgtccaggagtcagggggcaagctgacgaggcggccggcaaacagtcagtgtgaatttgaaagaagaaaaccagatggaacaacaacattgggacttctccatcctgttgagcccattgtgggagagccaggctactgccctgtaagactggggatgacaaccggaagactgcagtctggagtgaacaccctgcaggggttcaaagaagataaaaggaacagagttaccccagtgttatacttgaattacggaccctatagttcttacgccccacattatgactctacatttgccaatatcagcaaagatgattctgatttaatctattcaacatatggggaagactctgaccttccaaacaatttcagcatctctgagtttttggccacatgccaagattacccgtatgttatggcagatagtttactggatgttctaacaaaaggaggacattccaggagcctacaggacttggacgtgttatcacctgaagatgaaggccagaccagagcactggacacagcaagagaagcagagattgcacaagtagagccaacagggcgtttggagtctagcagtcaggacaggctcacagcactgcaagcagtgacaaactttggtgctccggctgaagtctttgactctgaagaagctgaagtgttccagaggaagcttgatgagactacaagattgctcagggaactccaggaggcacagaatgagaggctgagcaccaggcctcctcccaatatgatctgtctcttgggtccttcttacagagaaatgtaccttgctgaacaagtgaccaataaccttaaagaactcacacagcaagtgactccaggtgatgttgtgagcatacatggagtccggaaagcaatggggatttctgttccttccccatcatgggaaacagctttgtagatttgacagaagagtgtgaagaacctaaggaggcttgtgctgtcgagtgtgggcctgacagaagctgaagctggtctggtattgattacactatgtacatattttttcattctgaacctggaggtgcttttcagaagatattaactatttgtaaattgtgttctaattaagctttggaacagttcctttcaatgttccagagattggacttgtattaggaaataaagctgaacctgggactgtga

SEQ ID NO: 1743 - DNA, 2159 bp, Cricetulus griseus
  modified_base (428)..(428): a, c, t, g, unknown or other
gttcagcctacaagcacccaccaccctgatggccagcctgcccacagccttgccaatgcccagcagcaaaacctcagcctactgcttccagaacactgatcatgacaacgaacaatcagaccaggtttactattcccccgccgacccttggagtagcccccgtcccttgcagacaggctggtgttgaaggaaccccatctttgaaggccgttcaccatgtggcttccccagccatcccctcggcatcccccagtacactgtctagtcctcatctgtatcacaaacaagcacagcggcatgaagctgtccatgaaaggctctcataaccacacccaggggtggtggctacagctctgtgggcagtggagctgtgaggcctccagttggcaaccggggacaccaccaatacaaccgcactggctggaggnggaaaaaacacgcgcacacgagggacagcctgcccgtgagtctcagcagataatggctccgggaaccgagaccagcatccagcacctccaccgtgggctgccgagtgctgcccagcactggtcactctgcatgtttgtgtggtggccgaatccatctgatagagcagctccctgcgctcatctgtgaagccttactcaacgtggatgtgcgtctgcctgcctagaagtcttcgtccatgcccagcagggcggctcaggagtggcagggaccggctgtgaggctgccgctttactgccctcatgtcttgtttgaaaactttgggactgtttttctatgtaaatattgagaacttatgaacatgaacaccgtgaggaggggcttgtgggctttctttttaagtcttttcttttggtcagatgcagtgaaggagccaagtcaatcatgatggttttgtgaggccagcgtatacctggcagccttgctgtaggccttgggctgttgtcctgctctgaccacaaggtctgacattttgggttgggtttttaaaattagacagcaaatccagcatttaaagtgccagaagtaaaaacctctgtggggaaaagaggttgtcacatcatacaaatcttaaagtattgtgactgtggacatgcttcagtccgttaaatggtgtggtctagaactatgggcctgagagtatcattacagacaatggcacccagatttaggaatgtggagaaaggaatttcgttgattccattgaggaatctgcatagcggtatgcactcgttctgttaagagcaaatatctgaaaagtacctccgctgttcagggcacgtggggagtattttaacgtatcacaggagagcacagcccagcgtgggcccgggagcagctggtgcctggcgtcagaagcatacaggtatactatgcaagtgtattctgccacaacaaccactgtctttgttactttttttgaacaagaatatatccatcgcctaatcccaagtctctgaagcagcacagttgtcctgggagtgcttgcatcttgaaggccctctggcttccatttctgaaatggggctctggccctgctaaacactacaggtaggtccgcctttaagtcccctagtagagaatgtcaaggctgtgacatctgactgacgtgcaacagtgggagttctagattgatgtctgaatgtgatggatgcctagccaaggacaagttctgcgtgtctgggtccgcctctcgttgctgtggtggggccactgactctgggagacaggtccagagcagagtagcacatggggtctgcagctcgtgaggattggagtcgtccaaaatatttaaaactatttaaattgtgaaacctgttgctaaagaatatttatgaacactggtccataggcctgtactaatttacacattagcaatattgactgtacctgcattaaggagccaccgtggggccgtgcgagtgacccgcagatgtgcgttttaaagttctgtcccaggcacaggtatgtgtccatcccgcaatggtgaaccagatgaattggctggctaccactgtggccacatgcaacagtttgacaaaaagatatcatgtttcaattttgtgtgtggacaacaatgtggacactaaaattgacatatttttatgtaaagtttttctattctttgatttttaataaactttagaaaccaaaaaaaaaaaaaaaaaaaaaaa

SEQ ID NO: 1744 - DNA, 2159 bp, Cricetulus griseus
cgagcggctaatcggaactctgtcttccgttttctcgtctggattcctccagggaggagcaggacagcatgctgggctccggcttcaaagctgaacgcttacgagtcaattttgagattagtcataaatcgtcttaaactgttggaagaaaaaaaaacggactggctcagaaagcaaggaaggagattgctgactatggaggccgatggagagtcctggagctgtactgtgacctgctgctggctcggtttggccttatccagtctatgaaggagctagattctggtctggctgaatctgtgtctacactgatctgggctgctcctcggcttcagtcagaagtggctgagttgaaaatagttgctgatcagctctgtgctaaatatagcaaggaatatggcaagttgtgcaggaccaaccagattgggactgtgaatgataggctgatgcacaaactgagtgtagaagctccacccaaaatcctagtggagagatacctgattgaaattgccaagaattacaatgtaccctatgaacctgactctgtggtcatggcagaagctcctactggggtggagacagaccttattgatgttggatttacagatgatgtgaagaaaggtggtcctggaagaggaggcgggggcgggttcacagcccctgttggtggacctgatggaacagtgccagtgcccatgcctatgcccatgccatctccaaatgctcccttctcatatccactgccaaagggaccatcggatttcagtggattgccagtggggacttaccaggccttccctaacattcacccacctcagataccagcaactcccccatcgtatgaatctgttgatgacattaatggtgataaaaatatttcttctgcacagattgttggacccaagccagaagctcctgcaaagcccccttccagacccatggataattacaacaactttgtactgccagagttgccgtctgtgccagacacactcccaacagcatctgctggagccagtacctctgcatcagaggacatagactttgatgatctttcccggaggtttgaggaactgaaaaagaaaacataggtttcttaaagcaggcaatatccacagtctggaagttgagactgcatagttcttccttataacagtgaatctctatgaaattccgtttcatctgttaaccatcactgagcactcttccttggggctcttgctgctctaccaattgtgttgctttccagttctctagtgatctgtctttctgtcacatggatccttggttcactcctggccattccattcccaaaggagtgagaagagaagtattgtgggtagagttgccaaagatggctggaccatggaagagactaccctatgatatgtctcaaccttgtcttgtaaatgcatccttctgcatgggggtgattatagagagaatcaaggccaccatgtgttttctcaaatgagttagatggctcaggaagccactgtcacggttcctggaggcaggaccctctcattgacatacacactactccttgctgcagggcactgttccacctggatccagttgcaaagtttgtttggaaaagttctctcttagttctactggattctcagggagccctctgtggccttttgctttattttgagtgctgtgtttcccttttaggaaagagcagcactatagaaacttgttttttcccatagcatgttaggagagaagcataggtctctacccaagcttagggtgggcttccagttgccttaatagaagtactcaagtctcttgggtagagatctggaagcctacaggaaaagaggggtacatttcttcattggaaaacttttatgattaagggaatctttacaaactgataccttaaattttagtgccatgtggctgtagctcactgctttcctgggtggttgtgattcttcattacagtaacttatgtgcatcttggctccttagccaaggccacccttccaagaggttagctttgggactggaagatgagatttttgcttatgtataatatttctgtatatacctgtttcaagcaacttcatttgtttttgattgatttgtctcatagctcagtggctgctaataaagatctcatgttctgctttaaaaaaaaaaaaaaa

SEQ ID NO: 1745 - DNA, 2159 bp, Cricetulus griseus
acagcagcctggaaacctctgcccagtctgaagcgaagtggctgacacagatcgctgaactggagaaggaacagggcagcctggtaactgctgcagctcagagagaggaagagttctcagccctccgagaccagctggaaagcacgaagatcaaactggccagtgcccaggaatccatgtgccaacaggtaaggaccagaggaaatactcttggcagggtccaggaaggctgcggagcgtgagatacaggaggcactgagccagcttgaagagcctgctctcatcagctgtgcagggtccacagatcaccttctctccaaagtcaaggctgtttccagctgccttgagcaactggaaaagagctgcagccagtatctggcctgtccagaagatatcagtgagcttctacactcaataaccctgcttgccaacttgaccagtgacaccatcattcaggggagtgccaccagcctccgggccccaccagagccagctgactctctgacagaggcctgtaggcagtatggcaaggaaaccctagcctatctgttctccctggaggaagaggaagccatggagaaagctgacagcacagccatgaagaactgcctccgcaagattgaggccattggtgaggaactgctgccaagaggtctagacataaaacaagaagagctacaaggagatggccgccacttcagctgccattgaagctgccaccaaccggatagaggaaataactcagtaaatcccgagcaggagacacaggagtcaagttggaggtgaacgaaaggatccttggttcctgtactagcctgatgcaagccatcaaggtcctcgttgtgacctccaaggacctccagaaggagattgtggaaagcggcaggggtaccgcatcccataaagaattttatgcaaagaactcacggtggacagaagggcttatatctgcctccaaagctgttggctggggagctaccatcatggtggatgctgctgatctcgtggtccaaggcaaagggaagtttgaggaactgatggtgtgttcacatgagattgctgctagcacagcccagcttgtggctgcatccaaggttaaagctaacaagggcagcctcaatctgacccagctgcagcaggcctctcggggagtcaaccaggccacagcggctgtggtggcctcaaccatctccggcaaatctcagattgaggagacagacagtatggacttctcaagcatgaccctgacccagattaagcgccaggagatggattctcaggtcagggtgctggagctggaaaatgacctgcagaaggagcgtacaaaaactaggagagcttcgtaagaaacactacgagctggctggtgttgctgaaggctgggaagaagggacagaagcatcacctcctactgctcaagaagcaatccctagaaaagagtagagccaagccaacacccctcatatttaaacaacaaatcaaacctgccctacaatcccagcacttggcattctgaggcagggggatcatgggttcaggtctagcctggtctatatactgagaccttatctcaaaaattggccttccaaatagagtggctttgccctctctccacctctcgggttctcagagaccacactgtcagattgtcctctcctaggagccaaagccagaagtggttgattagatgtgactggatccagttctgagcatatagatccttccagacatgttttcaggtgaccctcaactacctcaggtttgaagaccctaagttaaactgattagcattctagggacaaaccgaggaaccccattaaatcttggtgataacctaatgtctcaagcttataacagactctcaaatgttcagggatggggttggtctttgtttgtttatgcccccttctgtttttaacctttttcgcagttttccattagaatagtccctataagtgaatctcacttttcacttcgtgcctaccttcccagggcaggtgccaccggctcttgtttctcccaacagtacttttattatggaatgaagacctttctttgtataatgcattacatctgtgttttcaacttttccaataaatatgtcagcctggccatggagaactctagtgataaaaaaaaaaaaaaaaaaaaaaaaaaaa

SEQ ID NO: 1746 - DNA, 2159 bp, Cricetulus griseus
  modified_base (2135)..(2135): a, c, t, g, unknown or other
ccagcctagcacagtcatattccggagccagtcattgccaggagctgactctcttcttgccaagcccattgacaagcagcacacggacaccgtggtgaacttcctcatccgagtggcttgccaggtcaacgacaacaccaacaccgcagggtcacctggagaggtgctctctcgtcgctgtgtgaatcttcttaagactgctttgcggccagatatgtggtgcaagtcagagctcaagctgcagtggtttgacaagctgctgatgactgtggagcagccgaaccaggtgaactatggcaatatctgtacaggattggaagtgctgaacttcttgctaactgtgctacagtcaccagccatcctcagtagcttcaagccgctgcagcgggcatcgcagcttgcatgacatgtgggaacaccaaagtgctgcgagccgtccacacgcctcctctctcgctcacactcttaactttgtcaagaagctggtgagcacttttggagtgggcctggagaacgtgtccaacgtctcaaccatgttctccagtgcggcctccgagtcactggcccgccgagcacaagccacagccccaggaccccgttttccagaagctgaagggccagttcaccacagattttgacttcagtgtcccaggatccatgaagcttcataatctaatttctaaactgaaaaagtggatcaaaatccttgaggctaaaaccaagcagcttcccaaattcttcctcatagaggaaaaagtgccggttcttgagctaatttctcagctcagacagctgaagtggagatcccgtggggtagtttttgatgcctaagccgacacactactacatcaagattgctcgctttatgccccgagtggaaattgtccagaagcataacacggcggcccgcaggctcctacatccgaggacacgagaaaggagaccaccaagagacacttgttcttcacagttcctcgggttgtggctgtctccccacagatgcgccttgtggaagacaacccctcttcactttccctcgtggagatctacaagcagcgctgtgccaagaaaggcattgaacacgacaaccccatctcccgttactatgacaggctggccacagtgcaggcacggggaacacaggccagccatcaggtcctccgagacattctcaaagaggtccagagcaacatggtcccccgcagcatgttgaaagagtgggccctgcacaccttccccaatgctacagactactggaccttccggaagatgttcaccatccagctggcactcattggctttgcagaattcgtcctgcatctcaatagactcaaccctgagatgttacagattgctcaggacacaggcaagctgaatgtcgcttactttcgatttgacataaacgatgcaactggggacttagatgccaaccgtccagtccctttccgtctcacacccaacatttctgagttcctgaccaccattggtgtttccggcccgctgactgcctccatgattgctgtcgcccggtgctttgcccagcccaacttcaaggtggatggcattctgaaaactgtgctccgggacgagatcattgcttggcacaaaaagacccaggaggacacttcctctccattgtcggccgccgggcagcctgagaacatggacagccagcaactggtctccttggttcagaaagctgtcactgccatcatgacccgcctgcacaacttggcccagttcgatggtggagagagcaaggtgaacaccctggtggctgccgccaatagcttggacaacctatgtcgcatggaccctgcctggcacccatggctgtgacctcagctgtcaccccacccggaatgtgaaatgtgcctctcagcctctgagcccatggctgtggagacctcgctctgccttgttacccactttatttagttactttcccagtagtttgtgtgtgaaagagcgtgagatttgtcccggagggagcccccctacacacaaggctgctgccattagagatggcagagccaaactgagcagcttccgagatgctttttaatttaagggtttcctctccgtggtactcctgcctcagtgtgacgtgcagattgagaaagtccctttttttntttttagaataaattaatttataa

SEQ ID NO: 1747 - DNA, 2159 bp, Cricetulus griseus
cccgggataccgatcccagtctcctgtgaggagtatggatgaagctccttgtgttaatggccgctggggaacactgaggcccagggctcaaaggcagactccctcaggttcccgagaagggagcctctccccagccagaggagatggctctcctatcctcaatggtggaaccttgtctccagggacagcagctgttgggggtgcttccttggacagccctgtgcaggtggtatctccaagcaccccatctgcctccgaaggatatgacctaaaaatgggactttccctagctccccgcagaggctctctcccagatcagaaggacctgaggctaagctccattgacctgaattgggacctgaagtctgcttccaatagcagtcatatggatggtacagacaacaggacagttgcagggagtgtgagacaccctccagaacagaccaatggtgttcatacaccaccacatgtggccagtgcccttgcaggggctgtatcccccagtgccctgcgtcggagtttggaagccatcaaagcgatgtcatccaaaggcccctcagcctcggccacgctaagtcctcctcttgggtcttctccaagctctccagggaatcagaacctgagcagtggagaaactgtacccatcccccgcccaggaccagcccaaggagatggtcattccttacccccaattgctcgccgcctgggccaccaccctccacagtccctcaatgttggcaaacccctgtaccagagtatgaactgcaagcccatgcagatgtatgtgctggacattaaagacaccaaggagaaaggccgagtcaaatggaaagtatttactagcagttctgtggtcgggcctcctgaaaccagcctgcacacagtggtacagggccgaggagagctatatatacagatatattatataaccaactctgtttacaaataaaggtgaggtctccgttctggttcagatcagctgttgctatcttagcggaggctgtgctggccttttctactctgctggtaatcagaccaggaagttagggacagactaacagcagtaacttcccacaagaaacaagctgaagagctccctggatctttctgtggccttctcagatttcattttgcctttaaaaccgaaattgaaactggctcacagccagcacttgccctggctgacgtgtgtgtctcctgcttcatgctcagtcttcccttagccattagcttcgctctggtggtctcggcaggaaagtcccccctggggaagcccaggtaaggaccagctctcgaggagaggaaggtgctctggagctgctcccaagggaacacccctgtgcctacttcctgtgtatcccaccactccagctccctgctctgttgcttctgccagtcctttggttgacagtttgatcctgtggggcctgacttaagaggcaaggtcagcagatgagcagcctgacattgctgaaacctggctgtggtgtttgcctgtggacgtgcctctggacttggtttctacttgcacatcaagtattcagacacctgaagttcagaatcgccacttttgtagtctttctttcccctgtgccttcctaagctagcggtcaactgttgattgttctacttttttttggtacgcgataccaattttgtcttaaaattcactgagagacatgagacaaaatattttgtttgaaccctcagaagcacctaaagcaaatatttatcagtatttaagtatttaaaatacatcttgtttctacttgaagctttaaccctttccattcctgcaagtgtgcctttgagagccctcggtcatattaacttcagtcatttggctggcctcgctcgtgtgagagttctgggcactgctctgcttgctcgatctgccccctcctaccaaccagggctcatgtcagtgtgcacccaccgtgccctggcgaagctggtgctgcgagtgatgtttcccatacaactcaggggtgccagggggctcaccctgatagtcatgataggcacatcacagtgtagggatgaaaacggaacccatggatatttaaatctgtcaatttcatttttgttaatgttttcccctgatgactttttagcagtttaacaaataaaacaaaaatggactgaaaaaaaaaaaaaaa

SEQ ID NO: 1748 - DNA, 2159 bp, Cricetulus griseus
tgtcgccagagcatcaactttttccctccagtgtgccctgttgcttggggcctactctttcagacgatgcacattttcccactcagcgggcactcccgaggggaccaagttacggaagctaatcctctcagatgagttgaagccagctcaccgaaagagggagctgccttctttgagcccagcccctgacacagggctgtctccctccaaaaggactcaccagcgctctaaatcagatgctacagccagcataagtctcagcagcaacctgaaacgaacagccagcaaccctaaagtggagaatgaggatgagcctgtccggcttgcccctgaacgagaattcatcaagtctttgatggcaattggcaaacggctggccaccctccccactaaggaacagaaaacacaaaggctgatctcagagctctccctactcaaccataaacctccctgcccgagtctggctgcccactgctggctttgaccaccacgtggtccgtgtgccccacacacaagctgttgtcctcaattccaaggacaaggctccctacctggatctacgtggaagttcttgaatgtgaaaacttcgacacaactagtgttcctgcccggattcctgagaaccgaattcggagcacacggtccgtagagaacctgcctgaatgtggtatcactcatgagcagcgggctggcagcttcagcacggtgcccaattatgacaatgatgatgaagcctggtcggtggatgacataggcgagctacaggtggagctccctgaagtgcacaccaacagctgtgacaacatctcccagttctcagtggacagcatcaccagccaggagagcaaggagcctgtgttcattgcagcaggggacatccgacggcgcctttcagaacagctggctcacacacccacagccttcaaacgagaccctgaagacccttctgcagttgccctcaaggagccctggcaggagaaagtgcggaggatcagagagggttccccctatggccatcttcccaattggcgactcctgtcagtcattgtcaagtgtggagatgaccttcggcaggagctgctggctttccaggtgttgaagcaactgcagtccatttgggagcaggagcgagtgcctctttggatcaagccatataagattcttgtgatttcagccgacagtggcatgattgaaccagtagtcaacgctgtgtccatccaccaggtgaagaaacagtcacagctctccttgctcgattacttcctacaggaacatggcagttataccactgaggcattccttagtgcccagcgcaattttgtgcaaagttgtgctggctactgcttggtctgctacctattgcaagtaaaggacaggcacaatgggaacatccttctggatgcagaaggccacatcatccacatcgactttggcttcatcctctccagctcaccccgaaacctgggctttgagacatcagcctttaagctgaccactgaatttgtggatgtaatgggcggcctgaatggcgacatgttcaactactacaagatgctcatgctgcaggggctgattgctgctcggaagcatatggacaaggtggtgcagattgtggagatcatgcagcaaggttctcaacttccttgcttccatggctccagcaccattcgcaacctcaaagagaggttccacatgagcatgactgaggagcagctccagctgctggtggagcagatggtggatggcagcatgaggtctatcaccaccaaactctacgatggcttccagtacctcaccaatggcatcatgtgacacccttcttgggcctataagtggtgggattgaaggcaccctccctaggaggacccttgcctaagaaaccccaaatcacaaaaccctacctacctaaccacctgcccaagggaaatggaaggcaagaaatacaaaggatcatgtggtaaccatgagagcttgccagagggtaggagagccagccatggggtccagacttgctggggcttccccacctccggctgtgtcagtattaccacctgacagatcccaggactcactgccctccagaggagagaggtgatgaacgtgaggatggacttttttttttttttttttttttttttaattttttttttaaataaaat

SEQ ID NO: 1749 - DNA, 2158 bp, Cricetulus griseus
actacgcgatcgagaaagaaaaagttagaaaattcctgcaagagttttattatgatgatgaactcggaaagaagcagttcaagtatggaacccagttggttcatctggctcatcgggaacaagtggcattgtacgtggacctagatgatgttgctgaagatgaccctgagctggtcgactcaatttgtgagaatgccaaacgctactcaaagctgtttgctgatgttgtacaagagcttctgcctgagtacaaggagaaggaggtggtgaataaagatgttctggatgtttacattgagcaccgactgatgatggagcagcggagcagagaccctggggcagtccggaaccctcaaaatcaatatccttctgagctgatgcgtagatttgagttgtatttccaaggcccaagtagcagcaagcctcgagtgatccgagaagtgcgggctgattctgtggggaaattggtgactgttcgtgggattgtcactcgtgtctctgaagtcaaacctcggatggtggtggccacatatacttgtgatcagtgtggggcagagacttaccagccgatccagtctcccaccttcatgcctttgataatgtgtcccagccaggagtgccaaaccaaccgctcaggagggcggctttacctgcagactcgtggttccaaatttattaaattccaagaaatgaagattcaagaacatagtgatcaagttcctgtgggaaacatccctcgtagcatcacagtggttttacaaggagagaatacaaggactgccctgcctggtgaccatgtcagtgtcactggtatcttcttgccagtcctgcgtacagggttccaacagatggcacagggtttactctcagaaacattcctggaagcccaccggattgtgaagatgactaagagtgaggatgatgcagctgaggctggagagctgagcggggaggaactaaaacagattgcagaagaggacttctatgaaaagctggcagcttctattgctccagagatctatgggcacgaggatgtgaagaaagcactgttgctgctcctggtgggtggtgtggaccagtctcctcaaggcatgaagatcaggggaaacatccacatctgccttatgggagaccctggtgtggccaaatctcagctcctatcttacatcgatcgtctggccccccgaagtcagtatacaacaggccggggctcctctggagtggggctcacagcggctgtactgagagactctgtgagtggggaactgaccttagagggtggagccctggtgctggctgaccagggtgtgtgctgtatcgatgagtttgacaaaatggccgaagctgaccgcacagccatccatgaggtcatggaacaacagaccatctccattgccaaagcagggattctcaccacactcaatgcccggtgctctatcctggctgctgccaaccctgcctatgggcgatacaacccccgccgaagcctggagcagaacatacagcttcctgctgctctgctttcccgattcgaccttttatggctgattcaggaccggcctgaccgagataatgacctccggttggcccagcacatcacctatgtccaccagcacagccggcagccccctgcccagtttgaacctttggacatgaagcttatgagacggtacatagccatgtgccgagagaggcagcctaccgtgcctgaatctctggctgactacatcacagcagcatatgtagagatgaggcgagaggcccgggccagtaaggatgccacctatacttctgcccggaccctactggccattcttcgactttctactgctctggctcgcctccgtatggtggacattgtggaaaaagaagatgtaaatgaagccataaggttgatggagatgtcaaaggactcacttctaggtgaaaagggacaaacagctaggacccagaggccagcagatgtgatatttgccacagttcgtgaattggtctcagggggacgaagtgtccggttttctgaggctgagcagcgctgcatatcacgtggtttcacaccagcccaattccaggcagctctggatgaatatgaggagctaaatgtctggcaggtcaatacttctcggacacgcatcacttttgtctgatgaccagcttt

SEQ ID NO: 1750 - DNA, 2158 bp, Cricetulus griseus
aaagaaaagaagttcaactacacgtgtaaattctgctacaaatacagagacacaagcagcctcagccttacacactcagaagccattgaaatctacctccctttccctattttacaaaaaagtgtaccgtctagcatatctccgcctaaatacactatgtgcacgccttctgtctgaccatccagaactagagcatattatctggactctgtttcagcatacactgcaaaatgagtatgagctcatgaaagaccggcatttagaccagatcatgatgtgctctatgtaatttgggacatctgagaagttccagaaaataaaccagatggtgtgtaatagtgaccgagtgctcaagagaagtgctgaaggtggcaaccctcccaagccactgaaaaagctgcgctttgacattgagggatccgatgaagcagatggaagtaaacatctcccagcagagtccaaattccaacagaaactggcagaaatgacttctactcgaacacgaatgcaaaagcagaaaatgaatgatatcatggatatctcaaacaaggaagaaaagtgaggatctcaggactctggacactgtggaccctggggacatgtgactcatgtctcatggatgtgactgtagttcccaggttctgctcatgttatagatataaaatgtgcaggtacaagttgaatatttgtgtggatgtttcctaagccacttcaatgttgtaatcaatggtatagagttgataatacacaggattgagaatcttgtgcagatcatgccatttaaaacatgaaagcagatcgtttgcatttccaacgtgagcctgctgccctcagaagtgaggctgcctctggagaggggtcctacagccccttatgcctggctgactactttgcctttcctcatggcacatgtgtgatgtttgctcttggttttattaatttatatgtatttttttaatttaacgtgaatacccttagaaagtgtgtcctgtcttccagatgcaagttgattgactgtccacatcaaccaaattatcttggctcttctactgacacagattgttacaaaccgcggaaaaatactaatttctacacattgggcttattttgatattagaatctaatgtactgtgtgtttgttttacatattttacctttgaaatacaagacaaaaaaacctgtaagaattgattcttttattcatccaactcatgctttaactgaagattattgataatattccaggttatttttccttttaatcattcagataactgaatttaagtacccatgtagtacttgaaagtcaagtctgaccacaactgtgctgcagaggacccaagtacagtacaacccaagtgcactttctaatgtttctgggtcctgaagaatcaagatacaaattaattttgttccacaagtagactgttagctataggagccttcttttttttcccctcatagaagtaagtgtctaattgcacctcaacaattattctgctctcctaaatttgggaaagtttgtgttttctctggaatggtacatgtcttccaggtatcttttgaactggcagttaccttgttttttctgtgaaaaagcttcaaatgaaaatagctgcattgaaaagaggcactcccttcaccccctccacctaaaggtgtatttaaattatcttgtgggattaacttatttagagatggtataatttaaaataggtgatatttaaggtagcatcagctagcagttaagaaaatcactttttctaaactccatactttttggaaagaaatctggtcttgttagaaaacaaacttcgattttctcctcagtttagtttcggttttactagtttaatagttatctcgataacaaaagcaatagacagcttcctccatttctcattaagttttgcatgaacatcctacagattagttaggttttcggttaaggcttaccatacttttaggtcttttgctagtaagttcaagttagaattagtgacagaattataggaattttcaaagatcctgtattgacatttcttaaggctgcagacactgcactattggttttgtttttgtactggttaaaactatacattcaaaattgctatgttcctatttctataatagtttatctatttaaataaactagttg

SEQ ID NO: 1751 - DNA, 2158 bp, Cricetulus griseus
cctggggctggtatgctgggtacacagtgatggaatggggggaagatattaaaagcaatttctaatgacgaagcagtgatgctggtgaaccaccaggccacaggagatgtgtgtacattgatgatgtgcctacaggacaaagggccggttgtggctcagatgatgtggctgatggatcatattttcaagtatacaaactttggaattgtttccctgattcatggggacttctttataagacagggaagatcctaccgtgaccaacagctgctggttctcaagaagcacctagaacagaattacaggagcagagatcgaaagtggattgttctatttcctgaagggggcttcctcaggaagaggagagaaacaagccaggcatttgccaagaaaataacttgccatttcttacacatgtcactttgccaaggtttgggcaacaaacattatcctgaatgcccttgttgctcggcatgaacacaggatttccctccagagttaccagtacaaaaagtgtatcagtgctggtccacaaagggtggataataacggtgtcttctatgggattttgtcctgcaagtcatgtaagccttctgtctgcaggcaggaggatcagaggagctctgagtcacagtcatgctagcacacgtcatgatggggagagactaatgtgtttgggaccaaaaccacccaagttggaaatttctggatcacaaaggagcctggcataccctgaagccgtcactggttggtgctgtctggcggccgtgctgcaccagccctcagtagttacaaagtgggctctgagagtatgctgcgggttctgagctggtggggactatggccatggtcaggtgaaagatacaatctggggctttctgcagaaattccatctgaggatttttacatgtaatattttttaaaagtctaaagagcaaaaaaaaatgtatagttgcaaagtatgcaaacgctttggatgactttattttattatgtaaactgttgaacacgactgtggtgtacaaactctttacatgtaaggagtccatgcactttacagtaacctttgtgattcggtaatgagacagttatacatccaactgccattatttttattaagtgctttcttttctttacaattattacaaagttgtatttattttctacagatggatttttgtttcatgatgctgtaatgtttacttcagcttgttgagctttctttgtgatctgcatgtcactatgtgtgttttaagaatgactgtaaaggctgtggtaactgtcattcacttttgtaaagggctggtcacacgtggatctggtttctgaatgcattggatgattttgccagatcaccttttcagaaatttaaatattgtgaataccaaaagaagcattttctcagcaaaaattaatagctggttctatttttttaatgtagagaaaataaagttgaatttttttccccaaaacaatgcttttaattcttaatagtaagggggggtgtctgtgctgtcctggagttgctcagcgcctgctgctgcggcttatgcctggagctcagcatccaatggcctggcctgtgagaaaaccatccggctcctcccaggacttaaaagatttgccttcctccagtcttaccatgtggttttgtttgttttttaacattaagaacattgatggtttagtgtcttgtttgtaaaatacctttgaccccaatgaaaacttttaatgtatgaaaatgtctcgcacaatcctaccaaataagttaaatcgtatggttcagtctacctcttcttttcctggatttaggctgctggttgggtggggcagcagttttatttcccctctgaagtactttatgtggaagacaacagactgggggactgaggcctgaaagcagattagaggctctttgagatctgttgctgaccagccctgttccccatgagttggggaaaagccattgtttttaattcccacttaatatgaaaatgtttgttttaaaaattgtttcttgctggtgaaaaatgtatttttaaaaggaaaaaccaaatcctcttttggtctgaggagtcagctgtatgagcaggtgtgaccgtatcataacatgctgatgtcatagaaatcaataaatttttacctctcaggaaaaaaa

SEQ ID NO: 1752 - DNA, 2158 bp, Cricetulus griseus
cacacaggatgccatcagtgccgccaatccccgggtcattgatgacagcagggcccgcaagctgtccacagacctgaaacgctgcacgtactatgagacatgtgcgacctaagaagcagcagctggccattgggccctgccaagtcccctgcccaacctcaccccagccactcggccgtgtctgctgcctccatcccggctgtgcacatcaatcaggccacgaatggcagcgccttcagtgactactcgtcctcagtcccttccacccccagcatcagccagcgggagctgcgcatcgagaccatcgctgcctcctccacccccacgcccatccgcaagcagtccaagaggcgctccaacatcttcacggggagaagaaggctgccgagtgcaaagtagacagcatcggcagcggccgggccatccccattaagcaggggatcctgctaaaaaggagtggcaagtccttgaacaaggagtggaagaagaagtatgtgacgctctgtgacaacggtttacttacttaccatcccagcctgcacgattacatgcagaacatccatggcaaggagattgaccttctgcggacaacagtcaaagtgccagggaagcgcctgccccgagccacacctaccacagccccaggcaccagtcccccgtgccaatgggttggccatggagcgaagtaacccacagctgggcggggcgcagaggagtggcccagctgaggtactcagttccaaccccaagctggagcctccccaatctccccactccaaccggaagaagcaccgccggaaaaagagcaccgggaccccccgaccagacggccccagcagtgctgctgaagaggcagaggagtcctttgagtttgtagtggtgtccctcactggtcagacctggcactttgaggcctcaacggcagaagaacgagagctgtgggtgcagagcgtgcaggcccaaatccttgccagtctacagggctgtcgaagtgccaaggacaagactcggctggggaaccagaacacagctctggctgtgcaggctgtccgcacggtccgtggcaacagcttctgtattgactgtgaagcccccaatccagactgggccagcctgaacctgggtgccctgatgtgtatagagtgttcagggatccaccgacacctgggggctcacctgtcccgggtccgctccttggaccttgatgactggccacctgaactgctagctgtcatgactgcaatgggcaatgccttggctaacagtgtctgggagggggctctggatggctactcgaagccaagccctgaagcctgcagagaggaaaaggagcgctggatccgggccaagtatgaacagaagctcttcttggccccactgccaagctcggatgtgcccctggggcagcagttactccgggctgtggtggaggacgacctgcgactgttggtgacactgctggcccatgggtccaaggaggaagtgaatgagacatacggggacggcgatgggaggacagccctgcacctgtccagtgccatggccaatgtggtcttcacccagctgctcatatggtacggggtggacgtgaggagccgtgatgccaggggcctgaccccactggcctacgcccgccgggccggcagccaggagtgtgcggacatcttgatccagcatgggtgccctggtgagggctgtgggttggcacccacttccaacagagagcctgccaatggcacgaatccctccgcagagctgcaccgcagccctagtctcctatgaagctcaggaagagggcagaggggccagaaggactcgaggtctgagattggagctcagcagagcaggagtgtgttttgcagccctctgccctacggtgccattaagggacaaaaccctttggaggtacctgtgaggagaggggggcaggacctctccctcctccagaaccctgcctcctcatgacagctcccacaagccttcaccctgcgatgggtggggaagaacaggacacaggatgggggtgccagagagagacaaggggaccagtctgtgagtcccatgtaaaatgtgtacattggagtatttatgttagtgtatatacgtggtgtgtgtgtatgatgagccaataaaccaggctgtatgtgtggcctcattt

SEQ ID NO: 1753 - DNA, 2158 bp, Cricetulus griseus
aagcagacctatatcacccggtctttcgtatgcaagtcatacggttggtttcacaccaccaacctcattgactcgagctggaatgtcttactacaactctccaggcctccatgttcagcacatgggagcctcccatggcatcacaaggccgtcaccacggagaagcagcagtcccgataagttcaaaaggcccacaccgcctccatcacccaacacacagagcccagtccagccacctccaccgcctcctccgccccccactgcagccctcggtcccttcggcagccacctcttcgcagcccgccccttcatcgcagcagcattcggtgcacccctcctcccagcccttaatgcatgagcttactcagaatttcaagttgggacttgtctgatggagccgccttctcaacgccaaaggcttctcctccctggcatatttggatctgatgtgtttgcactgaggttgtctagcttccctcctcatagtgttgtgaatgtctgtcggaaacgcagccagtgttgtgggtctgcaacaataaccagatgactctttccaacctaactctgtctataggattggaagttagatgaaccggtgcccacaacatgtctagtctagagctttctacagacacactttttactagattttttaatgtaaattgaccgcagtgtctcttgtaaagcagcctacagaaacaagtcacacagctgtagcttctccccatgtgtgggatgggagttattgcctgttgagatgcaattcttttccttttctccttaaatttaatccacctaagccagccagctcccctctgccatgagtggatagatgccttcccaccagtgatattgatgctgacttgaatgtggtcctggatctcttgctgcgggggccatgagattgtagcagagccgaaatggttacccctcccattcttttgtgttgtcctgagacagagggtgagcaagtattttctaggtgcgaaatgctttttttttttttttttttttttgtccttcccgatagaatcagtagccatcattggcaggtgagggcaacaatactttcagtggcttcatttcctgtcttgttgacagagaccctcgggtaccactgtgctgctaatcgggtgagggtctgttcccagatgaccttgcctttgatcagagcccagtccacgcacccagcatctggcgcctctgggctctgaactgctttctcttgtcaagcatgctggcattctagagagaattctagacctttcgccgatgtggaagtggttaagattttatttatacgtctttgttgattggagaagggagttttaaattcttagctcctgagacacagacgagttgaccatggaatggctatgtgaccagaatgtggctttgacacctcatgctgctgtgcctttgtcaatggcttctgatttgaccagttgtaattgataatgtgaatttttgttgatcctccagttgcaggaagagagtgtgtatcccccatggttaggtagacatgaacttgtccctgcttttgaagatcgcccagtaagacaggaaaaagcatggcggtccgtgcttcacaaagttctattttttaaaagtgcaagagaaagaaggtattctctgtgtaacttgatcatctgtctagtacttgtctaatagggtaaccaatgctgagagcttgtagtgatgactaccaaagacatgcgtagtaaaacttctgtttccaaattattaaagagccagccattgacgctgctccttggttccttctcgggagccattgtgagagactaaacgattcttaggggctttttgttaagttttagtttctcttttgttaagttttagtttctctcttttttttaaatttttgtataaaaatgtgttagcctaccgttttggggatcatttcccaggatgctcagcagttgtgattactggccacacccaggtcgcctgcctctccttgagtgatcaatgggatcctctgtgtgtgctagcatgggtgctgtgtgtgtgcacgtatgcgtgtgtgcattcatgccttaacttgggttaccgctcaactttgctgtttgactcggtcctcgccatcatcagattgtattgtgcatcttgatctgaacttcatcctggcaaaaaaaaa

SEQ ID NO: 1754 - DNA, 2157 bp, Cricetulus griseus
cgctgcctcatcctacctgtgcggcctgccatggatgctgagcttcttgcttgccacagtgccgagtacgtggatcgtgttcgggccacagaaaagatgaaaacccgggagctacaccgtgaaggtgccaactttgactccatctacatctgccccagcacctttgcctgtgcgcagcttgccacaggggctgcctgctgcctcgtggaagctgtgctttcaggacaggtgttgaatggcattgcaatagtgcgtcctccaggacaccacgcagaaccagatgctgcttgtggtttctgctttttcaactctgtagctgtggctgctcgacatgctcaagccattgctgggcgtgccctgcggatcctgatcgtggactgggatgttcatcatggtaatggaactcagcacatgtttgaagatgaccccagtgtattatatgtgtccgtgcaccggtatgaccatggcactttcttccccatgggggatgagggtgccagtagccaagtaggccgagctgccggtataggcttcacctgtccaatgtgccctggaatgggccccgcatgggtgatgctgactacctgactgcctggcatcgtctggtacttcccatcgcctatgagtttaacccggaactggtactggtttcagctggttttgatgctgcacaaggggacccactggggggctgccaagtgacacctgagggttatgcccaccttactcacctgctgatgggccttgccaatggccgcattatccttatcctagagggtggctacaacttggcatctatctctgaatctatggctgcctgtacccattccctccttggagacccaccaccccagcttaccttgctgcgacctccacagccaggagccctggcctcaattactgagaccatccaagtccatcgcagatactggcgcagtttgcggatgatgaagatggaagacaaggaagaatgctccagttctaaccaaagaagcagtatctgcaaaagaatctactctgggcaatgctaaatcagagacagctaaggcggtgcttgctcaggaccagtactcagaacaagctgctagggaagctacactggaccagaaaacctcaaatgagcctgtgggaggaagtactacggaccagcatgcctcagcatcagccacaaaaaatgtacctaaccagaccacctcagaggaggctgtgggagaaactgagccaatccaaattcctgtagcctcatgcgcagacaagcaaaccacagaagcttcccctatacagggagccacagcccagcaggcccctgaccagctgactggaagactcagcactttgacactacgaactggacctcaggaggcccctgaatctgaggagggcctactagcagaagcagctggaggtcaggacatgaatagcttgatgctgacgcaaggatttgggaactttaatgcccaggatgtattttatgctgtgaccccactatcctggtgtccccatttggtggcagtatgccccattcctgcaacaggcctggatacatctcaaccatgtgagacctgtggaacgctgcaggagaactgggtgtgtctgacttgctatcaggtgtactgcagtcgttatgtcaacgcccatatggtccaccaccatgaagcctcagaacatccactagtcctcagctgtgttgacctgtctacctggtgttatctctgtcaggcttatgtccaccaccaggatctccaagatgtgaagagtgctgcccaccggaacaagtttggggaggacatgccccactcacactaagtctcagaacatactgctgcctgtttaccttctgaggccccagacagagcagcttagttcactgcagcctgtaccttggatgagggtggcctcacttaaacctatcctgaatatcctttgcaaggtgcttctttaagtgcaaacccttttaaacggactataatgttcagttgtagatctgcccctgctcactgcctgctcgaggaacaccattgttctaccccagaaaggaagagggacaacttagtagccctaagaaggacccgaaatcacaaggatgacattgaagggcacaaatggcagttataacaggcttgcatatttaataaagtttaagttgttaaaaaacct

SEQ ID NO: 1755 - DNA, 2157 bp, Cricetulus griseus
gttcctgtacaatgagcacacggtcagagagagccctaacatcactgaccggtggattctgtccttcatgcagtccctcattgggttctttgagacagaaatggcagcttacagactatatactgtggtgcctcgcctggtcaaatttgtggatattctgaccaattggtatgtccgaatgaacaggagaagattaaagggtgagagtggcacggaagactgcgttatggctctggagacattgttcagtgtcctgctttctctgtgcagactgatggctccttacacaccatttcttactgaattgatgtaccagaatctaaagacgctcattgatcctgcttctgtccgggacaaggacacactcagcatccactacctcatgttgccacgtgttcgagaagagctgattgacaagaaaacagaggatgcagtatctagaatgcagtctgtgattgaacttgggcgagtgatacgagaccggaaaactgtcccaataaagtatcctctgaaggaaattgtggttatccaccaagacccagaagctctggaggatatcaagtccttggagaagtatatcattgaggaattaaatgttcgaaaagttacactgtctactgataaaaacaagtatggtattcgactaagggctgaaccagatcacatggtccttgggaagcgtctgaagggagccttcaaagccgtgatgatggccataaagcagctgagcagtgaggagctagagcagttccagaaaagtgggagtattgttgtggaaggccatgaattgcacgaagaagatattcgcctcatgtactcctttgaccaggccacaggagggactgcacagtttgaggcgcactctgatgctcaggctttagttctcttagacgtcacacctgaccagtcaatggtggatgaaggcatggctcgggaagtcatcaatcgtatccagaaacttcgaaagaagtgcaatctggttccaacggatgaaataacagtttattataatgcaaaatctgaaggaagatacttgaataatgtcattgaaagccacaccgacttcatatttgccactgtcaaagctcccttgaaagcatacccagttcctacatcagataatatccttattcaggagcaaacacagttaaaggggtcggaactggaactcacactcaccaggggatcctgtgtgcctggtcctgcttgtgcttatgtgaaccttaacatctgtgcaaacggcattgagcaaggtggagtgttgcttttggaaaatccaaaaggtgataataagttgaaccttgtaaagctaaagagtgttgttaccagcatatttggtgttaaaaatgcagagctgtcagtcttccacggtgagacagaaatacagagccagactgacttgctgagtctgagtgggaggaccctgtgtgtgactgcaggagctgccccctctgctgtcaacagccccagcgcccttctgtgtcagtatatcaacctgcagctcctgaatgcagggccacaagagtgtctaacagggactgtgggtaccctcctgcttgaaaacccacttggacagaatggactcagccaccaagggcttgtgtatgaagcagccaaggtatttggacttcggagcaggaggctcaagctgttcctgaataagactcaaacagaggaaattacagaagatatcccaatgaagactttgaatatgaagactgtgtatgtttctgtcctgccaacaactgcagatggctaatagttatccacacacacacacacacacacacacgggctcagtgaaggtatttactttgggctctgtctaatatgctgcttagaacccatagttcagatgggattgactgacctaagacctcacataattttcacatttaaccttaaacacctatgcagtcgtgttgggggagggtcctaatgttacctcagcaccacaaagcttatttctatacttgagttctttagtacaaaagtaggagtgatttaaatggcacagtacatatatatggccttgtaaaactgatttgagaccttgtgaagaaatggacatgttatatatttctgctgcctggattttcctgggtaattttgatgagatattttatgtttgattaaatcaaagtagtaaaacactct

SEQ ID NO: 1756 - DNA, 2157 bp, Cricetulus griseus
cccggagcgagcttttacacgggtagccagtgccgcaggaggcgcgaggggacaaaagacgttcagatggcagaaaacaagtctttcagatggaagccctgcagattctgtggaagctgctaaaaatgccagtaatacagaaaaagctcacagaccaggtgatgcagaacccacaagtgctggcagctttgcaggaacgtcttgacaacgtctctcacactccttctagctacatagaaactttacccaaagctgtcaaaaggagaattaatgctctgaagcagctgcaggtgaggtgtgcgcatatagaagccaagttctacgaggaagttcacgacctggagaggaagtatgcagccttgtaccagcctctgtttgacaagagaagagaattcatcactggtgatgtggagcccacagatgcggagtcagcgtggcacagtgagaatgaggaagaagacaagttggctggagatatgaagaataaagtagttatagctgagaaagaagcagcaacagcagaagagctgaaccccaaaggcatccctgagttctggttcaccatcttcagaaacgtagatatgcttagcgagctggtgcaggaatatgatgaaccgatcttgaaacatctgcaagatattaaagtgaagttttcagaccctggacagcctatgtcttttgtgctagagtttcactttgaacccaacgactacttcaccaatcctgtcctgacgaaaacatacaagatgaaatcagaaccagacaaggctgacccgttttcttttgaaggtcctgaaattgtggactgtgatgggtgtacaattgactggaagaagggaaaaaatgtcacagtcaaaaccatcaagaaaaagcagaagcacaagggtcggggcaccgtgcgaaccatcaccaagcaagtgcccaatgagtccttcttcaacttcttcagccccctgaaagcctctggagatggagaatctttggatgaagattccgagttcaccttagcctctgactttgaaattgggcactttttccgtgagcgaatcgtgccacgggctgtcctctacttcactggggaggccatagaggatgatgacaattttgaagaaggagaggagggagaagaggaggaattggaaggtgacgaggaggcagaagatgaggatgatgctgatgttaaccccaaggtgtaattttgtgttaatcattcatgcatttctagaaagaacccagccagccagcggagtgcaagcagcagtgagaagcagcgaccctgaggggctgccttgtggacggctgtcaggaccccaggctgcaggcaggggcctcagtccctgccaaagcagaattttgacagtgctgtgacatctaaccatttccaagtgcatgattcctctcccccttcccttcttactttgcttaacttgtacagtggaggctgggctgcagttcaggatagaagatttagttgtagcacctgctgccttggtgcctgaaaaccacgtagggggcgctggggttgtgtctggcattggcagagcctggtgattttgtgcacacagccctcccctactgaagaggccccatggtttccagctactgatcttcatgggaagttgctccagctgctgtaccctagtcatctcccaagcactgtagaggaggctatgctcgccttagagcatttttttccttgagtttttggtttcagggctgggtgggttgtggcacacacctctgaggccagagctgtctggttcacccttgtgcttatttattcacttgtgcttgggggctgttctgtgccatgcagaccacttgttatcgttgcctctggagggtgtcaggctgtagccagggggccaaagtcctccctcatgtaggggattgctggcctgtagaacagagcttcagcttgcactgtgcacaccagggtcacacctgggtttggtgaccagttggttggtgtgtgtggagtttgcgtagtgtgtgagtgtgtggttgtggtctttggcaactgggacagccatgtccacagtgaccagccgtgtagagcgtgctcagccttacccgataacacatttgtaactgaatacggtgttttcaatttgtacagaatagttagaatattctattaaagttgtgaaacacaaa

SEQ ID NO: 1757 - DNA, 2157 bp, Cricetulus griseus
atgacttcaacaagtaaggcgattgaattacaactacaagtgaagcagaatgcagaggaattgcaggacttcatgagggacttagagcactgggaaaatgacattaaacaaaaggacatggaactaagaagacaaagtggtgttcctgaagagaatttacctcctattcgaaatgggaattttaggaaaaagaagaaaggcaaagctaaagattcttccaagaaaaccaaagaggaaaacacaaaaacagaataaagtcttacgattatgatgcttgggcaaaacttgatgtggacagtatccttgatgaacttgacaaagaagataacacccacgattctgtgtcccaggaatcggagtcagaagatgacggtgttcgagtggattcccagaaggctcttgttctaaaagaaaagggcaataaatacttcaaacaaggaaaatatgatgaagcaattgaatgctacacaaaaggcatggatgctgacccgtataatcctgtgttaccaacaaacagagcatcagcttactttagattgaaaaaatttgctgttgctgagtctgactgtaatttggcaattgccttgagcaggagttacaccaaggcttacatcaggcgaggtgctgctcggtttgctctgtggaaattagaggaggccaaaaagattatgaaaaagtattagaactggaaccagataactttgaagcaacgaatgaactcaggaaaattgatcaggctttaaaatccaaagaaaactctcgacccaaagaagctgctacagtgattaaaccaactgaaggggacaagaagcaaattgaggaacagcagaacaagcagaaggccatttcagagaaagatctggggaatgggtttttcaaggagggaaaatatgagcgagcaattgaatgctacactcgagggatagctgccgatagtaccaatgccctccttcccgctaacagagccatggcctacctgaagattcagaaatatgaagaagctgaaagagactgcacacaagccatcttactagacggctcctatgcaaaggcttttgccaggagaggaactgcaagaacatttttgggaaagatcagtgaggccaagcaagattttgaaactgtattactcctggaacctggaaatacgcaggcagtcaccgagctttccaaaattaaaaaggaattaattgagaagggacattgggaagatgtctttcttgactccacacaaagacacaatgtgataaaacctgtagataatccgcctcatcgtgggtcacctaaagcactcaagaagatttttattgaagaaactggcaagttgatagagactgttgatgctccagatagcactgccgctgctccccagagtaatcaagcaacagcagctgtggtcaccgaaaacaagaagaattcaagccagggggacacctttcccgcaggtgatactccaagagccaaagtgttgaaaatagaagaaatcagtgacactttggccctacaaccacaggttgatttgaagcaggaagtgggccagtctttcagtgagaagatccctgtgaaggtggagcagataccggttcagtttgccactgctgttctgcctccagttcctgccaactccttccagctggagtctgacttccgacatctgagaagttccccagatatgttgtatcagtatttaaagaaaatcgaaccatctttatatccaaagttgtttcagaagaacctagatccagatgtattcaatcaaatcattaaaattttgcatgacttttacattgagaaagaaaagccagctctcatcttcgaaatcctacagaggctttctgaactgagaaggtttgacatggcagtgatgttcatgtcaggacccgagagaaagatcacaaatgtattattcagtcacttagaaaaatcagaattgaagtcagattctattgaagaactcaagaaaagatatggtggctgaccatgatccatgaggttgttttgtcttctacgtgtacattatttttctcatagaaatcaagtgtttgtttgtctttttaagaaatgaaatcatacctgagagaactctcatctcaatggtgttaattcatgtaaagtgtactgtgacctagctagtgagaaatgacttcaaattaaact

SEQ ID NO: 1758 - DNA, 2157 bp, Cricetulus griseus
cttgcgtcggctccgcagccgggcccgctccctgccacgcgcgcccctggggccccggctccggcgccggcaagggtcgcgtcctgctcgccttccccaccgccggccagccgccgccatgggtgcctacctctcccagcccaacacggtcaagtgctccggggatggggttggcgctccgcgcctcccgctgccctacggcttctccgccatgcaaggctggcgcgtctccatggaggatgctcataactgtattcctgagctggacaatgagacagccatgttttctgtctacgatggacatggaggggaggaagttgccttgtactgtgccaaatatcttcctgatattatcaaagatcagaaggcctacaaggaaggcaagctacagaaggctttagaagatgccttcttggctattgatgccaaattgaccacagaggaagtcattaaggaactggcacagattgcagggagacccactgaagatgaggatgataaagaaaaggtagcagatgaagatgatgtggacaatgaggaggctgcattgctgcatgaagaggctaccatgactattgaagagttgctgacacgatatgggcagaactgtcagaagggccctccccacaccaaatctggaactgggacaggcgatgaaccagggcctcagggcctcaatggggaggctggacctgaggacccatctagggaaactccttcccaggaaaatggccccacagccaaaggccacacagacctttcctccagcttggaacatgggactgaagcaggccaaattggtgagctgggcactgctactggtgaggctgggccttcctgctcttcagcctctgacaagctgcctcgagttgctaagtccaagttctttgaggacagtgaggatgaatcagatgaggcggaggaggaagaggatgacagtgaggaatgcagtgaggaagaggatggttacagcagtgaggaggcagagaatgaggaagatgaggatgacactgaggaagctgaagaggaggaggaagaagagatgatggtacctggaatggaaggcaaagaagagcctggctctgacagtggcacaacggcggtggtggctctgatacgggggaagcagctgattgtggccaatgctggagactctcgttgtgtggtgtcagaagctggcaaagctttagatatgtcttatgaccacaaaccagaggatgaagtggagctagcacgcatcaagaatgctggcggcaaggtcaccatggatggaagagtcaatggaggcctcaacctctccagggccattggagaccacttctacaagaggaacaaaaacttgccacctgaggaacagatgatttctgcccttccggacatcaaggtgctgactctcactgatgatcacgaattcatggtcattgcttgcgatggcatctggaatgtgatgagcagccaggaggttgtagactttattcaatccaagatcagccaacgtgatgaaaatggggagcttcggttattgtcatccatcgtggaagagctgctggatcagtgcctggctccagacacttcaggggatggtacaggatgtgacaacatgacatgcatcatcatttgcttcaagccccggaacacagtcgagctccagccagagagtggcaagaggaaacttgaggaggcactctccgtggagggggcagaagagaatggcaacagtgacaagaagaaggccaagcgggactagcagttgtcctgaccctgcccacctggactgttttctgagcccttggacccgagactgagttttgtctttttcttttagccttagcagtgggtatttggtgtgcagggggagctgggtggctttcctcagcccattccaaagagggctctccctccacgcggcagcctgggagccttgctggcctctccagcctcctcctccgggggctcatcgacggtcggtcggttctgtgcctgtgcgctgttgtgttggagggaaggactagtggttctgatttttactctgtgaacactttatttaaggacattcttttttattggcggctctgtgacccctagccgcttgcacccgctctctgttgtacactttcgagcaacactttttcagactaaaggccaaacaaaacctaa

SEQ ID NO: 1759 - DNA, 2157 bp, Cricetulus griseus
cggaagtgggtcgggggcttggcctctgcccggccgcggagccggagcaggcggtggtggccgctggggtccccggccaggcgagcctgtctggtggcggagcccgtacgcggcccgggtagcgggccaaggatgctgaacgtcccttcccaggctttcccggcccccggctcccagcagcgcgtcgcctcccaggggcgcagcaaggtacctttaaaacaaggcagaagtcttatggattggattcgactgaccagaagtggaaaggacttaactggactgaaaggcaggttaattgatgtaactgaagaagagcttaagacacacaataagaaagatgactgttggatatgtataagaggacttgtttacaatgtcagcccatatatggagtaccatcctggcggggaggatgaactgatgagagcagcaggagcagatggaacggatctgtttaatgaggttcatcgctgggtcaattatgaatccatgctgaaagaatgcctggttggcaggatggctgtgaagcctgctgctctgaaagactgtcatgaagggaagagagtcttaaaatggcgtcccaagagccaagtgacagatacactgcccagggagtgacagatacactgcccagggaaggccctagttctccaagctatgactggttccaaacagagtcctcagtcaccattgttatatacaccaaacaaaagaatatcaacttagactcggtaatagttgacctccaggatgactccttgagagcagaagtggttatcaaggatcagtcttaccttatacatattgagctaagccatgaagttcaagaaaatatttctgtacgggtcattgagaatgttggaaaagtagatattgttctacaaaagagagaaaacattccttggaaatgtcttggtcagcccttggagaagcatgattcctttattccaaagaaagatacaggcttgtactacagaaagtgccagttaatttccaaggaatatgttactcatgacacgaggcttttctgtctgatgctgcctccaagcactcaccttcaggtgccagttgggcaccatgtttacctcatgctcagtgtcacaggtgcagaaatagtaaagccatatacacccgtgtctgaatccttactctcagactttaaagaaccagttcttcccccaaataaatacatctactttttgatcaaaatctatcctgatggactcttcacaccagagcttgatcgtcttcagattggagattttgtttctgtaagcagtcccgagggcaattttaaactatctaaactccaggaagtagaagatctctttttattggcagctgggacaggcttcacacccatggttaatattctaaaatactctttgacttccgtgtccagtctcaggaaggtgaaattgatgttcttcaataaaacagaggatgatataatttggagatgccaactagagaaactagcctttaaagataaaagatttgatattgaatttgttctctcaacaccttcttcagaatggaatggcaaacggggacatgtgtcaccagctcttctctctgaatttttggaaagaagtttagaaaactccagagtcttcctttgcatctgcggaccaacaccatttacagatgaggggataaggttgctgcatgatcttaacttttccactgatgagatccatgggtttacagcataacgaaaagctgccattgtcttttattcaactgggttatatttgtgattgcttaggattttttaaaagaattttgtatgtacgaaaggcttccacttctggaatgaagtcacatgtcttcagtacaggtaccttggtttaattttgtactgtgacttactttactactgatgcctaacctgggaggtcaatcatggcagcagatgcatacaagaacctttgttatgaactgcaagttttccttaccactgaaatgtatcactgttctgcaataaacacttgtattttatgacattataaagtaagcaatcattttgatcactttctatgctgcaagatgtcttctgagcaatacagattaaattttacactgcactgtttactcaggaattgatggtgtatgtcatcattaatcttaaaacatggaatgctgtaactattggtg

SEQ ID NO: 1760 - DNA, 2156 bp, Cricetulus griseus
caggggccggcaccaggggattatagaagcaggtgtcatgatgttgtccgcggtgttgaggagaaccgcgccggcgccgcggctcttcgtagggttactcaagtctccctcgctccaaagcccgggaagtgcttatggccggagcgtaaccattggagaccgcggagagccgcagcggctgagagctgccgcctgggtgcgccctggagtatcttctatcttattccctggacggggggcagccaccggggggcgccatggagaaagcacggagagttcatgcctggctgccgccttctggggacacggccctagccccgaagaaacactccagggacaggacagctggaatggggtccccaacaaggcgggactgggcatgtgggccttggccacggcgctggtggttcattgctacaacaagagtccttccaacaaggatgcagctctgatggaagctgcccgtgccaacaatgagcaggaagtcagaaggctgttgtcagaaggtgcagatgtcaacgcaagacataaacttggctggacagcattgatggtggcagccatcagccgaaatgacagtgtggtacaggtcctgcttgctgctggagctgacccaaaccttggggatgacttcagcagtgtctacaagactgctaaggaacagggaatccattctctggaagtcctagtcactcgagaggatgacttcaacaaccggctaaacaaccgtgctagtttcaaaggctgcacagccctgcactatgctgtcctggctgatgactaccgcatcgtcaaggagctgctggatggaggagccaacccccttcagaggaatgagatgggacacacaccgttggattatgcccgggaaggggaagttatgaagcttctgaaaacttccgagaccaagtacatggagaagcagaggaagcgtgaggcagaagagaggcgccgcttcccgctagagcagcgactgaaggaacacatcattggccaggagagtgccattgccaccgtgggtgctgcgatccggaggaaggagaatggctggtacgacgaggagcaccctctggtcttcctcttcttaggatcatctggaatagggaaaactgagctggccaagcagactgccaagtatatgcacaaagatgccaaaaagggcttcattcggctcgacatgtctgagttccaggagcgacatgaggtagccaagtttattgggtctccaccaggctacatcggccatgaagagggaggccagctgaccaagaagctaaaacagtgccccaatgcagtagtcctctttgatgaagtggacaaggcccatccagatgtgctcaccatcatgctgcagctgtttgatgagggccgcctgacagatggcaaggggaagaccattgactgcaaggatgccatcttcatcatgacttccaatgtagccagcgatgagattgcccagcatgcactgcagctgaggcaggaagctttggagatgagccgaaatcgaattgctgaaaaccttggggacgtccagattagtgacaagatcaccatctcaaagaactttaaggagaatgtgatccgccccatcctgaaagctcacttccggagagatgagtttctgggacgaatcaatgagatcgtctacttcctccctttttgccactcagagctcatccagctggtcaacaaggaactgaacttctgggccaagagagccaagcagagacacaacatcacactgctgtgggaccgagaggtggcagatgtgttggttgatggctacaatgtccactatggcgcccgctccatcaagcatgaggtagagcgccgtgtggtaaaccagctggcagcagcctatgagcaggacctattaccaggaggctgcactctgcgaatcactgtggaggactcagacaagcaactcctcaagagccccgagctgccctcacctgaggctgagaagcgtccacccacactgcgtctggagatcattgataaggacagcaagacccgaaaactggacatccgggcaccactcctccccgagaaggtgtgctacaccatctagcatccacctgcctgtatgtaccctgaacatctaataaaggccccttgctgtggcatggcaacaaataatgaaggaaaaaaaaagt

SEQ ID NO: 1761 - DNA, 2156 bp, Cricetulus griseus
ggagacagcagcggatgaataaaaaatcgtgagtctgcttgtcagtcacgcaagaagaagaaggagtatatgctgggactggaggccaggttgaaggctgcgctctcagagaacgagcaactgaagaaggagaacgggtccctgaagcgacagctggacgaggtggtgtcagagaaccagaggcttaaagtcccgagtccaaagcgaagagctgtctgtgtgatgattgtgttggcatttataatgctgaactatgggcccatgagcatgctggaacaggattccaggagagtgaagcccagtgtgaaccctgcaaatcaaaggaggcatcttttagaattttccgctaaagaagttgaagacacatcagatgatatcaaccagaaaaacagctacagatatgatcattctgtttcaaatgacaaagccttaatggtgctaactgaagaaccactactttatattcctccacctccatgtcagcccctgattaatacaacagaatctctcaggttgaaccatgaacttcgaggctgggttcatagacatgaagtggaaaggaccaaatcaagaagaatgataaataaccaacagaaaacacgcattcttcagggtgctctggagcagggctcaaattctcagctgatggctgtccagtacacagagactactagcatcaggaattctgggaatgagctgcaagtgtattatgcttcaccaggaagttaccaagggttcttcgaagccatccgcaggcggggagacacgttttacgttgtatcatttcgaagggatcacctgctgttgccagctactacccataacaagaccacaagaccaaaaatgtcaattgtcttaccagcaataaacataaatgataacgtcatcaacgggcaggactatgaagtaatgatgcagattgattgtcaggtgatggacaccaggatcctccacatcaaaagctcctctgtccctccttatctccgagatcatcagaggaaccaaaccaacaccttctttggttcccctccaacagccacagagacaactcatgttgtcagcaccattcctgagtccttacagtagtgcccgagcctggccaaacctgaaagagctggtgagcagtgctgctctctgcctccttggcaagtggagaactgcctcgtactggactcagggaaagagaaagtaaagcctagaaggaagataatgaaatgaagacattgtcattcccgccctaatagcacttgaagggagacattcctccccagtccccactacaggaattatgggtgatttttaagtaaccactgcactacctaggaagatatcaccagagtccaaaaggaactatgcacatagaagaaatacagttttctcctgcctaagaaaattctattagtactctattagcttatatttttaatagctaagcttaaaacataagtttattttggatattgctagaactttcagcagttattatatgtcaggtattcatagaatctatgaaaaaaaagaatgacaagcctgtgtgattaggaaatttcctgagtcatgtcatggctagctcgtgtcacagaatgaccctgtgttccgctaactgtaagcattgcacatttagtgcataaaaagacctgcttatgtcggggttcaagaactaaagagtaaaagtcatttgttaaggtcaacaaataccacacgggtgcactttctgtctcagtcgacttggtggctgtaggtaaataaaccaggaagtgtggcatattccccagtatgctaatcccagactggaaggagcagattgacttcaggatgggttagtagctcagatggaagaggacttgcttagaatgcctgatgccaggacttccttcaccagtaccacatagtccaggcatggtggagtatgccttgaatcctagcacttgggaggtggaggtaggaggatcaggagttcagggtcaacctgggctacatgagacctgtcttaccatgtgtttaagaaatgcagtaaagatgtattattctctcctttaatgattatgtctgtttataagaataatggcaacagactatttcgtaccctcaactaagtctttataatgtgatacctgttctttctctaaaatccaaataaagagttttaaaacttt

SEQ ID NO: 1762 - DNA, 2156 bp, Cricetulus griseus
tgaagttttgggagtggagcagggggtcaccatgctgaaggacgctgtgcattatggcggctgggagaaccgggacatccataacatctatggcttatatgtgcacatggcgactgctgatgggctaatacagcgctctggcggcatagaacgtccctttgtcctgagtagggctttcttcgcaggttcccagcgctttggagctttgtggacaggggacaacactgctgaatgggatcatttgaagatttctatccctatgtgtctcagcatggcgctagtgggactttccttctgtggtgcggatgtgggtggctttttcaagaacccagaaccagagctgcttgtgcgctggtaccaaatgggtgcctaccagccattctttcgagctcatgcccacttggacactgggcggcgagagccatggctgttagcatctcagtatcaagatgcaatccgagatgccttgttccagcgatactccttgctccccttctggtataccctcttctatcaagctcaccaggaagggattcctgtcatgagacccctctgggtacactaccctcaggatgtgactgccttcagtacagaggatcagttcctgcttggggatgcactcctgattcaccctgtatcagatgctggggcccatggtgtacaagtctatctgcctggccaaggagaggtttggtatgacattcaaagctatcagaagcatcacagtccccagaccctgtacctgccggtaactttgaacagtatccctgtgttccaacgtggtgggacaattgtgcctcgctggatgcgcatgcggcgttcttcagactgtatgaaagatgatcctctcactctctttgttgctctcagtccccagggtacagcccaaggagagctctttctagatgatggacactcatttaactatcagactcgacatgagttcctgcttcgtcagttctcattctctggcaacacacttgtctctagttcagcagaccccaaaggccaccttgagacgcctgtctggattgagcgagtggtcataatgggtgctggaaaaccagcagctgtggtgctccagaccaaaggatcccctgaaagtcgcctgtctttccaacatgatcctgagacctctgtgctgatagtgcgcaaacctggcatcaatgtggcatctgactggagtattcatcttcaataacccaaggaacttgttctgagttgggaggagggtgtggtggtcttgagttaccttttcttttgccttggagtttgaccctacttaagagttcacctttctgatcccaagactcagattctgctaacatctgggcaggataacagggctgtcctagggctctgaattcctcttgtgacctagtctttccttctgtgtgtttccaagctcttcccctcattcccagtaccctgttgctgtaactggagcacactcatttgtgaagacccgaggggccttgtctttctcttttccttcctctgggtccctggcttcctcacaccctgtgtattcatgcctcttatgctgatgccagatcttggaagaagataggggcagtgacctttagggttccttttttcttccttgttctcttgttttccagctgcatacctttttcattccttctgccctcctacacctcacctttctccgtttcactgatacactgggatcatcccttaacctgttgagggacaaatggatcaagattcaggttgctggagaaaatcctctttcttctcatctcaaccttttcttccctgtttctttccagagctgctgcatttctcccgtcccttgagggagaagcttccacacagttatgaggggtggtcattaaatttcttttgccccctctggtccccttgggacactcaagatagagaaatgagttgtggtttcagtgaatcacggtcacctgtatttattgctgggaagaaggctgagggtgagggggagatgatcatgtgcgtccagggatggcctcaagccctgggggtggagggaggactcaggaaccaggagaaatatttgtgggaatttttttttacttcctctgggttcccaactgtgacaggttttgataaaaggagaaacaataaaaagagaaacaataaataaaaaaaaaaaaaaaaaa

SEQ ID NO: 1763 - DNA, 2155 bp, Cricetulus griseus
cctcaggggagggcacccagccttcccgcacagaaaaccgggatccactgcccaatccttgggcaccaacgccagctacccagggctctccgaccaacaccacgaccacaagcagtggcactatgcctggcggtagctcctctagtagcaccttcgggaacaccatggcggcagctaattatgttgctagcatctttagtacaccaggaatgcagaacctgctgcaacagataactgaaaatccccagctgattcagaatatgctgtctgcaccctacatgagaagcatgatgcagtcgctgagccagaatccagatttggctgcccagatgatgatgagtagcccactgtttgcttcaaatcctcagctgcaagagcagatgcgtccacagctcccgaatttcctgcagcagatgcagaatccagacacgcttgcggccatgtcaaatccgagagcgatgcaagcgttaatgcagatccagcaggggctacagacactagccactgaagcacctggcctcattccaagcttcgctccaggtgtgggggtgggagtcctgggaaccaccataacccctgtgggcccagtcactcccatagggcccatgggtcctatagttcctttcacccccataggccctattgggcctataggacccactggccctgcaagctctcctggatccaccggcactggggtcccccctgcaaccactgtgagcagctgtgcagctactgataccatcagtccgacaatggaaactttacccagcccgcagttcattcatcagatggtgcaggctctggcaggaggagaaatgagatttcagcagcaactggaacagctcaacgccatggggttcataaatcgtgaagcaaacttgcaggccctaatagcaacaggaggcgacatcaatgcggccattgagaggctgctgggctctcagccatcgtaattacatttctgtaccttgaaaaaatgtatcttatttttgataatggctcttaaatctttaaacacacaaaattgtgctttacttttattttgattcttttaaatctgtctacttataaatctaaaaggatgcattttaaggtggagtccctccctctttctctcccttcctgctcctcctcctccccccaccctctcccctcccttccagcctgccctctcccctctttgtttccttctttccttccttttcttctttggatttccttccttctctgatttgaatggtggggatcaatgctgtttcactcaaaggtgttgcatgcaaacacttctctttattctgcatttattgtgatttttggaaacaggtatcagccttcacagttgggtgaacaagttctgtcctacagatgtccagtttatttgcattttaaacattagcctatgatagtaatttaatgtagaatggagatattaaaaaagaagcaaattatttgaagctctctaatttgtggtaaaatattgcttattgtgactttggcatgtatttttgctagcaaatgctgtaagatttataccattcattggttgtttttgctattatttgtacacagtacagtaagcacaattggagttgtacatctagaagtattactgtagaatctctgagcagaatatgtgtaaccaaaatgagaaagaatataagaaatattcctgaagctaggtatgtctcacgattttgtagaatcttacagcatatttgataaatttctcagtgaaattgttggctaggcaagttcagttaaaatatagtagaaatgtttatcctggtttctctaagtatacattaattgtacagaaaacttacagtgtcacattgtgtcaacagttgcagattgattgtatatgaccttaatctttgtgcagcctgaaggatcagtgtagtaatgccaggaaagtgctttttacctaagatttcctcagcttctcccatgaagagaccctaatatgcattttgatttgtaattggaaatgtaacttactggaagtgtcatgtgatgtttgcattacttttaactgctatgtataaagaaagtgtatcttttggctctatcagttatttctcttgtgcacagggaaaaatgcattaaaaatgaactaaaaaaataaaaaaaaaataaaaaaaaaaaaaaaaaa

SEQ ID NO: 1764 - DNA, 2155 bp, Cricetulus griseus
ccaagatggcgctcgttaatagaaacccgggttcccgcaggggccgccgccgggcccgggagcccggcaccgcgtaccgagtagcgctgctctggccgcggggctgcgcctcgggccctcgcagtccccccgagctcagggaacacccgcgtccttcctccccggcgcgtccatgaactccgtgtcgcctgccgcggcgcagtaccgcagcgggagcccggaggacgcgcgccggcccgagggtcgccgaccgaggggacagacccgggtcccggatcccaacagcctgggaccttcggggtcaggcggggcggcgctaggctctactggaatcgacccctccgagcctgacgaggtggacaagttcaaagccaagttcctgacagcctggaataacgtcaagtatggttgggcagttaaaagccggaccagcttcagcaagatctccagtgttcacctttgtggacgacgctaccattttgagggagagggtgacatccagcggtttcaaagagactttgtatctcgactgtggctcacatatcgccgggacttcccacccctggctggaggcagcctgacctcagactgtggctggggatgtatgttacgaagtggtcagatgatgctggcccagggcctgctcctgcattttctgcctagagactggaggtgggtggagggcacaggactggctccccctgagatgccagggccagcctctcccagccgttatcgggggcctggtcgtcatgtgcccccacgatggacccagggtacactggagatggagcaggaccgatggcaccggcggattgtgtcctggtttgctgaccatccccaggccccctttgggctacatcggctagtggagcttgggcagagctctggcaagaaggcaggagactggtacgggccctctgtggtggcacacatcctcaggaaagctgtggagaagtgctcggaggtcccccgcctggtggtgtacgtctctcaggactgcacagtgtacaaggcagacgtggcacgtctggtgtcctggccagatcccacagcagagtggaaatctgtggtcatcctggtgcctgtgcgactgggtggtgagaccctaaaccctgtgtatgtgccctgtgtgaaggagctccttcggtcagaactctgcctgggtatcatggggggcaagccccggcactcactgtacttcattggctaccaggatgatttcctgctctacttggatccccactactgccagcccacagtggatgtcagccaggctgactttccccttgagtcctttcactgcacctcgccccgcaagatggcctttgccaagatggaccccagctgtactatagggttctacgctgggaacaggaaggagtttgagactctctgctcggagctgatgaggatcctcagctcctcctcagtcacggagcgataccccatgttcactgtggctgagggccacgctcaggaccacagcctggacgccctctgcacccagctctcccagcctgcactgcggctgccttgctcaggacgcctcctgaagtcaaaacggcccagctctgaggactttgtgtttttatagtgggaagggatggggaaagatgccagactatttatttttttatttatgtcgtgtcaggtatgggatctggaactccaatggcagtgctggatccctgtcctcatgtcccccatcctccccaatacagccagacctggctaggcccccagctcagcttggttgtggaggtagcctggctccctgtggccctcaagggttgctctgctgtttcctcctttggcgacccaactggcggaagtgcagccttttggggttgagaccaaatgcctgcaatctctgtcggctgaacttgtgacctccaagtgtcaccgtgggacccagcagcctggccttcttgctcttctgcctctgggaagttggcttctctgggtaggatgtgtgtgccaactcttcttccttggccacatgggtctcagactgaggcctcttcccacaggctccatttggcacaggaagctgtgcctgtgggctggccttgccctgtgacttccctgtggcttctgtgggcatttccatcctacaggagaaaaagtcaaagttcaggtcagcttgctgttc

SEQ ID NO: 1765 - DNA, 2155 bp, Cricetulus griseus
gctaactcttcgcagctcttcccttcacacacgctcacccgcgactcgagatggcggcggcggcagcggcggcggcggcggcgggggactcggactcctgggacgcggacacgttctctatggaggacccgatgcggaaggtcgcgggcggcggcacggccggcggggaccgctgggaaggcgaggacgaggacgaggacgtgaaggataactgggatgatgatgatgatgaaaataaagaggaagctgaagtaaaaccagaagtaaagatttcagaaaagaaaaaaatagcagaaaagataaaagagaaagaacggcagcagaagaaaaggcaagaagaaattagaaagaggttagaagagcctgaagaacctaaagtgctaacacctgaagagcaattagcagataaactccgtttaaagaagctacaggaagaatcagaccttgaattagcaaaagaaacttttggtgttaataatacaggttatggaatagatgctatgaacccatcttcaagagatgacttcacagaatttggaaaattactaaaagataaaattacgcaatatgaaaaatcactatattatgccagttttttggaagccttagttcgagatgtctgtatttcattggaaattgatgacttgaaaaagattaccaattcattgactgtgctttgcagtgaaaaacagaagcaagaaaagcaaaacaaagccaaaaagaagaagaaaggtgtggttcctggagggggattaaaggccaccatgaaagacgatctggctgattatggtggatatgatggaggatatgtacaagactatgaagacttcatgtgaccttttatcttctcctggtgtcttctttatgttgcccacaatcccttcaacatgtagcacaacttcctttcctttcagttctgccaaatgctacaatcagaagtgcagtatcttttgtgctggttatttaaccccttgacactcaggtgctaatgagcaaatgagggaacttggatcttgttgccaaggggttaaaattgggaacctcagttgctacaaaatcatagtttaaaaacaaaacaaacctaataatgttgtcattgttgctatttgattccatagcagcagtcactaaattggaaacaaaggttgcaacatgacaaaaaaaaattgtgtagtatttaccagcaccattcagtaatacagccttaaccatacctccttgaactacttcataacttgtcaagaaaagcagtttgcagcaagcaagggcatgtgggatgcacctagtattaaaattgctttgtcttaaaattgagctgaggatattaaaaacatgttgtgaagaagactgcttatctcagagtgaagatactgtggctgaaaaatactagtttgatacttaagattttaatgaccaaaacccttcaactttgaagctgaagaaggtaaacctctccgttattacagtgcaagtggtggatgatccagtgcattgactgtctagttatttatcagctatttctactgatggaggacttcagatgggggagggaactgtttctattttgcctgattcaggtgtctgagaaacaaatgttcttctaggctgcaatggaaaaacttaacagggttttggcatttccttttctttataaaacatgctcagcaaactgcaccagttaactacagtttggtaaattgttatgttaacaattatgacatctgcaatgttttataaagcaactaatttaataaaataactattgtgaggacttaaattttgtgttacctcccaagagataattgagagtacaggatgcagctcttgggtggagttctcttcacagccaggacaaaaaaatgctttatagtttctcttccataggcaataggaacctcaaagctctgtagaccactaagtggaaaacaggaccatataaatgacttgaattaatagaaggccgtgactacatagcaataactacagtaaatactgttgaaaagcagacaagggctaagatctacttagcagtaataatgacagacactgaataaaacctatatttattatagaaagatcagtttctaactcatgaaaatgtatcccctgttccttaactgtagtaaataagaattaaattaactttagaaactgg

SEQ ID NO: 1766 - DNA, 2154 bp, Cricetulus griseus
gcgccgggaaggagtttgcagctgctcggtcatcgtgcggcccgacgcgagcccgcgctggtgtgcaggcccgtctctgtgcctggtctctggtgtgagggtgtaggcgaggcccctgcctcggtccccggactaggccgcgaccccgggcgccatgaagcaggagggctcggcgcggcgccgaggcgccgacaaggcaaagccgccgccgggaggggaacaagaaccgccgccgccgccggccccccaggatgtggagatgaaagaggaggcagcagcggggagcggctcaacgggggaggcagacggcaaggcagccgccaccgagcactcccagcgagagctggacactgtcaccttggaagacatcaaagagcatgtgaaacagctggagaaggctgtttcgggcaaggagcctcggtttgtgctgcgggcgctgcggatgctgccgtctacgtcacgccgcctcaaccactatgttctgtataaggccgtgcatggcttcttcacctccaataacgccactcgagacttcctgctacccttcctagaagaacccatggacacagaagccgacctacagttccgtccgcgtacaggaaaagctgcatcagcaccccttctacctgaagtagaagcctatctccagctgctcatggtcatcttcctaatgaacagcaaacgctacaaagaggcccagaaaatctctgatgacctgatgcagaagatcagtactcagaaccgccgagccctggaccttgtagctgcaaagtgttactattatcacgcccgggtctatgagttcctggacaagctggatgtggtgcgcagtttcttgcatgcccggctccggacagccaccctccggcatgatgcagacggacaggctaccctattgaacctcttgcttcggaattacctacattacagcttgtacgaccaggctgagaaactagtgtctaagtctgtcttccccgaacaggctaacaacaatgaatgggccaggtacctctactacacaggccgaatcaaagctatccagctggagtactctgaagcccggagaacgatgaccaatgccctgcgcaaggccccacagcacacagctgttggcttcaaacagacggtgcacaagcttctgattgtggtggagctcctgttgggggagatcccagaccgcctgcagttccgtcagccctccctcaagcgctctctcatgccctacttccttctcacccaagctgttaggacaggaaatcttgccaagttcaaccaagtcctggatcagttcggggagaagtttcaaacagacgggacctacaccctaattatccggctgcggcacaatgtgattaagacaggtgtgcgcatgatcagcctctcctattcccggatctccctggcggacattgcccagaagctgcagctggatagcccagaagatgcagagttcattgtcgccaaggccatccgggacggtgtgatcgaggccagcatcaatcacgagaagggctatgttcagtccaaagagatgactgacatctactctacccgcgagcctcagctagccttccaccagcgcatctccttctgcctggacatccacaacatgtctgtcaaggccatgcgctttcctcccaaatcctacaacaaggacctggagtctgcagaggaacggcgtgagcgagagcagcaggacttggaatttgccaaggagatggcagaagatgatgatgacagcttcccttgagccagggcctggggaggggtgggctgagtggagactggcttttgtcttttccctcaggggtccctgcgtccctgcccgggaacctggcctcctttcccacacacagctcacagactgcgtatgtgcaggggtcagggatgctgggagctaactatcccccctcttgctactatgtctctgtagctggtgacaatacactgtgggcagagaatgggcggcaggtctcctggaggcagggtcttgcctaatggtggtgtaggcagcaggaggggacagacagaaccgtggattagggtgtggattagggcctggagttgggacatgttgggttgtatgtttttgaagcttcaattatgatttttaaacaataaaaagttctccaaaaaaaaaaaaaaaaaaaaaaa

SEQ ID NO: 1767 - DNA, 2154 bp, Cricetulus griseus
  modified_base (254)..(254): a, c, t, g, unknown or other
atgtcgtcgttcatctgggtgcagctgaagaagacgtcggaggtggacctggccaagccgctggtgaagttcatccagcagacgtacccgagcggcggcgaggagcaggcccagtactgccgtgcggccgaggagctgagcaagctgcggcgcacggcgctcggccgcccgctggacaagcacgagggctcgctggagacgctgctgagatattatgatcagatttgtccattgaacccaaggtcccattttcngaaaatcagatctgcttgacgattactttggcgatgctttcaagcagtgtcagtacaaagacactctccccaaggaggtatttcccaccctggctgcaaagcagtgtatcatgcaagccaatgctgagtaccaccagtctatccttgggccaagcagcagtctcgctatgatgagtatgtcaatgtgtaaggattttcttgacaagatcagccgtgcccttactgcagcaaagaaggataacgatttcatttatcacgaccgcgtcccagaccttaaagatctggatcctatcggcaaagccacccttgtgaaacccaccccagtcaatgtacccatcagccagaagttctcagatttgtttgagaagatggtccctgtgtctgtgcagcagtccctggctgtgtttggtcagaggaaagctgacttggttaacagatcaatcgctcaaatgagagaagccactactttggcaaatggggtattggcttccctcaaccttccagcagccattgaagatgtgtctggagacactgtgcctcagtctatcctaaccaagtccacttctgtagttgaacagggtggcatccagactgttgaccagctgataaaggagctacccgagttactacaaagaaatagagaaatcttagaagagtctttgagacttctggatgaagaagaagcaactgacaatgacttaagatcaaaattcaaggaacgatggcaaaggactgcatccaatgacctctacaagcctttacgagcagagggatccaaattcagagcagttttagataaagctgtgcaagcagacggaaatgtgaaagagcgctaccagtcccatcgagacaccatcgcacttctgtgtaagccggaacctgagctgaatgcggccatcccctctgcaaacccagcaaagaccatgcagggcagcgaggttgtaaatgtcttaaaatccttattatcaagtcttgatgaactaaagaaggaaagagagggtcttgagaatgacctgaagtcagtgaattttgacatgacaagcaagtttttgacagctctggcccaggatggcgtgataaatgaggaggccctttctgtcactgagctggatcggatttatggtggtctaacagctaaagttcaagagtctctgaagaaacaggaggaacttctaaaaaatatacaggtctcacaccaagaattttctaaaatgaagcagtctaacaatgaagctaacctaagagaagaagttctgaagaacttggcaactgcatatgacaactttgttgaacttgtagctaacttgaaggagggcacaaagttttacaacgagctgactgaaatcttggtcaggttccagaacaaatgcagtgacatagtgtttgcacggaagacagagagagatgagctcttgaaggatctgcagcagagcattgccagagaacccagcgctccttccatccctcctccagcatatcaggcctcaccagcagggggcatgccacagctcctccaactccagctccaagaaccatgccgcctgcgaagccccagcctccagcccggcctccacctcctgtgcttcctgcaaaccgagtcacccctgctgctgctgctcccacaggggcaggggttgcttcaccagcaccaacacagacccctggctctgctccccctccacaggctcagggaccaccgtatcctacctatccaggatatcctgggtattgtcagatgcccatgcccatgggctacaacccctacgcatatggccagtacaacatgccgtacacgccagtgtaccaccagagcccaggacaggctccgtacccgggaccccagcagcctgcctaccccttccctcagcccccacagcagtcttactatccacagcagtaa

SEQ ID NO: 1768 - DNA, 2154 bp, Cricetulus griseus
gccaaggccgcggaccgagctgccatggcggatatggaggatcttttcgggagcgaagctgagagcgaggcggagcgcaaagattctgattccgggtctgactcagactctgaccaggagaacggtgcttctggcagtaatgcctctggcagcgaaagtgaccaagacgaaagagatgactcaggacagcccagtaacaaggaactgtttggagatgacagtgaggaggagggggcctctcatcacagtggcagcgacaatcactctgaagggtcagacaacaggtcagaggcttccgagcgatccgaccacgaggataatgagccctctgatggagatcagcacagtggatctgaagcccacaatgatgaggatgatgagggtcacagatcagatgatgggagccaccactcagaggcggaaggttccgaaaaggcccagtcagatgatgaaaagtgggacagagaagataagagtgaccagtcggacgacgaaaagatgcagaactctgacgacgaggagcaggagcaagggtctgatgaagacaagctacagaactccgacgatgacgaggagaagatgcagaacacagatgatgaggaccgggcccagctttctgatgatgacagacaacaactgtctgaggaggaaaaggggaattctgatgatgagcaccctgcggcttctgataatgatgatgagaagcagaactcggacgatgaggaccggccacaggtgtccgatgaggagaagatgcagaactccgatgatgaaaggccacaagcttcagatgaagatcgaaggcagtcagatgatgaagaggagcaagaccagaagtcagaatctgccagaggcagtgacagtgaagatgaagttttacgaatgaagcgcaagaatgcaattccctctgattcggaagcggatagtgacactgaggtgcccaaagacaataatggaaccatggatctgtttggaggtgcagatgacatatcttcagggagtgatggagaagataagccccctactccaggacagcctgtggatgaaaacggcttgcctcaggatcagcaggaggaggagccaatacctgagaccagaatagaagtagaaatccccaaagtaaacactgacttaggaaacgacttatattttgttaaactgcccaacttcctcagtgtggagcccaggccttttgatcctcagtattatgaggatgaatttgaagacgaagagatgttggatgaagaagggagaaccaggttaaaactgaaggtagagaatacaataagatggagggtgcgccgagatgaagaaggaaatgaaattaaagagagcaatgctcggatagtcaagtggtcagatggaagcatgtccctgcatttagggaatgaagtgtttgatgtatacaaagccccactacagggtgaccacaaccatcttttcataagacaaggtactgggctgcagggacaggctgtctttaaaacgaagctcaccttcaggcctcactctacagacagtgccacacacaggaagatgactctgtcacttgcagatagatgttcaaagacacagaagattagaatcttaccaatggctggtcgtgaccctgagtgccagcgcacagagatgattaagaaagaagaagaacgcctgagggcctccattaggagggagtcgcagcagcgccggatgagagagaagcagcaccagcgggggctgagtgccagctacttggagcctgaccgatatgatgaggaggaggaaggcgaggagtccatcagcctggcagccattaaaaaccgatacaaagggggcattcgagaggaacgtgctagaatctactcctccgatagtgatgagggctcggaagaagacaaggctcaaagattactcaaagcaaagaaacttaacagtgatgaggaaggtgagtcttctggaaagaggaaagccgaagatgatgataaagcaaataaaaagcacaagaagtatgtgatcagtgatgaagaagaagaagatgactgaagtacaaactgtgaatgcattttatatatttattgtacagcttgtctataaatacgatgtaaacatgagttattttgattgagattcattgatttgtgtttgtgaaaatttaattgtaataaaacattt

SEQ ID NO: 1769 - DNA, 2154 bp, Cricetulus griseus
  modified_base (10)..(10): a, c, t, g, unknown or other
  modified_base (35)..(35): a, c, t, g, unknown or other
  modified_base (49)..(49): a, c, t, g, unknown or other
gagaagcagngcatcagccgaggttattgactttntcggctgtcctggngtggtttgctgagcgcgtggaccgcatcatcctgctctttgacgcccacaagctggacatctcagacgagttctcagaagttatcaaggccctcaagaaccggaacgagggacaagatccgtgtggtgctaaacaaggccgaccagattgagacccagcagctgatgagagtgtacggagctctcatgtggtctctggggaagattatcaacacccccgaggtagtccgggtctacattggctccttctggtcacacccattgctcatccctgacaaccgcaagctcttcgaggcagaggagcaggatctcttcaaagacatccagtctctacccagaaatgctgcccttaggaagctcaatgacctgatcaagcgggccaggctggccaaggtccatgcctacatcatcagctccctcaagaaggagatgcccaatgtctttgggaaagagagcaagaagaaagagctggtgaacaacctgggagagatctaccagaaaatcgagcgggagcaccagatttcccccggtgacttcccgagcctacgcaagatgcaggaactcctgcagacccaggacttcagcaagttccaggccttgaagcccaagctgctagatacagtggatgacatgctggccaacgacatagcccggctgatggtgatggtgcgccaagaggagtccctgatgccctcacaagctgtgaagggtggtgcttttgatggcaccatgaatgggccctttgggcatggctacggcgagggggctggcgagggcatcgatgatgttgagtgggtggttggcaaggacaagcccacctatgatgagatcttctatacactgtctcctgtcaatggcaagatcactggcgctaatgccaagaaggagatggtgaagtccaagctgcccaacacggtgctggggaagatctggaagctggctgatgtggacaaggatggcctgctggatgatgaggagtttgctctggccaaccaccttatcaaggtcaagttagagggtcatgagctaccctctgaccttcctccacatctcatcccaccctccaaacggaggcatgagtgacagccatgcctgacataccccagcccccagggctgctggcactttctacccgccagctccttgcctgcctatgtgggcctgggactggaggggcagagagggggagggaaagggtcaccatttttcaaggtccataaagactgagcggtgtttcctcagctcttgaataggaaaaccaccatctttcttttaaggctgtccggggttcagtgggaggcatgggtgatgcttggatgtgaacagtgggattttgtgcacaagaaccatgatattttaatatataatgttaggggcagccttctttcttgcctcttcctctgtctgacagccccacactcagcctctccctaccccagccctttcctatactccagccttggatcggttccacctcacagccagcatagagcagaccccttgggcttgagttgccttctggttgaggggaggtcatcccaactcctgctctgaggggtctgaggggtctgaaatgtactcgcttaaagtcaaccttcatggcagcttcctggagcccctgactgccttggggtgggcagtgggccctgtgacccggggtggtgtgctggtaagaggaagcctgtggcctggtctgggtgtagtgtccaagcagcaggataggggaaaacccaaccccttccctcaccctctcatttccttcctcccctcctcccctgctgagccaaggaggtctgggtgttctgagatccccagactgagcaataagaagccagagctagcaagtgaccactttggccacctcactgcagcctcagggacctggacacgccctatggccagtggttggctgtcagggtgggctttacactgaggtggtggagcagctgcagcctgctcatctgacactgccggtgggcttcagggagctgcctgccatcacccagccctgctctgggccttgctggggctgagctccagcctggcctgttagctccttgcctcggccttccatccctgctgttggctgagggtaggtgagatgtc

SEQ ID NO: 1770 - DNA, 2154 bp, Cricetulus griseus
ctttcttgtacaaattgtacatctacctcagctgggagaaatattggaagtggtttaaatacagtatcagattcttcttggaggcatagtcaagttcccagatcttcatcaatggtacttggttcatttggaaccgacttgataagagaaaggagagatttggagaggagagcagattcctccattagcaatcttatggattacaatcaccgaagtggtgatttcacaacttcatcatatgttcaagaaagagttccttcttcatattcacagggagcaaagaccaaaagagaattcaatgagcactttacagttgaattcatcatctaccaatcaccaattgaccttctgaacatcaaaacagtatcaagttctagggattctagcagaaattctttcagatcacatttttctccaagacaatcaccaatcttttcgaaacagttcacatccacatttcatatctgtcaagaatagcttctagcatgtcatctacttttttctcacgaagatctagtcaggattccttgaatacaagatcactgagttctgaaaattatatttctccaagaaccttgacttcacagtctcggagtagtggagcatcatcttctgaagtcaatgatggcagggcatctgaagcttctcagggatttagatttcttaggcgaagatgggggttgtcatctcttagccaaaatcatagctctgaaccagatgcagaaaattttaatcaggaatcagaaggtagaagtacaggaccgtggttatcttcctcacttagaaatagatgcacacctttgttctctagaaggaggcgagagggaagagatgaatcttcaagaatatctccatcagatgtaccacctagatctcatatttttagaagagaatcaaatgaagtagttcaccttgaagcacagagtgatccccttggggctgctgccaacagaccacaagcatctggagcatcaagcagtgctgcaggtggctccccaccagatttgcctcagggtggaagaagtacaggaatagcagggattcttcctggttccttattccggtttgcagtcccaccagcactcggaagtaatctgaccgacaatgtcatgattactgtagatattattccttcaggctggaatgcagctgatgggaaaagtagataaaactaaaagtagcaccttcaagagacccagaaaaattagacagaaaaaaaaagaaaagacctccttctagaggactctgaagaagaagaaggagacttatgtagaatttgtcagatggcagctgcatcatcatctaatttactgatagagccatgcaaatgcacagggagtctgcagtatgtccatcaagagtgtatgaaaaagtggttacaggccaaaattaattctggttcttctttagaagctgtaaccacctgtgaactttgtaaagagaagttgcaacttaacctggaggattttgatattcatgaactacatagagctcatgcaaatgaacaagctgagtatgagtttatcagctctggtctctacctagttgtcttactgcacttatgtgaacaaagcttttctgatatgatgggaaatacaattgaaccaagcactcgtgtccgatttattaaccttgcaagaactcttcaggcacatatggaagatctcgaaacttcagaggatgattctgaagaagatggagaccataacagaacatttgatattgcctaacttcatttaagacaaatggatgatccgtgaacatgtttattaaaactggcaattaagtatgaataattttgtgggggaatgcctattagatatatatatataaaatgaatatatatacatacatgtacaaatgtaaatatatattcattcaagtgttgctgaattgaaattcttcagctggaccttttaactctggccagcaaatctcatgtttataatatgtaatcaaaagctatttttttcttgtaggtgagtgggaaagcattacccttccttgttttaaatatctaagcaatgctcatcaatttttctgtgttacgattactgtagtcatatttatggaaaaaatgtttgtattagtctcttgctagtgaaaaaaagtcagataaaatgtacttttgaaataaaatgccaatggcaccta

SEQ ID NO: 1771 - DNA, 2153 bp, Cricetulus griseus
  modified_base (1959)..(1959): a, c, t, g, unknown or other
gctgtcccttgccgactcccacacagagttcttcgatgcctgcgaggttctccttttccgccagctcttccgagaatgagggttctgaggaagaggagtcatgcgctagtgagatcaccaccagcctgtctgaagaggttctggaccgcaggggagccgaccgctatcaaaaagggccgtgtgttccagggattgctgtaggaccccctcgccgccgctgcctgccagctgccagtgggcctggaacagatgtgagcctttggaatatcctgcgtaacaacatcggcaaagacctgtccaaggtgtcgatgccggtgcagctcaacgagccgctcaacacactgcagaggctctgtgaggagctggagtatagcagcctcctggaccaggccagccgtatggctgacccctgcgagcgcatggtatacattgcagcctttgctgtctctgcctactcctccacgtaccaccgggcaggatgcaagccattcaaccctgtcttgggagagacctacgagtgtgagcggcctgaccggggtttccgttttatcagcgagcagggtctccatcatcccccgatctccgcctgtcacgcagaatctgagaacttcatcttctggcaagacatgaagtggaagaacaagttttggggcaaatccctggagatcgtgcccgtggggactgtcaacgtcagcctgcccaggtttggggaccactttgagtggaacaaggtgacatcctgcattcataacatcctgagtggccagcgctggatcgagcactacggggaggtgctcatccgaaacacacaagatagctcctgccactgcaaaatcaccttctgcaaggccaagtactggagttccaatatccacgaggtacaaggtgcggtgcttagccggaatggtcgtgtccttcaccgcctctttgggaagtggcatgaggggctgtaccgtggtcccccaccgggtggccagtgcatttggaaacctaattcaatgcccccagaccatgagcgaaacttcggcttcactcagtttgccctggagctgaatgagctgacggcagagctgaaacggacactgccttccactgacactcggctacggcctgaccagaggtacctggaggaggggaacatacaggccgccgaggcccagaagaggaggatagagcagctccagcgagacaggagaagagtgatggaagagaacaacatagtccaccaggcgcgcttcttcaggcggcagacggacagcagcggcaaagagtggtgggtgaccaaccatacgtactggaggctgcgcgctgagccaggctatgggaacttggacggggccgtgctctggtagccctggccttggggcaggagactcttggtcctcactcctgccccccattcctaccatggacatatgggtgaggttaggctccctctcactgcccttgagggcaaaggggcagccaaggctccaacctttcccctctgctggccagagggggctgtgtctcgcacacgcccattccgccactgggatggaagtgaatctgtgctcccagtcttgataacccagcagctggcatgtcagacccttcttgctcagccatcctcctcatctgggagtgttttggggagatgccaggtcccccagatttgcttcccatttcagtgccttcctaggacacaggggtttccccttgatgctacccagactttctgtgcccagggcgctgccatgctgcaaggttggagtgagtggaggagaggagatgcccttttcccatgtgtcctgtcctctgcatcttctctctgccctgacccatccctgggcctgcatcccgtttccaactgcaaagcgcctgcagcttccagcctccccccaccccacgggcccaccagtcggtcccttcaggctcagcttaacagaggatcaggctgaggttcctggcctcagaatnacccaggagggagtgagccagcttgagtggtgtgtgtgtgtgtgtcctgcttgcaggcaagcagggttcctaatgtagccaggacacccccgctgctggtgtctgtcactgttgctgctcattttctcagtttgcctgagtcaggtgaattgctataacattccaagctccaataaagactgtcctagactttg

SEQ ID NO: 1772 - DNA, 2153 bp, Cricetulus griseus
cttcagtctcagctccactggctagaaagtaaatgggatttgcacaaattaaaagccgaactgaaatcctgactgcagtgttaatatccttttcttctggttgttactaacaggaaagtcaatgtcgtcagaagacctagaagcccaggaggatgaattattggccctggcgagtatttatgatgcagatgagtttagaaaagcggagtccgtccaaggtggagaaaccaggatctatctggatttgccacagaatttcaagatatttgtgagcggcaattcaaatgagtgtctccagaatagtggctttgaatacaccatttgctttctgccaccagctctctgctctctgcaagcacctagacaacctaatgggaagaacaccgaggcagtgtggtgctgtttgcttggatgcagtttcttaaggaggagaccctcacctacctgaatattgtctctccttttgtagctcaaaatggggtctcagaaaaagttcagagaaggacaacggctcaggcctcttccagcacagagctaggttttgaaggagctgctggatctgatgtagaccaagaagaaattgtggatgagagagctgtgcaggatgtagaatcattgtcaagtctgatccaggaaatcttggacttcaatcaagctcagcagatgaaaagctttaatagtaaattgttcctgtgcagtatctgtttctgtgagaagctgggtagtgagtgcatgtacttcttggagtgtaaacatgtgtactgcaaagcctgtctgaaggactacttcgaaatccagatcaaagatggccaagtgaaatgcctcaactgtccagaaccaaagtgctcttcagtggctactcctggtcaggtcaaagagctggtggaagcagacttatttgcccgttatgatcgcctccttctccagtctaccttggatctaatggcagatgtggtgtactgcccccgcccatgctgccagctccctgtgatgcaggagcctggcggtaccatggctatctgctccagctgcaattttgccttctgtaccttgtgcagactgacctatcacggggtctccccatgtaaggtaactgcagagaaattaatagacttacgaaatgaatacctacaagcagatgaagctactaaaaggttcttggaacagaggtatggcaagagggtgattcagaaggccttggaggagatggaaagtaaagactggctggaaaagaactccaagagctgcccctgctgtgggactcccatacagaagttagatggctgtaacaagatgacctgtaccggctgtatgcagtacttctgctggatctgcatgggttctctctccagagccaacccttacaaacacttcactgaccctgactctccatgctttaacagactgttccatgctgtggatgttaatggagacgtttgggaagatgaaattgagactagttcatttcttctgctcgccgtatagaaatggaatggtttgccctaatctatcgtcaagtacacaaagaaaccttgcaagatgtttagggtgccatatattcactcttcctgtgtagaaggaagaacagggtttatatttttctttggtactactgattaaggcacatagattttttccatgtaacataattccgaacaattatataccaaaggttcagaaatgaaaactatagattaaatattataatatgcccaaactgtggatagttataaagtaaatatttattttcttccccaagctttaggttagggagagggtcaagagttaaactttcagactatgtccaagaagcctgacattgttggagccctctcagtactataccttgcagctagggacagtcacagccctattgacactgcactgagagcctgacccatttgctgtatactgccagtgtttggagtggtatttatagcttgatagttggattttatttctgggttttactggctttttggaaaactgtcttcctcatgatttgataagtggcttggtagcctcttggtgatattttgaaaatgacagtaattgacctgcgtcttgtgaacacatgttttctactttaacactgaaaattaaggaattgcttaattgtcagcacagactgattctggattgtcagtgaggat

SEQ ID NO: 1773 - DNA, 2153 bp, Cricetulus griseus
gaagcagaggatttcactagcaggttatatcgagaattgaactcttcacctcaaccttaccttgtgcctttcctgaagaggagcttacctgccttgagacagctgaccccagactccgcggccttcatccagcagagccagcagcagcagccacccgcctcacaagccaccactgcactcacagctgtggtgctgagcagctccgtgcagcgcacagctgggaaaccggctgcctcggtgaccagcgccctccagcccccggtcatcagcctcacgcagcccacacaggttggcgttggcaagcaggcaccacccacaccactggtgatccagcagcccccgaagcctggagccttgactccggctggagataggtaaaaagcacggcatcacggaacctgcatccagatgtagtgagttacgtgtctcatgccacacagcaaaggctgcagaatcttgtagaaaaaataatctgaaacagctcagcagaaaaacttctcttacaaggatgatgacaggtatgagcaagcaagtgatgtccgggctcagctcaaattctttgaacagcttgatcaaattgaaaagcagaggaaggatgagcaggagagggagatcttgatgcgggcagcaaagtctcgatccagacaagaagacccggagcaattaaggttgaagcagaaagcaaaagagatgcagcagcaggagctggcacagatgcgacagcgagatgccaacctcacagcattggcggcgatcgggcccaggaaaaagaggaaagtggactgtgccgggccgggaccaggagcagagggctcaggcccaggcgcagcagtcccaggcagctccggcgtgggaacccccagacagttcacacggcaaagaatcacgcgggtcaacctcagggacctcatattttgtttagaaaatgagcgtgagacaagccattcactgttgctctacaaagcattccttaagtgacaggaggagccggcgtttctgaagggacgcatgcctgcggactttttatatatttgcagattacgcctttttgtaacaagcaaacgggatattgtttaaaaacagccacctctttacaatggagcagttttatactcctgtttctaaatcagctcttcagtgcggcagaaaccatgtctgcagcagagagaatacaaaggcctgtggatgctcttacaggacagctgacccgagctcatcctcgactgagtggccttcttgccaaacaagccatatttaaagactgatggaagcgcttagcaaataattagcagttgctcatcctgtgtgcgttttggttcagttcactctgactcacccgctaggtgtgcgtctacagccgatgacctcatttctgttactttactgtcgtagcagtcagttggcgaagcaaactgatttttagactatttatcaccccatcccaccctgtcctcccccccccccaacacatgaaattccccaggaacacagcctccaagcaggaatgagaaccttttcagcataaatacattttacttgcactgtgtttttagctcagagtgaaaacttagatgaaataaatcagagttgagaagaatcaacaacagactgtttctcagtgtggatcaagtgttggaaatggttggtgtattttgtcagtaattgtatataatttttggcacataacataaaatggctatgtaaactataattattttgctaagagactgtatgcaagctgtggccaaccttacaggcgtccagagcaaagccccctctttgtacctatttttttattacaaatatactaattggttctttatattttcagaggttattgtattaaattgtctattgatagtacttttatgattgtaaatactctggcttctccgtgtggattctcatgttagactttaattcgcacgtgtgaactgaaccctgatcagtatttttaccaacacctgagaactgttacacctttcatttatcttttaggaaatccctgtctttccattttttcatgtaaattttgcacagttacttgttcatatgtaaatattttactttcaaaaatgaagtttttaattgctattgttttatataggattgaaagaaaattaactcctttattaaaaacaaatttatctgta

SEQ ID NO: 1774 - DNA, 2153 bp, Cricetulus griseus
gaaaggacaaaactggctttagtgcagccctgtgtaatgaccaggaacctcgaagacccaagaacagagtctagaccaggcaggggaagaagtgcatcccttgaaaagtagcattcagaagctgaaagctcgcatacatgctggtgaaaaagagcagcactgcctcctcggacagctgagggaaagtaagcattatgcagatgtgcttaaggacagagttgagaaccttgaacaagaattgaagctctcagaggcaaacatcagaaaatgaaaatcttatgaaaggattaaaacaggaacaaaagcgagtgtctgaattagaaacaaaaaattcttctattgaaaacttactaaaagaaaaagaacaagaaaaggtacagatggaagaggaatccaaaataacaatggagaggcttcaaactcaattaagagagctaaatgagacaatgatttccttgtgcaatgaccaagaggcctataagaccaaagaacagaatctgagtggtcaagtacaaactcttgaagttgagaaggcccagctgctgcaggatttcggtgagaccaagaataaatacattagtttgcagtcttctgtaaatgtcctcactcaagaaataaaagatggcaaacagaaactagagaagaaggaggaagaggtcaggacactggaagaccaacttaaaggtcaagaacagcttgtatgtaaactttcccagttggaaggagagcagcaactctggcagaaacagaaagtagaactgggaaatctgactgtggagctggagcagaagatccaagtgctgcaatccaaaaacagcgctttgcagcacacctttgaagcactgcagaattcttacaaaagtttagaaagtgagcttggattgatgaagacggagaaagtatcaacttgtgcaaagaattaacacaatgattgggaaagaagcacagctacagagggagctgcatctaatggtacagaaaacaacaaggctgaaagaagaattcaataaagagaaaaataggctaaccgaagaattaaaagttccagtagaagaattaaagaacctcaaagtagagcattgtaaatctgtgaatcagcttgagaaggaatttcagcgtgctcaggggaaaataaagttgttgctcaaatcttgtaaacagctggaaagagaaaaggggatgctggagaaagagatctgccaacttgaagctgcacagaagcagaaagctggtactgttgtgggtgataatgtagctaaattaatgactgaaaacaaagagctaaaagagactcttgaagaaaaaatcaaggaagcagataagtacttggataagtactgttccctgcttataagccatgaagagttagagaaagccaaagagatgctagaactacaagttgctcgtctgagttcacaacaatccaaacagcgtcttcacagttctcctttactgaattcttcggttccaggaccatctccagccacttctgtcagtgagaagtcaacatctggccaaagtaaaacttcaggcaagagacaaaggtccagcggaatttgggagaatggtagtgggacaccaccttgtgcaccagagacattttctaaaaaaagcaagaaaacagtcaatagtagcgtgcatcctactgaggacaaggaagagactaagtttgaactagagggactcccagaagtcgtaaaaaaagggtttgctgacattcctacaggcaaaacgagtccatatatcctgcggagaactaccatgccgatcagaaccagcccccgccttgctgcgcagaagttagtgggatcctccccaacaccaggcaaagaaaacattgcagagtcctcaaaaccaacagctggtggcagcagatcacaaaaggtcaaggttgttcagcagagctctgtggattcatgcactgccataccagaaagcctagagaagtctctcacagcctgtaatgttcctgggagaaactctgcggagagccccacggaggacttgagcattaaacagggctaccctgcttccagcccagctgctgggcctaacccaccaatcaatgaaaactgtcgtgtccaatgagatgtcagggttctggaaggtggcagtagtcaaatgtgtggccttcaggtctccgatatgtaaga

SEQ ID NO: 1775 - DNA, 2153 bp, Cricetulus griseus
agctaatgatagacactcttcctaaactccgagaggatatcaaagaaatctccatgtctgatctcaaggacttcctggaaagcattcgaaagcattctgacaaaataggtgaaacagccatgaaacaggcacaacagcagaaaagcttcagtgttattctgcagaagcaaaacaatgcaaggtttgggaaaaatacgcatgtagataatgacagcatcctagaagagaagaatgacattgtattgaaacatgtgctcgaagaggaggctgagaatgaagaggaggtcttaactgttcaagatctcgttgacttttcccctgtttaccgatgcttacacatttattctgctttgggtgatgaagaaacctttgaaaattactaccggaagcaaaggaagaagcaagcacgtctggttctgcagccgcagtcgagtgtgcatgaaacagttgatggctatagaagatatttcactcaaattgtagggttctttgtggtggaagatcacattttacatgtgacccaaggattagtaacccgggcgtacactgatgaactgtggaacatggccctctcaaagataattgctgtccttcgagctcactcatcttactgcactgaccccgaccttgttctggagttgaagaatctcattgtcatttttgcagacactttgcagggttatggttttcaagtcaaccgactttttgaccttttatttgaaataagagatcaatacaatgaaacattgcttaagaaatgggctggtattttcagggacatttttgaagaagataattacagcccgatccctattggcagtgaagaagaatataaagttgtcatcagtaaatttccctttcaagatccagaccttgaaaagcagtctttcccaaagaagtttcccatgtcccagtcagtgcctcttatttatattcaagttaaagagtttatttatgccagccttaaattttcagagtcactacaccgaagctcaacagaaatagatgatatgcttaggaaatcaacaaatctgctcctgaccagaattctgagtagctgtttactgaaccttattaggaaacctcatataggtttgacagagctggtacagatcatcataaacacaacacacctggaacaggcttgcaaatacctggaagactttatcactaacattacaaatatttctcaagaaactgctcacaccacaagactctatggactttctacttttaaggatgctcgacatgcagcagaaggagaaatatacaccaagctcaatcaaaaaattgatgaatttgttcagctggccgattatgactggacaatggcggagtcagatggaagagcaagtggttatctaatggatcttattaattttttgagaagcatttttcaagtgtttactcatttgcctgggaaagttgcccaaacagcttgcatgtcagcctgccaacatctgtcaacatccttaatgcagatgctactggacagcgagttaaaacagatcagcatgggggccgttcagcagtttaacttagatgtcatacagtgtgaattgtttgccagctctgagcctgtgccgggatttcaaggggacaccctgcagctggcgttcatcgacctcagacaactccttgacctgtttatggtttgggactggtccacttacctcgctgactatggacagccagcctccaagtaccttcgtgtgaacccacacacggcccttactctcttggagaagatgaaggacaccagcaagaagaataatatattcgcccagttccggaagaacgacagagataggcagaagctgatagagacggtggtgaaacagctcagaggcttggtgactggtatgtcccagcacatgtaaacatgtccatgagtgcgtctccatggccagcactggtcatgagacaataatttgtttacagaagtcagaaaatacggtagaggaaataaactgatgagggcttaaacaagtattggtaacaaacatcatttgtatggatttttaaataattgaatactattttatatataaaaatgtaagattaatttttttcaatttcagaggaaaaatcgaaagtgtaatatataaatccaataaattgtgtatgaaactgattgcaaatattagaaaaaa

SEQ ID NO: 1776 - DNA, 2153 bp, Cricetulus griseus
  modified_base (209)..(209): a, c, t, g, unknown or other
  modified_base (2143)..(2143): a, c, t, g, unknown or other
ggcaccatgggttggtggaacgggtacagcgacgacccccgaagaatggtgtccccacttcgccgactacccccgccacattgacagttctccctatagccctgcctacttatctcctcccccagagtctggctggcgaaggatgatgccctggggcaacctcccagctgagaaggggcagttgtttcgactgccaactgcacttaacnggacaagttctgactctgctcttcacacaagtgtgatcgaacccccaaccccagtcacttattcacggccccacacctcccagtgtccctgcccagtcgccgaggaggaggttttctggatatcctcctctcgacctcgatcctgtgaagtccctggaatcaacatctttccatctcctgaccagcctgccaatgtgcctgtcctcccacctgccatgaacacgggggatccctacctgacctcaccaacctgcacttcccccctccgttgcccactcccttggaccctgaggagacagtctaccccagcctgagtgggggcaacagtacctccaatttgacccatactatgacccatttgggcatcagtggaggtctggggcttggggacccagctatgatgtagcaggacttcactcacctcttagccacccatccctgcagtcctccctaagtaatcccaacctccaggcttccctaagcagtcctcaaccccagctgcagggttcccatagtcacccatcactgcctgcctcctccttggcccaccatgcactgcccaccacctccctggggccacccgtcacttagtgcccccgcccttttcctcctcctcttcctcttcatccacttcatctcctgtcctgacgccgcccccccttacccagccttcctacctccccggggccctcctccccgccaccgccgtgtgcccctcagccccctgagcttgcccgcgggcccagccgacgccagaaggtcccaacagcagctgcccaaacagttttcgccaacaatgtcacccaccttgtcttccatcactcagggcgtccccttggataccagtaaactgcctactgaccagcgattgcccccatacccatatagccctccaagtctggttatacccacccacccatccaccccaaaatctctacagcagttgccctctcaggcctgcttagtgcagccctcaggtggacagcccccaggcaggacgtcacattatggggcactgtacccacctgggtccagtgggcatgggcaacagccttaccaccggccaataaatgacttcagcctggggaatctggagcagttcaacatggagagcccatcaaccagcctggtgctggatcccccggcctttcctgaagggcctggatttttagggagtgagggatcagttagtggcccccaggatcctcatgtcctcaaccaccagaacttgacccactgttctcgccatggctcaggacccaatatcatactcacaggagactcctccccaggtttctctaaggagattgcagcagccttggctggagtacctggctttgaggtgtcagcatctgggttggagctggggctggggctggaagatgagctgcgcatggagccactgggcctggaaggactaaccatgctgagtgacccctgtgccctgctgcctgaccctgctgtggaggattcattccgtagtgaccggctacagtgaggggactttactgccatccttcttcatggtcctgtcctcatcactgtccttttcatcccttccccctggctaggagagactactctctgctcccagatcctttttctaatatgaatgaaggatcctaaaaatgaggaaagggaaggggcttggccaggtggcccctgaatactgtacatctggtgggcctggaggagctcaagggagggcctaaagcacttgtaactttgaaaatggtctgtctggaggtcagagcctgttggaaagcaaggtgtagaggggaatcttggaggtagggcttgtccagataagggtgggcagtaccaaccctcccctatctctcttccccttgcaatggaggagagagccagagtggatattattttttattaaatatattatatgttaataaaaaatcctaaaacaaaaaaaaaanaaaaaaaaaa

SEQ ID NO: 1777 - DNA, 2152 bp, Cricetulus griseus
atcaagaaggcctacctgcaggaggaggagcgggagaactccgaggtgagcccacgcgaagtgggccacaacatctacatcctagcccttcagctttccaggcacaacaaacagctgcagcacctgctgaagcctgtgaaacgcatccaggaggaggaagcggagggcatctcttccatgctcagcctcaacaacaagcagctgtcccaaatgctcaagtcctccgcgcctgcccaggaggaggaggaagaccctctggcctactacgagaaccacacctcacagattgagattgtgcggcaagaccgaagcatggagcagattgtgttcccagtgcctggcatctgccagttcctgacagaggagaccaagcaccggctcttcacccaccacagagcaggatgagcagggcagcaaagtgagcgacttcttcgaccagtcctccttctgcacaatgagatggaatggcagcgccggcttcgcagtatgccactcatttactggttctcccgccgcatgacgctgtggggcagcatctccttcaacctggctgtgttcatcaacatcatcattgctttcttctacccctatgtagagggtgcgtccacaggcgtgctgggctccccactcatctcgctgctcttctggatcctcatctgcttctccatcgcggccctgttcaccaagcgctacagtgtccgccccctcatcgtggcgctcattctacgctccatctactacttgggcattgggcccacactcaatatcctgggcgccctcaatcttaccaacaagatcgtgtttgtggtgagcttcgtgggcaaccgtggtaccttcatccgtggctataaggccatggtcatggacatggagttcttgtaccatgtgggctacatcctgacgagtgtcctgggcctctttgctcacgagctattctacagcatcctgctctttgacctcatctaccgtgaggagacgctgtttaatgtcatcaagagtgtgactcgcaatggccgttccatcctgctgactgccctcctggccctcatactagtttacctcttctccatcgtggggttcctcttcctcaaggatgacttcatcctggaggtggaccggctgcctgagaaccactctagagccagcaccctgggcatgccacacggaactgccacgtttgtgggcacatgtagcggggacaagatagactgtgcctcggaggtctctgtgcccgagatcctagaagtagacgaggagccggacagcactgagcgggcctgtgacactctactcatgtgcatcgtcaccgtcatgaaccacggactgcgcaacggaggtggtgtgggtgacatcctccgcaagccctccaaagatgagtctctgttccctgcccgggtggtgtatgacctcctgttcttcttcgttgtcatcatcatcgtgctgaatctcatctttggggtgatcatcgacaccttcgctgacctgcgcagcgagaagcagaagaaagaggagatcctcaagaccacatgcttcatatgtggcctggagagggacaagtttgacaacaagacggtgtccttcgaggagcacatcaagctggagcacaacatgtggaactacctgtacttcatcgtgctggtccgtgtcaagaacaagaccgactacacgggccctgagagctacgtggcgcagatgatcaagaacaagaacctggattggttcccacggatgcgtgccatgtccctggtgagcagcgagggggagggggagcagaatgagatccgaatcctgcaggagaaacttggctccaccatgaagctggtgtcgcacctcaccgcccagctcaatgagctcaaggagcagatgacagagcagcggaaacggaggcaacgcctgggctttgtagatgtgcagaactgtatcagccgctgagaggagccgtggaagcccccacaggagctgcccttccttcaggccaggtggcccatcagcctccgaggccaggtgcctgccccacctcctgctctgctggcactccctcaggccaggctctggccagcgaggggtacggcagagcagacagtcctgcttagacgtcccttgaagactcagtttaccttagtgccttagaggacactaggtcctcagactg

SEQ ID NO: 1778 - DNA, 2152 bp, Cricetulus griseus
ggcttctgacagctaaccggctgcaggtggtgactgcccaggtgaaaatgtgtctgaaccctcattgtttggctctgcacagcttcatggacatctacacaggtctttttaatgtggggaataagttgctagtaagcctggatttactttttgcgatccggaaccagattaaaatgggagaggaccccaaaatgtctgtcagtgttgtgctgaagtctgtgcaggaacagacagagaagacactgacctcagaggagctgagccagctacaggagctgttgtgcaatggctattgggcttttgagtgtctcactgttcgtgactacaatgacatgatctgtgggatctgcggtgtggccccaaagtggaaatggctcagaggaatgaagagaatgtgctggcactgaagagtgtggagtttacctgggccggaattcttgggctccagtgaggtgaacgtggaggacttttggacgacaatggagacagaagtgattgagcaggttgcattcccctacaagcatccccatcaccaaatttgatgcctccgttatcgctcccttcttcccaccactcatgagaggaactgtggtcgtcaacactgagaaagacaaaaacctagatgtgttcagccagtacctggcaatggcagcgccttggtgaggctgctgcaggagggtacctgcaagcttgaggaacttagctcctatggtggggaggaactacagtacctattggagcagtgtggcatcccctatggcccagaagactccagggatcagctctgcttctccttattggccctctatgaatctgtacagaatggagccagagccagaccgccccaactcatttcacagggggtaaaatctacaaagtgtgcccccatcaggtggtctgcggttccaaatatcttgttcgaggtgaaagtgcccgtgaccatgtggatctgcttgcctcttcccgccattggccacctatctatgtggtagatatggccacaccagtggcgctatgtgctgacctctgctacccagagctgactagtcagatgtgggggaagaaccagggctgtttctctagccctacagagccagttgtgagtgtgtcctgccctgaactcttggaccagcattattctgtggatgtgccagaggctgagaactctgtccagcatccagtcaccaagactaccgcacggcgtattgtccatgcaaacacgaagcctgatcccagtgaccctagtgctggccaccattccttatcactgtgccctgagttggcaccctatgcctccatcgtggactgcaaactcaccagtgtccgccagcggcccattgcctttgacaatgccacccactattacctctacaaccgcctcatggacttcctcaccagccgagaaattgtcaaccggcagatccatgacgttgtacagagctgccagcctggagaggtggtcatccgtgataacctctatcgccttggggttgctcagatcaagactgaggcacaggaggatggggaggaagagggagcctcggtggcagaataagccaggttgtcatgtacagggcctgcaccatctctctcaagccataatatggcccttgcccaaggcagacctattgaggggacctgtagtcccctgtagggagggcctctgactgctggaactgaccaaagagcttccatttcatgagcacagtggggccctcaacctctgggctcaagagaggtgctggggaacctctgctgaatccgagagagcatgtggaggagctccctccaggaccgtcctctgccctgggttttggggaaaagaatccttcctcctttctctggccactgctaactgtaccctacatcctccgggccctcagaccctcaccacagaggggatgtggcccatagttgtgacatagctggcaagcagtaggaaaactcccttctgtgaaggggaagcagatagggctgtaagcaaacagcaacacaggctcaggtgcctgtggtttgctcagggcccgggaattggccgagtgctatttaatttattgagagggtgggataggtggctttccctctcgttcttcccccaacaagaataaagtttattaaattatctggttttgattaagacaaaaaaaaaaaa

SEQ ID NO: 1779 - DNA, 2152 bp, Cricetulus griseus
ggacttggatatagaatttgatgtacatcttggaatagctcatacccgttgggcaacacatggagaacctagtcctgtcaatagtcacccccaacgttctgataaaaataatgaatttattgttattcataatggaatcatcaccaactacaaagacttgaaaaagtttttggaaagcaaaggctatgactttgaatctgaaacagatacagaaaccattgctaagcttgtcaagtacatgtatgacaactgggaaagtcaggacgtcagttttactaccttggtggagagagttatccaacaactggaaggagcttttgcacttgtgtttaaaagtgttcattttcctgggcaagcagttggcacaaggcgagggagccccctcttgattggggtgcggagtgagcataagctttctacagatcatattccaattctgtacagaacaggcaaagacaagaaaggaagctgcaatctctcccgtgtggacagcacgacatgccttttccccgttgaggaaaaggcagttgaatattactttgcttctgatgcaagtgctgtgatagagcacaccaatcgtgttcttggatagaaacactccagtctttcgagatgatgtttgctttttcattagtcaatcaggtgagacagctgacaccctgatgggtcttcgttactgtaaggagagaggagccttaactgtggggataacaaatacagtcggcagttctatatcacgagagacagattgtggggttcacattaatgctggtcctgagattggtgtggccagtacaaaggcttataccagccagtttgtgtcccttgtgatgtttgccctcatgatgtgtgatgacaggatctccatgcaagagaggcgtaaagagatcctgcttggattgaagcggctgccagacttgattaaggaggtgctgagcatggatgatgaaattcagaagctggcaacagaactttaccaccagaagtcagtcctgataatgggaagaggctatcactatgctacatgtcttgaaggagccctgaaaatcaaggagattacttacatgcactctgaaggcatccttgctggggagctaaagcacgggcctctggccttggtggacaagttgatgcctgtcatcatgatcatcatgcgagaccacacttacgccaagtcgccagaacgctctacagcaagtggttgcacggcgagggggccgccccgtgtcgtgatctgtgataaggaggacactgagaccattaagaacacaaaaaggacaatcaaggtgccccactcagtggactgcttgcaaggcattctcagtgtgattcccttacagctgctggctttccatgagcaggttgctatgctgggcagcagagccaaatcttcagggcagttcgtgttgtccctggtggacctgtttattgtgaaggctcaggtgggagagtggaaagctttaactaacacactttcagtttttgcgggtcagtctttttatctttttttacaattaggatattctatagcaataaaagaaactaaggttacctgtttattatataatataactggtatgatttttctaaaaaaataaaagcacaatgtcattggaaaatgtttattgaaaaagaattcataattcacattgaatttaggaaggccaaagaaatggaagggaatggtaaagagattttggttcatgacatccaatttctcatgactttgtttactctcaagtttaaaagttttaacatgtaagttggtctttctcactgtatttaaagattgttaataagtatttcaatatcttcatagcttgatgaatttaaacaaggctgatgaggacatctttggaaattttcacattagcttgtttttttgtactaggttccagagtgggtatagaaatagtcttgttaactttttgaatgctgtctgtttgaatgtgtttttcctttaataaagttttgatatttgtttaaattatacttctctgggactggggggttagaataatcattgctctgttttgattttgtattcttttaaatgaatgtttagttttctgagccagatggttatttcattctcatgtcctgttaaatccagcgactataccggaactgtgaataaattgcccaaaacctt

SEQ ID NO: 1780 - DNA, 2152 bp, Cricetulus griseus
atcaagttagaaacagtctgcctttaaattcagatgtccccaaggcatttgcgagcgattgcctgagttttatgtagaagatgttgctgaatttttattttttattgtacaatattctcctcaggtgctttatgagccctgtactcaggacattgttgtgttcctcgttgtgatgctgtgcaaccagaactacatccgaaacccatacctagtggccaagctggtggaggtcatgttcatgaccaatccctctgtccagcctcggactcagaagttttttgagatgattgagaaccatcctctctctaccaaattgctggtaccttccctcatgaagttctatacagatgtcgagcacactggagccaccagtgagttctatgataagttcaccattcgttatcacatcagcactatttttaagagcctttggcaaaacattgctcaccatggcactttcatggaggagttcaattccgggaagcagttcgttcgctatatcaatatgctgataaatgacacgaccttcttgctggatgaaagtctggagtcactgaagcggatccatgaggtgcaagaggagatgaagaacaaagagcagtgggaccagctgcctcgggatcagcagcaggcccggcagtctcagcttgctcaggatgagcgtgtttcacgttcttatctcgccctggcgactgaaaccgttgacatgttccatctcctcaccaagcaagtccagaagccgttcctcaggccagaacttggaccccgattagcagccatgctgaactttaacctgcagcagctgtgtggacccaagtgccgggacctgaaggtagaaaacccagagaagtacggttttgagccaaagaagctgttggaccaactaacagatatttacttgcagctggactgtgctcgcttcgctaaagccattgctgatgaccagagatcctacagcaaggaactgtttgaagaagtcatttcaaagatgcggaaggcagggatcaaatccaccattgcaatagagaagtttaagcttcttgctgagaaagtggaggagatagtggccaagaatgcacgggcagaaattgactacagcgatgccccggatgagtttagagaccctctgatggacaccctgatgactgacccagtgagactgccctctggcaccataatggaccgatccatcatcctgcggcatctgctcaactcccccactgaccccttcaaccgccagatgttgactgagaacatgctggaaccagtgccagagctgaaggaacagattcaagcatggatgagagagaagcagagcagcgaccactaagctgtccctgtcgcatgtctctgctagaaacagccacgccagccacgccaggccgaagcagcatccacctcgaagctgctgctcaaacctgcaaccagatgtggccagatcctgagagcccaccccgagtgaccaaacagtagagatctgagggacacgatgagaagaggagcctgattgctgtacatatatttaagtgacaaacattcaaaagcttgagggacgagttttacgattgcctgtgtagtaaagcccgtccttcgcccgtcacaacctggggctgtggcaacggaagtctgtgatgacagcggtgggtctgggcagcatccctgagctttcgtttccttttgttttttctccatgtgactagagaactcggacattttgctgctaaagaatctcccccttcctcaccctccttgcactgctgtgggttttttaaagagaaacagaaccagactcctttcccggccctccaaacatgtattctgtgagataactgtgcctgcaacaaagtgttaatcttgggatcgtatttttatatcatattcacatacctgttttttaattggtgttagatgacatgattaataaaaaaggcaagatattttcagaatttgaatttcagtttttttttcttttcaaatagccctttgaaactttttttattataaatgcaatgaagagagccctggcccttctaccgagccctggattaagatcctgaggaacaggtgcagcgacaggatggctgaacgatcgggacttgtttgactggtggggtttggggaggtgagggctgtgctttgttttttgtttttt

SEQ ID NO: 1781 - DNA, 2151 bp, Cricetulus griseus
tcccttctaagtcactctccaggcacctccaatcagagccagccctgttctccaaagccagtccgcctggtacaggacctcccagaggagctggtacacgcaggctgggagaagtgctggagccggagggagagccgtccctactacttcaaccgattcaccaaccagtccctgtgggagatgcccgtgctgggccagcacgatgtgctttcggaccctttggggctgaatgcaaccccattgccccaagactcaagcttggtggaaactcccccagtggagaacaagcccagaaagcggcaactctcagaagagcagccaagtggcaacggtgtaaagaagcccaagattgaaatacctgtgacacccacaagccagtccgtacccagttcccccagcatcccaggaaccccaacactaaagatttggggtggatctgctgaagataaacagcaggcagctctcctccgacccaccgaggtgtactgggacctggacatccagaccaatgctgtcatcaagcacaggggtccttcagaggtcctgcccccacacccctgaggttgagctgctccgctcccagctcatcctgaagctacgccagcactaccgggagctgtgccagcagcgtgaggttgagccacctcgagaatctttcaaccgttggatgctggagcgcaaagtagtagacaaaggctctgaccccctgctgccaagcaactgtgatccagttgtgtcaccgtctatgtttcgtgaaattatgaatgacattcccatcaggttatccagaatcaagttccgggaggaagccaaacgtctgctttttaaatatgcagaggctgccaggcggctcatcgagtctaggagtgcatcccctgacagcagaaaagtggtcaagtggaatgtggaagacaccttcagctggcttcggaaggaccattcagcctccaaggaggactacatggaccgcctggagcacctgcggaggcagtgtgggccccatgtctctgctgcagccaaggactctgtggaaggcatctgtagcaagatctaccacatctccctggagtatgtcaaacggatccgagagaagcacctcgccatcctcaaggaaaacaacatcccagaggaggtggaggcctcagagttggagccccgcctggtgtactgctacccagtccgtctagctgtgtctgcaccccccatgcctagtgtggagatgcacatggagaacagtgtggtctgcatccggtataagggagagatggtcaaggtcagccgcagctacttcagcaaactgtggctcctttatcgctacagttgtgttgatgactctgcctttgagaggttcctgcctcgagtctggtgtcttctccgtcggtaccagatgatgtttggcgtgggcctgtatgaggggactggcctgcagggatcgctgcctgtgcacgtctttgaggtcctgcaccgactctttggcgtcagtttcgagtgcttcgcctcacccctcaactgctacttccgccagtactgttctgccttccctgacacagatggctactttggctcccgcgggccctgcctggacttcgccccgctgagtggctcctttgaggccaaccctccgttctgcgaggagctcatggacgctatggtctctcactttgagaaactgctggagagctcaccagagcccctgtccttcattgtgttcatccccgagtggcgggagccccccacaccagcgctcacccgaatggagcagagccgcttcaaacgccaccagctggtcttgcccgcctttgagcacgagtaccgcagtggctcccagcacatctgcaagaaggaggaaatgcactacaaggccgtccacaacacagccgtgctcttcctgcagaacgaccccggctttgccaagtgggggccaacgccagagcgactgcaggagctcaccactgcctacaagcagtcaggccgcagccacggctccagctcttcctcctcctcctcttcctcctcctcagaggccaaggaccgggactcgggccgggagcagggccctagtcgagagcctcaccccacttaacatatccttcggggaggaggagccccaggggtgctgtgactgactgctgggactaagtcctcagggct

SEQ ID NO: 1782 - DNA, 2151 bp, Cricetulus griseus
  modified_base (288)..(288): a, c, t, g, unknown or other
ttgagcctctgcaagcagatcaccgacagcagcctgggccgcatcgcccagtacctcaagggcctggaggtgctggagctggggggctgcagcaacatcaccaacaccggcctcctgctcatcgcctgggggctgcagcgcctcaagagccttaacctccgcagctgccgccacctctcggacgtgggcatcgggcacctggccggcatgacgcggagtgccgccgagggctgcctgggcctggagcagctcacgctgcaggactgccagaaactcacggatctttcnctgaagcacatctcgcgagggctgacggcctccggctcctcaacctcagcttctgtggcggcatctcggacgcggccttctccacctgtcgcacatgggcagcctgcgcagcctcacctgccgctcctgcgcctctccggcctggatgtgtcctttgttgacaaggtgggaggaccagagtctggcttacatagcccacgggactggacggcctccaagtccctctccctcctgctcttgccacatcagtgacgacggcatcaaccgcatggtgcggcagatgcacgggctgcgcacgctcaacatcggacagtgtgtgcgcatcacggacaaggggctggagctgatcgctgagcacctgagccagctcacgggcatagacctgtacggctgcaccaggatcaccaagcgcggcctggagcgcatcacgcagctgccctgcctcaaggtacttaacctgggactctggcagatgacggacagtgagaaggtcaggtgagggcggcagttccagtgtcccctgccccgccctgttcctcccacgaccgccactgttcccgcacactcacgcgcgcacttacacgttcatggcagtggccgcgatggggccgtgacgcgaagcccgggctcttttctccgagtccggcgcccctccccactgcgtctggggttcttctgctccctctacccactcttcctctcccagtgggtggagagatggacgctgctgctgcttctctgcccactcttctgcagggtatggagactgattcagccaccgccaactgtatcccggggcactgcatttggaaatggggtgggggtggggagggactcggcgtttcacccccccccccacggagttgaggaaagatgtctgccttcacttacactttatttggatactgtgatctggttttatttcgaaatgtgtagaaagcaagcccgactccaacagccttttttcacccactttgtaaaccagtctcttctcatcactgccccttcggtactctgccactcacttcgtttctgtatatatatatatatatgtctggctacctcgttttagtttacttttttcttttaaaccctggaattctacaagagagatattttgagactgaaacatttttgtgcctaaactggaaagatgcccactgggtttgtgtgtcttttttgttttggcttcttcccaacctccatctacccagtgtgccccacttccgcatcctggctgtgactttcctttttcccttgtctatttgggctttgaagacccaaccatgtttctaaatcttgatttaatttatagcacaaatgtatgggagaaatgagagcagaactgcctttttgttcgccggagatgcagattgagtcttgaagaggagtattatatatgcaaattatgccccaccccaaccctcttccaagttttcccacaaaaaggttacatagtgaggcttgaaggggggagactgaactccacgtctcatctgtgttctgttcataaaaggggagcttgtgggtctgaaagcttttgttctgaatggaggaatagatggctttattttggtgggggttggggctgtggacttaaaaaaaaaaaacgcttttgagtaggatgtatatttttgttggatattttgtttgtttatttttttagagtcctccacagcaacatgagagaccatggagaaacccagagacctttatcaattaattgtactgtttgtgaatttgtataaatgataacaaagatcctcttaaaacgtttatattcttacagtaaaaggttaaactgatatttatataataaaagaggaaatatgaagtatgtttttgaaaaaaaaagacacaaaa

SEQ ID NO: 1783 - DNA, 2151 bp, Cricetulus griseus
ggttgggagccgcagtggtgaggagggctggctgagggcaaaagcatgtcctccctccctgggtgcgttagtttggatgcagcaacagctgcccctgactctgaagacatgactgagctgcagcaggcagtggttgaagagcttgggtatctctatggaggaacttcgccagttcattgatgaagagctaggaaaaagatggactgtatacagcagcgcaagaagcagctagcagagttggagacgtgggtgctgcagaaggagtctgaggtggcttatgttgaccagctccttgatgatgcatccagggcagtgattaattgtgagtctttggtgaaggatttctactctaagctgggactgcagtatcatgacagtagctccgaggatgaagcttcccagcctacagaaataattgagattcctgatgaagatgatgatgtcctcagtattgattcaggctgcaaatgtgacccaaacatgtgcacaaatcgcttggtgcaacatggactacaggttcgactacagctatttaagacacagaacaagggctggggtatccgctgcttggatgacattgccaaaggctcttttgtctgtatttatgcaggcaaaatcctgacagatgattttgcagacaaagaagggctggagatgggtgatgagtactttgcaaatctggaccacattgaaagtgtggagaattttaaggaaggatatgagagtgatgtcgccagttcatctgacagcagtggggtggacatgaaggaccaggaagatggcaacagcggttcagaggatcctgaagagtccaatgatgacagctctgatgataacttctgtaaggatgaagacttcagcaccagctcagtgtggcgtagctatgctacccggagacagactcggggtcagaaggaaaacggactgtctgaggtggcttccaaggactcccgtcccccagaccttgggcctccaaatgttcctgtccctcctgcagtatctgtaggggctgcaagccaccttcatctgaagacgacccccaagaacaaggtggcctcgtggttgagctgcaacagtgtcagtgaaggtgggtttgctgattctgacagccgttcttccttcaagaatagtgagcgtggagatggccgggctggggcaggccgggcagaggctgagaaggcctctacctcaggattgagcttcaaggatgaaggagacaataagcagactaagaaagaggatcctgatgaccgaaacaagatgtcagtagtcactgaaagctctcagaattatggacacaatcctcctatgaagtctgatgggcttcgccgaccatctagtaaaacttctatgccccaaagtcggcgacttggggcttctactcagtccaaccctgatgatatcctgacactgtccagcagcacagaaagtgagggggaaagtggaatcagccgaaagcccactgctggtcagacttctgccacagctgttgacagtgatgacatccagaccatctcctctggctctgatggcgatgactatgaggacaaaaaaaacttgactggtccaacgaagcgccaggtggcagtaaaatcaacccgaggctttgctcttaaatcaacccatgggattgctattaaatcaaccaacatggcttctgtggacaagggggagagtgcaccagttcgtaagaacacacgccagttctatgatggtgaagagtcttgctacatcattgatgccaaacttgaaggcaacctaggccgctacctcaatcacagttgtagccccaacctgtttgtccagaatgtcttcgtggatactcacgatcttcgcttcccttgggtggccttctttgccagcaagaggatccgggctggaacagagcttacttgggactacaactacgaagtgggcagtgtggaaggcaaagagctgctgtgctgctgtggggccattgagtgcagaggacgtcttctctaacgggaaccagccctcttctcactctgagaacccgtgaccatccataccccagaactgggtcttcctgacgcttgaactctgaccccaaggctctgatgtagcttttctccagttgctagtagaaattaaaaaaaattaaacagtagaaaaaaaaaaaaaaaaaaaaaa

SEQ ID NO: 1784 - DNA, 2151 bp, Cricetulus griseus
ggatggggagctgctgaggctgcaggcagagaacacagccttgcagaagaacgtggcagcactgcaggaacgctatgagagagagcagagcttggcagagctaagagatcagcggcagggggagcgcctggagcatgcagcagcattgcgggccctacaagatcagatccatacagcaaaggcacaagaactgaacatgcttcgggaccagaccactgaattgtcagctgagttacagcatcggcaggctgaatatgaagatcttatgggactgaaagatgacctcaactcccaactccaggagtcattaagggccaataaccggctgctggaaacaacttcaagaaatggggcaagagaaggagcagttgacccaggacctgcacgaagctcggaagagtgctgagaaacggaaggccatgctcgatgagctagcaatggagtcaatgcaggagaagtcccagcacaaagaagagctgggagctgtccgattacggcatgagaaggagatgcttggggtgcgagctcgttatgagcgtgagcttcgcgagctgcatgaggacaagaaacggcaggaggaggagctccgggggcagattcgggaggagaaggctcgaacaagggaaatggagactcttcagcacacagtggaagaacttcaggctcaggtacactccatggatggagccaagggctggtttgaacggcgcttgaaggaggctgaggaatccttgcagcagcagcaacaggaacaagaggaagccctcaagcagtgccgggaggagcatgctgctgagttgaagggcaaggaggaagagcttcaggatgtgcgggatcagctccagcgggcccaggaggagcgagatggtcatgtgaagaccatcagcagcctgaagcaggaggtaaaggacacagtggatgggcagcgtatcctggaaaagaagggcagtgctgcgctcaaagaccttaagcggcagctgcacctggagcggaagcgcgctgacaagctgcaggagcggctgcaggacatcctcaccaacagcaagagccgctcaggccttgaggagctggttctctctgagatgaactcaccaagccggacccagacaggggacagtagtagcgtctcctccttcagctaccgggagattttgaaggagaaggagagctcagccataccagccaggtctttatctagcagtcctcaggcccagccccctcgaccagcagaactgtctgatgaggaagtggctgagctgtttcagagactggccgagacacagcaggaaaaatggatgctggaggagaaggtgaaacacctggaggtgagcagcgcctctatggcagaggacctctgccggaaaagtgccatcattgagacctacgtcatggacagccggattgatgtgtctgtggcagcaggccacacagaccgaactgggctgggcagtgtcctgagagacctagtgaagccaggcgatgagaaccttcgggaaatgaacaagaagctgcagaacatgttggaggagcaactcaccaagaatatgcacttgcacaaggatatggaagttctatcccaggaaattgtacggctcagcaaggaatgtgtggggtcccctgacccagacctagaacctggagaagacaactaagacctacaagctgcacctactttcaccccattccagaatgccactgccacttgggctgtggtgggaaaatgtggaggctggcaccaaatctaatagtttgggagattgacattaaagggggttagaagcctatctgttgctggtgttgatgatcccaatcatatggtagaggccccttggggaggaaggatcctgagggaagggcagggatgttttttcttcttggccctcggctcccaggggcatctgccttcaactctgcatgagctttccctcccagagaccaactcttttcatttcattttattttattttatttttaaattatgtctggaagcctggctactctgcatttgggattggggatgctgggtgggggtgcagtccattgcttagtgttctagcaatgtatgtatgtgtgtgagtgtgtgtgtgtaaaggctatgcagcccaaataccatgtggccaaacgggcccacccactgacaaaaaaaaaaaa

SEQ ID NO: 1785 - DNA, 2150 bp, Cricetulus griseus
  modified_base (516)..(516): a, c, t, g, unknown or other
  modified_base (659)..(659): a, c, t, g, unknown or other
  modified_base (1894)..(1894): a, c, t, g, unknown or other
aaggcgggcaggaacacttacgccatggtgtctgatcgctcctctggtcattctctggcttcagaactggtggagtccatgatggacatgaagagatcattaaggtgtacttgaaagggaggtcaggagacaggatgatccacgagaagagcatcaaccagctgaagagtgaggtccagtacatccaggaggccaggaactgcctgcagaagctccgggaggacataagtagcaagcttgacaggaatccaggagaccctctgcagcagcaggagatacaggtggtactagaaaagccaaatggctttggtcagggtcccatgactctctacagcagcccacctgaggctgacacctgcatgactgatgatgtggagagcttgaagaagactgtgcagggattgcttgccaagctgcaggaggctgagcggcggcaccagtcaggaccgggtggtatcagcgagaagccgaacagagtaatgtggcccttcagagagaggaggacagagtggagcngaaatctgcagaagttggggagctacagaggcgcttgctggggatggagacggagcatcaagccttactgtcgaaaagtcagggaaggggagatggccttagaggagcttcggatcaagaacgctgactgccaagcagaaagngaaaaggctgctgctctcgaaaaagaagtggctgggtttcgggagaagatccaccacttggatgacatgctcaagagccagcagcggaaagttcggcagatgatagagcagctccagaattcaaaagctgtgatccaatccaaggacaccaccattcaagagctcaaggagaaaattgcctatttggaggctgagaacttagaaatgcatgaccgcatggagcatctgatagagaagcaggtcagtcatggaaacttcagcacgcagacccgtgccaagacagagaacctgggcagtgtccggatatccaagccccccagccccaagcctatgcctctcatccgcgtggtggaaacctgagcttcaggagatggatgctgctgttgctgcttggacctgcagagaagcccaccacccctgtaggctgttgatactgactctgacttcctgaccgtaccttggtggccccaggtcttgggctcatgccccaggctctgcttgctggcaggtggagcagaagtgtctgtctcctccggacatcacaggccttgagaagacattctcctgctagcaggaacaggacaatatccttactcccagttactgttttttctggtgtaacagaactcccctgctgtgtatactggaatctagctgccccaaagccaggccctcatcaagtccagagaagtgacaaaatttgtcttagtccccaaaaagctggaagcacagatgtatagtgatcggagcaagtcctgagggaatgaagttccttctgcaaacacagctcagttcttagcaacaaactgtttgtttttctacttggctccacccttgtgccatgctgtccagggcctcccacagacagtcaatggaggccagctggccagacctggtcttaaccagtgaacctaaactagatacccttgcctctctgggaacaaaggaatatgcattcagggagcaggttttttagtaggaaggttcttgaggccataaatagttgacatgacttctccccgctgtggaagctcccagtcttcaggatttcccctgtggtgtcctgaaaagcacacctcagccttcctgactgcttcctcatcagtcccagcaaaaccatcactgtatttattttgttaagttattgctggttttgcttacatctcagagttgatttagtaccagtgctctgcagtctcctgctgaggtgtttgggcttaccttgatgtgggganagtattctggttggcgccttccctctagctgctgcttttcctttcttcctcctgagtcagctcacaactcaggaggctagtttctgtccccaagtgtgtgctgtccagggaatagggcaatcaggagtgttttttcggggggggttgttcttctaacctctctgaaccctcccaccccataaccaactgtgtcccagccccgaatgaccctgcagctcattgtgtttcttatagtgtgctctagtagcctcaagag

SEQ ID NO: 1786 - DNA, 2150 bp, Cricetulus griseus
tgcggcctgcaccgtagtgcggcaattggcgtgctggtttccttgtcgtcccggtggtgtgggtttcacctaggaaacggaatggcgcttctgtgttacaaccgcggctgcggccagcgtttcgaccccgaggctaacgcagacgatgcttgcacataccacccaggtgtacctgtatttcatgatgccctgaagggttggtcttgctgtaagagaagaacaactgatttttctgacttcctaagcattgtaggctgtacaaaaggtaggcataacagtgagaagccacctgaaccagtcaagcctgaagtcaagactacagagaagaaggaactgtctgaattaaaacccaaatttcaggaacatatcattcaagcccctaaaccagttgaagcaataaaaaggccaagcccagatgagccaatgacaaacttggaattaaaaatatctgcttccctcaaacaagcacttgataaacttaaactgtcatcagggactgaagaagataagaaagaagaagacagtgatgaaattaagattgggacttcttgtaaaaatggagggtgttcaaagacataccagggtctacagagtttagacgaagtctgtgtatatcattctggagtacctattttccatgaggggatgaaatattggagctgttgtagaagaaaaacctcagattttaatacattcttagcccaagaaggctgtacaaaagggaaacacgtgtggactaaaaaagatgcagggaaaaaagttgttccatgtagacatgactggcatcaaactgggggtgaagttaccatctcagtgtatgctaaaaattcactgccagagctcagccaagtagaagcaaatagtacactgttaaatgttcacattgtatttgaaggagagaaggaatttcatcaaaatgtgaaactatggggtgtgattgatgttaaacggagttatgtaaccatgactgcaacaaagattgagatcactatgagaaaggcagagcccatgcagtgggcaagtcttgaactgcccacagccaaaaagcaggagaaacaaaaagaagatattgcagattgatgagaagagaaaaattcttatgtgtgggtgaagtagtagcttgctgctgtaatctttttgttgttcttaatcttccattttagggttatcatgaggttcttcaaagccaaagtctgttcgtttgtttgtttgtgcctcttatcttccttttgagttctgtaagatgattattcaagtgtcctcactagcagaaacatagttgttacccaacatgaagggaggaaaagaactcatgagcatatttctagtatatcttagtataaattattataagcagagaaataaaaggggtgtttttttttttgtcctgatatcgctgttacccttaaatggtaaagcaaggtgtaatataaaaaatttaattggcctttccatgaacttttgttactgtaattcttgaatatctttaaggaaaaatttatttgtttcccctatgaggtggttacttcctgtagtactaaccttgaagcagtgtagtcaccatctgtgggtactgctaacagattcatttgcaatcaatttaatgtcagaaggttacattaatgcctatagtatttgtcaagcagtataatttaagactatagaaaatatatctaagaagtatcaatttggttaaaactcatcatttcataagagtaagcaataatgtttttaaaaagtctctttttaattatttaaaggtgttttgtggtgtgttaactaaattttgtctaatttatagtctaaatcctcttagggatgatatctatcccagatgaaaactatctgtaaaattgtgaccgtgtagctttgttgaaatatattaagatatatatgtgtgaggcttgaatgtggaatgcccctgcaggcttttttgagctgttgatcccccaacttatggctctattttgaaggctgtagaacaacctttaggatgttgggtgagcctttaaggattctacacccttgccggcttgcctccagtcagggcatgtgaaccacctctgtcccgtgctctcagtgctgccgtcacagccattataaactgtatcctctgaaactgtgagccaaaataaacttttcctcccttg

SEQ ID NO: 1787 - DNA, 2150 bp, Cricetulus griseus
tcaggagctgctcagttttgcatatgattctacattcctaccagaggacttgtctttgacacactctacggaaatcttttgaaagttgatgcctatggaaacctcttggtttgtgcacatggatttaacttcataagaggaccagaaactagagagcagtatccaaataaatttatccagcgagatgacactgaaaggttttacattctgaacacactattcaatcttccagaaacctacctgttggcctgcctagtagatttttttactaattgtccaagatataccagttgtgacacaggatttaaagaaggggacctctttatgtcctaccggagcatgttccaggatgtaagggatgcagtcgactgggtccattacaagggctcccttaaggaaaagacagttgaaaatcttgagaagtatgtagtcaaagatgggaaattgccgttgcttctgagccggatgaaggaagtagggaaagtgtttcttgccactaacagtgactataaatacacagataaaatcatgacttacctgtttgatttcccacatggacccaagccaggaagctcccatcgaccgtggcagtcttactttgatctgattttagtggatgcacggaaaccactcttttttggagaaggcacagtgctacgtcaggtggacactaaaactggaaaactgaaaatcggtacctacacaggccccttgcagcatggcatcgtctactcaggaggctcatctgatacgatctgtgacctgttgggagccaagggcaaagacattttgtacattggagatcacatttttggagacattttgaagtcaaagaaacggcaggggtggagaactttcttggtgattcctgagcttgcacaggagcttcacgtctggactgacaagagttcactttttgaagaacttcagagcttggatattttcttggctgaactctacaagcaccttgacagcagtagcaatgagcgcccagacattagttccatccagagacggattaagaaagtaactcatgacatggacatgtgctatgggatgatgggaagcctcttccgcagtggctcccggcagacactctttgccagtcaagtgatgaggtatgctgacctctacgcagcgtctttcatcaacctgctgtactacccgttcagctacctcttcagagccgcccatgtcctgatgcctcatgaatcaacagtggagcacacacacgtggatatcaacgagatggaatcccctctcgccacccggaaccgcacatctgtggatttcaaagacaccgactacaagcggcaccagctcacaaggtccgttagtgagattaagccgcccaacctcttcccgctggctccccaggagattacacactgccatgatgaagacgacgatgaagaggaggaagaggaagaataaggaggcaaactaaaaccctgagcacccatcagcaagtctggcaggactcacggggcaagggtggccttgtttcgattctgttagggagggtgggtggccctcatcagaagtacatttggaaagtttcagaaggctttaaataattctaatcatagctggtggccctggcaaggctgctgctgtgttggttccttcctgggtttccttgctggagtgattttagactagaccacaggggtttgaatttgaggcacaagtcctcatccttgctacattttaaaaaattggtagcacaaatgcttttttgttaaataaaaacaatccttttggggaatgtcgctgaagatgcagaggcacaagttcccagagaacagcagctgaagtcatgtgactgccctgccagtgcagggagttgcccaacacttggaacacttttctagattcttgctttagctttcatttgttttcttccattcttggccctggtcactagggtactggctgctctagagcttagtaaagtgtatgtctaatgctgacaccactcttgtgtaaaacagctgtcaactgtcacagccgttggtctgcagatggctttaggcttggcatgctctcaaaggaaatcacattttcaagattgctaactatatctgtatcacttttagttcaagaacatgctcttatgtacagtgtttcataggtataaagattttttt

SEQ ID NO: 1788 - DNA, 2148 bp, Cricetulus griseus
gctgattcccctttgctatggataaggatagaaccggatatgtcaatcctgaggaaggtggaatttgagcaggctgattttatgtggcagtatgagcttggctatgaaagagatgtcattgctcagcaggaatctatcctggccttggaaaaattccccacccgggccagcatcatgtctctcactcactgatattctagaacaagagcagtgtttctacccagtgaggatgtcagctgcttctgtcttgcgaagaaaataagttttcagataactattaccgtgcagaaatgattgatgctctggctaattctgttacacctgctgtcagtgtgaataatgaagttagaactttggataacttaaatcctgatgttcgactaattctggaagaaataacccggtttttgaatatggagaagcttctcccaagttacaggcacactatcactgtcagttgcttgagagccataagggtgcttcagaagaacggacatgtgccaagtgattcttctcttttcaaatcctatgctgagtatgggcatttcgtggacatcaggatagcggctctggaagccgttgtggattacactaaagtggaccggagttgtgaagaacttcagtggctacttaatatgattcagactgaccctgttccatatgtaaggcataagattctaaacatgttgactaagaatccgccatttacaaagaacatggagtctcccttatgcaatgaagccctagtagatcaactgtggaaactaatgaattctggtactgcacatgactggaggttacggtgtggtgctgtggacttgtacttcactctctttggcctcagtagaccttcctgtttacccttgccagaactcgggcttgtcctcaatctaaaagagaaaaaagccgtcttgaatcctaccataattccagaagccggagcaggcaaccaggaatcctcgagtaacccaggctctcatgctcagctcgctggatttccagaacccttttccaagttctcaagatgaggaggaggtcgatatggatactgttcatgacagtcaggccttcatttcccatcatctgaacatgcttgaaaggccatctactccagggctttctaaatatcgcccatcaagctccaggtcttccttaatgcctcagcattcattaggctgtgacatcataccaaccacaaaaccccagtggactatggaactgtcccgaaagggaataggtaaggagcagcctttggagatgagtgtgcattgcatgggagcagctccgctctcgatgtttggtaaggagtctacgtcctctagacacagcgaccaccatcaccatcatcaccatgagcacaagaagaagaagaagaagcacaagcacaaacataagcacaaacacaagcacgacagcaaagacaaggacaaggagccctttgccttctccagccctgccagcggcaggtctgtgcgctccccgtcactctcggactgaagcttcttcctgaaaacacagagcgaccacttttttacaaaagccttcatatccattgccaggtccattcacatcctggtctcctatggaataccaaggtcaggtatgcttgaaagcctttgatggatgtcatgggcagaaagacatttcaacagaagcaactgccagatctgtggtacccagtgttttcatgaagtgctgagtaacaccactcggaattgctggaaagacaggcttttctataggactaatccctcttggctgctttttgtgttagccatagaaagtaagtgccatcattatgagcaaagactattatatttccttttaccctacagtccaaaaagttttgaaagaaattatttttgaaaacatttaatgtaactatctttgatagtgcatttggtgattttgatgttgcaatttagcagaacagccaggtccaccaccattatcaaatcaaatcaagatgtgaaaagaaattttgttttgtcttccattaagtaaaagtgaatgtgttcatatgtaaaatgtgttgctgaatgtgggcagtatatacacggaacaaagcaccccttctaaaattcctctgtgatataaggctgcctggtgctgcttgcctgtagtcccagcatttgagagataggagga

SEQ ID NO: 1789 - DNA, 2147 bp, Cricetulus griseus
actctgcgagcttctggcacacgtgtgcgaattgctatgatggaagtcaaagagaagaaaaaattcacaggaaaaagtccaaagacagcacaaggaaagactagatttcataaaaaccgtgattctggttcttcaaagacattcccacagaaagttgtcaaggaaggtggccctaaagtgtcatctaagaactttgagaaaggtgccacaaaacctggcaaaaagggtgtgaagcagttcaagaacaagccacaagggggcaaaggaccgaaggacaaattccagaagccaaatacattcaacaagaagaggaagttccagccagatggtaaaagcgacgaatcagcagccaagaaacccaaatgggatgacttcaaaaagaagaagaaagagctgaagcagagcaggcagctcagtgataagaccaactatgacatcgtggttcgagcaaagcacatttgggagagcttgagaagaaaagactgtgataaagaaaaaagaaggaagctgatgagtgatttgcagaaattgattcaagggaaaattaaaactattgctttcgcacatgactcgacacgtgtgatccagtgcttcattcagtatggaaatgaagagcagaggaagcaggcttttgaagaactacaaggtgacttggttgaactaagtaaagccaaatattccaggaatattgtcaagaaatttctcatgtatggaagtaaaccacagatagcagagataatcagaagttttaaaggtcacgtgaggaagatgctgcgacattcagaggcatcagccatcgtggagtatgcgtacaatgacaaagccattttggaacagaggaacatgctgaccgaggagctctatgggaacacgtttcagctttacaagtcagcagatcacccaactctgggcaaggtgctggaggtgcagccgggaaagctagagcttattatggatgaaatgaagcagattctgactccgatggcccagaaggaagctgtgattaagcactccctggtccataaagtgttcttggacttttttacctatgcacccccaaaacttcgatcagaattaattgaagccatccgggaagcagtggtatacctagcccacacacacgatggtgccagagtggccatgcactgcttgtggcatggtacacccaaggacaggaaagtgatcgtgaaaacaatgaagacatacgttgaaaaggtggccaatggccaatactctcatttggttttactggcagcatttgattgtattgatgacactaagcttgtgaagcagataatcatatcagaaatcatcagttccttacccagcatcgtaaatgacaaatatgggaggaaagtcctgctgtacttgctgagtcccagagatcctgcccacacagtccgagaaatcatcgagcttctgcagaagggtgatggcaatgcacacagtaagaaagacactgccatccgccggcgtgagctcttagaatccatctctccagctttgctaaaccacctgcaaggacatgctcgagaggtggtgctggacaagtctgcgtgtgtgttggtgtctgacatcctgggatctgctactggagatgttcagcctgccatggatgccatcgccagtttggcagcagtagaactacatcctggtggcaaggatggagagcttcatgttgccgagcatcccgcaggacatctcgttctcaaatggttaatagagcaagataaaaagatgaaagacaatggaagagaaggttgttttgcaaaaacccttatagagcgggttggcatgaagaacctcaagtcctgggccagcatcaatcgaggtgccattattctttccagccttcttcagagctgtgaccaggaagttgtaaacaaagtcaaagctggactgaaaagcctgattccaacgttggaaaaaaacaaagcaccagcaaaggagtagaaattctgctagaaaagctaactgcataggcgcgctggacaagcaagctggaacctgcttcccacggataagaagggcggatccaccgtactcaaaactggacactctaaacatgtattctttgttaaaggacctatttatataaagttgtttctaaaagacactttttgctttatgccaactttctgacctgt

SEQ ID NO: 1790 - DNA, 2147 bp, Cricetulus griseus
tcctgccgcctcccgcgccccgcggggctgcggatggagctccatcgcggcggcgtggggagccaggctgcgggccggaggatggatggggactgcgatggcggctgcggcagcaaggacgccgggtcggaggactacgagaacctaccgaccagcgcctcggtgtccacccacatgacagcgggagcgatggctgggattctggaacactccgtcatgtacccgttggactccgtgaagacacgaatgcagagtttgaatccagatcccaaagccaagtatacaagcatctatggcgccctcaagaagatcatacaaacggaaggcttctggaggcccctgaagggtctgaatgtgatggtgatgggtgcagggcccgcacatgccatgtattttgcctgctacgaaaacatgaaaaggactttaaatgacgttttcagccaccatggaaacagccacctagctaatgggatagctgggggtatggccaccctactccacgatgcagtaatgaatccggcagaagtggtgaagcaacgcttacagatgtacaactcacagtaccagtcagccctcaattgtatccggacggtgtggcggaccgaggggttgggggccttctacaggagttataccacacagctgaccatgaacatacccttccagtctatccatttcatcacctacgagttcctgcaggagaaggtcaacccactgcgaaactacaacccacagtctcacatcatctcgggcggtctggccggtgcgctggctgcagctgccaccaccccactggatgtctgcaagaccctcctcaacacgcaggaaaacatggcgctctccctggccaatgtcaatggtcggttgacgggcatggccaatgccttcaggacggtctaccagctcaacggccttgctggctatttcaaaggtatccacgctcgagtcatttaccagatgccttccaccgccatctcctggtccgtctatgagttcttcaagtatttccttacgaagcggcagctggagagccgaactctgtactaaaggaacgggcagtgggaagtggtcccagcatcttttgttcctgcctcaccccttgttctcatacccaggccctgtcctgcagggtgctcgcgccgggcgggcccttcattccctgcctggtgcccgagaaagggaggaccagcctccactgccgggaaggctgtctgtgggaatgtcccagatgatgggaggtgggaaaaacttgggaaggagaatgagaagttgctttttctcctgtctctaggggagtgtagcttttctgcagccctgtggccttctcttctctctccctagatctttagatcacaccgcagaggagagcggtgacacagtaaagaagagtttatgtacataaaagtaccattacccagtctaaaataggtggataatgtttatcctttatttttctacatagagatttttgaaattgtgtgtgcttgtgtgtgtccataaataggattagagttgggatgatgtacctgttttttgctgactaatcctgctgcaaaagcaatattgtcattggcatctttggagtgacatccaaggatggaccatgccacctgagtatactgttaatacttgagctgtgtgtgtgtgtgtgtgttcttatgttcaggccatggcagtcaccctcttaatagataagtgttaatttattatagactaaaacattgatcttttaaaaatggaatgttcttaattcatgactatattttaaagaatggattaaatatagctacttttatgtgtacttgtgagccaattgcccctcccccccatgtcttaacagccacaatcttccaaatgtcattcccaaggctgtatctccaacacactgctatgctagtaaggttttatttaactttatttatgggtaattgtgtctgtggaaaacagatgtgccgctgccagtcccacagtgtgtgggataagagtggtccagtgttattttctgaatgttttaaaatgcctgtggtcaagactgtttttgccttgtgacttctgagtatggggagctgtagtatattcccatgtgggggtgtctgctgtgctgctacagttgtaacactggagctggagaaaataaagcattgatc

SEQ ID NO: 1791 - DNA, 2147 bp, Cricetulus griseus
  modified_base (12)..(12): a, c, t, g, unknown or other
actttttttttntttttttctatttctttattttttgagtcccctcaaggacggagtcttcaccactcactcagatgtctggtcctttggggtcgtcctctgggagattgctacactggctgagcagccataccaaggcttgtccaatgagcaagttcttcgcttcgtcatggagggcgccttctggacaagccggacaattgccctgacatgctgtttgaactcatgcgcatgtgagatggagcccagctttcaggaggtctccttctactacagcgaggagaacaagcctcctgagccagaagagctggagctggaactggagcccgagaacatggagagcgtaccgctggacccctcggcctcctcagtctccctgcctctgccagaaagcactcaggacacaaggccagaatggcccaggccctggagtactggttctccgtgccagtttcgatgagcgacagccttacgctcacatgaacgggggtttggggtttttttttattattacttttgtatttgtctgatgtcttttcatttcctgggctaagcagcagcattgggagacctggaccagaaagatccactccttctgaaccagtgatgatggtcagactttctcactctgctctgaactaggtggtggtacaaatgagaacttcaagataggatgtttgtttgaagtgaacctctcttgccagaggtactgaagatagagaccttggacagttcagagggcttcttcactttgggcctccgactttgacacccggatggttatttagagacgcaaactccttgatggaatgatgggatgaccatgcattaggaagccatggtaactgagatagtgacatgaagagaattggggacagaggcataagggcttggaagaagcctggaccacatttggacgtgatggttctgatggcgtgagaccacgtcgaggctgtggagtcatcgtgggcattggttcagataataaacttagcattgtgctctggaaacttacagagctaagtcacatgtggagaactcagactccatcacccctcaccagttgagttgtctggggcatgctagggatttatttattttgtttatgtgagaacttcataatcactgatttgtgtgtccacatttgtgtctgcatctttccagtaaacattttttttaactagtcactcattatcgtttccaatcgggcttctaagtccagtagattacgggtagtcagttgacgaagatctggtttacaagaactaattaaatgtttcattgcatttttgtaagaacatagaataattttataaaatgtttgtagtttataattgccggaagtaatttaaaacacttttccccctctgtgtgtgcaaatatgtgtttgtgttcttttttatgggagggcttcaggacacagactggcttcacggtgatcacacaattctgatgtgcaagcctttggcatacatacatatgtgcctcagatcccaatgaaggctgtgcctacttatatttaaggccgaatgctgaaggtacatttttccaatacagaacaaactctttaacaaaaaccacaacatgttcccccaccccatttttttaagagttaaaatccatgtcctttggctcccagcgcattattggccatgtctctaccgttccagaagataccattgttgaaaacatctggaattgtctaactatgggggaaagtctaggaaccatttgtgggttgggttgatggaacagatgcatcgccaataatgcattttctgaagttgttcttagttaaaaaattttttactttaaaaaaaaaaaaaaaaagtttttaaaaaaagaatgtcaatatgcccaatttgttacataaaataactttctgtgtataaattattcctttaaaaaaaccctctgtttatatttaaaaaaatcaatagatgaaaaaattcaatgtttttgtatattctgttgtaagaatttattcctgttactgcgacatactcgggattctttacattatgaaaaagaaactttgtctattttgaatggctaaagctaaggccacttgagtttctattactctgtcttttttctagtagttaaagtaccacatgggttaagttaaaataaaagaattctgtatg

SEQ ID NO: 1792 - DNA, 2147 bp, Cricetulus griseus
gcctcttctgctgtccaccttgccctgggaaaattgcttcaaaattagcatttttgtcctacctgatccaacttacacactgatgtgtgatgaaagtggaagccgctggactttacacctgtcagaaagagcggactggcaatactcttccagagaaaaagatgctattgagtgtttcatgacaagaaccagtaaaggcaatagaattgcttgtatgtttgtgcgttgttcacccaatgctaaatataccttactcttctcacatggcaatgctgttgatcttggtcagatgagcagcttttacataggtctggggtcccggattaattgtaatatattctcatatgattactctggatacggtgctagttctggaaagccaacagagaagaacctgtatgcagatgttgaagctgcctggctggctcttcggacaagatacggcattcgtcctgaaaatgtgattatatatggccagagcatagggacagtaccatctgtggatcttgctgctcggtatgagagtgctgctgtcattcttcattctcctttgacctcaggaatgcgagttgctttccctgataccaagaagacctactgctttgatgcattcccaaatattgacaaaatctctaagataacctctccagtattaataattcatgggactgaagatgaagtcattgacttttcgcatggcctcgcgttatttgaacgttgccaaagacctgtggagcctctgtgggttgaaggggcaggacacaatgacgtggagctttacggacaataccttgagaggttaaaacagtttgtgtcacaggaactggtaaatttgtaaactactctgtaaatttgcatactgggttttcttttcttgctgaactgcactccttggtaaataacataaaacctgaaggttttgtttacaaatcatgtatgttgccttcataactgtacaggtaatgatttgttaacagacttaatgaaggttttaattaccagaactagaaactggaaatagcagtatcatgcagtcaggctgtgtaatttatattttttctgtgaattttttttaaacatcaagatgagtactgtatgaaattttaattctataaaatcagatgctgtaaaagtattgccaaatgcttttgcatatcaaaagcaaatttataaatatttttaaacatctcaatgtactaaatatcctggtatacaaatataatattctttcaaaaagctgtatatctaaagcaattcaagtactcagaataaactgtaaaaaaacaaaactatgaaagcacccacattaactagagtgacctatgctctgttgtacagggatagaggcttaaatggttattttattgtaaaaatacattaacttttctgtattctccaattatagtacattatcctaaaaaaaaatgaagtcttaatttttatgccatctgttaacttaccagccattcatcgtgtaaatgagaagtcctgatggcgctgatttttaactagttttgatttatgtttggtactgtgagacaactacttaagattttcagttatttaaaagacatttagggcttcaagaatgattttgtatgcaatgttgttttaaaattttgactaattattagaattgtagtagtcttccttatatgaatacttgaaactccattagttgttcttcaagactacagacagactcactggtccctttccaccttggctgtttttaagagtagggcctgttcttttggattactatctgataatgtcatgggttcactcctgaattcaggggataagaaaacatgtcatacattttatattaaccagtatagtaaaaataaataaaaaaataaataaagctcacacacaaaaactaagttgcctttccttgaatgaatcttgcctgaataaatgaaagtaaaataaaaattaaactaatggtatgtagtctaatttgtaatgaatgagaattgaaataatacacactgtggatgtttttaaggccttatgtagttttaattgttctgcttgttctgtggttatgtctaagacactagtatatgattctttaaagtatatcaagtattgtgaatgctttggttcagatatgtcaaattaacagtaaaacaacaaatgta

SEQ ID NO: 1793 - DNA, 2146 bp, Cricetulus griseus
catccctgggttaccccggtctctgggggccacggataccatgaacgacgtagccattgtgaaggagggctggctgcacaaacgaggggaatacattaaaacctggcggccacgctacttcctcctcaagaatgacggcacctttattggctacaaggaacggcctcagggacgtggagcatcgcgagtccccccctcaacaacttctcagtggcacaatgccagctgatgaagacagaacggccacgtcccaacaccttcatcatccgctgtctgcagtggaccactgtcattgagcgcaccttccatgtggaaacacccgaggagcgagaagaatggaccactgccatccagactgtggctgatggactcaagaggcaggaggaagagacgatggacttccgatcaggttctcccagtgacaactctggggctgaggagatggaggtgtccctggccaagcccaagcatcgtgtgaccatgaacgagtttgagtacctgaaactcctgggcaagggcacctttgggaaggtgatcctggtgaaggagaaggccacgggccgctactatgccatgaagatcctcaagaaggaggtcatcgttgccaaggacgaggttgcccacacacttactgagaaccgcgtcctgcagaactccaggcatcccttccttaccgccctgaagtactcattccagacccatgaccgcctctgctttgtcatggaatatgccaatgggggcgagctcttcttccatctatcccgtgagcgtgtgttttccgaggaccgggctcgcttctatggtgcagagatcgtgtcagccctggactatctgcactctgagaagaatgtggtataccgggacctgaagctggagaacctcatgctggacaaggatgggcacatcaagataacagactttgggctgtgcaaggaagggatcaaggatggtgccactatgaagaccttctgcggaacacctgagtacctggcccctgaggtgctggaggacaacgactatggccgtgcagtggattggtgggggctgggcgtggtcatgtatgagatgatgtgtggccgcctgcccttctacaaccaggaccacgagaagctgttcgagcttatcctcatggaggagatccgcttcccacgcacgcttggccctgaggccaagtccctgctctctgggctgctcaagaaagaccccacacagaggcttggcgggggctccgaggatgccaaggagatcatgcagcaccgcttctttgccaacatcgtgtggcaggatgtgtatgagaagaagctgagcccacctttcaagccccaggtcacctctgagactgacaccaggtatttcgatgaggaattcacagcccagatgatcactatcacaccgcctgatcaagatgacagcatggagtgtgtagacagcgagaggaggccacacttcccccagttttcctactcagccagtgggacagcctgaggcctggggcagcagctggcagctatcactcctttgcattgcgagtccagaagccccgcatggatcatctgtatctgatggttttgtttcttggaagcgctggggaggaaccttgccagcctccaggaccaggggagaatgtttctactgtgggcagcagcctacctcccagccaggtcaggaggaaaattatcctggggtttttcttaatttatttcatccaatttgagggcacatgtggcctcagtgcccagaacaattagattcgtgtagaaaaatattaaggacttctgagaccatgtgcaatgtgggctcatgggtctaggtgggtcctgtcactgttccatcgacctggctaccctggctgccacctgtctttagggtccagggccaccgtccaaccggagggcaccagaaacacctccctgttgtatgctggctggctctctccctcctgagagtgtctgcctcatgagctcttctcttagcacttgtcctttagatgctttccttctccagctgtccccctggcctgtcccctcctggccagacactgtggccattgctgcaccatgtcgttttttacaacagtcaacttcagcatttttactattataataagaaactgtccctccaaattcaataaaaattgcttttcaag

SEQ ID NO: 1794 - DNA, 2145 bp, Cricetulus griseus
gggtctcatgagcctaaagcagctctctgcagctattgccttagttggaggcatcagccagcagctacaggagcgcaaggcagaggccctggcccagataagtgcagcctttgaggacctggagcaagccctgcagcagcgcaagcaggctctggtcagcgacttggagagcatttgcggggccaagcaaaggtgttgcagacacagttagacacactgcgccagggtcaggaacacattggcagtagctgcagcttcgcagagcaggcactgagactgggttctgcccctgaggtattgctagtgagaaagcacatgcgagagaggctggctgcactggcagcccaggccttcccagaaaggccacatgagaatgcacagctggaactggtccttgaagtagatgggttgcggagatcggtgctcaatctgggtgcattgctcaccaccagtgccactgcacatgagacagtggccacaggcgagggcctgcgccaggcactagtgggccagcctgcttcactcactgtcaccaccaaagacaaagatgggcggctggtacgcacaggcagtgcagagctgtgtgcagagatcactggtcctgatggcacacgccttgcggtgccagtggtggaccacaagaatggcacatatgagctggtgtacactgcacgcacagaaggtgacctgctcctctcagtgctactctatggacagccagttcgtggcagccccttccgtgtgcgtgccctgcgacctggggacctgccaccttccccagatgatgtgaagcgccgggtcaagtctcccggtggtcctggcagccatgtacgccagaaagcagtgcgcaggcccagttccatgtacagcactggtggcaaacggaaggacaacccaattgaggatgaactcgtctttcgtgttggcagccgtggaagggagaagggtgaattcaccaatttgcaaggtgtgtctgccgcaagcagtggccgcatagtggtagcagacagcaacaaccaatgtattcaggttttctccaatgagggccagttcaagttccgatttggggtccgtgggcgctcacctgggcaactacagcgtcccacaggtgtggccgtggacaccaatggagacattattgtggcagactatgacaaccgttgggtcagcatcttctcccctgagggcaagttcaagaccaaggttggagctggccgcctcatgggacccaagggagtggccgtggaccggaatggacatatcattgtggtagacaacaaatcttgctgtgtcttcaccttccagcccaatggcaagctggttgggcgttttggaggccgtggggccactgaccgccactttgcagggccccactttgtggctgtgaacaacaagaacgagattgtagtaacagatttccataaccactcagtgaaggtgtacagtgctgatggagagttcctcttcaaatttggctcacatggcgagggcaatggacagttcaatgcccccacgggagtagctgtggattccaatgggaacatcattgtggccgactggggcaacagccgaatccaggtattcgacagctctggctccttcctgtcctatatcaacacatctgcagagccactatatggcccacagggcttggcattgacctcggatggccacgtggtagtagctgatgctggcaaccactgctttaaggcctatcgctacctccagtagctgcagaagggccctacttggcttatggagggacggacataggggtgattggacaagagggtctggctaagaggtgggccagacccagcagcactgaatgtgggctgtgggcatgggtgtgcccagtgcccttcccttcctccccaaccccacggttgcactttatttattcggttcttgctttggtgactgggtgggcctggactggtcccaaggatgtgtgcagagcttcaccctacccccttacacacacctcccccttacaccctcagtctgctctctgccccctggcctggggccagaaaagcctcttacttcaaacagaagtccctctggttgtctccctaccaccccatacacactgacagagacagcaataccccaccccatactaaataaatgtgttcgccaagg

SEQ ID NO: 1795 - DNA, 2145 bp, Cricetulus griseus
tctcctctcctgtcgcttgtctcctcttctctcgctcttctctccgcctcgtcaggttcggctaagagtgagtggcaagatggcggcgcccaggatgccaccctcccggctgtcgggcgttatggtgccagcacccatccaggacttggaggccctgcgcgccctcaccgcgctcttcaaggagtaccgtaaccgggaaacagcacccagaacgatcttccagagagtcttggatatcttaaagaaatctactcacgctgttgagctggcctgcagggacccttcccaagtggagcacctggcttccagtcttcagctaatcacagaatgtttcagatgtcttcggaatgcttgtatagagtgctctgtgaaccagaattcaatcaggaacctggatacaattggcgttgccgttgatttggttcttctctttcgtgaacttcgagtggaacaagactctttgttgacagcttttcgttgtggcctccagtttttaggcaacattgcctcacggaatgaagattcccaatccattgtttgggtccatgctttcccagaactctttatgtcttgcttaaatcatccagacaaaaagattgttgcctactgttcaatgattttgttcacatctcttaatcctgagagaatgaaagacctggaagaaaacctcaatattgcgattaatgtcatagaagctcaccaaaagcatccagagtcagaatggccgttcttgattattacagaccactttctgaaaagcccggagttggtggaagccatgtattccaaactcagcaaccaggaaagggttacactgttagacattatgatagccaagctagtgggtgacgaacagctgacaaaggatgacatctctatatttttgcgccatgctgagttgattgcaaactcatttgtggatcagtgtaggaatgtgctaaagttgacttcagagcctcacactgaggataaggaagcactggctaccattcggcttctggacgttctgtgtgaaatgacatccaacacggagcttttgggctacctgcaggtttttcctggcctgatggaacgagtgattgatgttttacgggtgattcatgtaactggaaaagatacctcgaacatcttcagtccctctgattctctaaaagcagaaggtgacatcgaacacatggctgaagggtttaaatctcatctcattcgtctgattggaaatctgtgttacaagaataaagaaaaccaagataaagtgaatgagctggatggcattcctctgatcctggacagcagcaacatcgatgacaacaacccctttatgatgcagtgggtggtgtatgctgtgcgaaatctcactgaagacaacagccaaaatcaagatttcattgctaaaatggaggagcaggggttggcagacgcatctctgctgaagaaaatgggttttgaagttgaaaagagtggggagaaactgattctgaagtctaataacgacatccccccaccttgaatgacctcttcatctcaacatgttcagattccatctcatggatctctcatctctgcagtatatgaaatcccaagtattggaaatgtagagcacagatgcgggaatctctcagccctttagagttcaatgtgtgtaagctacaagtggactattttcttttttctttgcagtaagtgtaactgtctgccttacctttgtccccttgggtagagcgcgctttccagtcatttaccttgtgcttaccattgtagtaataaacatttttgagggcatagcccctacttggcaaagactgggacccttgattggatcctgtgcatcctttcagatggcaagtatgcttcattcctttgattctctgcttttcattggatttctgaactctggcgggcacttgaagtaagtttctcactgtgattaattctaccaatctcttttctacccttctgcctttccaaaacattgacatgactcatttccagttaattaatttgagaaccctccctcttcatttcatgcactgtgttgtcactgagccctgtcctttggaagttagaaaagagtgagaatgggtgaaagaacatgtggcacttaactgtttgcatcccaggttgacttagagttatggattccataaa

SEQ ID NO: 1796 - DNA, 2144 bp, Cricetulus griseus
tggtaccatggctgtgttcgtcgctctcctgtccttgctggtgacgggtgttttagggaatgaatttagcatattaagaacaccagggtctgttgttttccgaaatggaaattggcctataccaggagatcgaatcccagacgtggctgcattgtccatgggcttctctgtgaaagaagacctatcgtggccagggcttgccgtgggtaacctattccaccggccacgggctaccattatggtgatggtgaagggagtggacaaactggatctccccgtgggcagtgtcatctcctaccctttggagaatgcggttccttttagtcttgacagtgttgcaaattccattcactccttattttctgaagaaactcctgtagttttgcagttggctcccagtgaggaaagagtgtatatggtgggaaaagcaaactccgttttcgaagacctttcagtcactttacggcaactacgtaaccgcctgtttcaagaaaactctgttctcagctctcttcccctcaattctctgaataggaataatgaagctgacctgctctttctttcggaactgcaagtgctacatgatatttccagtttgttgtctcgtcataagcatctagccaaggatcattctcctgacttgtattccctggagctggcgggtttggatgaacttgggaagcactatggggaagactctgaccaattcagggatgcttccaagatccttgtggatgctctccaaaagtttgcagatgacatgtatggtctctatggtgggaatgcagtggtagagttagtgactgtcaagtcatttgacacatcctttgtgaggaagtcacggaccatccttgagacagagcaagagacctcccaaagtccctataaccttgcatataagtataattttgagtattcagtggttttcaacttggtactgtggattatgatcggcttggccttggctgtgattatcacctcttacaacatttggaatatggatcctggatatgatagcatcatttacaggatgacaaaccagaaaattcgaatggattgagtttgccttatgctacccttagcaggtttgggaactggttgttctgttagagtatatcttttagtatagtttaaagtagacagtatagtataccttaaatttattttaaagaaaacatagatttttgttctctattttgtgtgtgcctgtggtttctttagagtgattcatagtgttgacataaattgatatagattccataatatgcttaaatgttgttgacatagtcatttaataatgtaatttcattccatttaatacatttggaaatgtgcactgaaagaaatgtaaaccacttagaatagttgtgttattcatgttggagaatgcactggggttcttagagaagctttcaaatgcttgagttccttgcacgggacagataagtcctgatgcagctgttattcactatgaaccatttgtaaatgtcttaatctgatgtaaatatctatgagacaggaggcaaggttttaactaagagtagcccaaaaatactggatatgcttatacaatcgcttagttttggaagtgtgcgtggttggcaggctagctgtttttaatcttttctgcaactttggtgatccgtgcagtttagtagagatattcaaaatattaaagatactgtgttgatttcagaagagaatagctttgtggtgtatagatgcttgtaattagatataaaaaaacaaatctgtgggggatatcttgaagcatgaatataaaatatttttatttccataacttccccccccctgtgaacttactctggtttgtatatggtacggcttcattctgtagaatattaagtggaagtggatgattgctactgttcatgtggaaatggaccaatatctatatagagtgacaaataaagttaatgattcaaaatctgtgtcattgcaattgtaaatttatattatggaaacctaattaaacaggctgttatttcatcagaactggctgttttattagacgaagggttgatactgttttctacatttgctttattgtctcattgcctcctgggtctttgtaccaatgtaaggaggtatcttaattccattcttgttattgaacttgtgca

SEQ ID NO: 1797 - DNA, 2144 bp, Cricetulus griseus
agctgctgaatgaggctgtagatggataagaatgcttttgtagaaaaaatataacaccgttggagtaatattttccgaaccaccagttattctgtcaagatgtacttaaattgcagcctggcaaagtcggtattgtcagcaatgggaaattcttaggacctttacatgaagagttctacgtagaagattttcacttgattgaaaagacaacatttagtaactcagtagagaaaattaaagacattgttgaaaatatggaaatcaactcaaaacacttgagtgaccttgtgatgaaaatagatgcgcttgtgtcttccctgcctgtgcgcagctcccagcccatcacactcctcagagaggatcacagtgttataaagataaatcctccagagaatgatctgttctttgatgtcattgctattgtggatcctttgacaagagaagctcagaagatggcacagctattggttgtgcttggcaagattgtgaacacgaggataaagcttttcatgaactgcaggagcaagctttcggaagcccctttaggaagcttttaccgttttgttctggaaccagaactgatgtcaggggctaacagtagtccttctgatggaccagtggcaaaattcctggacatcccagaatctcaccttctaactctcaacatgattaccccagaaggatggttggttgaaacagtacggagcaactgtgaccttgataatattaatttaaaagataccgggggattgccacagccgagtatgagctagagcatctgctccttgaaggacactgctttgatttgacaacagaacagccccctcagggtctgcagtttacactgggcacagaaaacaaccctgccgtagttgacacaatagtgatggccaatcttgggtattttcaattaaaagcaaacccaggtgcatggatactgaaattacgtgaaggaaaatctgaagatatttatgatatagttgggcatgaaggaacagactcagaaactgacatgggagatgtcatcgttgtgttggacactttcaagagtaagatcctgaaaattgaggtaaagaaaaaatcaggtaaaattatggaagacatccttgcagataaacatgaagataaaggcatgtgggagtcaattaaaagcttcgcaaaaagcctgcataaagatgacaaaaaggaaaatgacatcctaaacattttttcggttgcttctggccatttgtatgaacgttttctacggatcatgatgctttccgtcctgcagcacacgaaaacaccagtgaagttctggtttctgaagaattacctttcgccaacatttaaagaggtgattcctcacatggccaaagagtacggattccaatatgaacttgtgcaatataagtggccccgttggcttcaccaacagactgaaaagcagcgaatcatttggggttacaagattcttttcctcgacgtgcttttcccactagcagtggacaaaatcatatttgttgatgctgaccagattgtgagacatgacctgaaagaacttcgagattttgatctgggcggagctccttatggatacactccattctgtgatagccgcactgacatggatggatatcgtttctggaaaacagggtactgggcatcacatcttatgaaaaggaaataccacatcagtgccttgtatgtggtggatctcaagaagttccggagaatttcagcaggtgataggctccggggccgataccaagctcttagccaagatccaaatagtctttcaaacctagatcaggatcttcccaacaatatgatttaccaagttgccattaagtctcttcctcaagactggctgtggtgtgaaacctggtgtgatgatgaatctaaacagagagccaaaacaattgatctgtgcaataatcccaaaacaaaggaacccaaactggaagctgctgcaaggattgtcccagagtgggtcaaatacgatgcagagataagaacattattagatcatcttgaaaataggaaaaatgcaatttccacacatgatgaactctagcgctggtttccagaggataaataggatgaaaatctgccacctgctgggaatttgtgaaactgctaaaactagtaggacatttcattca

SEQ ID NO: 1798 - DNA, 2143 bp, Cricetulus griseus
tgtgggtagccctgatcagctcatggtaacacaaaagggaaatgtgttggcagtgatgagcaattggggaaggtggtgtacaatgctttggaaacatgatcaagtcagacccttcaggcaatttaactggcatggttggcactgctctctatgtaagccctgaggtccaaggaagcaccaagtctgcatacaaccagaaagtagatctcttcagcctgggaattatcttctttgagatgtcctatcaccccatggtgacagcctcggaaagaattttcgttctcaaccagcttcgagatcccacatcgcccaagttcccggaggactttgatgatggagagcatacaaagcagaaatctgtcatctcctggctgttgaaccatgatccagcaaaacggccgacagccacagagctgctcaagagtgagctgctgcccccgccacagatggaggagtcggagctgcatgaagtgctgcaccacaccctggccaacataggaccgggaaggcctaccgcaccatgatgggccaaatcttctcccagcacatctcgcctgccatcgactacacctacgacagtgacatccacttcaggaaagaaattacagcattcacttgaaccatacagtgttactgaaggcaatactcctacactgtgggattccagaagataaactcagtcaggtctacgttattctgtatgatgctgtgactgagaagctgacaaggagagaggtggaagctaaaattctgtaacctgtcattgtcctctaatagtctgtgtcgactctacaagttcatcgagcagaagggggatttgcaagacctaaccccaacaataaactcactaataaaacagaaaacaggtgttgcccagttggtgaaatatagcttaaaagacctggaggaagttgtcgggctgctgaaaaagctgggtgtgaagttacaggtctccatcaacctaggcttggtttacaaggtgcagcagcacactggcatcatcttccagttcctggcattcagcagacgcaggcaaagggctgtgcctgagatccttgcagctggcggcagatatgacctgctgattcccaagttcagaggcccacaggctctggggccagtccccgctgctgttggtgtcagcatagccatagacaagatattcgctgctgtcctcaacatggaagagcctgttacagtaagttcctgtgacctcctggttgtcagtgtcggccagatgtccatgtccagggccatcaacctaacccagaaactctggacagcgggaatcactgcagagatcatgtacgactggtcacagtcccaagaagaattacaagagtactgcagacatcatgaaatcacctatgtggccctggtctctgataaagaaggaagccatgttaaggtcaagtcctttgagaaagagaggcaaacagagaagcgtgtattggagtcagatcttgtggatcatgttatgcagaaactgaggaccaaagtcagtgatgaaaggaatatcagagaagcttctgataatcttgctgtacaaactgtgaaggggtcgttttctaatgcttcaggtttgtttgaaatccatggaacaacagtagtccccactgtgagtatcatatctccagaaaagctgtcagccagcaccaggaggcgacatgagactcaggtacaaacccgacttcaaaccgcccttgccaatttacatcagaaaagcagtgaaattgaaattttggctgtggatctaccaaaagaaacaatcttacaatttttatcgttagagtgggatgctgatgaacaggcatttaacacaactgtgaagcagctactgtcacgcctgccaaagcaaagatacctcaaactcgtctgtgatgagatttataacatcaaggttgaaaagaaagtgtcggtgctgttcctgtacagctacagagatgactactacagaatcctattttgaccctgaggaactgttgctgcattgttcaaatggacagaggcttatactggataatggaatgttgtacattcattttaacttaaattctaataagctgtcctacaaagttgagctttgtcggtctttcatgtatgttataaatttatctttttggatacaataaatgctttcata

SEQ ID NO: 1799 - DNA, 2142 bp, Cricetulus griseus
cggaggaggaggaggaggaggaggaggattgtatgttactccagaaaaggtctgtgcaagtaacaggctgatttccactctggagaatctatatgatcggaagctcttggcacgctttgtcattgatgaagcacattgtgtgagtcagtggggtcatgattttcgtcaagattacaaaaggatgaatatgcttcgccagaagtttccttcggttccagtgatggctctcacggcaacagcgaatcccagggtacagaaggatatcctcacacagctgaagatcctcagacctcaggtgtttagcatgagctttaacagacacaatctgaaatactatgtattaccaaagaaacccaaaaaagtggcgtttgattgcctagaatggatcagaaagcatcacccatatgactccgggataatttactgcctctccaggagggaatgtgacacaatggctgacacgttacagagagatggtcttgctgctctggcttaccacgcaggcctcagtgattctgccagagatgaggtgcagaacaagtggatcaaccaggatggctgccaggttatctgtgcaacaattgcatttggaatgggaattgacaaacctgatgtgcgatttgtgattcatgcatctctccctaaatctgtggagggttactaccaagaatctggccgagctggaagagatggagaaatatctcactgtgtgcttttctatacctatcacgatgtgaccagactgaagagacttataatgatggaaaaagatggaaaccatcatacaaaggagacgcatttcaataatttatatagcatggtacattactgcgaaaatataacggaatgcagaagaatacagcttttagcttactttggtgaaaaaggatttaaccctgatttttgtaagaaatacccagatgtttcttgtgacaattgctgtaaaacaaaggattataaaacaaaagatgtgacggatgacgtgaaaaatattgtaagatttgttaaagaacacagttcatcaccaggaacaagaaatacaggtccttctggaagatttactctgaacatgctggtcgacattttcttggggagtaagagtgcaaagattcagtcaggaatatttggaaagggatcttcttattcacgacacaatgccgaaagactttttaaaaagctgatactggacaaaattttggatgaagacttatatatcaatgccaatgaccaaccaatcgcctatatgatgctaggaactaaagcccaaaatgtgctaaatggccatttaaaggtggacttcatggaaacagaaaattccagcagcataaaaaacaaaaagctttagtggccaaagtatcccagagagaagaggtagttaagaagtgtcttggagaacttacagaggtctgcaaattgctggggaaagtctttggtgttcattacttcaatatttttaatacagctacactcaagaagcttgcagaatctttatcctctgatcctgaggttttacttcagattgatggtgttactgaagacaagctggaaaaatatggtgcagaagtgattccagtattacagaaatactcagagtggacactgccagctgaggacagttccccgggcgaggaggagcctgtatcttctcactactttacaaatcaagctagaaatgaaagaaagaggaagaaaatgccagccctccaaaggcccaagaggagaagaactagttacggtggcttcaaggcaaagggggtctctactgcaagcagaaaaacgtcttctaaaagtaagttctctggtgtaactggatccagctcggcctcatgtgcttctcaagcaacatcagtagcaagtagaaaattggggattatggctcccccgaagcctgtaaatagagcattcctcaggccttcgtatgcagtctcctaacagcaccgctcagcacacacatcttgtttgtcggcgtctgaccatctgtgactagaaagctgttagtcttcttacatcgtttgaagttttcactcctatctattaatatttaaatgtatctcatgtgatagttctgatttttaaataaacattttctttgctgccactgcaaacgtggcggccattgtttctcagagcatctgaagcaat

SEQ ID NO: 1800 - DNA, 2142 bp, Cricetulus griseus
  modified_base (401)..(401): a, c, t, g, unknown or other
tgatggcaccgagacgtatctgcagccgctgtccatgtcccagaacctggcgcgcctggcgcagcgcatcgacttcagccagggctcgggctccgaggaggacgaggctgcggggcccgacggcgacgcgcaggactgggctggcgccggagcggagcaggacgacgaggaggggttggtaaaaattccaaccttctctgtggccttgggactcagtgaggaacaatttgcgaagtgccctcacggagatgtgtgttctctatgatgtcctcagtattgtcagggacaaaagttcatgactctggaccccgtttctcaggatgcgcttcctcccaaacagagtcctcagaccctgcagctgatctctaagaagaagtccttgctggagcagctcaaatccncctgagggcagaaagactgaccaagtcagtgactgagaaccaggaaaacaagctccagcgagacttcaactctgagctcctgaggctacggcaacactggaagctgaggaaggttggagataagatcctgggcgacttgagctacagaagcgcgggctctctctttccccatcatggtacctttgaagtgattaagaatacagacattgatttggataaaaagataccagaagattactgtcctctggatgtccagattcctagtgatttagaggggtctgcatacatcaaggtttctattcagaaacaggctccagacattggtgatcttggcacagtcaacctttttaagagaccattgcccaaatccaaaccaggctccccccattggcagacgaaattagaagcagcgcagaacgttcttctttgtaaagaaatttttgcacagctttctcgggaagctgttcagattaagtctcagatccctcacattgtggtgaaaaaccagatcatctctcagccattcccaagcctgcagctgtccatttccctgtgccactcctcaaacgataagaagtcccagaaatgtgccacggagaagccaggcccagaggatcacctctatgtcctggagcacaacttgcacttgctgatcagagagtttcataaacagaccttgagttccattgtgatgcctcacccagcaagtgctccttttggccacaagagaatgagactttcaggtcctcaagctttcgataaaaatgaaattaattcaatacagtccacagaaggactcctaagaaaaaataattaaacaagccaagcatatttttctgaggagcagaactgctgcaaccattgacagcttggcaagtcgaattgaagatccccagatccaggcccactggtcaaacatcaacgacgtttatgagtccagtgtaaaagttttaatcacatctcaaggttatgaacaaatatgcaagtccatccagctgcagttgaacatcggtgttgagcaggtgcgtgtcgtgcacagagatggacgggtgatcacattgtctcatcaggagcaggagctgcaggatttccttctgtctcagatgtcccagcaccaggtgcatgcagttcagcagcttgccaaggttatgggctggcaggtcctcagcttcagtaaccatgtgggactcggacccatagagagcattggcaatgcctctgccatcacagtggcctccccaagtggtgactatgctatctcagttcgtaacggacctgagagtggcagcaagattatggttcagtttccccggaaccagtgcaaagaccttccgaaaagtgatgttttacaagacagcaagtggagtcacctccgtggaccattcaaggaggttcagtggaacaagatggagggccgtaatttcgtttataaaatggagctgcttatgtctgcactgagcccctgcctgttatgatttttctccagaacaagttccagaaacattgacttggatgtttacagactatttacaagcacaagggagaagtgtcttcaatataagtctctcactttataagtgacgggtgctttgaaggggaaaagtttatgtacagttgtagaatgcagtatggggagatgtaaaataatacattttttatacagtgaacctgaaaacattactaaagggcttgaatttgctttttaaaataaaaagaatcctatctttgatgttaacataaa

SEQ ID NO: 1801 - DNA, 2142 bp, Cricetulus griseus
ccaggagtgagcagctgctcccggttggccctgcccgaaggacaaacgacagcaggacagcccacaccaccaactaagcagcctgtacctggctgcttccccctccccaggaacattcaccatgagtcccctgtggctactcaccttgctgctcgccctgagccaggccctgccctttgaacaaaagggcttctgggacttcactttggatgatgggctgctcatgatgcatgatgaggaggcttcaggctcagacaccacctcaggtgtccccgacctggattctctcacacctaccttcagtgccatgtgtcctttcggctgccactgccacctgagggttgttcagtgctctgacttgggtctaaagactgtgcccaaggagatctcacctgacaccacactgctagacctgcagaacaatgatatctctgagctccgaaaggatgacttcaaaggcctccagcatctttatgccttggtccttgtaaacaataagatctccaagattcatgagaaggcctttagccctctacggaagctgcagaaactctacatttccaagaaccacctggtggagattcctcccaacctgcccagctccctggtagagctacgaatccatgacaaccgtatccgaaaagtgcccaagggtgtattcagcggactccgaaacatgaattgcattgagatgggtggtaatcccctggagaacagcggctttgaaccaggagcctttgatggcctgaaactcaactacctgcgcatctcagaagccaagctcactggcatccccaaagatctccctgagaccctgaatgaacttcacctggaccacaacaaaatccaggcgattgagttggaggacctacttcgctactctaagctgtacaggcttggcttaggccacaaccagatccggatgattgagaatgggagcctgagttttctgcctaccctacgagaactccacttggacaacaacaagctgtcccgggtgcctgctggcctcccagacctcaagctcctccaggtggtctatctgcactccaacaatatcaccaaggtgggcatcaacgacttctgccccatgggctttggagtcaagagggcctactataatggcatcagcctcttcaacaaccctgtgccctactgggaagtgcagccagccaccttccgctgcgtcactgaccgcctggccatccagtttggaaattataagaagtaaaagcagtagtagccaccatggtggccttggtgagagtctctgaggaacatagccagatgccatcacagcctcctcctggctcccaagcatgcacatatgcacatggcctggccctctcatccattcccctcagcttttgagatttaacactcacctaccatatccactcaaagactccctataaatccttcttcttgtccattctgacaccctatctgcgttaggaggagccagcaagtgtggacacagcacagtagcacagctactgttccatccagacatgtattcctctcttcctcacccatgtctgttttccagctctcttgggccatacctgctgcccttggccttggtgcaagttcactacctgtccatctatctctgtctgcatatttctgtctgtctatctctgtgtgtctttctatctctctctctctctctctctctctctctctcacacacacacacacacacacacacacacacacacacacacactggccattccctaggctgctttctgcttcataggtctctggccagtccctgcacaaacaaatctgggggcaactatctccctgattgccctgcccagcacttgacccccagccctggaggatgctagaaggtggaggcccagaatcctttccatattgtccaggaagggggctgtactctgctatcaaaatgaggagcagtaagcttcctagcccctgaagaagctcagcaagccaccagagcccccagaaccagtttgcattggttcatgccctctcccaatatggctaggtccctctccctcacctctgggtccctgctgtggtaggggttggtgagcagttgcacccagctggagggagtgcagcttctgagatcagttgtctttcaattaaagaaacactgtgcaatac

SEQ ID NO: 1802 - DNA, 2142 bp, Cricetulus griseus
gtaccagatcctagattgggattcactatctccatgccaactgggtgttacacagggatttgaaacctgctaatattttagttatgggtgaaggtcccgagcgaggaagagtaaaaattgctgacatgggcttttgcccgattatttaattcacctttgaagcctttagcagatttggatccagtggttgtaacattctggtaccgagctccagaattactccttggagcacgacattataccaaagcaattgatatttgggctatagggtgtatatttgcagaactactaacgtcagaaccaatatttcactgtcgacaagaggacatcaaaactagtaacccttaccaccatgaccagctggacagaatattcaatgtaatgggattccctgcagataaagattgggaagatataaaaaagatgcccgaacattcaacattaatgaaagatttcagaagaaatacgtacaccaactgcagccttatcaagtatatggaaaagcataaagttaaacctgatagtaaagcattccatttgcttcagaagttgctcactatggacccaataaagcgaattacctcagagcaggccatgcaggacccctacttcctagaagacccacttcccacatcagatgtttttgccggttgtcagatcccttaccccaaacgagaatttttaacagaagaagaacctgatgacaaaggagacaaaaaaaccagcagcagcagcagggcaataaccacactaacggaactggccatccggggaaccaggacagcggccacgcacaggggccccccttgaaaaaagtgagagttgtccctcctaccactacctcaggtggactcatcatgacctccgactatcagcgttccaatccacatgctgcttatcccaaccctggaccaagcacatcacaaccccagagcagcatgggatactcagctacctcccagcagcctccacagtactcacatcagacacatcggtactgagctgtgctggagtctgtcagtgcactgttgctcatgctgcagggctggctgcagcactctgcgggaacctggtgtgggccatgcgaatgtactgtacaaccacatcttcacaatgtccaatagccaagttccaccagttgtcacagattggggtggtagcttccaggttgtacctaagtttggagttagacttgaaaagaaagtgctagcacagttgtgtcgtcggtttgctacttccatagtttacttgacagggttcagactgaccaagcatagttttcagtgacagtctgtagcagttgaagctgtgaaatgtgctagggcaagcatttgtcctcgtgtgtggtgactttcagtgtaacagcgttatctgaccaatagtacacacaagacgtaaggtttaactggtacttgaaacacagattatgttaacaaaataactgagactttaaaagattattttggtacacctttcttttagtgtcttatcagtgggttgattcatcatctacagaaatcagtgttttatgaccaagaatatcgcttggattgttttgaaagtacaaaagaactgcatagtttctactgacaggtttcagaactcccaaagaataatttccaacttagaagtttgtttttattgtcaacctatgacttgactggtcttaaagctgctatttgatagtaattaaatatgttgtcattgatataaacctgtttggttcagcaaacaaactgagatgattgtcacagacagtgttttatttttctcgttggtgttgctgatttgtgagcatgctttccgatgaaaaaagcatgagtggtaacctccaggcacggcatccagttcacattcttttgtcctgatttaaagctgggtagtatagtgctctttaaactttgttcagttgacttttctttttaaaaagttgttcacacatttttttagggtgcccttacttcagcaaaggagaaggagtaggagagccttagaatttttgaggggaaaatacaaagctataacatacaacgtactgtatcaaactattttacatgaatgacacaagtattctgaataaaaaaattgaacattagttaaaaacaaggtgttatgtaataaatttattttacaataaatcaa

SEQ ID NO: 1803 - DNA, 2141 bp, Cricetulus griseus
caacatgtcagaagttgccacctacaaaattttgttaactttaggtatttaatcaagtccttgcaaagcttgcccagaccagtgacattaataaaatgactcctagcaacattgccattgtgctgggccctaacctgttgtgggccaaacaagaaggaacactggctgaaatagcagctgccacatctgtccacgtggttgcggtgattgaacctatcatccagcatgcagattggttcttccctggagagatagaattcaatgtatcagaagcatttgttcctcttgctaccccaaattctaatcacacatcccaatggcggtgatggaagggggatttggtgaaaaaggagagctttggtgtgaagcttatggacttccaggcccaccggcggggtggcactctaaatagaaagcacatatcccctgctttccagccgccactcccgcccacagatggcaacgccttggctccagcaggcccagagctgccttctcagagctctagggctgacagcagctcagggggtgggcctatcccctcttctgcaggcatattggagcaggggctgagcccgggtgacagcagtcctccaaaacccaaagactctgtgtgtgcagctgtccctgcaccaggaagaaacaacaaccaggtgaccacaggcccaagccaggccccatcaggtggtagctcccatcagctctcggtgggcacacctcacagtgcagctggtcccagccctcatactctgcgtcgagctgtgaagaaacctgccccggcacccccaaaaccaggaaacctacctcctggccacccagggggtcagagctctccaggcacgggcacatccccaaagccaaacacacgcagcccttcgccacccccgcaacaggcaacaggccccgggcacgcgccgcagctccagcagcctgccccccatccaggcgcccagccacccgccaccgcagccccccacacagccccggctgggtgagcaggggccagagcctggccccacgccacctcaaacacccacaccacccagcaccccacccttggccaagcagaatccctcgcaaagcgagaacacacagcagcatggaaccctcccaaggccgcggccggtgcccaagccccgcaaccgacctagcgtgccgccacccccgcatccgcctggcgcccacgcaggggataacagccttgcaccggcagcgcccacagcctccagaatcgtcactgatgcccttcccagtgccctcacaggtggggaaggtttccagaactaagacaccaattctagggtttcagaatcacttcgcaacatctttcctgaaatgcattcagacttggcaagcaaagaagtgcctggccacattctgctggacatagacaatgacacagaaagtaccgcattgtgaagaaagtcacttgccagcctttggccctccatcctggtgagcagaactgggtcaggcaagcctctgtccctgcagaccacacagtgagaagctttcagtgggagaaggaaggtctgaccacgcaggactagactcccacggcccacagagaagggaaagggccagtcctcaaagccgaatgacctgtgtcgtgaagaagttggcttgctttatctaggatgaaaatcatgccaaaaatgatagaacaaggaaacacctacggtggaaaaagtattactgctgagaaaagtgtgggaagtctttgcccatgctgttaacacagacagcaacttggagtgactaagagactcacctatctatttaataaaacacattaattatgcaagttgcctacttcctgctacttggactttggttgtcttgcaccagagggagcttctgttccttcagacttgctgcagaatcattttgtattaaatacagtctgtgtctcctccaacccccagaacctcaagcattgatggcgactgctggctctgtcgcctcatcaaactggatgtgagtcgtgccttgtagattgccagaacatggagaaaaatatactagttacttttttaaaaaacaaaacaaaacaatatataattgctacttgataaagggggaatgttattctagtttcgtgtttaattggaattaaatatattctgtggtttatatgaaaa

SEQ ID NO: 1804 - DNA, 2140 bp, Cricetulus griseus
caaagatggcggcggcggtgtccgcgcgctggctgcgtttccgcggggggcctgccttcctgcagaccgctcgccgggcgggtgtcggtgaagcgaagctctgctgcagattttatcctggaagtgcatccctcccaaaggttgaaggaacaaatgcaacagggattgaagaaatagtcattccaaaaaagaaacatgggataaagtggctgttcttcaggcacttgcatccacagtaaacagggaccctacggctgtgccttatgtatttcaagatgacccttacctcataccaacctctgctatggagtctcgttcatttttattggcaaagaagtctggggagaatgcagcaaaatttattgttaattcacatcccaaatatttccaaaaggatgtggctgaacctcatattccgtgcttaatgcccgagtccctggaacctcagattgaagaggtgagtgaagctgcactgaaggaacgaatcagactcaggagagtcaaggcttctgtggacctctttgatcagctcttacaagcaggaaccacagtctctcttgaaacaactaatagtctcttggatttattgtgttactatggtgaccaagagcccccagctgactgtccttatcgacaaactgaacatgcagaaaacttggaagaggccacagagacaaatgttcaaacctccaagatgaagactattccttggaaagcacaaaacaatgctgagagaatctttgctctgatacccgagaagaatgcacgctcctactgtacaatgatccaagggatggtgaagcaccgagcttatgcacaagcactgaacttgtacaccgagttattaaataacagacttcatgctgatgtatataccttcaatgcattgattgaagctaaaatgttgatagccagtgagaaatttgaggaaaaatggaataatatactggatctgctgaaacatatggttgcacagaaggtgaaaccaaaccttcagacttttaatgctgtgctgaagtgtctccggaagttttatatgcatggaaggctcccagccttacagacattacgtgaaatgaaataccttggaatagaaccctcacttgcaacataccatcatattattcatctcttttatcaccgaggcagctctttaaaaacgtcatccttaatcatctatgacatcatgaatgaattagagggaaggaaattctctccacgggacctggatgatgataaattttttcagttggccatgaatgtgtgttcatctctcagggatttagagcttgcttaccgaatacatcatcttttaaacacgggggacaaccgaaaactgattggaggtgatcttcaacgtaatttctattattcgaagtttttcagtttgatttgttcaatggaacaaattgatgtcactttgaagtggtataaggacctaataccttcagtattctttccccactcccaagcattgatagatcttcttcaagcattggatgtgtccaatagactagaaatggttcctcaaatttggaaagacagtaaagaatatggccatacttttcgagctaacctaagagaagaaatcttgatgctcctggccagggataaacacccaccagagcttcaggtggcatttgctgactgtgctgctgatatcaaatccacgtatgaaagccaagatgccttgcagactgcccatgattggccagccaacactctacagtatatagctgtcctttttttaagaggtggcagaacccaggaagcatggaaaatgttggcacttttcaaaaagcataataagatccccagaaatgaattgctggaggagtttatggacactgcaaaagcatctgatagtcctgctctagccattgaggtcgtgaagctagcaagtgcctttagcttgcctgtttgtgagaaccttgcccaaagagtaatgatggatttcacagtcaacccagaacaaaaagaagccctgggtaacctcactatatcaaacagcagtagtgatggagacagcagcagtgacagtgacatcggtgaagacaaaagagagaggtgacccacaatagctgctggaatgtgaagtggtaaaaataagcagatgcagggctgtgtttgaatgtaagct

SEQ ID NO: 1805 - DNA, 2140 bp, Cricetulus griseus
ggagcaggttaggcaacgaactgcccctggcagtggcttctactgctgacctgatacgatgtaagctcatggatgtagctggtggcttgggcactgatgaacttagactgctctatggcatggcattggtcaggttttgtgaatcttatctcagagaggaagaccaaatgttctaacctccccctcaagtacctggctcaggaggtgaacattccagactggattgttgagcttcgccacaagttgacccacaaaaaaatgcctcatataaatgactgccgcagaggttgctactttgtcctgggttggctccagaagacatactggagccgtcaactggaggacagcctgaaagacacgtgggagttggaagaggacctgatagagatagaagaacaacaagaagaggaaggtgaaattattgttgatgatgtaatggaagagaatccagagcctcaggatgatgataaagatgatgagttggctgtcgaggatgatgcaaacgataaagacaataaagaggcggcttctcatccagaatcaagtccaagacataaggagttgtatgaaaaagcacgggaattgctggtagcatatgaagaggagcagtttaaggtgctggagaaatataggcatttacctcaagctgttaaggtgtggaataacctttccccgtgtgtacagtgtatcctggaagaactcaagagcattacatgggaaaacaggaatgctgtgctggatgcttttctggatgacggcttcctcattcccactttcgagcagttggcagctttgcagatagagtatgaagaaaacatcgacttgaatgacgtcttggtgccaaagccattctctcagttctggcagcccctgctccggggcctgcactcccagaccttcacacaggccctgctggagaggatgttctctgagatgtctaccttggggaaccgtgggattcgacctacctacatccttagatggactgttgaactgatcgtggccaacaccaagactggacggaatgctcggaggttttctgcaagccagtgggaagcaagaaagagctggaggctgttcaactgttcggcctcccttgattggccccaggtggtcgagtcctgcttgggctcaccttgctgggccagcccccaactccttcagctagtcttcaaagccatggggcaggtcttgccagatggggagcaggagaagctgctgcgtgtctgttccatctatactcagagtggagagaatgatgcagcaaagacaagcgcagcttcctcttccattgggaaaaatccatacacattggataccttacatcaggacctgaaacagtctggtgccaactgtgagtctgaagaaaatgttcaacagaaggaccaaggcagccttaaggatgccaagcaaggggagaaaaatgaggacgagggggaggagcaggaggagaacgaggaggtgcaggatgaggagatgatgatgacgaagatgacgatgatgaagatgacgatgacgatgaagacagaatggagtggggtcctttctctttcatgaagggagcctatgtttttgagaatactaggattgcttcccggaaaagagaggctttgcatggttcagcgtggcaagtaagccctgaagatgtgcgatggggtacattccctataggccgaataccaggtcagactgacgacccagcagaacttgtgttggataattatgacaccatgtatcttttggaccaacctgtactagagcatcgactagaacccccaaagtccaggaattgcactctgaacctaagttgttgtggaggcagtaacaactctagcagcagcagcagcaacagcggtggcaacttggaaggccttctctggagtcagggacaactgcatgggctcaaagctggcttgcagctattctgatggctgtcctgatgcaagtgtccttgcagcgccactataatcacagctcagtccagagtccatccatggtacaaactggacaacctgggagacagttcagatcagccccgtcaattcagctttccaccacagtggaaatttgaattcttcctcccagattttctgttgtgttttgaaaaataataaacagatttttgtcatggtgtttgtga

SEQ ID NO: 1806 - DNA, 2140 bp, Cricetulus griseus
ggaggaagtgagagccaagcagcagggtgtgcaggactctatgaacaggaaaaaggaacaactgaggcaagaatatatggaaatgaaggctatccttgattcagcggagaccaacttgatgcgtaagctgaaggaggaggagaagcggatccacggaaagctggacagcatctaccaggttcttgccaagaagaagagtgagatgcagaacctgaaggcggaggttgagctcaccctgtccaaaggggacgagtttgagtttctggagaaagcggcaaaattgcaaggaatgtcaacaaaacaagtctacatccccaaggtagacccagaccacgaattgataaagggggtctaccagagtgcattgaacctcaaaaatgagctgaagcaatctttcaagcagctacaggagaaggaagaagacaccacaggaaaagaagaccaagaaaccaactggtgctaccggctcctttcccagctcttcctcattcaacaagcttcccacctttggagctcctggacagtcaatggattttaaaacaactgaccctgatgccgcacccaaagccaacaccttgcagccaaactctactgcactcaaagctaagatgctagaaaacttcttagccaagtctagggccgagcttctggagtattacgttaaagtcgtcttcgactacaatactgcccacaacaaagtggttctgtcagacaactacaccaccgcctccgtggctgagggacttcagcactaccgtacccatccccagagattcacctactgctctcaggttctggggctacaatgctataagaaaggcattcactactgggaggttgagctgaagaagaacaatttctgcggtgtaggcatttgctacggcagcatggataggcagggcccggagagccgtctgggccgtaatgccaactcgtggtgtgtggaatggttcaacaacaagatctctgcctggcacaacaatgtggagaaaaccctgccctccaccaaagccactcgagttggtgtgcttctcaactgtgaccatggctttgtcatcttctttgctgtcactgaaaaggtctatttgatgtataagttcaaggtggactttactgaagccctgtacccagccttctgggtgttctccgctggtaccacgctttccatctgctcctcctctcctctaagtaggcaggccactaggccagcctcagacacttggactttgaggaacatctaagactggaacttctgagtccccataggtaggagattggaaggagaactgggggagaggctgagagaataaaaaggggagatttggctgggaaaggggtggagtgattgtcttgtgggtggggaagcatatctacctcctggtacccctgagggcagggtgacctcccagagtctgggaaatttcaggctgctagccacttgggcagagcttcgaaaggaaaatcattagtgcttcctgttgtcttacagaaaatctgtagctagccttgtttgaaaccaagtcagacttgggaaacatctaggtttagagaagcagaatgccaagggttaactgaggggtcctccttggactcttacacagaaatgaaactgacagtcaagactctttccaggctatgtacagctcaggctaggaagtatgtatccctctgtttatgagagagccaagcaggtgaccaaagcccggagctgttcaaggtgctttggagctgtaagtggaggagtatacccttgctgtctggtacctttctgtttgcaatggtaagaccttgccttgaccataaacgtgtctggcagacagatggaaaggtggaggatggctctgttcaccactcttgtcattccaacatggaagagacacctaaacacaggttacaggaaaaccctgggggctctgtggacatacaggaattgccagaaacgttgatgtaaaatcctatcctagacccaatgactgtctcagtcactctggtatgataaactaaaggtcaagtctttgcattggtgtgggggtgatgtgtgtgtgtgtgtgtgtgtgtgtgtgtgtgtgtgtgtgtgtgtgcgcacgcacatgtgaaatcctaagtgaaaaaaaaaaaaaaaaaaaaaaaaaaaaaaaaa

SEQ ID NO: 1807 - DNA, 2140 bp, Cricetulus griseus
cgtcgcgtcggtggcaggactcctgaatatattccaaaactgaacaatttcaactgagctgaagtactctgccttcctagaggtaccagtccagtttaggagagccagagcagatcattagccatcatggcaaaccttagctactggctgctggcactctttgtggctacgtggactgatgttggcctctgcaagaagcggccaaagcctggagggtggaacactggtggaagccgataccctgggcagggcagccctggaggcaaccgttacccacctcagggtggtggcacctgggggcaaccccatggtggtggatggggacagccccatggtggtggctggggacaacctcatggtggtggttggggtcagccccatggtggtggctggggtcaaggaggtggcacccacaatcagtggaacaagcccagtaagccaaaaaccaacatgaagcatgtggcaggtgcggctgcggctggggcggtggtggggggccttgggggctacatgctggggagcgccatgagcaggcccatgctccattttggcaatgactgggaggaccgctactaccgtgaaaacatgaaccgctaccctaaccaagtgtactaccggccagtggaccagtacaacaaccagaacaactttgtgcacgactgtgtcaatatcacgatcaagcagcatacagtcaccaccaccaccaagggggagaacttcacggagaccgacgtcaagatgatggagcgcgtggtggagcagatgtgtgtcacccagtatcagaaggagtcccaggcctactacgacggaagaagatccagcgcggtgctcttctcctctcctcctgtgatcctcctcatttccttcctcatcttcctgatagtgggatgagggaagcctccctgcttgtacttcctcgttcttgtggtctaggctgggggaggggttatccacctgtagctcttttaattgaggtggtgtctcattcttgcttctctctttgtcccccataggctaatgcccttggcactggtgggccctgggaaatgtatagtagaccagatgctattccatccagagccttttgattgagtccatcatgggccagagctaacagcaggccaatacgaacataacagcacataatcgctggctagtcggggctttgttttggtctagtgaataaatactggtgtaaccctctgacttccacactgagtacacagtgacagacacacacaactgttaaaataggcgaaggattctacagccaaagaagtcactgtttgggcatggtccctaagaaacagcctcccatttgggatatttaaagcatccatatgtggcattcctccttttctaacataaactctagctgagcaaggcaatgggggaaaaaaatgaaattgccctactaacattgaaagcaaacctttgttcatttcctagaaactagaatgatgttttagccttgctcggattgaaccaggagattttgactctgaggagttccaacactgtaaaagcatggtactcctgcaaagggagaaatggttaggacacaaagtcaaggcgcttgcatttcttcatttctgtctcataattgtcaaaagccagaattaggtcataccattatacttgtatttgaataggacaacaagagacaatctaaaaattctcctaggttgcagatgagagaaatgggctccattcaaagtgaacagaaagtgtgttagcattgcttaagtaaggcaaactttgttccttaagttgctgtgtatatccctgagcagacataaccactctgcaatagcatcggcctgtactgcaggtgttctgtgtagaatatataaagcataactacaagcttagaccttatgttctgatgcatccgaagtacataacactgaccgtttcgtctggtaccaaatgcttactgtgtgacccttaggctttcaacgtgcacttggttccatatatgaatccaaagcggacccctagctggtcttcaaaatctgcatgtacttcacattttctatatttgtaactttgcatgtacttgttttgtcatataaaaagtttataaatgtttgctatctgacattaaataagagctatgatgagacaaaaaaaaaaaaaa

SEQ ID NO: 1808 - DNA, 2139 bp, Cricetulus griseus
tccgcgccctcgatcccccatccccaggtgaggggctgagccccggtcgcggagaccccgaggagcccggcagggtcatcatttgctgcacgacatggcaggagctggaggagggaatgatattcaatggtgtttttctcaggtgaaaggagcagtagatgatgatgtagcagaagcagatataatttctacagtagagtttaatcattctggagaattactagcaacaggagataaaggtgggagagttgtcatctttcaacaagagcaggagaacaaaatccagtctcatagcagaggagaatacaatgtttacagcaccttccagagccatgagccagaatttgactacttgaaaagcttagaaatagaagagaagatcaacaaaattaggtggttaccccagaaaaatgctgcccagtttttattgtctaccaatgataaaacaataaaattatggaaaatcagtgaaagagacaaaagaccagaaggctataacttgaaagaggaagatggaaggtatagagatcctactacagtcactacattacgggtgccagtgttcaggcccatggatctaatggtggaggccagtccacggagaatatttgccaatgcccatacctaccacatcaactcaatttctatcaatagtgattatgaaacctacttatcagcagatgatttgcggattaatctctggcatctggaaattacagacaggagttttaatattgtggatatcaagcctgccaatatggaagagctcacagaggtgattacagcagcagaattccatcccaacagctgtaacacattcgtgtacagcagcagtaaaggaactattcggttatgtgacatgagggcatctgcgctctgtgacagacattctaaattgtttgaagaacctgaagatcccagcaacaggtcttttttttctgaaatcatctcctctatttctgatgtaaaattcagccatagtggtcgctatatgatgactagagactatttgtcagtcaaaatttgggacttgaatatggaaaacaggcctgtggagacataccaggtacatgaatacctcagaagtaaactttgctcactctatgaaaatgactgcatatttgacaaatttgaatgttgttggaatgggtctgacagtgttgtcatgactggatcctacaataatttcttcagaatgttcgacaggaacacaaagcgggatataactctagaagcatcacgagaaaacaataagcctcgcacagttttgaagccacgcaaagtctgtgcgagcggcaagcgaaagaaagatgaaataagtgttgacagcctagacttcaacaagaaaatccttcatacagcctggcaccccaaggaaaacatcattgctgtagcaactacaaacaatctgtacatatttcaagacaaagtgaattaggctggcattcctagcagaggagccacttcctgcttagtgagatagttgaatctagcattcatacctataagagagcggtccattgtggcgcccctttccagtgtttgacagtgtgccattcgacaacacatttgatagccacatggagaaagctgtgtgggtgcatcccaggctgttctccatgtctgctagccgtttagggaagggaagggcacttttaatttaatgacttcttgcaccatcttgcctggtggactggactggactgtgtcagcattgatgtactccactttttatgccttccattgtgatgacgtcaaacacagtgaacgccttcagtcatgctatgggatttgtgtatcctcattactgtatcatttgtggggtacacccctcctctcttttttaaattaaatacagctcattcttactgtggcttgtagcattcctcctctctggcctcctggactcttcccctccatctcttacccttgccctttccacctggtctcggtggtggcatattaaaaggaagaacgaaagcacacaaaacgagtcagttttgggtcagtggtaatgggggtatatgttgcgaacaaatgttttaataacagttggctgtaatcactccttgccatgtctggcactgaaaataaggaaaaaaaaaaaaactactactgaataaaagtgacaaagaatgg

SEQ ID NO: 1809 - DNA, 2139 bp, Cricetulus griseus
agttgggatagatgggcatcggaagatcatgtccttcatgatacagatgaaaatcggcggttacagtgtaaattggccaaaaaagcaatagctcgcctgagaggtgcaggaggaaagaagaggcgctgtcggctgcctggtgtcgactctgtcttaaaaagtgtgccagttaaagaaaccactcaaaatgatgaaaactcaataagcagtacctgtcatgacagctctggaagaaaaaaatgaaagaaataaaagaacatcgtcagcgccgtattaaagtaaagactaaagcgaaaaaaaagtattgtcactgcgctcaagaaaggacatggacgaaagaacaataaccatagatatccctgaagttcttaagaagcaacttgaggatgactgctactatatcaacagaaggaaacggttagtgaaacttccatgccaaaccaacatcataacaattttggaatcctatgtgaagcattttgctattaatgcagccttttcagccaatgagaggcctcgtcaccatcatgccatgatgcatgcacacatgaatgtgcactatgtcccggcagaaaagaatgttgacctttgtaaggagatggtggatggattacgaataacttttgattatactctcccattggttttgctctacccatatgaacaagctcaatataaaaaggtgacatcgtctaaatgctttcttcctattaaggaaagtaccaccacaactaacaggagccaggaggagctgtctcctagcccacctttgttgaacccatccacaccacagtctaccgagagtcagccacttagtggtgaaccagccacccccaagaggcgcaaagctgatccagaagccctgcagtctctaaggaggtccacacgtcatagtaccaactgtgacaggctgtcggagagtagctcctcacctcagccgaagcgccggcagcaggacacatctgccagcatgccaaagctgtttctgcacttggaaaaaaagacgcctgtgcatagcagatcatcttcccccattcctctgactccaagtaaggaagggagtgccgtatttgctggctttgaagggagaagaaccaatgaaataaatgaggtcctgtcctggaaacttgtgcctgacaattatccgccaggagaccagccacctcccccttcattcatttatggtgcacagcatttgctgcgattatttgtaaaacttccagaaatccttgggaagatgtccttctctgagaagaatctgaaggctttactgaagcactttgatctctttctgaggtttttagcagaataccatgatgatttcttcccggagtcagcttatgttgctgcctgtgaggcacactacagcaccaagaaccccagggcaatttattaaagattcaatggttctggaaaaatagctgcactttgcagctttatattttaggttccaggtgaaatgttaatgagatgtggacctatcctgggggttctctgaaagaggcaggctctgttgtttgagttgctcatgtactgttatttctgttaagaattattttctgagctctgtattgtggtccatgcctatggggggcagtctatttaattaattaattaattaatgatttttaaatgtaatgattacttcctgggtgcctgaacgtattccaaagcaacactgttgcacaagctgtgtgtgctagcaggataaaaacagccatagctgtgttcacagggaaacgttcatgaacgtgtactaggttaaacattgttctggtagccattgcagttggttgttagcaagaaccgcattgtttgattatttgttaatgttaaacaaaatggttttgaaaactgttttctgttcaacagatcttaggatgtgcttggaagccacaaagtactctgaaagtagtttagaggaaactgatattgatggcaaaggagaacttgcagctatgcattgcttgtagcagttccctttctccgaaacattatttttgttgctctaaataaagcgttgcctgtcttgtttgagtattttacagccatactctgctgtgtaatgttatagttccttttcttataaaatagttattttgggttggatctaaataaaagactttgccagttttgttt

SEQ ID NO: 1810 - DNA, 2139 bp, Cricetulus griseus
tggctccctgcatgtcacactgtgtgggacccccaagggcaatcgtccagtcatcctcacttaccacgacatcggcatgaaccacaagacctgctacaacccgctcttcaactccgaggacatgcaggagatcacacaacattttgctgtctgccatgtggatgcccctggccaacaggatggtgccccgtccttcccagcggggtacatgtacccctccatggatcagctggctgaaatgcttcctggagtccttcaccagtttgggctcaagagtgtcatcggcatggggacaggagctggcgcctacatcctgacccgatttgcactcaacaaccctgagatggtggaaggcctcgtgcttatgaatgtgaatccctgtgcagaaggctggatggactgggcggcctccaagatctccgggtggacccaagccctgccggacatggtcgtgtctcacctcttcggcaaggaagagattcacagcaacgtggaggtggtgcacacgtaccgtcagcacatcctcaatgacatgaaccccagcaacctacacctcttcatcagcgcctacaacagccggcgagacctggagatcgagcggccaatgcctggaacccacaccgtcaccctgcagtgccctgctctgctggtggttggggacaactctcctgctgtagatgctgtggtggaatgcaactccaagttggaccctacgaagaccaccctgctgaagatggcagactgtggtggcctccctcagatctctcagcccgccaagcttgctgaggccttcaagtactttgttcagggcatgggatacatgccctctgccagcatgacccgcctgatgcgctcccggacagcctctggctccagtgtcacctccctggagggcccccgcagccgctcccacaccagcgagggcccccgcagccgctcccacaccagcgagggcccccgcagccgctcccacaccagcgaggatgcccgtctcaatatcacccccaactcgggtgccaccgggaacaatgccgggcccaagtccatggaggtgtcctgctaggcagtctgtgcaccagtcattcctggactgtgatctctcccttagcccccaacccctgcctgccaccctgcgctaatgcggtattaatctaaaactgcttttgtaagagtgaactctggcgatggcagacccaagatgttcaggctgcctcctgggaccagagtgggtggtggtggacaaaggcaagaagcagttcagtgttctgttctgctaacaagtggcctggtggcccctctctctaccctcagacgccaaactgccaaaactaagaaacacatagctgtaacactgcctggctccaagcccaggttgatccagcatcctggttcgcaggcattttgccagccccccccccctgcttcctgtttcctcccccactaaactcattcctggaaacagacttctgatttgaaaggggagcgaggcagggaagttgggcaccttattttaagaagggaaaacaagacagagattaagaagaggcaggatctagggcaggtagaaggaaaccgagtccacgcagttcactcgaagggactggctttaaagttttggatgctgaaaccccacagcctgttttttttctggcaaccttttaacatctgagggagactgtcaacaatctcccgggctttaaaatgaaagtgatccgcaaatactgggtgtcacagtggtttaagacttctgctctgcagtcggttcctggctcccatcccacagtgtgaaccagtgggtgatacctttgtccctggggaagatggttttggtttgtagtcgccttctttgagacagaggagaactcaacaggtggcagtggtccttgcctgaatgtctctaactggcccattgctggttcttcagagagaaccatgtgctctggtgggggtctgtacattccatgggaactcgcttccctcccccctgccccccaactcctaccatggaggcttcctccgaccttgtgtagaaagatcagggatccagaccaggccagggcagtttcttaatgagatgtttgtatttatttccagaccaataaatttgtaactttgcaaaaaaaaaaaaaaaaaaaaaaa

SEQ ID NO: 1811 - DNA, 2138 bp, Cricetulus griseus
  modified_base (483)..(483): a, c, t, g, unknown or other
gtgatgagtgtggcaaggcttccagccagagtacaagcctttgcatccaccagagagtacacaccaaggagagaaaccatctcaaaatatcagttatataatgatgttttgctaagaattaaaaatcttaaacccataagtgccactaggaaggaaaccccaaatccacctacattgaccctgggaacatctacagcagtccccagaacccagacatagctttccatacatcccgttatttctgaatccaccttacctcatgtcctcagagtacctataacacctaccccttcctagatggcattaaaattcattttagattttaggagagtcaagatatgcagtactcggccgatcagaaaatcactggcagatgtacatgctctggaactttagtttgtggactctgctaatcactgtgtctttaagttagacttattttctagtggctgtgacacatgctttaacttgtaaatttttttnttttttaagtagctgaatgtatatatcagggaggaagaagcaagcaaaactgagcttgtctgcttacaaaactgaccctcttgggccccatttataagtggtggggttccctaccagctggggaggccttgggagggctgactggggagtcattgaggatgaatctgtcatctcaggcaataatgtataggtgtcatcatggatcacatacagttctttttaggcatgagtgtattggctaacccatcatcatcattcattcactgagtatttattgaacgtctcctgggtgttggacatgtactgggtgctaggaatgccactggatcatgaaattcacctctggaggaaacgggataaggaagttaacacataaataatgtagtttgcagtagtgattaagtggtatgagaaactagggtggtgtgtagaggggggtggggggccaggtagcaagggtcaggaactctgcgctgaaggtgctggggccaggtgaagggagcagtgacagtacacagtacaggtgctgctggctctggggatgagatgcgggtgttggaggtagtttgctgggaggggaagcactgagccatgagcttagtggctagcatttatgggcctgttgtgtttgttttgtttctattgactgatgctaaaactctggggggaactcaagggatgttgagaagaccaaacgtccccagtgataccaacacaaaagctcctgtctcagtttccttcccattccccttcttggtctccctcatgcagtcatttgctcaggaagtctttgggaaactagtgtgacctgtaagtctgaagtggatgattggcttggtggcttctgtcggccatttaagactgaagaaagaacttcccagatagtcagaaatatgagactgctttgttttgtttttttgttttttttgttttttagaatgttaggctggaagaggcttttgtaaaactgaagccttggtatgtcgaggaggctttgtaggagcacagtcagtggatggggtttagggacatatctgttaccatgcatttcaatgcagacatcttcaggcaagcctctggccagctgctcactgcctttcccctctccagagagggctatcggttaacaaagccccttccaggcctcacagccaccatagcaatttactgtagtgtcttacacttcaatgtcaccacagcgtggaacattagaggaaagcctagatttttagttgatagagagccagttgaaatatcatcaatagaattttagttttaggaaaaattggtttgatttgtagctttattactattaggtatgtaagcttgggcaaatcgcttaattttcaggtctagttttctcacagaatgaggacactggactaaaggatttcccaatttccagctagtcctagagttctatatttctacatagttgaattattttatcatgctgttgctggggaatacaactaacacttttgaagctactaattttatgtcaagctttaaagtccataattgttatcttcagaaaatattatttgacctacagtatgtctaaatcaatttaataaaatcactttataacaaggaaaaaaaaaaaaaaaaaaaaaaaaaaaaaaaaaaaaaaaaaaaaaaaaaaaaaaaaaaaa

SEQ ID NO: 1812 - DNA, 2138 bp, Cricetulus griseus
ccgggactgcgcctcgtcttcctgaaggttgagaacaaaaagaagatgcacctggactttccccggagctctctgcgtttttaaagcgtcgggtggagttgggggttcgtaagccgcgttgcttactgaaagtagaagtcacttctgccttccgtggaaaacttgtaccttccataagtgtttctacagaaggcacccgtggtggttctttaagctaccaaaaattgcccaagcttgtgtgacatcagctctgtcaagtgtccatgatgctgggccctgagggaggtgaaggctatgtggtcaaacttcgtggcctaccctggtcctgctcaattgaggacgtacaaaacttcctctccgactgcacaattcatgatggggtcgcaggtgttcatttcatttatactagagaaggcaggcagagtggtgaggcttttgttgaacttgagtcagaagatgatgtaaaattggctctgaaaaaagacagggaaagcatgggacaccggtatattgaggtgttcaagtcacacagaaccgagatggattgggtgttgaagcacagtggtccaaacagcgccgacagcgccaatgatggctttgtgaggcttcggggactcccatttggatgcacaaaggaagaaattgttcagttcttctcagggttggaaattgtgccaaacgggatcacattacctgtggacccggagggcaagattacaggggaggcgttcgttcagtttgcctcacaagagctagccgagaaagctctagggaagcacaaggagagaatagggcacaggtatattgaagtgttcaagagcagtcaggaggaagttaggtcatactcagacccacctctgaagttcatgtctgtgcagaggcctgggccttatgaccggcctggcacagcacggagatacattggcattgtcaaacaggcaggcttggataggatgaggtctggtgcctatagtgcaggctatgggggctatgaagaatacagtggcctcagtgatggctatggcttcaccactgacctgtttgggagagacctcagctactgtctctcaggaatgtatgaccacagatatggagacagcgagttcacagtgcagagcaccaccggccactgcgtgcacatgagagggctgccctacaaagcaacggagaacgacatttacaacttcttctctccactcaaccccgtgagagttcatattgagattggtcctgatggaagagtgacgggagaagctgatgttgagtttgccacccatgaagaagcagtggcagccatgtcgaaggacagggccaacatgcagcacagatacatagaactcttcctgaattcaacaacaggggctagcaacggggcttatagcagccaggtgatgcagggcatgggagtgtcagctgcccaggcgacttacagtggcctggagagccagtcagtgagtggctgttacggggccggctacagcggtcagaacagcatgggtggatatgattagtatagtaggagcatttgagttatttcaatcaaaaatttcacaggcagccaataagcagtcaagagcagtttaaactctagaggaagctgggggacccactttgcaccatgagtttgtgaaaatctggattaaaaaattacctcttcagtgtttctcatgcaaacttttcttctagcatgtaatattgagtaaactaaaactattttcttccgcttttctcaattaacatttttggtagtatacttaagagtgatgttatctgagttaagtagtttaagtatgttgagcggatctttaagcacaccacagtgaacacactggggacatgtacttttctggagaactcaaaaggtgctagatccctgatgcaaagagaagcatttctcatgttcattctagtttatattttcatttaaatctttaggttaagtttaagctttttaaaagttagttttgagaattgagacacaatactaatactgtaggaattggtgaggccttgacttaaagctttctttgtactgtgatttccttttgggtgtattttgctaagtgaaacttgttaaattttttgttaactaaatttttttcttaaaataaagactttttcacaaaaaaaaaaaaaaa

SEQ ID NO: 1813 - DNA, 2138 bp, Cricetulus griseus
ggccgctgacggtccgcggtcccccgggcccagaccctgggctgccccgcgttgtctcccccgtccacacgctacgagcctggaatgcagctctccaacagggcggcagccagggaggcggcgagccgcgacgtgctggccgcggacctccgctgcagcctcttcgtctcggcgctgcagagctacaagcgggactcggtgctgcggccttcccgctcctacgcccgccacgacagtaaggacttcgaggccctgcttgctgatgctggccggttacccaacctgaaggaacttctccagtccccccagagacacagacaaacaggcctgggacctggtgagctggattttatcttcaaagatcctgacaatccacagcgcagagaaggcagagtttgaaaagatccagaagctgactggtgcctctcacttgcctgttcccactccggacttcctatttgaaattgagtactttgacctggccaacaccagattttatgagaccaaaggagaacgagacctcatctatgccttccatggcagccgcctggagaacttccactccatcatccacaacggtctacactgccacctaaacaagacatctttgtttggagaagggacctacctcacaagtgacttgagcctggccctcatttacagtcctcacggccatgggtggcaacatagcctccttggcccaatccttagctgtgtagctgtgtgtgaggtcatcgatcatcccgatgtcaagtgccaaaccaagaagaaggattccaaggagattgaccgcaacagagcaagaatcaagcacagcgaagggggagatgtccctcctaagtactttgtagttaccaataaccagcttctgcgggtgaaataccttctggtgtattcccagaagcagcccaagagggcctcaagccagctctcctggttgtccagccattggttcatggtcatgatgtccctgtatctgctgctgctgctcgttgtgagtgtcaccaactcctctgctttccaacacttctggaaccgagcgaagagatgatcacaggcacttggagtgggggccactcaccgtgtgccttacggaagcttgtcctctacctcctgtatctcatatccagccaggtccagtttggggaccagatgcaggggggtacacaggacagttttcatatgccataaatgtactgattgtgattgtccagccacagttcagtcaatggggacccctggcccctcacttgtcagtttcagggtaccctcccatctgctttttcctaaatagtctagggaggtggctcttaagccagggccaaagggaaaagtaactcctgttgcatttaaaagcaaagtgtccaagctgtcggtggtgtgtttacaatcattcagatggaggctggccctttctctaatgccttttggaagacagaatgtgtgcaacgggggtgataaatcattaggcggttgccttgttttgactcgagatacccaagagggacagtcgtgtttcccataaaaatcagtgggatcgtttgaggattccatcagctttagtctgcgggtgtaaaacatttgaatggtttttctcagatcaacaaatgatttctgctacagctgtacctccctcccttctcaccacacaagagaaggagccacagcaggataacaaaatgcagacctaacaactagcaactccttcatccttttctaaaaatgaccaactgctgattacagctgaaaaggaaccaaatgtttgttttctgtttttgttgtgaaggatccaagccataggctcactagggtcatcattcccacaaagctgccttgatatacaacactctcggccttcaggggcccacgggccttcaagacagaatcctgcctcagttggccctgagcttcagtgtgtgaacagagagccccagctatctgtgctgtgttgtttagttcctccttcctgccaggcttcaaccaggaaagaaccgtgttgaatgaaaatgaagtttccatagagaagggaaggaaatcattttctacaatttgtaaagttttgtgtaaaagccactattatgatttttaaatcaaatagtgggacaatttaaaaaaacaataaagatattttcctaaat

SEQ ID NO: 1814 - DNA, 2138 bp, Cricetulus griseus
gcggcgaccggtaagaacagtggccatgggggaccctggactgtccaagctgcagttcgccccctttaatagtgccctggatgttggcttctggcatgaactgacccagaagaagttgaatgagtaccgcctggatgagactcccaaggacatcaaaggctactactacaatggtgactctgccggtctacccacacgcttgacattggagttcagtgcttttgacatgagtgcccccacgcctgcccgctgctgccctgccctggggaccctgtacaacaccaacacactggaggcttttaagtactgcagacaagaagctccttctggaacagtcagcaaacgagatctgggaagccataaagtcaggcactgctctcgaaaaccccatgctcctcaacaagtttctgctcctgacctttgcggacctgaagaagtaccacttctactattggttttgctgccccgccctctgtcttcctgagagcatccctctaattcaggggcctgtaggcttggatcaaaggctttcaccaaaacagatccaggccctccagcatgcctatgatgatctgtgtcaagccgaaggagtcacggccctaccatacttcttaatcaagtacgatgacaacaccgtgctggtctccttgctcaaacactacagtgatttcttccaaggtcaaaggacaaagataacagttggtgtgtacgatccctgtaacctagcccagtatcctggatggcctttgaggaatttttggtcctggcagcccacagatggagcggcagtttccagtctgttgaagtcctctgctttcgagaccgcaccatgcaggggaacagagatgtggcccacagcatcatcttcgaggtgaaacttccagaaatggcatttagcccagattgtcctaaagctgttggctgggagaagaaccagaaaggaggcatgggaccaaggatggtgaacctcagcggatgcatggaccccaaaaggctggctgagtcatccgtggatctgaatctcaagctgatgtgttggcgattggtccctaccttggacttggacaaggttgtgtctgtcaagtgcctgctgctgggagctggcaccctgggatgtaatgtggctaggacactgatgggctggggcgtcagacatgtcacatttgtggataatgccaagatctcctactccaaccctgtgagacaacctctgtatgaatttgaagattgtctggctggtggcaagcccaaagccctggctgcagcagaacggctccagaaaatatttcccggagtgaatgccagcgggttcaacatgagcatcccgatgccaggacatcctgtgaatttctctgatgtcacgctggagcaggcacgcagagatgtggagcagctggaacagctcattgagagccatgatgtcatcttcctgttaatggacaccagagagagccggtggcttcctgctgtcattgcggccagcaagcggaagctggtcatcaatgctgccctggggtttgacacctttgttgtcatgagacacggcctgaagaaacccaagcagcagggcgctggggacctgtgcccaagccaccttatggcacctgctgacctgggctcctccctttttgctaacatccctggatacaagcttggctgttatttctgcaatgacgtggtggctccaggagattcaaccagagaccggacgctggaccagcagtgcacagtgagccgcccaggcctggcagtgattgcaggtgccctggctgtggagctgatggtttctgtcctgcagcatcctgaggggggttatgccattgccagcagcagtgatgaccgcatgaatgaacctcccacctctctgggacttgtgcctcaccagatccggggatttctgtcacggttcgataatgtccttcctgtcagcctggcgtttgacaaatgtacagcctgttcacccaaagttcttgatcaatacgagcaggaaggatttaccttcctagcgaaggtgtttaactcctcacattccttcttagaagacttgactggtcttacactgctccatcaagagacccaagctgcagagatctgggacatgagtgacgaggagaccgtctgaggcaaccacagcacag

SEQ ID NO: 1815 - DNA, 2138 bp, Cricetulus griseus
ccatcacacagcactctcgcatctggcccctgtatcttcgattcctgcgctcccacccactgcctgagactgctgtgagaggctaccgtcgcttcctcaagctcagtcctgagagtgctgaggagtacatcgagtacctcaaatccagtgaccgactagacgaggctgcacagcgcctggccacggtggtgaatgatgagcgctttgtgtccaaggcgggcaagtccaactaccagctgtggcacgagctatgcgaccttatctcccagaatccagacaaggtacagtccctcaatgtagcatcatccgtggtgggcttacccgcttcaccgaccagctgggcaagctgtggtgctccctggctgactactacatccgcagtggccacttcgagaaggctcgagatgtgtatgaggaggctgtgcgcactgtgatgccagttcgaggagagcatgattgcagcaaaagatggagactgcctctgaactggggcgtgaggaggaggatgatgtggacctggagttgcgcctggcccgttttgagcagctcattagccggcggcccctactccttaacagcgtcttgctgcgccagaacccacaccatgtccacgagtggcacaagcgtgtggccctgcatcagggccgcccccgggagattatcaatacatacacagaggctgtgcagacagtcggaccccttggcaagccccacacactgtgggttgcatttgccaagtttttatgaagataatggacagctggatgatgcccgtgtcatcttagagaaggccaccaaggtgaacttcaagcaagtggatgacctggcaagcgtgtggtgccagtgtggagagctggaggctccggcatgagaattatgatgaggccttgaagctgttgcggaaagctacagcattgcctgcccgccgggctgagtactttgatggttcagagcccgtgcagaaccgtgtatacaagtcgctgaaggtgtggtccatgcttgctgacttggaggaaagtctgggcaccttccagtcgaccaaggctgtgtatgaccgaatcctggacctgcgaatagccacaccacagattgtcatcaactatgccatgttcctggaggagcacaagtacttcgaggagagcttcaaggcatacgagcgtggcatctcactgttcaagtggcccaatgtgtcagacatctggagcacctacctgaccaaattcattgcccgctatgggggccgcaagttggagcgcgcacgggacctcttcgagcaggcactagatggctgtccacccaaatatgccaagaccctatacctgctttacgcacagctggaggaggagtggggccttgcccgccatgctatggctgtgtatgaccgcgctaccagggccgtggagccagcccagcagtatgatatgtttaacatctacatcaagcggggctgctgagatctatggtgtcacccacactcgtggcatctaccagaaggccattgaggtgctgtctgatgagcatgcccgtgagatgtgcctgcgatttgcagacatggagtgcaagcttggtgaaatcgaccgtgcccgggctatctacagcttctgctcccagatctgtgatcccaggacaactggggcattctggcaaacatggaaagactttgaggttcggcacggtaatgaggacaccatcagggagatgctgaggatacgtcggagtgtgcaggccacgtacaatactcaggtcaacttcatggcttcacagatgctgaaggtgtcgggcagtgccacaggcaccgtgtctgacctggctcctgggcagagcggcatggatgacatgaagttgctagaacagcgggcagagcagctagctgctgaggcagagcgggaccagcctcctagggcccagaacaagatcttctttgtgaggagtgatgcatccagggaggagctggcagagctggctcaacaggccaaccccgaggagatccagctgggcgaggaagaggacgaggatgagatggacttggagcccaatgaagtccgactggaacagcagagcgtgccggctgctgtgtttggaagcctaaaggaagactgacaccctccacaccttttttctccctatggtcccacccc

SEQ ID NO: 1816 - DNA, 2137 bp, Cricetulus griseus
  modified_base (233)..(233): a, c, t, g, unknown or other
ggagttgaagcagaagaatggggtaaatttcttcacaccaaaaacaagctttatacagattttgatgaaattcgacaagaaattgaaaatgaaactgaaagaatttcaggaactaataagggagtaagccctgagccaatccaccttaaagttttctcacccaacgttgtcaatctgacacttgtggatttaccaggaatgaccaaggtacctgtaggtgatcagccaaaggntattgagcttcaaatcagagagcttattcttcggttcatcagtaatccaattccatcatcctcgctgtcactgctgcaatacagatatggcaacatcagaagcactcaagatttccagagaggtagatccagccagagctgaaaacaaggataaatgtcttagctgctcaatatcagtctcttctaaatagctatggtgaacccgtggatgataaaagtgctactttactgcagcttatcaccaaattcgccacggagtactgtaacactatcgaaggaaccgcaaagtacattgaaacttctgagctatgcggtggtgctaggatttgttatattttccatgagacttttgggcgaacctttagaatctgttgacccgctaggtggccttaacactattgacattttgactgccattagaaatgctactggtccccgtcccgctttatttgtgcctgaggtttcatttgagttattggtcaaacggcaaatcaagcgtctagaagagcccagcctccggtgtgtggaactggtccatgaggaaatgcagaggatcattcagcattgtagtaattacagtacacaggaattgttacggttccctaaacttcatgatgctatagttgaagtagtgacgtgtcttcttcgtaaaaggctgcctgttacaaatgaaatggtacataacttagtggcaattgagctagcttatatcaacacaaaacatcccgactttgctgatgcctgtgggctaatgaacaataatatagaggaacaaagaagaaacaggctagcaagagaactaccttcagctgtatcacgagacaaggttgtatctgtaggaggtgggattggagatggtggtcaggaaccagcaacaggcaactggagaggaatgctgaaaacttcaaaagctgaagaattgcttgctgaagaaaaatcaaaaccaatcccaattatgccagcaagtccacagaaaggccatgctgtcaatttgctggatgtgccagttccagttgcacgaaaactgtctgcccgtgaacagcgagattgtgaggttattgaaagactcatcaaatcctattttctaattgtcagaaagaatattcaagacagcgtcccaaaggcagtaatgcattttttggttaatcatgtgaaagatactcttcagagtgaattagtaggacagctgtataagtcttccttactagatgaccttctgactgaatctgaggacatggcacagcgcagaaaagaggcagctgacatgctaaaggcattacaaggagccagtcaaattattgctgaaatccgagagactcatctttggtgaacagaactgtcgaacacctagacttttgacttgaacttgctagctactgcctacctgagtagacgtttatttatgaactcctgtgtactgcagtgtatgaatttgctcttgtgaagactggctagaagctgaaaagtatactctgcattacaaaaatcacacacttaattcacatttttaaagtttcccatgatacatgtatatcaagtctgtttcagtcacgcttacaagaacagttgatgttctagttgtacaaagcagtttgtgtgtggatatgatgacctgtgtaactttttgtagtcttaaagctgcagccgtagtcctcagaaagggagctccaggacatttcatgactgtaatgcatgcactatttatatagactcatctggctgtaaaagatggagcttggcaaattcctcacataatcaatgtatccacctatccttcatttttatagtcttcaaaaacaaaacctataatctttgctgttttgagaaatgtgtaagatctgaaagactatcataaagatgtaggaatatactctgtagttatattagcaaggaaaacaagaaca

SEQ ID NO: 1817 - DNA, 2137 bp, Cricetulus griseus
tgccacccacacaggcccggagtctgcgctttgttaccttgctgtatcgacatggagatcgctcaccagtgaagacatatcctaaggacccctatcaggaagagaagtggccccaggggtttggtcagctaaccaaggaggggatgctacagcactgggagctaggccaggctctgcggcagcgctatagtggttttctgaacacctcttaccaccggcaggaggtttatgtgcgaagcactgactttgaccgtactctcatgagtgctgaggccaacctggctggactcttccctcccagcgaagtgcagcgcttcaatgctaacatttcatggcagcctatcccggttcatactgtgcctgtcactgaagacaggttgctaaagtttccattgggcccatgtccccgttatgagcagctgcagaatgagactcggcagacaccagagtatcagaacaagagtattcagaatgcacaatttctggacatggtggccaatgagacaggacttacgaacctgaccctacgagaccatctggaatgtgtatgacacactcttttgtgagcaaacacacgggctgctcctcccgccctcgggcctcaccccaaaccgtgcagcgtctgagccagctaaaggacttcagtttcctcttcctcttcgggatccacgagcaagtacagaaggctcggcttcaggggggagttctgctggctcagatactgaagaatctgacacaaatggcaaccacctctcaattccctaagcttctggtttactctgcgcatgatactaccctggttgctctgcaaatggcactgaatgtctacaatgggaaacaagccccctatgcttcctgccacatatttgaacttcatcaggaggataatgggaatttctcagttgagatgtactttcggaatgacagtaagaaggcaccctggcctctgatcctgcctggctgctctcaccgttgcccactgcaggacttccttcgcctcacagagtctgtcatacccaaggattggcagaaggagtgccagctaacaagtgatactgcagacacggaggtgattgtggccttggctgtctgtggctccatcctcttccttctaatagtattgctcctcactgtcctcttccggatgcaggctcagcctcctggctaccaccatgtggcagacagggaagaccatgcttgacaaccactcagtccccttccctctgcctcctaggggaggtgggctgagtccttgctcctgactattgctgatcccagcccatgggcaggttagcctccctgattacctaagcccagatgaatgagtgaggctcagctggacgcatgacacctgtgactcaccatctacatgcctgatgtttaccatgtgctgtgttggacactggctttctccaaatgggatttgcctcttctatactccctaaggacctgagatacagactagcattcaggcttcactcaggacctgggataaaaaagaaaaaaaaactgaagaagccggtacttgacctgccttgctcttccaccaagccttgttctttgtcttcttctagcccatatctttggcaaatggcttagaggacattgtcccttgatacttttttagaggcaaaaaactacaaatcactgggagcataaaatgtggctatcgaggaactggatcatccaacagcaaagtttccctgtggctgaagctactgttagtgtcaacccttaactgtggcccaaaatagggctgaagtgactccgaggaaatgaaggtttgactgtgagtgctggctctgtgcctttcttttctcccgtttgacatccaaggagcactcgttaccaggttatactaggtctgctcagaagcccaggtggctttggggttttttagttggggtgtacaaaggataagcttttattggctatgtccaagattgaacataaattttaaaaattacctggttattctgctaccacatattagaaaaaagaaaagtaaccttggctctaggacaaaacttggctctgggctaaacatagcagggactcttagtgcagtggttttctcttcgtttctggagcaaaatctagagcagtaacatgccagtatcttagttgcacagtatcc

SEQ ID NO: 1818 - DNA, 2137 bp, Cricetulus griseus
gccaggctgggtccgagcatcccgctgcttcggacccgcccggcccggacatggcgagcgtccgggcctccccgcgaggcgcactgctgctgcttctggccgcggcgagggttgcggaggtggcggggggcctggccccgggcagcgcgggtgctgtatgttgtagtcattcaaaggataaccaaatgtgccatgatgtctgtgaacagattttctcctcaaaaagtgaatcccgactgaaacacctgctgcagagagccccagattactgcccagaatcgatggttgaaatttggagttgtatgaattcatctttgccaggtgtatttaagaagtccgatggttgggttggcttaggctgctgtgaactggctattggcttggagtgtcgacaggcgtgcaagcaggcatcttcaaagaatgatatttccaaagtttgcagaaagaatatgagaatgctcttctcggttgcattagcagctccctgggtgggtcaccaggactctgcactttgtaccaaagaggaaaaagcctctcttacagaggccccctgccagcccttctgcagagctgcagagcctgtttgcgggcacaatggtgagacttacatcagtgtgtgtgctgcctactcggatcgtgtggcagttgactactatgggccctgccaggctgttgggggtcctctctgaatacagtgctgtggccgagtgtgctgctgtgaagtgtccttcactctcatccatgggctgcaaacccgtcattccacccggtgcttgttgcccattatgtgctgggatgttacgggttttatttgacaaagaaaaactggacactattgctaaggtgacaaacaagaagccaattacagttctggagattcttcagaagatccgcatgcacgtgtctgtcccacagtgtgatgtgtttggatacttgagcatcgagtcggagattgtgatcctgattatccctgttgaccattatccaaaagctttgcagattgaggcctgcaataaagaagcagagaaaatcgagtccctcatcaactcggacagccccactctggcgtcccatgtccctctctctgccctcattatttcccaggtgcaggtctccagaagccttccatcctctgctgtgaaggacaggcctccctgccactccctgctcctcttcagcctgggtctcgccatgcacttgctgtggattcgcccctgactgcccacaaccaccttgtgaagacattcaggactgttagcgggtggccgagaaaaagcacgtgtcacctcttagcaccacacagtatttttttcctgtcttgcaagtggtcctcccagtaattgccagtttgtgcctgtgaatggggcagccccagtgcatccaagcgtcttgggttgtgcagttttatattagccagataggctggtcagtactcaccacgttcagagagtttaactatcagactttaaaccaattgctgctactatataattgccaaaaagtaagataattagttcatgtaaatagtacatgattttttaattttattatgaaggtgaatagccatatttgtaaatgacaatcatatgtgttagccctgtactttccgttcatgaagacacatttgcttttgtgatgtgcacagtgtggataagtgtctgtctgactttctttttatatagaattataaagactgtggtttatatatttaaaatgtcaggctaagtattaaaatgtttgtatgttgtctaagaaattggatactttgaatgtttcacagtttgaaataagctattaatgtaatacttattgtttgtatgcacctgaacttagattttacatgaagtatttttcagtgttacttgtaccctctgaaatttagcaatatgcttattataccaaaatgttgttgaaaagtgggcacttagagctttcagaggatctccgtgctgatgttaatgtagactctgtcacaattgcctgtttctgtctaagtgtcttcaacatactagactatattgtgtatatatatattctatatatagtataccataatatactatatatgtatctatatatagtatacatcaatatactagaaagcttttctatttttaataaaagtaattttatatga

SEQ ID NO: 1819 - DNA, 2137 bp, Cricetulus griseus
gtggcacccttaggtaccaaggagccctccaggtctgacaaagggaagggcactgcttgggcagattgtagtagcacagttggccagcctacatccccagtacctggccccactgatgcaagccagggctcagaaggcccagccccacactccgccattgaggagaaggtgatgaagggcattgaggagaatgtcttgcgacttcaaggtcaggaacggacaccgggctctgaagccaagcaccgcaacaccagcagcattgccagctggtttggccttaaaaagagcaaactgccggctctgaacccgccgcaccgaagctaccaagagcaaggaaggggccagtggaggctccccgctccggaaagaagtcaagactgacacccggaagctggaagctgagagcctcaacatctccaagctgatggctaaggcagaggacctgcgccgggcactcgaggaagagaaggcctacctgagcagcagagcccgcccacggcccccccgggcccagccacagtgcctggctcaggtctggggcaagtgcaaggccagctagccggcatgtatcagggtgcagacaccttcatgcaacagctcctgaatagggtggatggcaaggagctgcctcccaagagctggcgggagcccaagcctgagtatggggatttccagccagtgtccactgatcccaagagtccctggcctgcctgtgggccccggaatggcctggtaggcccacttcagggctgcggaaaaccttccggaaagcccagcagcgagccaggtaggcgggaagagatcccctcagatgtcagcctggccgagccagtttccaccgcacacttcacagcctgtggctccttgactcgaaccttggacagtggcattgggaccttcccacccccagatcatggcaacagcggaacccccagcaagaatctccccaagaccaagtcactgcgcctggagcccccgccaggggcacccctagctcggcctcctgccctcaccaaagtccctcgccgtgcccacacactggagcgggaggtgccaggcattgaagagctgctggtgagtgggcggcaccccagcatgccagcctttcctggactgctcactgctccttcaggccaccgaagccatcagacctgtcctgatgatccctgtgaagacccaggccctcccccacctgtccagctggccaagaactggaccttccccaacacccgagcagctagcagctccagtgaccccttcctgtgccccatcccgacaactggagggactgccctaggacccccatggccctgcctgtggaccggaagcagagcctagagcccagccgcacatctacgcctcagggcccagcatttgggggcagtcgtacccccagcacgtcggacatgggcgaggaaggcagagtggccagtgggggagctgccgggctggagacctcagagtccctaagtgactcactctatgactcactgtcctcctgtgggagtcagggctgagggaccacacccactacagttcccctggagctgggaccccaggctgggccctattttcacactccatgccttggagccagtgaggctccatctgaagggaccaagaagaaggtggataagaaggtgacaggggtccctggcacaccccactgctgctgtggatgagacaaccatgctcggctcagggagagacctcacccctggtcccttgactcccccagagtcaggctcttctctaagggactgggggccccaggctgctttgtcccagctcccacttcaggcggagccatcttgtggtgctgggcttcctgcccgccatctctgccatctctgcccaacctggctgcaaccctgcccccagagccccccatgggggccaattttggaagccccaggcttgtggattttgggggtgaggggggacaagttgccttctctttctgccctggtcctccctgctgtctgaatggtgctgcctcccttccccacgtctttggggtctgtttgtctgtcttcattctttgtttttatatatatgcacatacatgcatataaaagcgcctggttcagtccccacacccaacccgcactgcggttatttatctgttgttaaaagc

SEQ ID NO: 1820 - DNA, 2137 bp, Cricetulus griseus
tacctgctggtagtgtccactggagagtgtctgagtcaggagaccatccttctgggagtggactttcctgacagcagttcccacagctgcaccctgggcctggtcttgcccctctggagtgacgcccaggtgtacctggatggcgatgggggcttcagtgtgacatctggtggtcagagccgaatcttcaagccagtctccatccagaccatgtgggccacactgcaggtattgcaccaggcatgtgaggcagctctaggcagcggccttgtgcaatgagtggatggccatgtctgacctggagtccctgcgaccacctattgctgagcctggacaggcctcggaacaagagcagatggagcaggcgatcctggctgagctgtggcaggtgttggacaccagtgacctagagagtgttacttccaaagagatccgccaggccctggagctgcgtctgggatgcccccttcagcagtaccgtgactttattgacaaccagatgttgctgcttatggcccagcaagaccgagcctcccgcatcttcccccacctctacttgggctctgagtggaatgctgccaatctggaggaacttcagagaaacagggttagccacatcctgaacatggcccgggagattgacaacttcttccctgagcgcttcacctatcacaacgtgcgtgtctgggacgaggaatcagcacagctgctgccccactggaaggagacacaccgcttcattgagcgtgccagagcacagggcactcgggtgctagtccactgtaagatgggtgtcagccgttctgctgccacggtgctggcctatgccatgaaacagtatggctggggtctggagcaagccctgatccatgtgcaggagctccggcccatcgtgcgccccaaccctggcttcctgcgccagctacagacctaccagggcattctgactgccagccggcagagccatgtctgggagcagaaaagtggggtgtggtctccccagaggagccccctggcacctgaagtttctacaccattgccacctcttccaccagaaccaggaggcagtggggaggtgatggttataggttccaaggaaagccaggaagcccccaaagaagagcttgggctgaggccccgcatcaacctccgaggagtcatgcgctccatcagtctcctagagccctcctcggagccagagagaaccccagaggctggagacctggccagaggttttctcttcagatgaagagcctcttcatcccttccctcagatttcaacagccaaaggtggtcacagccaaagggcccacagggggccttggcctgccctgaagtctcgccagtctgtggttgcccttcatagtgctgccctggtggctagcaggacccgggccttccaggagcagggacaagagcaagagcagcgggaggctggtatgccttctacacctaggctccggaaagtggtgaggcaggccagtgtagacgacagcaaagaggagggtggggcctaagcctttatactctgtcccgctagacactaaacagactggtcacagctcctcagatgagcacctttgcacctctgggcctgcacactccatatagctagctcctccccagcagtccctagacctttgtcatttcctgcagccttaggtctcaggtagctcatgtctacctgtcaagggctcaagactttttctacatagggtatatgagtagaaccattaatggtgcctttaagggtaataacaccctagtttcattttagggcaggttttctggttcatgtcccccttgccctcaacttttggccatcctgtcccactcctcccacctctcctcctgaagtcctacaggcagctaggccaagggtccagggaccacaaaggtagatagcactttcagtccccagccccataggctctgagggggctcagagttcacccttcacacaactgatcagaatctctgctgctgctgagttctcccatggccctcacagggtctcagggcactgggctaaagagagtcttcttgtttttgaagatctctggccagtcaagtttttcatagtcgtgtagtatctggctttgtactgaagtaaataaaagacattttcatattaaaa

SEQ ID NO: 1821 - DNA, 2137 bp, Cricetulus griseus
  modified_base (7)..(7): a, c, t, g, unknown or other
  modified_base (460)..(460): a, c, t, g, unknown or other
acccgcnccgaacgctcggtgctggagctggtgcggcccaggcgcccttcctggttacactgcactacgctttccagacggatgccaagctgcacctcatcctggactatgtgagcggtggcgagatgttcactcacctctaccagcgccagtactttaaggaggctgaggtttcgagtgtacgggggtgagattgtgctggccctggaacacctgcacaagctgggcatcatctaccgtgacctgaagctagagaatgtcttgcttgactcggaaaggtacacattgtcctcacagactttgggctgagcaaggagtttctgacggaggagaaagagcggaccttctccttctgtggcacaatcgagtacatggccccgaaatcatccgaagcaaggctggacacggcaaggctgtggactggtggagcctgggcatcctgctcttcgagctgctgacnggggcctcgcccttcacattggagggagagaggaacactcaggccgaggtgtctcgacggatcttgaagtgcctcccctcccttccccctccggattcgggcctggtggcacaggacctgctacagcggctgctgtgcaaagaccctaagaagaggttgggcgcgggtccccagggtgcgcaggaagtcaagaatcacccctttttccagggtctggattgggctgctctggctgccaggaagatcccagccccattccggccccagattcgctcagagctggatgtgggtaattttgcggaagaattcacccggctggagcctgtctactcccctgctggcagccctccacctggggactctaggatctttcagggatactccttcgtggcaccgtccatcctcttcgaccacaacaatgcagtgatgactgatgtgctggaggcacctggtgcattttgtatatgatgctgtcggggcaggttcccttccaaggggcttcaggccagggcgggcaaagccaggcagctgagatcatgtgcaagatccgggaagggcgcttctcactggacggggaagcctggcagggtgtgtcggaggaagccaaggaactggtccgagggctactgacagtggaccccgccaagcgactgaagctggaggggctgcgaagcagctcgtggcttcaggatggcagcgcgcgctcttctcctccgcttcggacgcccgatgtgctggagtcctctgggccagctgtgcgctctgggctcaacgccactttcatggcgttcaaccgaggcaagcgcgagggcttctttctgaaaagcgtggagaatgcgcctctggccaagaggcgcaagcagaagctcaggagcgcagccgcctctcgccgcggctccccagtgcctgcctcctccggtcgcctatcagcctctgccaccaagggggcaccccgccgagccaacggccccttgtccccctcctagctcccgccactgtgacccccttctccttaggagctgtgacccgcgagcccggtgctgccaccagacttatgccagtggctcccactctgatccccaggaattgccctgccctccccacccagtcccagacagagcagaagtatttttataagcagagattttttaaaaatgtcttaccagataagagttagggacacagggaagcaagtgttgtgagcagagtggggtttgcccacccccaccccccacactgcctcatcaggagagaaggcccctcccagggcctactccactaagcaagggcatcctctgccattcttaagcacgcagttgccatggggaacaaatcaggagccctgtcactttatggaccgtgtgcaattatgtccaccaaagacctgtgttgggaatgagagagaaaccctggggaacctctagagcattactgagatacatcacttttatgtcagctggcttctcccctagtggggctaaggaaggaggtaggtgctccctacagggaagcccctttctcactcacccattcctcatgggcacagctgcttctggctgcgggtggagccttgggggtctgggcttggcatccacagtcactgcctcagcccttttaggctgtgcctttgactttaaaataaaactccattcagtgtaacaaaaaaaaaaaaaaaaa

SEQ ID NO: 1822 - DNA, 2137 bp, Cricetulus griseus
ctctgcaccggcccggccaggttcgcgtagcaaatttaggagcatgaatgcagcggccaaaaagctggctcgagcaccagccgatctcgggaaagctggggttcctggagatgcagctaccggtgccccagtgaccgccccgctgtcgaaagagattcctgaggtcttagtggacccacgcagccggcgccagtatgtgcggggccgctttctgggtaaaggaggatttgccaaatgcttcgagatctcggatgcagacacaaaggaggtgttcgcaggcaagatcgtgccgaagtctttacttctcaagccccaccaaaaggaaaagatgtctatggagatttctatccaccgcagcctcgcacaccaacacgtcgtaggcttccacggcttttttgaggacagcgactttgtgtttgtggttttggagctctgtcgcaggaggtctctcctggaactgcacaagaggaggaaagcgctgaccgagcccgaggcacgctactatctacgtcagatagtcctgggctgccagtatctgcaccgaaatcaggtcattcacagggacctcaagctaggcaacctcttcctgaacgaggatctggaggtgaaaataggggactttgggctggcaaccaaagtggaatatgaaggtgaacgaaagaagaccttatgtggcactcctaactacatagctcccgaggtgctgagcaagaagggacacagttttgaggtggatgtgtggtccattgggtgtatcatgtacaccttgctagtgggcaagccaccttttgagacctcatgcctaaaagagacctacctccggatcaagaaaaatgaatacagcattcccaagcacatcaatcccgtggccgcctcccttatccagaagatgcttcagacagaccccactgcccgccccaccattcacgagttgctcaatgacgagttcttcacttctggttatatccctgcccgtctccccatcacctgcctcaccatcccaccaaggttttcaattgctcccagcagcctggaccccagcagcaggaagcctctcacagttctcaataaaggtgtggagaacccattgcctgaccgtccccgggaaaaggaggaaccagtggttcgggagacgaatgaagccattgagtgccaccttagtgacttgctgcagcagttgaccagtgtcaatgcctctaagccctcagagcgagggctggtgcggcaagaggaggctgaggatcctgcatgtatccctatcttctgggtcagcaagtgggtggactattcggacaagtatggacttgggtatcagctgtgtgacaacagtgtgggggtgctcttcaatgactcaacacgcctcatcctctacaatgacggtgacagcctacagtacatagaacgtgatggcacagagtcttacctcaccgtgagctcccaccctaactcgttgatgaagaagatcacgctcctgaagtatttccgaaattacatgagtgaacacttgctgaaggcaggggccaacatcacacctcgggaaggtgatgaactggcccggctgccttacctgcgaacgtggttccgcacacgcagtgccatcatcctgcacctcagcaatgggactgtacaaattaacttctttcaggaccacacaaaacttatcctgtgccctctgatggcagcagtgacctatatcgatgagaagagggacttccgcacataccgcctaagtcttctggaggaatatggttgctgcaaggaactggctagccggctacgctatgcccgtaccatggtagacaagctgctaagctcgcgctctgccagcaaccgcctgaaggcctcctcttaggcctctgtccttcggactggtgctgcttcactctgcaagctctgtgtgggcctgcactgctgggctcctggggctgctgtccagtgctccctggcctctgggggctgggtggggagcagtgcaccccctgaaggggttgctgtgtaagttattttgtacatgtttgggtgtgggttacagcctcctcccctgccctcagcccactgtatggattgtatagatatttctattgaacttgggactgcccttttattagtctttatatacatttaaatatatgtacat

SEQ ID NO: 1823 - DNA, 2137 bp, Cricetulus griseus
ctatgagcctggagtactcggctactttgagttcagtggttcacctcagccccctggctacttgaccttcttcacctcagcactgcactctttaaagaaagattacctaggaacaatacgatttggggttatcacaaataaacatcttgcgaaactggtatccttagtacactctggaagtgtgtatttacatagacatttcaacacatcacttgtcttccccagggaagtcatgaacttcacagctgagaacatctataagtgggcctcagaaggagacactcttccgatggctgcagccccatggaggcaagagtctgctgttgaacaatgagctgaagaaaggaccagcactcttcctattcataccttttgatcccttagctgagaggcatcctctcctggatgagatcaccgaagtggccttggagtacaataactgtcggtggggaccaggtggtggagcgtctccttcagcaccttcggcggatggaggcacctgtgttccagtccctggcaccagagctgccagctccactgcctgatgttcagctgatggcagcgtctccctgctgtaacacggtggtgctgccacaggggccagccctctccaggacccacaatgtctgtgaactgtgtgtcaaccagacagtgggtggtactaagccgagctcagtgagcatgccacagtgcagcttcttcgagatggcagctgctctggattctttctacctcaaggagcagactttttatcacgtggtgtcaggcagcatagaatgcagtcaattttttaaccttcctaccagccctttcagctactacactgcatgttgcaggaccatatcccggggcatggcaagcttcactggctctgaacaggatgtctttacagccccggctatcacattctcttccctcaagaagagctgtgaggccactgccccaagctccattcctcacattgaggagaacaggtaccactttcctgaagtgggcctcactagcacaaccttcacaggcctgagctgcagaaccaacaagaccctgaatatctaccttttggattccaatttattttggttatatgcagagagactaggtgcccctagctctgctcctgtgaaagagtttgccacaattgttgatgtgaaagaagagtcgcactatatcttggaccccgaacaagccctcatgaagttcactctagagtcttttattcaaaacttcagtgttctctacagtcccttgaaaaggcatcttactggaagtaattctgcccagtttccgtctcggcatttaatcactgaagtgacaactgataccttctgggaagtaactcttcggaaacaggatgttctgctgctctattacacaaaatggtgcggcttttgcccatctctcaatcacatcttcatccagctagctcgactcctgccagaagatacatttactgtggctaggattgatgtgtctcagaatgatcttccttgggaattcatggttgaccgtcttcctactgttttgtttttccctgcaatagaaaggacctaactgtgaaataccctggagacctccccatcacccttccaaatctgctgaggttcattctgcatcactcagaccctgcctcggcccctcaggactttgacatcagccctcctacccaagaatgtgtccagaacgaggcagtcctacagcgtgaacacatctctcacgtggagaataccatgcagaagctaaggtctgagatgagcagcctacgccgtacacaagagaaggtggagggccggctctttagtgcccgcagggatgggcaccgcctgctacgccgtcagcgtgctctggagcaacagcacaggttgctccgtcgccacagtcagaaactgcaggccctgtatgtgcagaaggctcgtgagctccaagagctggccagtgcctcagagactcccctccctgagcacacatggctcaagatccttctggccactatggagagggagctggaaggccagggtggagctaaggaatcagcccctctggaaaaggctcaccccaaccactctaagttgaaggaatcagaggtgaaaactggtacattgggaatatatttatgcaaaattttattgaaatttattgt

SEQ ID NO: 1824 - DNA, 2137 bp, Cricetulus griseus
actacagacagaaggctgctgcagcaggtagaatcccacaaactaccttagaagggagattggctcttctgacaaagaaattctcacaagtcgaataatagatcgttcaattcgacctctctttccagcgggctatttttatgatactcaggttatttgtaatctgctagcagtagatggtatccatgaacctgatatcctagcaattaatggtgcttctgcagccctctccttatcagacattccttggaatggacctattggggcagtacgagtaggaatgattgatggagaatgtgttattaacccaacaaggaaagaaatgtcttctagtactttaaatttagtagttgctggagcacctaaaagccaaattgttatgttggaagcctctgcagaaaacattctacagcaggacttctgtcatgctatcaaagttggaatgaagtatacccagcagataattcagggtatccagcagttggtaaaagaaattggtgctgctaagaggacaccccagaagatattcaccccttcaccagagattgtgaaatacactcataaaatcaccatggagaaactctatgcagtttttacagattatgaacatgataaaatttctagagatgaagcagttaacaagataagactagatacagaggaacaactaaaggaaaaatttccagacgtcgaccaatttgagataatagaatccttcaatgttgttgcaaaggagattttcagaagtattattttgaatgaatacaaaaggtgtgacggacgggatttgacttcactgagaaatataagctgtgaggtagatatgtttaaaacacttcatggatcagcagtatttcagaggggacagacacaggtgttctgtactgttacatttgattcattagaatccagtattaagtcagatcaaattctgacggctataaatggggtaaaagataaaaatttcatgctgcactatgagtttcctccttatgcaaccaatgaaactggcaaagttactggtatgaatagacgagaacttgggcatggtgctcttgccgaaaaagctttgtgtcctgttattcccaaagactttccttttaccataagagtcacatccgaagtcctcgagtcaaacgggtcatcttctatggcatctgcatgtggtggaagtttggcattaatggatgcaggggtcccaatttcatccgctgttgccggtgtagcagtgggattggttaccaaaaacaatccagagaaaggtgaaatagaagattatcgtttgctgacagatattctgggaattgaagattacaatggtgacatggatttcaaaatagccggtacaaataagggaataactgcattacaggctgatattaaattgcctggaataccaattaaaattgtaatggaagccattcagcaagcatcagtggcaaagaaggagatattacagataatgagcagagcaatttcaaaacctcgagcatctagaaaagaaagtggaccagtcgtagaaacagttaaggttccattatcaaaacgagcaaaatttgttggacctggtggatatcacttaaaaaaacttcaggctgacacaggtgtaacaattagtcaagttgatgaagaaaccttctctatatttgcaccaacacctagtgcaatgcatgaagcaagagacttcattaccgagatttgcagagatgatcaagagcaacaattagaatttggagcagtttataccgctacaataactgaaatcagagacactggagtaatggtaaaactgtacccaaacatgactgctgtgctacttcataacacacagcttgaccaacggaagattaaacatcccactgccctaggattagaagttggccaagaaattcaggtcaaatactttggccgtgatccagctgatggaagaatgaggctttctagaaaagtacttcagtctccagctataactgctgtcaaaactctaaatgatagaagcagcattgtaatgggagagcctatttcacagtcatcatcaaactcttccccttgactcttttggaaatggtattcaacaatgatattctgcaaagcatattttaacagttctgtccaaatgtgtagatttatatataat

SEQ ID NO: 1825 - DNA, 2137 bp, Cricetulus griseus
ggctgcagtctcggtgtgaaggcggccggagcggctgtctcgactaagatgaggttcctgctgcttctcctggtggcggcgtcggcggtggtccgcagcgaggcctctgccaacctgggcggcgtgcccagcaagagattaaagatgcagtatgccacggggccgctgctcaagttccagatctgtgtatcctgagggtacaggcgggtgtttgaggagtacatgcgggttattagccagcggtatccagacatccgaattgaaggagagaattacctccctcaaccaatttatagacatatagcatctttcctgtcaatcttcaaactagtattaataggtttaataattgttggcaaggatccttttgctttttttggcatgcaagctcctagcatctggcagtggggccaagaaaataaggtttatgcatgtatgatggttttcttcttgagcaacatgattgagaaccagtgtatgtcaacaggtgcatttgagataaccttaaatgatgtgccggtctggtctaagctggaatctggtcatcttccatccatgcaacaacttgttcaaattcttgacaatgaaatgaaactcaatgtgcatatggattcaatcccacatcatcgatcatagccctacctattggcactgaaaactattttacactaagggattttgcaagagcagcgtgactgacattatgaaggcctgtactgaagacagcaagctgttagtacagaccagatgtttcttggcaggctcgttgtacctcttggaaaacctcagtgcaagatagtttttccattgttggcacatgctgaattctgcacatacatggagtgcaatgcaatgatactgtgtagcttccccagcccactgttaatagtttcttcttggcgtggcattactacttgtaacttctttttttggtctaagtttgagaaagttcagaattgaattacaacttgagttttttttcaagatgtgtgttaagcttgttgtgtttttatatgaattttcatttttttacagtttaatgttagttttcttggaaacacctgaagttcccaaataatttataaaagtttatcagatagctctaatttggttttgcttaatatatagttttcagaacactgcagattgtgaacagtaaattatacaggattatggggggaaatccaatatccagagtactctactgtgtgtgtgtgtgtgtgtgtgtgtgtgtgtgtgtgtgtgtgtgagagagagagggagggtcttaaaaccttgttaatatgattgcttatcactccagactccacatcttgtaaagtttagcatcagaggggcctttcttcaagtaatggacattccatttgtgacacaattagctttatggcatgtagacattcagaatttgggccatggatgttcatgtgtacttggcaggtcaaactatgaagaacctaaagtcaaatccaactttctccatgtttgccttagattgattttgtctcctagataatagctttaactgtcttagacatctagtaaaattcagctgttttatccacactcgtctgttgtcatatttaaatccagaatataatattctactaaagagataaatgagatgcatggatataaaaattataaggtaaaggagaaagtaaactatttataactttattactaacaatttaaaatttattagttgcatataaattggtatagccatatagctacaaaatgtctgtgctctataaatcagagaactgaggacttgtcaataggctagctaattttactggagttttcaacacagttgccattgtggaaggtttttgcattaatgaaaaagttggtaaacatggcgttaggcctcagtgtgtaagatgtacaggaacacctgctttctgaatgtgagtagcattggttatggcactagcattagtgacagttgctcagcctgaacagctgtgaaatgtgatgagatcccgtgatggttcattctttccttaaaggtttattagtttggaattttgattgactggcacattctatcattgtcctaacttaaaataattcaagtttaaaagtttttttaaaacattgatttgatatttgaagggtcttttactttaaaaaa

SEQ ID NO: 1826 - DNA, 2136 bp, Cricetulus griseus
aatgcagtttgttcggactgagcaagatgaaactggaaactgggttgaagatgaagagcagatggtacgcctgaaggccgatgtggtcattagcgcctttggttctgtcctgagtgatcccaaagtgatggaagccttgagtcccatcaagtttaacagatggggtctcccagaagtagacccagaaaccatgcaaaccagtgagccatgggtatttgcaggtggtgatattgtaggtatggctaacaccactgtggaatctgtgaatgatggaaaacaagcttcttggtacattcacaagtacatacaggcaggatccagagctggtgaggaacatctgtcgctgggttaggcaagctgttcgggttccattttttgccaagttgaccccaaatgtcaccgatattgtaagcatcgcaagagcagcgaaggaaggtggtgcagatggtgttacagccaccaacactgtttctggcctgatgggactgaaagctgatggcactccgtggcctgccgtgggcattggaaagagaaccacatatggaggggtatcaggaactgccatcagacctattgctttgagagctgtgaccgccattgcccgtgctttgcctgggtttcctattttggccacaggtggaattgactcagccgaaagtggacttcagtttcttcatagtggtgcttcagttctccaggtatgcagcgctattcaaaatcaggacttcactgtgattgaagattactgcactggcctcaaagccttgctttatctgaagagcattgaagagttagcagactgggatgggcagagtccagccattatgagtcatcagaaagggaaaccagttccacgtattgctgagctcacaggacagaaactgccaagctttggaccttaccttgaacagcgcaagaaaattattgcagtgagtaaaatcagagcgagagatacaaaatggaacttgttctccactccagagaaagcccttcatcccaacaaaagcctattcctgctatcaaggatgtaattggaaaagcgctgcaatacctgggaacatttggtgagctgagcggtgtagagcaagttgtggccctgatcaatgaggaaatagtgcatcaattgcggcaaatgttacatgacctgtaatgactcgtggctaccaggctataacagtttgatccagaaaactcacctgcctactcgttaccgacacctgcacaggctgcactctctgcctcagcgtctgtcctattatcgactgtatcaggatggtttccaggacaacaccttatgaaccaaagagaggcttacccttagctgtgaagccagtgtgttaaggtgatttgtaagatagttgctgtgaactttgatgtgaccgacataggctgatctttaaacacagcggtaaggaatcattgtggtcagttcttttccaaattttatagaatcattgtggtcagttcttttccaaattttatagatttacacatataattactaaataaaatgtctaaattggaaagcaatgtctaatgccagtgaccaattaatggtcataaaaatggaataattctttttctgaggtagctggtgagtaactgcataccagttaattggatgtgctccgtcagttgtctactgtgaaaaattaacttttttcatggcaattagtgtgacaatttctaaattgccctatgccatgctcattctttgattcctaattgtaagtgaaatgaactattttggaacaaagtacagttacatatacaggaaaccgttgccaaggtaacactttgtaattaaaattacctgtaattttaacacaatttctaaggacgtgtaattagctccattaagaacgatcgaaaaacgtcaagtcattatttactatgacaaggggaacaaaacctgaaagggtgttttctagaattttcttctggtcccttttgtgaagtagctcactctttggtgctggacactaacagagagactatttcctgactaaaattcagttcagcactcatgcctgaaacaggtgtccagactactcagggatggaccacacgtcatttttatttgaatattgaagctgtgttcctgatgaaatgagatattgcttcttttagtcacct

SEQ ID NO: 1827 - DNA, 2136 bp, Cricetulus griseus
gtcgtacgtgcggctcggcggagggccgggcctgcgctctctccgccttcctacccacctccggctgccggctacacgggtatttgcagcccggtaccccgtgcgatcatcagccctttgcacgatgcctccaaaaaagggaggagatggaattaaaccacccccaatcattggaagatttggaacttctctgaaaattggtattgtaggattgccaaatgttgggaagtccaccttcttcaatgtattaaccaatagtcaagcttctgcagagaacttcccattctgcactattgaccctaatgagagtagagtgcctgtgccagatgagaggtttgacttcctttgtcagtatcacaagccagcaagcaagattcctgctttcctaaatgtagtggatattgctggccttgtgaaaggagctcacaatgggcagggcttggggaatgcctttttatctcatattagtgcctgtgatgggatttttcatctaacacgtgcttttgaagatgatgacattacgcatgttgaaggaagtgtagatcccattcgagatatagaaataattcatgaagagcttcagctaaaggatgaggaaatgattgggcccattatagataaactagagaaggtggctgtgagaggaggagataagaaactaaaacctgaatatgatataatgtgcaaagtcaaatcctgggttatagatcagaagaaacctgtacgcttctatcatgattggaatgacaaagagattgaagtgttgaacaaacacttatttttgacttcaaaaccaatggtctacttggttaatctttctgaaaaagactatataagaaagaaaaacaaatggttgataaaaattaaagagtgggtggacaagtatgacccaggtgccttggtcattccttttagtggggccttggaactcaagttgcaagaattgagtgccgaggagagacagaagtatctggaagcgaacatgacacaaagtgctttgccaaagatcattaaggctgggtttgcagcactccaactagaatactttttcactgcaggcccagatgaagtgcgtgcgtggaccatcaggaaaggaacgaaggctcctcaggctgcagggaagattcacacagactttgaaaagggattcattatggctgaagtaatgaaatatgaggactttaaagaggaaggttcagaaaatgcagtcaaggctgctggaaaatacagacaacaaggcagaaattatattgttgaagatggagatattatcttcttcaaatttaatacacctcagcaaccaaaaaagaaatagattttagttatctctcagataaatgtacaacttctaaaatgcatttattgggtttgggggttttgtttttaaattaaagtttctgaaatctaaagagacaaagaggagtgggaatcttctacaaattatttttatttgttttaaaattataaaatactgtgtatcttcaatgaaatgcaagttactaaacgtgaacagctttgcttttcacgtgattaagaccctacttcaaattgtagaagcttttcaagacccatattactctcatgatacttcattaatctccatcatgtatgccaggcctgacacattgacagtgaagacaatgtggcttgctcctttttgaatctacagataatgcatgttttacagtactccagatgtctacactcaataaaacatttgacaaaaccagccttggtgtgtttggggatgtctgtattgactgactgtggtgtgttgaatgcgatatggcacctgctggctgctgattacagaattttaaggcgtgtgtgtgacacaggaactggcagtgtggggcagctgcaattgtatcttaaaagtgtgtctttcatgggaattagaagaataatttaccagggattgtctcaaaaaaagttaattaatttgtagatggacatttattgaaagatgatagcagtgatattttcaaaggttataacataggtgactctgaccagaaagaacataattttgtttcagacattagtgtaattttgtttgttgttattgttctaaccaaatggaaggcatttttttttgcttttctttaaaactattaaattttaaaacttaaaaaa

SEQ ID NO: 1828 - DNA, 2136 bp, Cricetulus griseus
cggcccgctttgctgctacttcagaagcagctgtccctaccccagactggtgaactggacagcaagacactagaggccattcgtgcaccacgctgtggtgtcccagacttgggcaaattccaaaccttcgagggcgacctcaaatggcaccaccataacatcacatactggattcaaaactactcggaagacttgccgcgagacgtgatcgatgacgcctttgcccgcgccttcgcggtgtggagcgcggtgacaccgctcacgttcacccgcgtgtacggcctcgaagcagacattgtcattcagtttggtgtcgcggagcacggagacgggtatcccttcgacggcaaggacggtcttctggcgcacgctttccccctggccccggcattcagggagacgcccacttcgacgatgaagagctgtggtctttgggcaaaggcgtcgtggttcctacctactttggaaatgcaaatggtgccccttgtcactttcccttcaccttcgagggacgctcctatttggcttgcaccacagatggccgcacggatggtgcgccttggtgtagtaccacagccgactacgacaccgaccgcaaattcggtttctgccccagtgagacactctacacggagcacggcaatggggacggcaaaccctgcgtgtttccattcatctttgagggccgatcctactctgcctgcaccactgaaggtcgctcggatggttaccgctggtgcgccaccacagccaactacgaccaggataagctctacggcttttgtcctacccgagccgacgctactgtggttgggggcaactcggcaggcgagctgtgcgtcttcccctttgtcttcctgggcaaggagtactccacctgtaccagcgagggccgcagagatgggcgcctctggtgcgctaccacctcgagcttcgacactgacaagaagtggggtttctgcccagaccaagggtacagcctgttcctggtggcagctcacgagttcggccatgcactgggtttagatcattcttcagtgccggaagcgctcatgtaccccatgtatcgcttccttgagggctcccctctgcacgaggacgacgtgagaggcatccagcatctgtatggtcctggccctaagcctgacccagggcttccagccaccaccacaactgcaccacagccgacagcacctcctactatgtgccctactgtacctcccactgcctaccctacaaagagtccccaggctggccctacaggccctcctgcagctgaccctacaggccccccctactgctggccctacaggccctcctgcagctgaccctacaggcccccctactgctggcccttctgaggccattacagtgtctttgagcccagcagacaatgcctgcaacgtggatattttcgacgctatcgctgagatccagggctctctgtatttcttcaaggacggtcggtactggaagttcctgaatcgccgagggagccggctgcagggcccctttcttattgcccgcacgtggccagctctgcctgcaaagctggactcagcctttgaggatccgcagtccaagaagattttcttcttttctgggcgcaaagtgtgggtgtacacaggccagtcggtgctgggccccaggcgtctggataagttgggtctaggctcagaggtaacccagatctccgggctcctcccgcgaggcggcgggaaggctctgctgttgagcagggagcgcgtgtggaggttcgacttgaagacacagagggtggatccccagagtgtcactcgcttggataggatgttccctggggtgccctggaactcacacgacatcttccagtaccaagacaaagcctatttctgccaggaccgattctactggcgtgtgagtttccgagatgaggtgaaccaagtggaccagagggaaaggagccagttttgctggatacaaactggtgatctcttctagagactgggaaggagtggaggcaggctgggccctctcttcacaccttccttttttttgtttagactgtttctaataaacattaaaaaaaggaataaatgaatatttacttaaaaaaaaaaaaaaaaaaaaaaaaaaaaaaaaaaaaaaaaaaaaaaa

SEQ ID NO: 1829 - DNA, 2135 bp, Cricetulus griseus
ggacccggcttgatcatcaacacccaggaacaaggaccagatgaaggagaggagaaggcagcaggggaggctgaggaggatgatgaagatgaagaggaagaagatgaggaggaggacttatcttccccctccagggatgcctgagcccctggggagtgtcggaagtcccctcctggaccccaggccctcacagatggcccccgggaacatagcaagagtgctagcctcctatttggcatgcggaacagtgcagccagtgacgaggactcaagctgggccaccttatcacagggcagcccctcctatggctccccggaggacacagattccttctggaaccccaacgccttcgagacggattccgatctgccggctggatggatgagggtccaggacacctcaggaacctactactggcacatcccaacagggaccacccagtgggagcccccaggccgggcctccccttcacaggggagcagcccacaagaggagtcccagctcacctggactggctttgctcaccaagaaggctttgaggaaggagagttttggaaggatgaacccagtgaggaggccccaatggagttgggtactgaaggaccctgaagaggggacattgcccttcccagctcaagagcctcagcccagagccattgccccaagaggaggagaagctgccacaacggaatgccaatgcagggatcaagtgtttcgccgtacgctctcttggctgggtggagatgaccgaggaggagctggccccaggacgcagcagtgtggcagtcaacaattgtatccgtcagctctcctaccacaaaaacaatctacatgacccaatgtctgggggctggggagagggaaaggatctgctgctccagctggaagatgagacactaaagctggtggagccacagagccaagcgctgcttcatgcccagcccattgtcagcattcgtgtgtggggcgttgggcgggacagtggaagggactttgcctacgtagctcgtgataagctgacccagatgctcaagtgccacgtgtttcgctgtgaggcacctgccaagaacatcgccaccagcctgcatgagatctgctccaagatcatgtctgaacggcgcaatgctcgctgtttggtaaatggactctccctggaccactctaaacttgtggatgtccctttccaagtggaattcccagcacctaagaatgagctggtacagaagttccaagtctattacctggggaatgtacctgttgccaaacctgttggggtagatgtgattaatggggccctggagtcagtcctgtcctccagtagccgagaacagtggaccccaagtcatgtcagtgtggctcctgctactctcaccatcttacaccagcagacagaggcagtgctgggggagtgtcgggtgcggttcctctccttcctggctgtgggcagagatgtgcacactttcgcattcatcatggctgccggcccagcctccttctgttgccacatgttttggtgcgagcccaatgctgccagcctctcagaggctgtgcaggctgcatgcatgctccgctaccagaagtgtctggatgctcgttcccagacctccacctcctgcctcccagcaccccctgcggagtcagttgccagacgtgtaggatggactgtccgcaggggtgttcagtcgctgtggggttccctcaagcccaaacgtctaggatcccagaccccatgaagaactcccatccttcctctgcctgcttgtgttgggccccagggaactcaagagtttggggcaggtaggggccctggatactgttcctaggcctcacattccccaagctgcccctcctcggtagctggggttccctacctaggggctgggagagagaaattgaattcattcacagaagtcattacactggactgatgacatgaggggccagaagcaaggccagccctgggctctccatccccagtgtttgaggtggagcaggaggaactggtccaagccaagccccaccctcaaaggcccagcaggggcaggaggggactggtgtcggcatggatcccctctcccctgtcctgtgggaaactccactgtactgatatcactaataaagtctgtctgcgctgc

SEQ ID NO: 1830 - DNA, 2135 bp, Cricetulus griseus
atcaataagtatggatttgtctgcccaccccacttgctccacagatgttttggggtgtgctggaagagagcatatggaaaaatatggacaaaagttgaacactttgcaaaaattggatggaaaaatcacaaacactcagttaataacccgtattcccagttccaagatgaatacagcttagaagaaataatgaaatcaaaaaagatttttgattttctgaccgtcttgcagtgctgtcccacctcagatggcgctgcagcggcaattgtgtctagtgaagaattcgtacacaagtatggcctgcaagccaaagctgtggaaattgtggcacaggagatgatgactgacttgccaagcacatttgaagataaaagcattattaaaatggttggctttgacatgagtaaagaagctgccagaaggtgctatgagaaatccggcctgacacccaacgatgttgacgtgatagagctccatgattgcttttctgccaatgaactcctcacttacgaagcactggggctctgtccagaagggcaaggtggagcattggttgacagaggagataacacttacggaggaaagtgggtcgtaaaccctagtggtggactcatttccaagggacacccactgggagcaacaggtctggctcagtgcgtggagctctgctggcatctgagaggcgaagccggaaagaggcaggttcctggggcaaaggtggctctgcagcacaatttaggcctcggaggagctgtggttgttacgctctacaggatgggttttcctgaagctgccagctccttcagaactcatcagattgaggctgcgcccaccagctctgcaggtgatggattcaaggcagatcttgtctttaaggagatcgagaagaagcttgaagaggaaggagaacagttcgtgaagaaaattggtggcatttttgccttcaaagtgaaggatggccctgggggcaaagaagccacctgggtggtagatgtgaagaacggcaaaggatcagtgctgcccaactcagataagaaggctgactgcactatcaccatggctgactcagacttgctggctttgatgactggtaaaatgaaccctcagtcggccttctttcaaggtaaattgaaaattgctggtaacatgggtctggcgatgaagctgcaaagcctccagcttcagcctggcaaagctaagctatgaagatctccatttggaaacctcagcacatcaggatgagatggatagatatgtagatatccacgtctcattgtcaggacttagtccgacatttcccgattagcatgaggtagatttgttgctaagtgggtgtggccaatggtgtttttcccgagctgggggtggatagggcctcccagcctacggctgctgctttgaagacttgcatacaactgtgcatgacaaggctactatggcagtgagggtttgaggtaaatttcagtttcagaataaaattcagaacaataaaatctaatgactgtaaacaaagctcttgttttgcttagaagtatatttaaggatcaatgtgtggaaaacttggaatgagagttccccttggggggatgggagaagaaacagacttccatagttgaccaggagttagtgtctcgcacttttaattacctgcatcaagttcttactaatagttcttaaaattctgtactgtattaaaagtaaaaaaaaaaaactttgaaaatgtgcatttcatgccatctgaaacagttcttttcttcccaattaaaatacaagaattatggtctgagcttaggagggaatttacaactgaacagagctgtttttaaagtatttttgaattggcatccctaaaaaaaatcagggtattagagccattggatgccattgctaaaattaattaaataaagtttctcccagaggcacaagtttcaaattataacttcatattaataagttcataaattgagtctcacaatttctctttttcatacatttgattgtctgctgtatccttccttctagtttttctgattctgatgctctttgttataacttaggtttggataaaaaataatgcttttggaagatttaaaaagaaaattaaaatagttcttcctatgtaaaaaaaaaaaaaa

SEQ ID NO: 1831 - DNA, 2134 bp, Cricetulus griseus
cagccatgtgggaaagcatgaatatttcatgcatgccacagataaagggggccgttctgctgtggacgcctttgagatccacgttcacaagcgcccacaaggtgacaaggctcctgcacggttcaaggccaaatttgcaggtgacccagcaccagtggttaatgacatccacaagaaattgctttggtaaagaagctagcttttgcttttggggaccgaaactgcagtactatcacccttcagaacatcacccgtggctctattgtggtggagtggaccaacaacacactgcccctggagccctgcccccaaggagcagatcatagggctgagccgcagggattgctgatgaaaatgggaaacctcggcctgccttctccaatgctctggagcctgactttaaggcagtgagtattgctgtgacaggcgctggcagttgtcggcacttacaatttatccctgtggcaccaccgtctcctggaaacctcagcagcaccagccacactgacccttgaggaccaggccacctttatcaagaagggggtgcctatcatctttgcagatgagctggatgactccaagcccccaccctcttctagcatgccactcatcttgcaggaagagaaggctcctctcccacctcctgagtaccccaaccagagtgtgcccgagaccacgcctctgaaccaggacactgtaggagagtacacgcctctgcgggatgaggatcctaatgcacctccctaccagcccacccccacccttcacagctcccatggagggcaagggctcccgtcccaagaacatgaccccataccgatcaccccctccgtatgttcccccttaacccataagcgcctgggtggaggcaggggtagggcaggggcctggagacaactcggtgttgtctgtagagaccggtggcccacagaccattgcccactggtagccaacacctgacctagcacacactgacacacagggcctggacaagcctgccctctctggtcctcccaaaccccaaagctgctggagagactttggggacttttttatttttattttttgcctaacagctttttgtttgttcatagaaaattcttcgctgattttgatggctggctctgaaagcactgtttgagtagaggtagaacgaaggagcgaggaaccgtgaatgaactcgcaggcagtgctgggtgacccccagctctctgcattttgcctttaacactaactgtactgttttttctattcacgtgtgtctagctgcaggatgtaacatggaaaacagtagctaaagattaaattcaaaggactttcagaagttaaggttaagtttttacatttaatctgctgtttacctaaacttgtacgtataatttttgggtgggtatggggaattgctttgctaaaaataagctcccagggtgtttcaaacttagagaagaccaagggacagtatttttatcaaaggaatcctattttttcacactatgtcaacttggttgctctgataccccagagcctgactgagggcctcttggtcctggttctggtgccagggccctggtgctgggtttgctctcctgctgttgccaggggctggaagctggaggggcctcttgggccatggacatcctgacctctaccccatgcacgctagtggcctaccactgagggggtcttcatttctgtggaaaagggactccaagaggcattggtggctgtgacccccaacctaggtgctccaaggtgggccagctgctcgtaggggcacctgagaaggttgaaggacccacatctcaacctttttttttccttctctgtgggtttggtttttctttttcttccctcctaaaggaatatcatggtctttgaaacactcagtggggaacattttggtgaagatgcaatatttttatgtcatgtgatgctctttcctcacttgaccttggccactttgtcccaacagtccacagtcccaccccacgcaccccatcccctcttctctggcgctccagtcctgggccttgggcctgggggaggagtgccagcaatagttcatagtaaaaaaatctgtgggctctcaaagctaattttttactaaagtttttatacagcctcaaattgtttt

SEQ ID NO: 1832 - DNA, 2133 bp, Cricetulus griseus
ctgacatgctggcctcttcgtctgagtatcgacatgggaacgtggtcttctttgatgtgttcggcctgcttgtcatcgcatatccttctcgtgttggcacaataataaactacatggctgttacggctgctgttttgtacctggggaaaaaactgctgcagcccaaacacaggaatgctgactacacgagagacttcttgtgtggacttgccatcactttcattagctggttcactagccttgttacagttcttattatagcagtgttcgtctctctcattggacagtctctctcatggtacaaccacttttatgttgctgtttgcctgttatggaactgcaacagtggctaaaataatactcatacatacccttgcaaaagattttattatgtgaatgtcagcaaccagtatctgggagaagtgttttttgacacctcattgtttgtgcattgtggctttcttgttgttctcacttaccaaggattttgctctgcattcataagtgctatctgggtagcatttccattgttcacaaagctttgcgtgtacaaggacttcaagaagcacggtgcccaaggaagattgattgccttttaccttttggggatgtctatcccatatctttatggactgtacctcatctgggctgtattcgagatgtttactcctatccttggaagaagcggttcggaaatccctcctgatgttgtgctagcctccattctggctgtctgtgtgatgattctctcctcctattttattaaattcatctaccttgtgaaaagcacaaagaaaaccatgctgactctaacaatggtgtgcgcagtcacactcctcctcgtctgcggtggagtctttttcccatacagctccaatcctgcgagtccaaagccaaagagagtgttccttcagcacatgagtagaacttttcataatttggaaggaaatgtagtaaaaagagactctggaatatggatcaatgggtttgattatactgggatgtctcacgtaacacctcacattcctgagatcaatgatacaatccgagctcactgtgaggagaatgccccactctgtggcttcccttggtatcttccagtgcactttctgatcaggaaaaattggtatcttccggctccagaaatttctccaagaaatcctgcacatttcagacttatatccaaagagaagacaccatggggttctataaaattgacctttgaagcaacaggaccaagccatatgtctttctatgttcgaacccacaaaggatcaacgctgtctcagtggtctcttggcaatggcattccagtcacaagcagaggaggggactactttgtgttttattcccatggactccaggcctctgcatggcagttctggatagaagtacaggtgtcagaagaacagccagaaggaatggtcacggtggccattgctgcccactatctatcaggggaagacaagagatcttctcagctcgatgctctgaaagagaagttcccagattggacatttccctctgcgtgggtttgcacctacagcctttttgtgttttaattgcgtggatgggctttgagtacatgccccttagacattccatgggacagtttctctcccatgttatatggatatatgtaacacaagtcaatgagttttagtgagcgtatgttcaaagagcttctgggataatactcttcagggacaagtaccatatgggttaaactttgggatagtgatgtctggcctttttgtcacttgaaaattccagttttcaggcacttttaagcacatgtggatactgccttttacattaacaaaaaaaaaagacaaaatttgagttagtcaacaatattatgcacccagtaacaagatgctcagtttcaggaacatgcttaaaggccagaaatagtcaagtaattaatacagtattcatggcttttaataagcacactaggtagttatcagtaaccccctcttttaaagattatctgatcatttgagtaattcacttctgaaagtatactttcaagttctaagtaatgcatttcccccctaatgagtataaatataagcagcacaatagggaggagtataaagaactggtgtgtgtgtgtgtgtgtgtactatc

SEQ ID NO: 1833 - DNA, 2133 bp, Cricetulus griseus
acaagggcatttggtcgcttagcgccctccgctcgagtgcccactgccgtcccgtcgagagcccgcgcaggaaccagcacctttgcagacatggagactgtggttcgacgccattcttatctcgagtccctcaggcctttctgcagaaggcaggaaaatctctcttgttctatgctcagaactgccccaagatgatggaagttggggccaagccagcccctcgaaccctagtccacttcagcagcacactgccagcagatcagagaaacccctccagccaatgagaaagaaaaggctgccaaagctgcagtccagcaggctcctgacgaatcccagcagactccagatggcacacagctcccggctggacacccgtcacccactgcaagccagggctctgggagcaagtgccctttcctggctgcacagctgagccagacaggcagcaatgtcttccgcaaggccagtctggagcttcaggaggatgtgcaggagatgcatgctgtgaggaaagaggttgcccaaagctcagtaacccccagtgtgatcaatgtgaaaactgatggagaggatcccagccaattgctgaagaacttccaggatatcatgcgaaagcaaaggccagaaagagtgtctcatctccttcaggataacctgcccaaatctgtttccacttttcaatatgatcgtttctttgagaagaaaattgatgagaagaaaaatgaccatacttaccgagtttttaaaactgtgaaccggagagcacaaatcttccccatggcagatgactatacagactccctcatcaccaaaaagcaggtgtcagtctggtgcagtaatgactacctaggcatgagtcggcacccgcgcgtgtgtggggcagtcatggagactgtaaaacagcatggtgctggagctggtggaactaggaatatttctggaaccagcaagttccatgtggagctggagcaggcgctggctgacctccatggcaaagacgcagcactcctgttctcctcctgctttgtagccaatgactccaccctgttcaccctggctaagatgatgccaggctgtgaaatttactctgactctgggaaccatgcctctatgatccaagggattcgcaacagtcgagtgccaaaatatatcttccgccacaatgatgtcaaccacctcagagaactgctacaaagatctgacccctcagtccccaagattgtagcatttgaaactgttcattcaatggatggagcagtgtgcccactggaggagctgtgtgatgtggcccatgagtttggagcaatcacgtttgtggatgaggtccatgcggtggggctgtatggggctcgaggtggaggaattggtgatcgggatggagtcatgtcaaaaatggacattatttctgggacgcttggtaaggcattcggctgtgttggagggtacattgccagcacaagtttgctggttgacaccgtacgatcctatgctgctggctttattttcaccacctccctgcctcccatgctgctggctggggccctggagtctgtgcggatcctgaagagtgctgaggggcgtgcccttcgccgccagcaccagcgcaatgtcaagcttatgaggcagatgctaatggacgctggtctcccggtcatccactgccccagccatatcatccctgtgcgggtcgccgatgctgctaaaaacacagaaatctgtgatgaactgatgaccaggcacaacatctacgtccaagccatcaattaccccacggtgcctcggggggaggagctgctgcggattgcccccaccccgcaccacactccacagatgatgagcttctttctcgagaagctgctgatcacgtggaagcgagtagggctggaactgaagccacattcgtcagcggaatgcaacttctgcaggaggcccttgcattttgaagtgatgagtgaaagagagaaagcctatttctcaggcatgagcaagatggtgtctgcccaggcctgactgtgacgtcagttattcacccaaccccaggccattaccatatccaaatagtagtcggaattgtctttatatgtgaaataaattatatattaaatattaatctatagtaaaatcatagtcctg

SEQ ID NO: 1834 - DNA, 2133 bp, Cricetulus griseus
acctcccctgcctgcagaatctctgtgtttggccatggggaaagcaaatggtgagccaacgtgggcactcctcctgacggcactcatcgctgaactgggcatcctcattgcctcccttgacatggtggccccccattctgtccatgttctttctgatgtgttacctgtttgtaaacttggcctgtgctgtgcagacgcttctgaggacccccaactggcggccccgattcaaatactatcactgggcactgtctttcctaggcatgagtctctgcctggctcttatgtttgtctcctcctggtactatgccctagttgccatgctcattgcgggcatgatctacaagtacattgagtaccaaggggctgagaaggagtgggtgacgggattcgaggcctgtccctgagtgctgcacgctatgcactgttgaggctggaagaagggcctcctcataccaaaaactggcggcctcagctcctggtgctgctgaagctagacgaagaccttcatgtgaagtaccccccggctcctcacctttgcctcccagcttaaggctgggaaggcctgacaattgttggctctgtcatccagggcagcttcttagagagctatggtgaggcccaggctgctgagcagacaatcaagaacatgatggagattgagaaagtaaaaggcttctgccaggtagtggtggccagcaaggttcgagagggactggcccacctcatccagtcttgtggcctgggcggcatgagacataactccgtggtgttgggctggccctacggctggcgacagagtgaggaccctcgtgcctggaagacctttattgacactgtgcgctgtaccacagctgcccacctggccctgctggtgccaaagaacatagctttctaccccagcaaccatgagcgctacctggagggccacattgacgtgtggtggatcgtgcatgatggaggcatgcttatgcttttgcccttcctgctacgccaacataaggtttggaggaagtgccggatgcgcattttcactgtggcccagatggatgacaacagcatccagatgaagaaggatctagccatcttcctgtatcacctccgtctggaagccgaagtggaggtggtggagatgcataacagtgacatctctgcatatacctatgagcggacactgatgatggagcagcggtctcagatgctgcggcagatgaggctgaccaagaccgagcgggatcgagaagcccagctggtcaaagacaggcactcagccctgcggctagagagcctttactcagatgaggaggatgaggctgcagcaggggctgacaggatccagatgacatggaccagagacaagtacatgcctgagccctgggaccctagccatgcccccgacaacttccgggagctggtgcacattaagccggatcagtccaatgtacggcgcatgcacactgctgtgaagctcaatgaagtcattgtcacacgctcccatgatgcccgcctagtcctactgaacatgcctggtccccctaagaacagtgagggtgatgagaactacatggaattccttgaagtgctgactgagggccttgaacgagtgttgttggtgcgtggaggtggccgtgaagtcatcaccatctattcctgagcccagtggagtctcgtggcctggagttggggtgtctaggacaacagtccctacccctacacctacttgccagttctgctttgcccagccttgctttggaccagttttgctaggtctcctgggaaaccaagcttggacctggcaatttaaatggatccgagggcccatggagcctgggggatataggcattttcacccataccccagtgtaggcttatcctgactagagaagactggtgagggttaatatgggatttgaagtcccagtctggcccaggagcgctatttattgtatatttattgtttggatgtcatcatcagagaagaggggagggatactaagagggggaactgagctgggcctgcctgcaggaagacctggctcaggctgctgtgggcagagactctcatcaagccaagtggaatggagctggccaagttgagcctgactttttcaataaaacattgtgtatttctgg

SEQ ID NO: 1835 - DNA, 2133 bp, Cricetulus griseus
caccccacagcctgccggggaagctgcttttacatctgactctttaaggactggaaggtcgaggtcatctcagaacatttgtaagacaggagacagtacagaagccctcagtctgcctcatgtcaaaggccacttataagcccgttatctttaattgcatgaaatgcatgtttggggatggcagaaattccaaggtgcatcgacattaacccatgcatttagtaatgtaccttgagtctaaaatcccaagcaaacagttgctgctgatgctatggggtgtgcgaagatgtcaggagtagttcaattgcaagagttgatgctgtatttgaaatcattttattaatgtaatttgaatgtcaatctgtgtgcttttggtgacttagcgctgtggcaagcaactttgcacattgttgtcatgttgtcctttatgctgagaatgttttctaattagaaaacgggcagatactgctattcagggccagtggggcaggagactcactcttcccttgacatcttcaccttcatgagaatagtctccgagggaggagtcaactctataaatggtcaaaatctttacaagcatgtgagctaccgatgggtttaacagcctgtgctggtggactggtctctctttgagaacacagtgacgggtttgcccatcctgcccactcaaatggccagtgtgaccagctgttcccatttagtggacatcttattcttgtataacagagaattttgcaagctatttatttttaataagccctgaatgtctttttgctattatgtagtaccttttgcacatgaaagactaaagctaaacttcctttacttttatactatagtgaacatttttctattcttcccaacaatattatcccaaatgtgaaattattggctcagtttccaggttatgaacatttataattacaaaccagatagcattggctgtgtctgcagatcaaaaccccttagcaatatattgtgacagcaaagcaacaaataaaaaaaatatgtattcaaaatgtatttctcaaaaggcaagcaatattggccgctttttagaattcagccaagcacctgtaatcacagcactggcagactgagacaggcaaacttgagttcaaagctagcctgaattatacagcaagagcagaggtgggtggatctctgtgagttcaagcccagtctggtctctatagtgaattccaggacagccagaactgtagagagaccctgactcaaaaaaaaatcaagtcttttaagctattcttttcattttccaaatagaatgctactcaattactaatgtgagttttcatttcccaatgtctccaaccaacctgaggtaatgatgtaccccgcaaaggacttacccataggtgtataaaaagcacatccctccactgggcaagagccagagatacctgcctggcactcaacaaggttcactgcaaataatggctgaggaagaggaaggagctgacagcttccagacagcactgatactgtctcaggttgaaccccactggcagcaagaattatgaatgtattggggaccccttcttaggcatcctcaggtctcaaacacagtacagttcatctaccatagatgaagactgaagaattagagacaacgccaaaacacatcacggcagtcttaagcaaaatgtgaaaaactacattttgaaaaatgattgtacattgaagccatgacgattttgtgtctattttattctagcacaaaactcttggacgttgcaagataggtttcttggcgtgtaaacttcagggttatatctattatgccattctctgggggaatggaggaggggggtctcccatttacacttagcagaggcccattgctccaccccaaagttttttttgtccttaaatgacatggttgtgttttgtaaggaaaatttaatttaatataattatgtgcatttaagtgagcagttctaaagtcatgtagaaaaacaacacaattgtctgtttcctgaaacaactaaatcgggaataccatacccatttcaagctatcgttaaaatgtaatttcctttgctctcttttactgagatatttgttttaaactaaaacaattaaaaagatatctaataaaaaaaaaaaaaa

SEQ ID NO: 1836 - DNA, 2132 bp, Cricetulus griseus
gcagtgacgtggatctatccttccagctaagccagttagatctgaaagagcctcagagcccagcattacagagtactccctgtaaaatccgttaaagacaaaattatgaataaagctggtgaagtttcattggatgttacacagagtcccagggatggcagtggacttggactagaggaagtcacaggtcttaagtgtagttttgattcatccagagaaggaaatactcgacctgtcagtgaagagaaactactgaagtctattaatgcaggtgcaaagagcaatactgatacttttattttatttcttcaacaacaagaatcaatcttaaaaaatttgtacaaattcaaaagaacaagacaaccaattcaaagtaacttatgacatgattggaggcttaaacagtcagctgaaagcaataagagaaatcattgaactgcctctcaagcagcctgaacttttcaagagttatggaattccagcacctagagggttgttactctatggtcccccaggcactggaaagacaatgattgctagggctgttgctaatgaagttggagcttttgtttctgtaattaatggtcctgaaattataagcaaattctatggtgagactgaagcaaggttacgtcagatatttgctgaagccactctacggcatccatcaattatttttattgatgagctagatgcactttgccctaaaagagaaggagcacagaatgaagtggaaaagagagttgtagcctcactcttaacattgatggatggcattggctcagaaggaagtgaaggacgggtactagtccttggagccacaaatcgccctcaagcactagatgctgcactcagaagaccagggcgatttgataaagagattgagattggcgttcctaatgcccaggaccggcttgatattcttcagaagctgctccgaagggtgccacacttgctcactaaagctgagcttctgagactggcaaataatgcccatggatatgttggtgcagacttgaaggccttgtgtaatgaggcaggtctgtatgccttgcgaagagtcctgaggaaacagcctaacctccctgatagcaaggtggctggcatggtgaaaattaccctgaatgatttcttacaagggatgaatgacatcagacctagtgctatgagagaggtagcaattgatgtcccaaatgtatcttggtcagatattggaggactggaaaacatcaaactgaaattgaaacaggctgtggaatggcccttgaaacatcctaagtctttcatcagaatgggtattcagccacctaaaggagttctcttgtatggccctcccggatgctccaaaacaatgatagcaaaggctttggccaatgaaagtggcttgaactttctagctataaagggacctgaattaatgaataaatatgttggtgaatctgaaagagcagttagagagatattccgtaaagcaagagcagtggcaccttccattatcttctttgatgaacttgatgctttggcagttgaaaggggcagttcttcaggtgctggggatgttgcagaccgtgttttggctcagctgttaacggagatggatgggattgaacagctaaaagatgtaacagttttggcagctactaatcgcccagacagaatagacaaggctttgatgaggcctggaagaatcgacaggatcatttacgtgccattaccagatgcagcaacaagaagggaaatactgaatctgcagttccactcaatgcctattagtaatgaggttgacctggatgaactcgtcctccaaactgacacttactcgggagcagagatcatagccgtctgcaaggaggctgctctcttggccctagaagaagacattaaagctgaccgaattatgaagaggcatttcactcaagccttgagcatcgtgacacctagaatcccagagtcgctgatgcgtttttatgaagattaccaagaaaagagcgggctacacacagtctaagaaatacatgcttatatgcatatattttgtagagaaaagtttgtttgcaaaattttgtcttgagggtgtttacagtttcttaataggtaaatgtttgaaatatcctcactggagttgaagagcc

SEQ ID NO: 1837 - DNA, 2132 bp, Cricetulus griseus
gttactggttgagttcccagcgacaggtggtgtggtgccctcttggcagtttcagcctgtgaaactgatccgctatgtcacagcttttgatttcttcctggcagcctgtgagatcatcttttgtttctttatcctttactatgtggtggaagagatattggagattcggattcacagactgcactatttcaggagtttctggaattgtctggatgttgggattgttgtgttatccatagttgctatagtcattaacatttaccgaatgtcaaatgtagagggtctactacagtttctcgaggatcagaatacgttccctaactttgagcatgtggcatactggcaaatacagttcaacaatatagctgcggtcatggtatttttggtctggatcaagctcttcaaattcatcagctttaacaggaccatgagccagctctccacaaccatgtctagatgtgccaaagacctgtcttcggcactcagttgatgacttcagtactttcctaagaatgtatcttcactcagttccgcatcattttgggtgatatcaacttcgcagagattgaggaagctaaccgggttttgggtaccactttattttacttacatttgtgttctttatgttcttcattcttttgaatatgtttttggccatcatcaatgatacttattcggaagtgaaatcagatttggcccagcagaaagcggaaatggaactctcagaccttatcagaaagggctaccaaaaagcattggtcaaactaaaacttaaaagaaataccgtagatgacatttcagagagtctacggcaaggtgggggcaagttaaactttgatgagcttcgacaggacctgaaagggaaaggccacaccgatgcagaaattgaggccatattcactaaatatgaccaggatggagatcaggaactgacagaacgtgagcaccaacagatgagagacgacttggagaaagagagggaggacctggacttggaacacagctctttaccacgtcctatgagcagcagaagtttcccaagaagcctggatgactctgaagaggaagatgacgatgacagtgggcatagctcccgcaggaggggcagcatctccagcggggtttcctatgaggagttccaggtactggtgaggcgtgtggaccgcatggagcactccataggcagcatcgtgtccaagattgatgctgtgattgtcaagcttgagatcatggaacgggccaagctgaagaggcgagaggtgttaggaaggctgctggatggagtggctgaggatgagagactgggtcgtgacagcgaggtccacagggagcagatggagcgcctggtacgggaagagttggaacgctgggaatcggatgatgcagcatcccagacaggtcacggtgtaggcatgcaagtgggactcaatggtcagcctcaccctagaagttcccggcctccttcctcccagtctgctgagggcctggaaggtggaggtggaagtggaagtgccaatgtccatgtgtaataatccacaagtgtttgtatgtgtgttcctgagacatgatgaggtggttgtccagtatggtagtgacagttacagtatttatacgcccagctacattatgatgctggtctttgtgaccaactgttataattttctgcacttttaatttattttacataaactttgcccatggtttcaagaggaatgttttactttttctcaaatgagaaatctagatgtaaatattgagttcaagaaaacaaaaaattttgaaagtacacgcagtggctgccctgtcccagtcttcaggtgaagccgggcaatggtttggttgcacacctttaatcccaacacttgggaggcagaggcaaatggatctctgtgagttcgaggccagccaggactacacagtgagacctatggtacactaatttctttcttccttggtattgaagtttgcaaaccaggggtattgtgtgtatgtatttatgtatgtgtatcatgttgttacaagtaaacaaacttcaacttgaagtgcatttattatgtggtatccatgtgtatcgactatgtgccatatatctgttatggtcactacaacatcttttatgatgcttgttatta

SEQ ID NO: 1838 - DNA, 2132 bp, Cricetulus griseus
ggcgaggcggccggggcgtgtgagccgctcggccagctgccgtctacgcgcattcgcgcggccaccgggcgactgcgccgcgcggctgcctcgctgagcgctcggcctcggggccgcgggatccgccgcgctgtctgcggtcagaaagaccgccctcccgcgtccgtgccggacgggtcagaggcggcacagcacgcgaggccacccgcgatgctgctgtctaagttcggctccctggcgcacctctgcgggcctggcggcgtggaccacctcccggtgaagatcctgcagccagccaaggcggacaaggaaagcttcgagaaggtgtaccaggtgggcgccgtgctgggcagtgggggcttcggcacggtctacgcaggcagccgcatcgccgacggactcccggtggccgtgaagcacgtggtgaaggagcgggtgaccgagtggggcagtctgggcggagtggccgtgcccctggaggtggtgctgctgcgcaaggtgggcgcggcgggtggcgcgcgaggcgtcatccgcctgctggactggttcgagcggcccgacggcttcttgctggtgctggagcggccggaaccggcacaggacctcttcgacttcatcacggaacgtggcgccctggacgagcccctggcgcgccgcttcttcgcacaggtgcttgccgctgtgcgccactgccacggttgcggggtcgtgcaccgagacatcaaggacgagaacctgctggtggacctgcgctcgggcgagctgaagctcattgacttcggctcgggcgcgctgctcaaggacacggtctacactgactttgatggcactcgtgtgtacagccccccagagtggatccgctatcaccgctatcatgggcgctctgccactgtgtggtctctgggtgtacttctctacgacatggtgtgtggggacattcccttcgagcaggacgaggagatcttgcgtggcaggctgtttttccggaggagggtctccccagagtgccagcagctcattgagtggtgtctctccctgcggccctcagagaggccctcactggaccaaattgctgcccacccctggatgctggggacagaggggagcgttccagaaaactgtgaccttcggctctgtgccctggacactgatgacggagccagcaccacttctagcagtgagagcttgtgaggaggagggagcctgggctcaggctagccagccctttcccagaatgaacattctctgcctgggatgtctcctgcaaaagcagtgacctctgacccctggtgacctttgctcttggcaccgggcctgtttcctttgctttgagtgcctttttgaacgctgctccacagggcctgggttttcttgagctcttctgtccaaagatggctgcgggctaaacaaggtcccgcctgccttgggtggatacttgaaccagagacccctgccctgctgctgcatcttggaggcagccttcctgaccaactgtgtctgacatggagcacccctgtggtgcccacctcccaccctccagtctcatggtgttcgtctgggcatgtctgcacaagcaatgcaacggttgggccactggtgcccatctgccaccccaggcacgccagggtctcttatttatggtgtgaccaccctggagggcacccctgccctgctggggctatttattgtttaatttatttgctgaggttacttcctccaagcagccacctcctccaggcccctggggtatacaggacagtcagggtggctgtgcagtccacagaccccatcttcctgcacctggagtaggtccccagcccacatgtctgtgggaggaagaacttgtacagtggctaatttaagggaagcggggggaccctgccaccctgggcactcttgcgctggggggtgggttttaaattattgaccttgtacagtctgcttgctggctctgaaagctggggtgggggacagagtctcaagcccttaatttattttagcagctgtgtttctgtgaccctggtgtaagtaggcatcaggggtggggttgttttaagttcaaaagtgtgagatgtctggaaatcatattttttatacaggtatttcaattaaatgttttggtatataatgga

SEQ ID NO: 1839 - DNA, 2132 bp, Cricetulus griseus
  modified_base (99)..(99): a, c, t, g, unknown or other
cttagtccagagactattacggtgacatctgcagttggtcctgtgtccatgatggcttcaacagcagttacagaagcagaaacacagctttcaaaaggntggcactgaaggccatgtcctagcaagtagttcaggagctggtgttgttaagaggtgacaactacagcaacaaagtgggtcgtttctctgtttcaagaaccgaggacaaggtcacagagctcaaaaagaaggaccagtgacctctcctcctctcagagattcagaacaaactgtaagtcctgctgtgataccaaagaaggagaagcctgagcaggaagagccttcccatctgaacgggccctcttctgatctggaggctgcctttctcagtaggggtacagaggatggctcagctagtccacactctccccctcacctgtgctcaaagagccttcccatccagaatctaagtcagagccttagtaattcattcaactcctcttacatgagtagtgacaatgagtcggacattgaagatgaagacttaaggttagaacttagacgactaagagaaaagcatcttaaagagattcaggacctgcagagtcgccagaaacatgaaattgaatctttgtataccaaactgggcaaggttccccctgctgtcattattcctccagctgctcctctgtcaggaagaaggcggagaccctttcaggtaacctgtctggtcagagtggaacttcagtcttacacccccagccagaccctccaccccccacggcaacaccccagagactgggcacaaccagctgttacagcctcttaagccatctccttccagtgacaacctctattcagccttcaccagtgatggtgccatttcagtaccaagcctttctgctccaggttcaagggaccagcagcacaaataccgttgggggaacagtgagtagccaggctgcccaggctcagccacctgccatgacttccagtaggaagggcacattcacagatgacctgcacaagttggtagacaactgggcccgggatgccatgaatctttcaggcaggagaggcagcaaaggacacatgaattatgagggccctggaatggcaaggaagttctctgctcctgggcagctgtgcatttccatgacctcaaacctgggtggctcagcccccatctctgcagcatctgctacctctctaggtcacttcaccaagtccatgtgccccccacagcagtatggttttccagctgccccatttggcactcagtggagtggaacaggtggtccagcaccacagccacttggccagttccaacctgtaggaactgcttccttgcagaatttcaacatcagcaatttgcagaagtccatcagcaaccccccaggttccaacctacggaccacttagtcagaagtgaagatgttaactgaatagatttgggggcacaaaatggaatgctgggggtggggggttggggaagtagcctatatactaactactagtgctgcatttaactggttatttcttgccagaagggaatgttttaatactattttgagcccttagaatggagaaccaccctccctctccatttgttggagttcaaaaagatgaaaagagcagctttctggtggaggggctgcctgagactgctttcctgttctgtacccaccagtcagtcctagggctagaagagagccttgttaccagagttccccaagagctcagtgtaagctaaacccctatgtatctgtcagtgggtagagcgcttaattttacatattccccaaatccctaattccttactcccacaagaatgcacaccttaaaacaaaaggttctttcccactctgatccctaccctactctctctcttcttttccttttacaacctagtggaaaataccaggggactggggttgcaaccctttcttatataggtcattaatgctttaagcaagatatcagcagctttgactgcagcattagcaattagggaaaacaatgacgttccctgaggacatgtaactttgccatcagttttgatgtggaaacactgtgatatataaatgttgttggacaactatttaagttttaagagtaaaatttgaaaggtttaaaaggttcacacacacaca

SEQ ID NO: 1840 - DNA, 2131 bp, Cricetulus griseus
cgcttcctgaatgagctcatcaaggttgtgtctcccaagtacttgggctcccggacgtcagagaaggtgaagaataagatcttggagctgctgtacagctggacaattggcctgcctgaggaggtgaagattgcagaagcttaccagatgctaaagaagcaggggattgtgaagtctgaccccaagcttccagaggatgccatcttttcccctcccccctccacggccgaagaatgtgatctttgaagatgaggagaagtccaagatgctggcccgcctgctgaagagctcacaccctgaggacctccgtgctgccaacaagctcattaaggagatggtgcaggaggaccagaagcggatggagaagatctcaaagcgggtgaatgccattgaggaagtcaacaacaacgtgaaactgctgacagagatggtgatgagccacagccagggcgctgcctccagcagcagtgaggacctcatgaaggaactgtaccagcgctgtgagcgcatgcggcccacgcttttccgattggccagtgacacagaagacaatgatgaggccttagctgagatcctgcaggctaacgataatctcacccaggtgatcaacctgtacaagcagctggtccggggtgaggaggtcaatggtgatgccacggccagctccattcctgggagtacctcagccctgctggacctctcaggcctggacctccctccctcgggcaccacatacccagccacacccacccaccctggcaaccagagcagtccagagcagcccagtgcctcagtgtccctgcttgacgatgagctcatgtctctgggcctaaatgaccccacaccatcttcaggccccagctcagatagtgtggggtggaacagcttccagtcgtcagatggcgccgaaccctcagtccctcctccagcccagacccccggcatggactgccgacccccagcacaggcaaccctaccaacgagcagtggcctggatgacctggacctcttggggaaaactctcctgcaacaggcgctgcccccggaggcccagcaagtgcggtgggagaagcagcagccagccccccggctcaccctccgtgacctgcagagcaaaagcagctgtagcttgcccagtccaggagccaccaacctcctccacaacacgtctccggagctctctgggcctccaccacagccagcacccaccgagctctctttagccaacatcactgtgcccctggagtccatcaaacccagcagcatcttgccagtgaccgtttatgaccagcatggcttccgtgtcctcttccactttgctcgggatccactgccagggcgctctgacgtgctggtggtggtggtctccatgctgagcactgctccccagcccatccgcaatattgttttccagtcagctgtccctaaggtcatgaaggtgaggctgcagccaccttctggcacagagctgccagcatttaaccccatcgtccacccctcagccatcacccaggtcctgctccttgctaacccccagaaggagaaggttcgccttcgctacaagctcatcttcaccatgggcgaccagacctacaatgagatgggagatgtggatcagttcccccaccagaaacctgggggagcctctaggacagaggggctggagagaggaggggcaacaggacctcttcctgttcagcctggtgctctctccttcctgtggcccccagtgactcttccctctccctaggctgcttctcctgctgagccaaacccagcaggaggctgggcctgggtttgccatagctgctgggaccccaaccaccagtgggagcctggaacagggaggggctgtatgccctggaatgactctcgggagtgagggaagaagcatggctgttaggcccagccctgactccagcctgaggtggggtcttcccccacctgtcttttatgccttatggaaaggcccagccataacttggaggccatgctggagctgggaccagcccaggcctcctctgtgggaacccagtgactgggggtgatgcccatgccctagttgtttgcacttggtgtgtggtttggctctttgcttttcttttgaaatggccctgtggtcacagagctg

SEQ ID NO: 1841 - DNA, 2131 bp, Cricetulus griseus
ggcccaggttcctctggccccagaatgttctcgggccatcatgaagttggtgtactgtgctcattgccggggcgtccctggtgcccggccctgccccgactattgccgaaatgtgctcaaaggctgccttgccaaccaggccgacctggatgccgaatggaggaacctcctggactccatggtgctcatcactgacaagttctggggcccaatcgggtgcggagaatgtcattggcggtgtacacatgtggctggcggaggccatcaatgccctgcaggacaacaaggacacactcacagccaaggtcatccagggctgcggaaaccccaaggtcaatccccatgactctgggcctgaggagaagcgtcgccgtggcaaactagccctgcaagagaagcccccaacaggttctctggaaaagttggtctctgaggccaaggccaagctccgagacatccaggacttctggatcagcctcccagggacactgtgcagtgagaagatggccatgagcccagccagtgatgaccgctgctggaatggaatatccaagggccggtacctgcctgaggtgatgggtgatggcctggccaaccagatcaacaaccctgaggtcgaagtggacatcaccaagcccgacatggcgatccggcagcagatcatgcagctcaagatcatgaccaaccgtttacgtggcgcctacggtggcaatgacgtggacttccaggacgctagtgatgacggaagtggctcaggcagcggtggcggctgcccagatgacacctgtggccggagggtcagcaagaagagctccagctcccggacacccttgacccatgccctccctggcctatcagagcaggaaggacagaagacctcagccgctagctgcctagagccccacagcttcctcctgctcctcctcgtcaccttgatccttgcagcagccaggcccaggtggcggtaactgccccctgtccccaaggactgtcttggccaaaacatgcaacagacaatatttaatacccttggccttggaggcccagggcaggatgaggcaacagtagctcagagtaatggggcacagtgcatggggtgctggcctcctgggtctgattgcgcctgtcaccctagcttttaattttgtatcaggtcagctgcgagccagtgtccccaaaagccatgtatttcagggacctcaggggcacctctggctgcacactcctcccttaccctcctgcaccatcccagaaactcatgaggccagccagaagggcggctgttagccacaacccatcggagacctcaagtgagcctgtgccttcctttcccacctcctcccactggggactccccaccagaccccaagggccacagatgtcagaaactgaggcccatcccgcggctccccaggaagcctgccagggctgtcagtatgttgctgtccaggctctggcagggccttcaagtttatgcatgacaccttctactcagaagaaactctgcagccgggatccccacataacaccaggccagggtggcagctggctcggccactgtaggcttaactgccacactgcttgagggtgtgttctgtcccctcaagtggactcacaaagtctggccttgggggtccacgtgaggaacctcacttcaggggaatagccagccacatctagcctctatcccacttataaaggtcccctggccacagggatgctgggtggctggtgacacttcagctcagggtcaatgggacctggtactgcaggtcaggaggatgcctgggcccctttcctgacccaggcatctctgcaggagctgggggagcaatgacagtcaagggctttcacagacatgcacatctggaccctcggtgtccttgtccactgagcactacatctaagtcttccttgacagcactggagaggctcaaggcggtatcctcctgtggcctggagacctggggcacctggcgtaccgaggctgtcacagctctgtcttcccttccagggccttggagggtgctgagctgctatagccaggaagacagtggccctgacatgcagaaggcctggaaaggctgcttactgtcttttttttttttttaattttaatttttttttttta

SEQ ID NO: 1842 - DNA, 2130 bp, Cricetulus griseus
  modified_base (1969)..(1969): a, c, t, g, unknown or other
gacctgtggagcctgggcgtcatcctctacatcctgctcagtggctacccgcccttcgtgggccactgtggcagtgactgtggctgggaccgaggggaggcctgcccagcctgccagaacatgctgtttgagagcatccaggaggggaagtacgagttccctgacaaggactgggcccatatctccttcgccgccaaagacctcatctccaagctgctggtccgagatgccaagcagaggctgagtgctgcccaagtcctgcagcacccgtgggtgcaggggtgcgccccagagaacaccctccgacccccttggttctgcagaggaacagctgtgccaaagacctcacatccttcgccgctgaggccatcgccatgaaccggcagctggcccagtgtgaggaggacgctgggcaggaccagcccgtggtcatccgagctacctcacgctgcctgcagctgtccccaccctcccagtccaagctggcccagcggcgacagagggcaagcctctctggcacccccgtggtccttgtgggggaccgtgtgtgacccccaccagccccttgtacatacgcccctgccctgcagggcctgaaggctagggatctgggtaccccgccccttgccatcccaggcaccagttcacctgggtcctgctaggggctgctgggctctgttgggaggtgttttcttctccctgtcctcagccccacccctgcctgtttggctttgttttgttttgtttccttttaccactattgaaagcaagtgcccaggaggaaggcggagggtttgggccactcagcctgcaccccacgatgctcgcctgtcaactgtgaaggccacctgcgcccccacctccactccagccactctgctgtcttccagggttggggatcccgcagggtcacacctcttcctagccctcagtattgtcagggacaggccctcctggtgagcacagtggcccttttgtctttccccaccagagcactcttgggtctggggcaggggattccactgtcttggatagagacctctggaggttgggtggatggggacgcacctggttgattccctgtccccatcacctacctgcctgtcccttggagggttgacaatcagaatctcctcccaggctgcttagctccttgcgctgggacaggcctgataccagtcccacctcccaggggcaaagctggaggacgaccctgcacccagctagctccaccaaggcaggagaggtgctggacaaggagcccatcagcaaataatggggttcccacatgactccccacctgggcacctgagtgccccttctcagggctcagcctggccatggccatgtcctgcccctaggcctggggactgtttctagccacgagctactatgcaatacgagttcccatttcctccgtggccctgctgacggggcggctttgggggccacaccaccccgcctgcaattcctctgctcaggtgtctccagggcagcccctggcctcaaaactccttggtcaagattgttaagtttagtttagacttttttaaaaaaataataataatttgacttgcttccctgttattgaagagtacttgaatgttggggtctggtgggtggggacctgggacacccactgcccagcaccctccaccctcctccttagtcccataggattgtcacagtaggggaggtgacatgccttcagtcctgcctgcctctggacacaattccaaagaccccctggagggccaccagcatgatccagctgttgggcacccgaggacttgcccctgcaggttcttgaagcagcctgactgggcagtgagcagcattgatccctccccaagcagggctgtcatttccttgctgtcttccatgcccgacctggaggatgggtcaagacccctaactgtgaatgagagacaatcctggggtggcttggccacaaaccatgctgaattcngtataaaaaagaagaaaagcctgttttagatttggggacatgcaagcactttcaactccatcctaccaggtgaaaagaccgctacagacctttcccaccaactgtcaacgccaggattttgtattctgttttgtaaggatttaataaaagtcatttaaaaa

SEQ ID NO: 1843 - DNA, 2130 bp, Cricetulus griseus
cggccgcagggtcccctccgtgccggcgccgcagctgccgggcctctcgagtcggtggacgcgtcctcccgccggcctcgcaaccgccgcaccccggcctcggctgcgtcgcgccatggcggcccctggcgccccgcggtcgctgctcctgttgctgctggcaggccttgcacacggtgcctcagcattgtttgtggtgaaagacagcaatggcacagcttgtataatggccaacttctctgcctccttcttcaccatctacgagactggacatggttctaagaactcaacctttgaactgccgtcctctgcagaagtactgaatagtaacagttcttgtggtagagaaaatgtttctgaacccatcctcacaattgcttttggaagcggatatttattgacgctcaacttcacaagaaatgcaacacgttacagtgtccaggacatgtattttgcttataacttgtcagacactcaacatttcctgaatgccagcaacaaggggatccactctgtagactcctcaactgacatcaaggcagacatcaacaaaacataccggtgtttgagtgctatccaggtccacatgggcaatgtgaccgtcacgctcagtgatgccactatccaggcctacctgttgaatagcaacttcagcaaggaagagacacgctgcacgcaggatggaccttccccgaccactgtgccgcctagcccctcaccaccacttgtgcccacaaaccccactgtgattaagtacaatgtgactggtgaaaacggaacctgcctgcttgcctctatggccctgcagatgaacatcacctacatgaagaaggacaacatgactgtgaccagagcattgaacatcagcccaaatgacacagctagtgggagctgcagtcctcatgtggtgaccttgacagtggagagcaagaacagtatcctggatttgaagtttgggatgaatggcagttctagcctgtttttcctacaagaagtccggttgaacatgactcttcccgatgccaacgtgtcgtcactcatggcctccaaccaatcactgagagctcttcaggccacggtcgggaactcctacaagtgcaacaccgaggagcacatctttgtcaccaaggagttttccctcaatgtcttcagcgttcaggtccaggctttcaaggttgaaagtgacaggtttgggtctgtggaagagtgtatgcaggatggtaacaacatgctgatccccattgctgtgggtggtgccctggcagggctcgtcctcatcgtcctcatcgcctacctcatcggcaggaagaggagtcatgccggctaccagaccatctagccggtggacaggcgggtgcgctgcgccagacgcacaggggcctgttcttatgtccccgagcttagataggtgtggaagggaggcacactttctggcaaactgttttcaaatctgctttatcaaatgtgaagttcatcttgcaacatttactatgcacaaaggaataactattgaaatgacggtgttaattttgctaactgggttaaatattttgctaactggttaaatgttaatgttaccaaagtagagctctaaggaggacaagaaggctccccccatttgacttttttaagacttggtgtttggtttcttcatcctgttactcagatttaagccttacaaagggaatctctggcctgacacttgggcgtggtaagggcggctgatctttaggctgcacgctgaagatgctagaagggaagagcagggaagccctgcacagaggcattcacaggggcaacctctggacaggcttgggctgcctggcctggggaccggaatctggcatctggctgggcacaaccaccagtgtttctgtgctctgccacccatgagctggtacttttctaaatagaaaaaggcattatttttatttactttttgtaaagtgatttccagtcttctgttggtgttgagggtggccccgtttctgcactgtgtacaataaaagattcacactgctgacctgtcctgccgcataggtgggttgtacactgaggaccagctcacgtaatgcattgcctgtaacgatgctaataaaaagtctccttctttgtcaaacaaaaaaaaaa

SEQ ID NO: 1844 - DNA, 2130 bp, Cricetulus griseus
cgggggaccccagctcacggtgcccccaaacctattaccgcagacgctgcttaacggcccggccagcgctgcggtgctgcctccgccccacggtttggggggcagccgaggacccccgactccagcgcctcccggtgctcccggggggcccgcctgcctcggggctgccccgggtgtgtcggccactgtatcctccgcgccgtcttcgacctcgtcgacggtggcagaggtgggcgtggggtgcccgggggcaagaggcctgggtcggtgtcgagtacggaccaggagcgtgagctaaaggagaagcagcgcaacgctgaggccttggccgagctgagcgagagcctgcgcaaccgagcgggaggagtgggccaacaagcccaagatggtccgcgacacgctgctcacgctggctggctgcacgccctacgaggtgcgcttcaagaaggaccactcgctgctgggtcgcgtctttgccttcgacgccgtctccaagcccggcatggactacgagctgaagctgttcattgagtatcccacgggctccggcaacgtgtactccagcgcgtccggggtggccaagcagatgtatcaggattgcatgaaagactttggccggggtctgtcctctggcttcaagtacctggagtacgagaagaagcatggctcgggcgactggcgcctacttggggacctgctgcccgaggctgtgcgcttcttcaaggagggcgtgcctggcgcggacatgctgccccagccctacatagatgccagctgtcccatgctacccacggcgctggtgagtctcagccgtgcccccagtgcacccccaggaactggaaccttgccgccagcggcgcccacgggccgcggtgcagccgccagcctgcgcaaaaggaaggcatccccggaaccgccggactcagctgaaagcgcactgaagctcagcgaggagcagcagaggcagcagtggatggcaaaccagagcgaggcgctgaagctcactatgtccgcggggggctttgcggctccagggcacgcagcagggggaccgcccccgaccccctccacctctgggacctcattccaataggaccaccccgccggaatcagccccccagaatggtccgtcccccatggccgcactcatgtcagtagcagacactttgggcacagcgcattcgcccaaggacggcagttcagtgcactctaccactgcatctgcaaggcgaaacagcagcagcccggtgtcgcccgcctccgtgccggggcagcgtcgcctggcatcacgaaatggggacctgaatttacaggtggcgcccccgccgcctagcgcccacccgggcatggaccaagtgcatccccaaaacattccggattcccctatggccaacagcggacccctctgctgtaccactttgccacgaacgtttggaggacactcatttcgttcagtgcccatccgtccctagccacaaattttgtttcccttgttctagagagagtatcaaagcccagggggctacaggtgaggtgtattgccccagcggagagaaatgccccctagtcgggtctaatgtaccttgggccttcatgcagggtgaaatcgcaaccatcttagctggggatgttaaagtgaaaaaagagagagacccttgagccgcagggcagggacctcttttgccctagaccacctcctcctcaatctagagggcccttccccccacctgcctcccatttcccttcccaccaagatgtagaattgtgaatataactgcaaaaagttagtcttatgtatagacattatttccgtcgtatgtttctatattttgaaacaggtatgtaacttcttcatttgaaggataagctggttgtgttaagcagtataatattgattggatcatttgcatcatattcgttagcatttatttggtggcagaatgtttgcctaggtacagcattaatagcccttagcaacgactgctgctggtgtgtatttttgtaaatgttatgcactctgaaaaggaaaaacacaacaaaagaaaatgtattttgttgttttttgttttgccaaggccagagttgctagaaaagaaaaaaaaaaaaaaaaaaaaaaaaaaaaaaaaaaaa

SEQ ID NO: 1845 - DNA, 2130 bp, Cricetulus griseus
gtctgttcctccgactccttcaacgaggacatcgcggtcttcgccaagcaggttcgcgctgaaaagcctctattttcctcaaacccagagctggataatttgatgatacaagcaatacaagtactaaggtttcatcttctggagttagaaaaggtccacgaactgtgtgataacttctgccaccggtacattagctgtttgaagggaaatgcccattgacctcgtgattgacgagagagatgggagctccaagtccgatcatgaagaactttcaggctcctccacaaatctcgccgaccacaacccttcatcctggcgagaccatgatgatgcaacctcaactcattcagcaggttagacaacagtgtagcttcacctggcacaggtgatgatgacgatccagacaaggacaaaaaacgccaagaagaaaagaggcatattccccaaagtcgcgacaaatttttattcatgagagcttggctcttccaacatctcacacatccatacccttccgaagagcagaagaaacagttagcgcaagacacaggactgacaattctccaagtaaacaactggtttatcaatgccagaagaagaatagtacagcccatgattgaccagtcaaatcgagcagtgagccaaggagcagcatatagtccagagggtcagcctatggggagcttttgtgttggatggtcagcaacacatggggatccggcctgcagggtttgcagagcatgccaggggactacgtttctcagggtggtccaatgggaatgagtatggcacagccaagttacactcctccccagatgaccccacaccctactcagttaagacatggacccccaatgcattcgtatttgccaagccatccccaccacccagccatgatgatgcacggaggaccccctacccaccctggaatgacaatgtcagcacagagccccacaatgttaaattctgtagatcccaatgttggcggacaggttatggacattcatgcccaatagtataagggaactcaaggaaaaaggaaacacacgcaaaaactattttaagactctctgaactttgaccagatgtgacacttaatatgaaactccagacagctgtgattattttttacttttgtcatttttcatcaagcaacagaggaccaatgggacaagaacacaaatgtgaagtgatgggctcattgagacaatattgtccatgcaaagatcctctggagaaagactccgagagttataactactgtagcataaacatagggactaagttaaacttgtacatttctgttgatcactccgttacgttgcctcaaatagttttagaagagaaaaaaaatatatccttgttttccacactatgtgtgttgttcccaaaagaatgactgtcttggttcatcagtgaattcactatccaggagagactgcggtatattttaaacctgttgggccaatgagaaaagaaccacgctggggagcgcgatggacacttggctgaacctcatcactctatctccagcgactagaatgtgttttgatgcccagcctttgttcccccatcaatgtgtcctttagtttcaaacagatctttatagtttgtgcttcataagccaattcttattatgattttgggggactgttcttcaaagaacttgccaatgaagatttagagacagagagaaggctccttcaagttccgagccttggctgtggacaaaacaatcttaagttgggcagctttcctcaacaagttattcatggtcgttgcaccataagtaggattctatcaggaactcaaagcttgggggataaaaaggagcgagagaatactgtaacaaacttcgtacagagttcggtctttttaattgtttcatgttagatattctatgtgtttacctcaattgaaaaaaaagaatgtttttgctagtatcagatctgctgtggaattggtattgtatgtccatgggaccctcttttctcagcacgtgttcctcactagaagaaaatgctgttacctttaagctttgtcaaatttacattaaaatacttgtatgaggactgtgacgttatgttaaaaaaaggtgttaagtcacaaaatgcggtaataaatattcatttt

SEQ ID NO: 1846 - DNA, 2129 bp, Cricetulus griseus
gcctgcagaggaactccttgtgagcggcctgtgagagtttatgcggatggaatatttgacttatttcactctggtcatgcccgggctctgatgcaagcaaagaacctttccctaatacatatctcattgtgggaggtctgcagtgatgagctcacgcacaacttcaagggcttcactgtgatgaacgaaaacgagcgttatgacgcagtgcagcactgccgctacgtggatgaggtggtgaggaacgccccctggacgctgacgcccgagttcctggcagagcaccggattgatttcgtagcccatgacgatatcccctattcttcggcagggagtgacgacgtgtataagcacatcaaagaagcaggcatgtttgctccaacacagaggacagaaggtatctccacatcagacatcatcacccgcattgtccgtgactatgatgtgtatgccagacggaacctacagaggggctacactgcaaaggagctcaatgtcagctttatcaatgagaagaaataccacttgcaagaacgggttgataaagtaaagaagaaagtgaaagatgtggaagaaaaatcaaaagaatttgtgcagaaggtggaagaaaagagcattgacctcatccagaagtgggaagagaagtcccgagaattcattggaagtttcctggaaatgtttggtccagaaggagcactgaaacatatgctgaaagagggaaaaggtcggatgctgcaggccatcagtcccaggcagagtcccagcagcagccctactcatgaacgctccccctccccctcctttcgatggcccttctctggcaagacgtccccatcttcctccccagcaagtctctctagacacaaggctgtgacctgtgacatcagtgaggatgaagaggactaacttttcatccctgtcccctaccttagaagcctgctctgcatccattttcctccccagaactttgctttactgtttatgctcatgtaatcttgacagggaaattgtcatttttattaaattttttaaaaattagtctttcaaatatagtaaatagaactaattttttgccctgaggaagtaggcacaagaaagaagcgtgtactacccagaggcctttcttccagacacactagtgcttgccttctgttctgaagcaaggtggcttgccagatccttcaaacaaagagccatgctgatgggtaatttggcaagactgttgcaattttaacttccctaaaatatctaaaacctgaattagctcctaattccaagtgtcctgccgacccatgtgtcagcatggttgtgggaaggaagagatctaagtctcgcttttcttactccctgaggagtttcttgttggacccaatggggtccatgcagacactgagtggggatgcaaccaaacaacagagtgtcggttgcagaattttctgctgtgttcatcttagaatattctgttcgcccaagtatttgggagctgtggtcaatctctttcctgcaacctacctgtaaaggaagggccatatggccttgacctggaaccctctctcaaagctgttgaaattagtgctttctcatgttaggtagtgctgcatagctcattttaactggttccactttggtcttctctttggggatccgtctctctctgccttattctcctaggtatacaaaggtgatgacgtcactgctgccactcacctgcttgttctctcagtgcatgtcgcccataggtacttgagggtcagtgtgctcctaggtgctagaaaaggtgctgagcctgttgtctttgagatctgttcccttatcaacttttcaatcccttctcaaatcagttctgtttccctgctttggttttacccctaaagccatagcttctagatctctgtcagcatacatgtgccgaaactgaacccacacggggttcaaaggaagcttccttaacaatgttttaaaactaatggtatttttttaagcttaccaatataagtatttttaaaggttgtatttttcaaagtcattaacaatgattgttttctctcacagacagattatcatgggataaagaatggtccctagcttctatttttcaaaaaaaataagtgcaacatgttcttggactt

SEQ ID NO: 1847 - DNA, 2129 bp, Cricetulus griseus
caaagaagacgtggtttgataaaccaaattttaataggacaaacagtccaggtttccagaagaaggttcagtttggaaacgaaaatactaaacttgaacttaggaaagttcctccagaattaaataacatcagcaaacttaatagtaacatttttagtcgattgggaacattggttaacttacaggtcgcctataacggtgaccctgaaggtgcccttatccaatttgcaacatacgaagaagcaaagaaggcaatctcaagtacagaagcagtattcaataaccgcttcattaaggtttactggcacagagaaggagctgctcagcagttacagaccacttcaccaaaggtaatacagccgttagttcagcagcccattttacctgttgtgaaacagtcggtcaaagagcggttgggtcctgtaccttcaggcactgttgaaccagcagaagcccagagtgctacttcagaccttccccaggtgttgtctacatctactggccttacaaaaacggtgtataatccagctgctttgaaggctgcacaaaaaaccttgctagtttctagccccgcaattgataataatgaagcacagaaaagaaacaggaggcactgaaacttcagcaggatgtaagaaaaaggaaacaagaaattttagaaaagcacattgaaacgcagaagatgctaatttcaaaactaagaagaaaaacaaaacaatgaagtctgaagataaagcagaaataatgaaaacattagaggttttgacaaaaaatattaccaagttgaaagatgaggtcaaagctacatctcctggacgctgtcttccaaaaagtataaaaacgaagactcagatgcagaaagaattgcttgacacagaattggatttatataagaaaatgcaggctggagaagaagtcactgagcttaggagaaagtatacagaattacagctggaggctgctaaaagaggaattctttcatctggccgaggtagaggaatccatgcaagaggtcgaggtgcggctcacggccggggcaggggtcgaggtcgaggaagaggtgtgcctggccatgctgtggtggatcaccgacccagagcattggagatctctgcatttacagagagcgacagagaagatcttctccctcattttgcgcaatatggggacattgaggattgtcagattgacgactcttcacttcatgcgataattacattcaagacaagagcagaagcagaagctgctgcaattcatggagctcgtttcaaagggcaggatttaaaactggcatggaataaaccaatatctaatatttcagctgtggaaactgaagaagtagaacctgatgaagaggaatttcaggaagagtctttggtggatgactcattacttcaagatgatgacgaagaagaagaggacactgaatctcgttcttggagaagatgatttgactgatgattgatctgcatatgctagaactctacctgtgtccattagtgttacctaatgtacttttacatacttgtaaaaaacaatttttggtaaaatatgatgaagatggatttcacaaatagataaaagagaagaaaactaccttctgatcttgtattttgaaagattgatgtttgcattttatttcagtaaacaattgctaaagacatcacaatagaacatatgcaatgtttttattacatacttctattgaacattacagaattctttgggttatttgtaaattaatgaatagatttgaatacttatgacccattacttgttataacatagaagattttgttttactccaaataaggaatgaatttgcatttaaaatcttaatgaatgttttcaaaaatgaatagatgacatagtgctctaactaaagtctccaagttatgtattcataatattacatagtagtatgcttaggctttactatgtattagccatttgttggatttgtgtatgtattttatcacatgggtgttaatgataatggtgtatgactgctttacatatgagtccttatgcatctggatgctaaaaataaagtggaatggtctcttaaaagaaaaaagaaaagaaaaaaaaaagcaatagaaaaaaaaaccatagacaaatagttcctt

SEQ ID NO: 1848 - DNA, 2128 bp, Cricetulus griseus
ccacccgagtcgcacagcagtagcctggctgaccacgaatatacagcagccggcacgttcacaggggcccaggctggccgtgcctcccagcccatggcccctggagtctttctcacacaaaggcggccttctgcatcatcccccaacaacactgctgccaaaggaaaacgtacaaaaaagggcatggccaccgccaagcaaaggcttggaaagatcttgaagatccatcggaatgggaaactgctcctctaaggcttgggaagccaggacccttctgctctgctcaggacccccggagccccgctacatcagcccctcccaggagggtggctgtgccgcccggcccagggagggccttgcctcctcccagccacctctccccaccacgagcatctgtcccttgagcaggtggagcgagcggagcatggccgtcccttgttgtgaacacggacatctttctcaagttgcttagagtgaccagttccagaaagtggccctgccaacttgagtaccattccggtttcaggacagcctccaggccaccccaccggctctgcttgggagcatgaggccttcaaggaaggcgtgcagtgagccacgctcaccagcccgagtctgagctggccccaggctggcagcctccaaaggcgtaaaacaaggcaaaggacacagaaagagaggagctgtgggtattgaatgtcccctccctcctcttcccgagtgagtctttacagcacttggccagtgaggagaggttgccccagctccctggctggcaggtagcaggctagatagtgggtgtcacacactcaaatgcctggggacttttggggttgtcaggacccacagttaggttggtgtgttagtgggtggaggaaccactgtggggtcacaggggaagggtgacagctcagccacgtcttagggtccgggggacccaggctaagccacgtggaagggccctactctggaacagcacttctaggccaaggcaccctgccctgagtgggcagacaggtgggcagggccacagggctggagccagcatggcagcgcttgtctgagccgctgggtggcatcgtgagcatggccatcccaggtggcgtgtccacccatcgacacagaggggctgggtttgtttctcaggcaatcctgtattttcattttagatgtatttccggaagcatatttttcatagaatgtagcgtgtaaatagctttttaaatgacttttttataagagcaaaagtatctctaggaatttctttctatagagtccttcagtaacctttatacgagtttttgcccctcccctcctggctctgatggacagtcgggttctggcctccacacccttttctttctttccttttgttactcttattttcctcttaggaactaaggtattgcctgaaaaacaacggcgcctgcgcagccttacactctgtctttcagagcggatagtacagacccccttcccacacgccctgaagccgcgtctccagtttcacaccagctcttcgctctccttcttgtatgacgaggggtcggggatgcagttattttactagcaccttgtgaagtatttgtgtttcgtgatgctgtaatttattaatgtttgtagctttttatatttgtacatttcttatgaggtttgtttctacacccgttacctggatgtgttgtccatgaggagatgcagcttggcggaggccttatccactcccacttgacctgtttggggggactctgtccccagggcccggggctgggagaggggcatctcgcgggccccaggcttactcagaactggtgtttttaaagtttccttgaccccgtccttgtgaacatttctataatcttaacccgggcatcaagctgttctctctctctctctctctctctctcctttttaattttattattattttggcgacatgtacatttctaacaaagtttatcgtggctattaaagtgttctatttcccagttcatattactcttgtatcgagtccatgaggtctaaggcagcttagacctaaaagttttaaaaaagtaaaaatatttcaggttttgtacagaaaaaaaaaaaaaaaaaaaaaaaaaaaaaaaaaaaaaaaaaaaaaaaa

SEQ ID NO: 1849 - DNA, 2128 bp, Cricetulus griseus
agcggcggctgaaccaggcggactagctgcggccacggcgccgccaagtcgcgtgcgacccgcactcggcccgccgccgagagagccaccggcgccgcctgtgacctcgtgaggctggcatgcaggatggcaggacagcccagccatatgccccatggagggagtccgaacaacctctgccatgcactggggcctgcgccccctcaagacccacagaggcaccccaacaccctatcttttcgctgctcactggcggacttccagattgagaagaagattggccgaggacagttcagtgaggtttacaaggctacctgcctgctagacaggaagacagtggctctgaagaaggtacagatctttgagatgatggatgccaaagcaaggcaggactgtgtcaaggaaattggtcttctaaagcaactgaaccatccaaacatcatcaagtacctggactcattcattgaagacaatgagctgaacattgttctggagttggctgatgcaggcgacctctcacagatgatcaagtacttcaagaagcagaagcggcttattcctgagaggactgtgtggaagtactttgtgcagctgtgcagtgctgtggagcacatgcactcccggcgtgtgatgcaccgagacatcaagcccgccaacgtgttcatcacagctacaggcattgtgaagcttggtgacctcggcctgggccgcttcttcagctcagagaccactgcagcccactcactagtgggaacaccatactacatgtcaccagagaggatccacgagaacggctacaacttcaagtcagacatctggtctctaggctgtctgctgtatgagatggcagctctccagagccccttctatggagacaagatgaatctcttctccctgtgccagaagatagagcagtgtgactacccacctctcccaggggagcactactctgaaaagctgcgggaactggtcagtatgtgtatctaccctgaccccaatcaccggcctgacatcgtatatgtgcaccaggtggctaggcagatgcatgtctgggcatccagcacctgaatgcagcatgcctcatcaaagctaaacaccacttgtcttacttgagtcctctccccaagtggcaccaggaaactcccacagccaagaccagagggctctcagcaggctagctgaaagcagctgggttatggtcaatctccaaagtcctttctttgaactcttgcagacaactctgagctgacctgaccaattagtgagggcagtcactgaagctccctgtaccaactgaaatgtgaacctcggcctggtttcttcagacctgtccaggccccacactgtcagacttgtagcaaacagggtgactggtgtgtgtcagcctttgcaaatggttaacacccgttgatttagttcttggtacctttccatacaaccaggctgtgtgcttcatttactctctcttgtaaggggatacaatagaaataatggtttagagtagagattttgctaatactttctctgcattttataacttgatgagtgacagtgaggagcagccagcattggcattgagatgcatggtgtctgggagacaggagggtcctcctcttctgaaccctgccatgtaccatcgcctcctggaatgctgtggctcactgtatgataagtgtgctgacagaatctcaaacaaaagatgttacttagacacagcagcctaagtttgttatcccagcacttgggaggtagaggcaggaggatcaagaatccagggtcaccctaggcaatatgggaagtttgagactggactggactacataagatcctatctcaaatgtaaaaaaacaaaaaaacacgagatgcaaatcagccagcagtggcaggtgatccaaaaatgcagcctgtcaccctttcagaaaactcaagtccgtggaccatgagaatcaagaattaaaatacaactgtattatgtgcaggaaaagcagaaatatgttcatttactttttgttctcaataggattaactgtgaagactaatttataaatgtgaatttaaggaaacttaagtgccagaggaaactgttcttgaaattattttgttctaccaggagcactctctacccaat

SEQ ID NO: 1850 - DNA, 2128 bp, Cricetulus griseus
tggcgtccagatgaagcacctcctccgccaagggcggccagccgttcaggtctcacatgaactggaggtggtggccaccgagtatgaacaggaaacagtggccatgagtggtgacatggctggcttcggcagcgtcaagcccattggcgttcacacggtggtgaagggccgtctgcacctgaccttggccaatgtgggtcacgagtgtgagcccagagcaagaggttccagttcactgccaccatccaggtctcgggtcatctcaaatggagccagcttcttctctgggggaagcctcctcataccagggggctccagacggaaatgtgtggtacaagcgcagaagctaggctgatgtggacagcgagctggccgccatgctgctgacccaccctggagctggcccggggccccaggctgcccgcggggagccagatgccgcacacaggcgcaagctggagaggatgcggctggtgcgcctgcaggaggccggaggagcgtccgacagtcgcaggatcagcttgctggcccagcagagtatccgtgcacagcattcacgggacctgcaggtcattgatgccttaccgggaacgcaccaaggctgagagcatcaccagcgtgctaagccaggccatcaccacccaccacacgctgtacgccacgctgggtacggctgagttctttgagtttgcccttaaaaacccgcacaacactcagcacacggtggccattgagattgatagtccagagctcagcatcatcctggacagccaggagtggaggtacttcaaggaggccactggcctgcacacacccctggaggaggacatgttccacctgcgtggcagcctggcaccccagctctacctgagacccccggggagactgcccacatccctttcaagtaccagaacttttctgtgggcccactggctccaccacaggcccctgctgagatgagctctgagaaggacccggagtcgagagccctctggaagtgcagtgccatgcctactaaacacgccaaggtccttttccggacggagagtggccggcccattgccgtgctctgcctgactgtggagccccagccccacgtggtggaccaggtcttccgcttctaccacccagagctcaccttcctgaagaaggccatccgcctgcctccctggcacacacttccaggtgctcccgtggggacgcctggtgacgaccccccagtccatgttcgatgcagtgacccgaatgtcatctgtgaggcccagaacgtgggccccggtgagccacgggatgtgtttctcaaggtggccagcggtccaagcccggagatcaaagacttctttgtcatcatctatgcggatcgctggctggcggagcctgtgcagatgtggcaggtctgtctccactccctgcagcgtgtggacgtctcctgtgtcgcaggacagctgacccgtctgtcccttgtcttacgggggacacagacggttaggaaagtgagagcctttacctcccaccctcaggagctgaagacagaccctgcaggtgtctttgtgttgccgcctcatggggtacaggaccttcatgtgggcgtgaggccgaggagggctggcaaccgctttgtccatctcaatctggtggacatggactaccaccagctggtggcatcgtggctggtgtgtctctcctgtcgccagccactcatttccaaggcctttgagatcaccatggcagcaggcgatgcgaagggtgccagcaagcggatcacctacaccaacccctatccttctcagaggacctaccacctacacagtgaccgccctgacctgctgcagttcaaggagagctccttccaggtggcaggaggagagacctacaccattggcctgaggttcctgccaagtggtagcaccgggcaggaggagatcctgatctacatcaatgaccatgaggacaagaacgaagaggcattctgtgtgaaggtcctctaccagtgagggcacagccgtgtggccagggcccattcctgatgaacataatatattttaattgctatgtatttatactggaattcttttgtatctgctttttttaagttattgaatgaaacacttgacttctgcagaaaaaa

SEQ ID NO: 1851 - DNA, 2127 bp, Cricetulus griseus
  modified_base (11)..(11): a, c, t, g, unknown or other
  modified_base (30)..(30): a, c, t, g, unknown or other
  modified_base (55)..(55): a, c, t, g, unknown or other
acttttttttntttttgagtgggtgatacnccttccacgtgagcgctgatgggcngatgcagcctcgtgccttcccccactgacgcactagcagcccgatcccaggcatgccgccagatcaacacgctcagccacggggaggtggtatgtgctgtgaccatcagcaaccccacacggcacgtctacacaggtggcaagggctgtgtgaagatatgggacatcagccagccaggcagcaagagtcccatctcccagctggactgcctgaacagggataactacatccgctcatgcaagcttctccctgatgggcgcacgctcattgtcacagatggggccagctgtatagacatctctcatgatggcactaagctgtggactgggggtctggacaacaccgtgcgctcctgggacctgcgtgagggaaggcagctacagcaacacgatttcacctcccagatcttctccctgggctactgccccactggggagtggctggccgtgggcatggaaagcagcaatgtggaagtcctgcatcacaccaagcccgacaagtaccagctgcacctgcatgagagctgcgtgctgtccctcaagtttgcctactgtggcaaatggtttgtgagcactgggaaagacaaccttctcaatgcctggaggacgccctatggagccagcatcttccagtctaaagaatcctcatctgtcttgagctgtgacatttcagcggatgacaaatatattgtaacaggctctggtgacaagaaggccacagtttacgaggtcatctactgaacaaggactctaacaggcctgtcaaactctgggagacacccacgcggccctgacagggaggcgctggccaggcccccgaggacggcagaggaatgggggagcagcattgtggggctgcactccggaaggcggagaggacgcatgccccttcgtggattgatgtgtctgacagacttgacgggctttctcttctcccccttaccagtgctggcagatacttcaagtagatttatctggaggcttctgcttccgtttcccctccacagacaccctcatgagtctctgtctctttctcccctttctaacctgtcccctccctactctggggtgggggacactggagtagaccacattgttgttctggggaggggtgcctcattctgattgtgcagtgcacgaggtttatgaacaatgtaaatagagactgtggttgctgaccggccagtgagggaggaggccccttcccaccgatgctcgccgtgtactttgcctgctgtatttgtaatccactcatggtggtggtcttttctttcttttcttttttttttttttcctttattaaatttggtgcacactcaatcattgtgaagaggactcctccagcgcagcctagaaaggattccatatggcgggggtggggggcacagcgactcagctcagggagctaccagaagaaaaacagcaactggtgtgggtgcttttttttttttaatttgaataaaaagaattagaagtgatatcctttcataagatgccttctcccctttcctgctctcagccctttctactccctgaaggggtgaaatgggaacccccgtcatctgcaggtatcaccccttgggtaccaatgtttgtggtattaggttttgttttgttttgttttggtcttttgttgttttattaaagaaaagctaaagaccgtgtgagccctgctagtgggctctccatggatgtagcatatggaagagagtttttatattgcatttttatggattattttataatgtgggacttggtgtaggaagaaaggagagcgcctgtgaaacctgcccatctccagtgctccagttgagtggctgcccccaacaggatgtatgttgggacatgaaaaggccatggcaccctgcaccttcttgagagaggtgtgtgtcatgcctgtctggagtctgtccatctgcctctgggtttcagatggtcactggccaccacttgttaaggctctagccagaagggagggtgagggtggaagagagttattcctgaagaaaaaagaaaattgaaaagtcattgtaatgagctttttatatttttaaaagttactatttaaaaagg

SEQ ID NO: 1852 - DNA, 2127 bp, Cricetulus griseus
tgaaagtcttagcgagatcagtaattccttctaggccttggcagatggatccagtaggttgagagaaagtgaaggacttcaggaacaaaagaaactccccatgccactagcaactccatttttatcaactggaaggatcatgccagcgaccagcaacagatccaggtttatgaaaatgggggttcacagccaaatgtcagttcacagttcaggctacggtacttgggagctcaaggtgctgtggatgaagacctgtcatcccctgaaaatctgaaaggattcattgagataataatcccattgctaatcgagtgctggattgaagctttgcctccacaactagctgctgctattggaaatggtatagagcgagagcctctgcaggttatgcagcaagttctgaatgtcatttccctgctgtggaaactgtcaaagcagcaggatgaaacccacacattggagtcatggcttcgaaagaattaccttactgatttcaaacattcattttatgagccattttccatatgccttaaaagaaataacaaagcaacgaaagaaagagacaaataaaagcatcaagcattgcacggttctctccaataatgtagatcatcttttactgaatctaacgctgtctgatatcatggtctcgctggcgaatgcttcaactttgcagaatgactccagttggatagaaaccataaggaaatttgtgacggagacccttaaaggtggcgctaggctgaacagtaaacagttgaacagattgcttggagtctcatggagactaatacaaatgcaaccaaacagagaggccacagagattctcattaaggcagtgtatacgctatatcaacagaggggcctgcttcttccagttaggactttgttaatcaaatttttcagtaaaatctatcagaaagaagagctgaggtcttacagattgagataccggagcagagtgctatcccgctggctggctggccttccattgcagctttctcaccttggttcccgaaaccctgagctgtccacacagctgattgacatcattcatactgctgcagcacaagcaaataaggacttactgaaaagcttacaagctgctgctctgcgaatttatgatccacaagaaggtgctgtggtggttcttcctgcagagtctcagcaacgcttggttcagcttttgtattttctacccactctgcctgctgatttgctttctcggttaagtcggtgctgcattatggggagacttggttcaagtttggctgccacacttattgggatactatacatgagatcgtccttttctggatggaaccattcaattaatgactacttaatgactgatgtggactatctcagcttcttattttccacacttacagggttttcaaaagaggagttggcctggcttcaaaaccttcgaggagttcctcatgtcatccagacatcactttcccccgtgcttctctaccttacagacttggatcagtttttacaccattgggatataacagaggcagtttgtcacagtttattggttattcctgcccgaagccagagctttgatatcatgcaaagtgccatcagtaagcatttggttgggctgactgtaattcctgacagcacagctggctgtatatttggagtgatgtgtaagctcctggatcatacatgtgtagttagtgagtctctcctgccattcctggcttcttgttgctacagccttctttattttctgctgactctagagaaaggggaagcagaacatctgaaaaagagggacaagctatggggcgtttgtgtttccattctggctctcctgcctcgagtcctcaggttgatgctgcagagtcttcgagtgagccgagcttctcctgaagaactgcctgttgtgggccagttgctccgcctgctgcttcagcacgttcctttgaggacgcacatgctgaccaacgccatcctcgtgcagcagatcattaagaacattacgactttgaagagtggtagtgttcaggagcagtggcttacagacttacattactgcttcagcgtgtacatcagtggccatccccagggacctagtatattgaatgcattgtattgaagaagcaccgtggt

SEQ ID NO: 1853 - DNA, 2127 bp, Cricetulus griseus
tcttaatcctcaaaaagatggagttaatgtagtagaagaagaaattaaaaagtacacgactctgtcatacagagccccggaaatgatcaacctttatggtgggagacccatcaccaccaaggctgatatctgggccctgggatgtttactgtacaaactttgtttcttcactcttccttttggtgagagtcaggttgctatctgtgatggcagcttcaccatcccagatagttctcgatactcccacaacatacattgtttgataaggtttatgcttgaaccagatccagagctcagacctgacatatttcaagtatcctatttgcatttaaattcgaccaaaaaggattgttcagtctccaacatcaataattcttctcttccctcaactctccctgaaccgatgactgctagcgaagctgctgctaggaaaagccaaatgaaagccagaataacagcaccagcaacagcatcagcatcagcagcatcagcatcagcaacagcagcagctgcaacaacagcagcagcagcagcagctacttcaaaatgcttatttgcagcagtatcaacatgcaatgcggcagcagcagatacttcaacaactagtttttaatgcattcagtctatcagccacaacctcccacatcacaatatcctaacaatgatgcagcagtatcaccaggtctttcttgcagcagcagatgctagctcaccatcagcagcctcagcagcaggcatcacccgagtatcttacctcccctcaagagttctcaccagccctagtttcctacacttcatcacttccagctcagctcggaaccatagtggatccctctttcggtgccaataggttagttgctgagaaggaggcagtagcgcatttcacaaacgagaaggccatcagtcacccgcctgatatgtcagggtggaacccttttggagaagacaacttctccaagttaacagaagaggaactgctggacagagagttcgaccttctcagatcaacacggggactttaatgatgacgacaccgagcccgagaacctgggtcacaggcctttgctcatggactctgaagatgaggaagaggaggacaaacacagctctgactcggagtatgaacaggctaaagccaagctgatgcgctgactcctggccaggagtttgatgtgttcggtgcgggtcccttcttcgcggtgcaagctccacagcagcagcacagggggaacgggaagaacctctcccagcagacatttccggagcaggaggactttgatgtgttcacaagggcacccttcaacaagaaggtgaataatgtacaggactggcccacagcggggcctgacacgcgcccgttgcctgcacggcccagaagtgtagatatgtttggctccactccctttcagccattttccacatcagcgagtagaagtgagagcagggaggatgtttttgggctcgtgccctttgaggaaataaccggaagtcagcagcagaaagtcaaacagcgcagcttgcagaaactgacttctcgccagaggcgcacaaagcaggatgtgtccaaaagcaatgggaagcgccaccacggcacacccaccagttcaaagaagcccctgaagcctccctaccgcacccccgagagggcccgcagacacaagaaggtgggccgcagagactcacaaagcagcagtgagtttttaacaatttccgactcgaaggagaacatcagcgttgcactgactgatggcagagacagaggcagtggcctgcaacccgaggagagtctgctggacccctttggtgccaagcctttccatcctccagacttgtcgtggcaccagtcccatcagggcctaagcgacatctgtgttgaccacaataccatcttgcctgggaggccaagacagaattcagtgcacgggtcattccatagtgcagacgcattgagaatggatgacttcggtgccgtgccctttacagaacttgttacaccacgtgagtctcaacagtcccaaccagtcgaattagacccatttggtgctgctccatttccttctaaacagtagatactccaaggtggactcggcaataactcctgtttcaaaaaagtatgaatagttttat

SEQ ID NO: 1854 - DNA, 2127 bp, Cricetulus griseus
cagacagctccctccggaacctgaacctgctgtaaccaaagccagcagctttagtggaatctcggtcctgacaagaggtgatagctctggaagcagcaaaagcataggcaggctttcaaaaacaggatctgagtcttcaggtagtgtagggtcctctacaggctctctttctcacacccagcagcctctcccaggttcagctcttagccaaccttctcatggcacacctgtcatctacccggcagccagcactcacagttctctttcctttgatggtggcctcagtgggcaaggtgcatctcctagcactagcttccttttgcttcccttggaagcaactggcataccacctggcagtattctgatcaacccacagacaggtcagcccttcataaacccagatggaactccagttgtgtacaatcctacctatgactcaacagccagttcgaatggaatttagcaacatagataatattgtccagcacagccctcaacttagcagccctatcatttcaccagtgcagtcaccggctccagctcagctgtccaccctaaagaccatccgtccttcgggaccaccactttccatcatgtcccagtttgctagaccgtttgttcctgggcagggagatgccaggtatccactgcttggccagcccctgcagtacaatcctcctactcttctgcatggacacattccacaccaacagggtcagtctggcagcaggcatgggaaccgaggacgcagacaagctaagaaagctgcatccactgaccttggagccggcgaagcagttgttggcaaggtcttggaaatcacagaactaccagatggaataactcgaatggaagctgagaagctttttggggaactctttaaaattggcgccaagatccgatggctccgggacccccagtctcagccccagcttcatcgtcatcctctctgctgtggcagtggggatagcactgtcaaccccgagcgctctaaacccagtgacctggcctctacgtacactgtcttagccacgttcccctccatttcagctgcacagagtgcactaaagaagcagatccactcagtgaacaagtttaagctgagaatgagcaagaagcactacgacttccacattttggaaagggcaagttctcagtaaatcagccacctttggacccctctataatccccctgccctctcccatctgattggcttgatatgtggagcggatattaatataaagactcctgggatgtgtggccacatgttacagcttttggaagaaaggccagggacccagtaaaaggagggggagataactatttcaccccagtgactataggaacccacacaggaatgatacagagttagcagctttttctaaggaaatgctgttcagatgcctcctaacttttatagttattttgttttatatttctgaattcttgtatcagatccaaagctctattgtacagcaaattattcttcaaagtgattataaccagttgcagcctgtatttctttttgcggccagcacagtgtgaaccaactcagactttgggaaaaaaagaatgcaggaatggaataaccaagtcaaaaccatgtcaaaactatcctctggggggtgctgagggtgctaaggagacccacaaatagacaattactcctccactgaattgctaaacacagaaaagttttccaggaaatccagaactccccaacagggtccttccttcatttaggtagtatggccattaagtgtaaggtaattatgttctcaatgcctcttagtaaaaccacttaggttaaaaagaaataggaatcatcctaggcaggaaaattattccacttttttttaagtgtccttccaataactaaatgccactcatctgcattctcctctgtgggtattttatctcccaaggaaatgcacttgatgagtgctgaaacttcttaagtggtttaaattttgttttcattgtttgcagcggattactggacatcaaagattcattgcacttatgaacaaggaaccttattttcaatttctgtgtaattttgcaaggctgtacaatgtgctgatgcaagcctttttcagttcaagagaataaatgtttacaaatgt

SEQ ID NO: 1855 - DNA, 2127 bp, Cricetulus griseus
  modified_base (2124)..(2124): a, c, t, g, unknown or other
cagctgcagcagcacctccgctgccagcacagcaggaaattccagctcacccagcactgcttctcagagcccgacttgtaaggacggtgaccggcgctggctcagctgagcctagccctacagaagtggatgtatccaggcaatgtgtctgctcccctggtggatcagaggactctgaggccatggaggaaggaaatgcagagaattctgtctgccccagatgctgctgtcacaagccccaggagtcccaaaggagaactagcaggtgttctgatgaggaacgtccttcaaccagccgagcctgtgttgtgaatggtccggatggtacgagatccgccttttcctttaggactctgccacaaggggggtcttcaggcccagcacatgatgagagaactaatgggagtggctgtggggctacaggtgaggacaggagggggagctcccagcctgagagttgtgacgtgcagtctaatgaagactaccctcggaggccccttaccagggccaggagcagactgtcccatgtaccgctgatatctgagtcagaagttgccaaaacaaagccatgtcatgcaattaagcgaaagcgaactgcagataagtctaccagtaccagtgatcctgtgattgaggatgaccatgtacaggttcttgtattaaaatccaaaaatcttgttggagtcaccatgaccaactgtgggatcacagatctagtgctgaaagactgccccaagatgatgtttatccatgctaccaggtgcagggtactgaaacatttaaaggtagaaaatgcaccaattgtaaaccgatttgactatgcacagtgcaagaaactaaatatggatcaggtactagaccaaatactgaagatgccgccagagaggaaccgtatcatctacctgcgcccaatgcagcaggtagatacactaactttggagcagaagctgtttagtggcccctacccctatcatatttgcattatccacgagttcagtaatcctcccaatgttcggaacaaggtgcgcattcgcaactggatggatacaatagccaacatcaaccaagaactcattaaatatgaattcttccttgaagccactcgaactgaagaagatttaaagaagtaccctaagtacccatgggggagagaaatctacactttagagggtgttgtggatggagcaccgtattccatgatatctgacttcccttggctgagatcactgcgggcagcagagcccaacagcttcgccagatacgattttgaagacgacgaagagagtaccatctatgcccctcggaggaagggacagctgtctgcagatatttgtatggagacaataggagaggagatctcagaaatgcgccagatgaagagaggtgtatttcagcgcgtggtggcaatttttatccactactgtgatgtcaatggagagccagttgaagatgactacatttaaagagaccttccctggctcttctggtccaaagcggccaagaggctacacagaaactttgggcttggaattgggaggccctggctcagtttgttatataggaaatatataaggaacatggaaattgtatacaaagatttatatatagaagaaatatacaaagacacttccaaaagtaatgtctttataacctatgtttatacatcttaatttaaagaagtcatctgaatgaaggcaaataatttgaacattgattttgttcacttttctagacttcgttctcaatgtcatgtgactgagcccatgtactctgcttcttaccattgtcccttcagtctgtgcctttttcttctccagcagagctgtctgagtcagtgctaatgagtgctgtgtcttgtgtgtgtgtgtgttactataatggcaactaaccctcggtcagagaagactgcttctgtactaagtgggctcttctttttcctagtgtttatatttggcatatttctttacatgaaacattcagaaatagtaaaaaacatgaatttgaagggcaaatagaaggttttcagagcattctagttatttatttccacattcaattgtgtatttgctttatcttggacataaaaataaaccttagtaaaaactctaaaaaaaaaaaaaaaanaaa

SEQ ID NO: 1856 - DNA, 2126 bp, Cricetulus griseus
cggcggccatgtttgtggcgcgcagcatcgcggcggaccacaaggacctcatccacgatgtgtctttcgacttccacgggcgccggatggccacctgctccagcgaccagagcgtcaaggtctgggataaaagtgaaagcggagattggcattgtactgctagttggaagacacatagtggatctgtatggcgtgtgacatgggctcatcctgaattcggacaagttttggcttcctgttcttttgaccgaacagcagctgtttgggaagaaatagtaggagaatcaaatgataaactccgaggacagagtcactgggtgaagaggacaactctagtggatagtagaacatctgttactgatgtgaaatttgctcccaaacatatgggtctgatgttagcaacctgttcagcagatggtatagtaagaatatatgaggccccagatgttatgaatctcagccagtggtctctacagcacgagatctcatgtaagctgagctgtagctgtatttcttggaacccttccagctctcgtgctcactcccccatgatcgccgtgggaagtgatgacagcagtccaaacgcaatggccaaggttcagatttttgagtacaatgaaaacaccaggaaatacgcaaaagcagaaactcttatgacagtcacagatcctgttcatgatattgcctttgctccaaatttggggagatctttccacatcctggcaatagccaccaaagatgtaagaattttcacattaaaacctgtgaggaaagaacttacttcttctggtggtcccacaaaatttgaaatccatatcgtggctcagtttgataatcacaactctcaggtctggagggtgagttggaacataacaggaacagtgctagcatcctcaggagatgacggctgcgtgaggttgtggaaagctaattacatggacaattggaagtgtactggaattttgaaaggtaacgggagcccagtaaatgggacttctcagctgggaaactcaaatccttcactaagttcaaatactccaaatcttcaaaactcattacatggatcttctgctggcagaaagcacagctgagtacaagctagctggagtaactttgctgttttgctgcttgttgcatgcacacaggaatggaactcgaactccttttccccttccccagcgccgtttgatctctcccaagatgcaccagcagcctgctcactactaaacacagtccaaaaggcctttaaaattacagtgtatataattttttgtactagtcagtttattgacactataaatggaaaggctttttgttgagacatcatcaccaaaacaattttttgaaatgttctggagactaacttgggttccttcctagctattgttttctcttctttggttctctttgtatttactgtctttctcttttcttctgtttccccctccttctcccctctgttgtttttgttttggtgttttgttcctgtcttcattatttcaggtatttctttccccctctggattccccacgggctggatcgagatggtccagttgtgcccagctcctccctcctcctgctcctctggtagagcactcttgtgatgccaccgctctcggcctcttaatcccttacctgagaatgaaggggtttaaaacactgatttaaaggccttgttcagatgctcgtaaaagcttttattccgggctgctttttggttttcttcattttctttcagaagatccttcttacttagggcatgtcttgcatgtattacaactgaagtgtttggaaccaaacctgtttgtacttctgaaccaggaaaccctggcatcactcactagtcggttacctctgatgagatgagcttcaaaaaagcaacattaactgtgaaagattcccagtatctgattcagagtgcctgtcttgtaaattctgtgtggaattgttatagacttcagtttagcctgttagtaggcagctttgtgtgaaagcatatcattgtggacctcactctgcatttcagacattaagaacattttgaatttttataggttgatgttacaaatgactgtaaaataaatcattcctgtgtataaagcagcaaatcataaggatatttttg

SEQ ID NO: 1857 - DNA, 2126 bp, Cricetulus griseus
gatgattgaggaaggtgggaacaagaggaagaccatggcggagaagaggcagctcttcatagaatgcgtgctcagaattttgatgtcatacgactgtcaacttacagaacagcttgcaagttacgatttgtacagaagcgatgcaaccttcatctcgttgatatctggaacatgattgaagctttccgagacaatggccttaacacactagaccataccactgagatcagtgtgtcccgccttgagaccgtcatctcctccatctactatcagttgaacaagcgccttccttctactcaccaaatcagcgtggaacagtccatcagtctcctcctcaaccttaatgattgccgcgtatgacagtgagggccgaggcaagttgaccgtattttcagttaaagctatgttagcaaccatgtgtggtggaaaaatgctggacaaattgagatatattttctcccagatgtcagattccagtggcttgatgatgtttggcaagcttgaccagtttctgaaggaagccctgaagctcccgacagcagtctttgaagggccatcctttggttacacggaacacgcagtccgcacctgttttcctcaacagaagaagataatgctgaatatgtttttagacaccatgatggccgatcctcctccccagtgccttgtctggctacctctcatgcacaggcttgcccatgtggagaacgtcttccatcctgtggagtgctcctactgtcactgtgagagcatgatgggcttccgataccgatgccagcagtgccacaattatcagctctgccagaactgcttttggcgtggccatgccagtggcactcacagcaaccagcaccagatgaaggaacattcctcttggaaatcccctgcaaagaagctgagccatgcaattagtaaatctttgggctgtgtaccctccagagaacccccacatcctgtttttcctgagcaacccgagaaaccacttgaccttgcacacatagttcctcctcgacctctgaatatgaatgacaccgtggttagccacatgtcgtctggagtgcccactcccaccaagaggttacagtatagccaggacacgcccagtctcttggccgatgagcatgcgctgatagcctcctatgtggcccgtctgcaacactgcacacgtgtcctggacagtcctagccgactggatgaggagcaccggcttatagctcgttatgctgcccgactggctgcagaggcaggaaacatgacccgtcctcccactgatgccagcttcaactttgatgccaacagacaacagagacagctcattgcagaactggaaaacaagaacagagagatcctgcaggagatccagcgcctgcggctggagcacgagcaggcttcccagcccactcctgagaaggcgcagcagaaccccacgctgctggcagagctgcgcttgctcaggcaaaggaaagatgagctggagcagaggatgtcagcgctgcaggagagtaggcgggagctgatggtacagctggaggggctgatgaagctgctaaaggctcaagccacagggtcacctcacacatcacccactcatggaggtggccgccctatgcccatgcctgtgcgttccacgtctgctggctccacccctacccatggcccacaggattcactgagtggagttgggggcgacgtacaggaggcctttgcacaaggtacgaggagaaacctccgtaacgatctgctggtggctgccgactccatcaccaataccatgtcatctctggtgaaggagctccattcaggttagccgaggagcagtccagacacaggaagctcgggcacagcggctgagaagcaagctggcaccgacaagacaagggaaggtcttccccagaggcacattcctatccgtctctctgctgcacacctggacccggcttgcaggctgccagactcactcaaccaccagagagaggagccaagcctatgggaagtggggagggactgcctgaggccccagctggtgggcctcctgcatgtactagcctctgcattcctccctcagggcatggtctcatctctgcatcaggaatttaccaggaggtaggaaaagaaaaagaaaaagc

SEQ ID NO: 1858 - DNA, 2125 bp, Cricetulus griseus
gagaagttcagcagcctgagggctgacgacattgaacagatgcggtttaaacagaggctgaaggtgatccagtccttggaagacacagccaagagaagcgtggtccgagccataccaggggacattggcttttcaattgaagagctggaggatctttacatggtgttcaaggccaagcatctggcaagccagtactggggtggtagccgctcagccgccatccaccgggaccccagcctgccctacctggagcagtaccggattgatgccagccagtttcgggagctctttgccagcctgacaccctgggcctgtggctctcacacgcctgttctggcaggccgcatgttccgcctcctggaccaaaacaaggactcactgatcaacttcaaggagtttgtgacagggatgagtgggatgtaccatggagacctcacggagaagctcaaagcactctacaagctgcacctgcccccagctctgatccctgaggaagcagagtcagccctggaggccacccattacttcacagaggatagcccctcagaagaagcactaccccaggagcagcaggaaggaagtggaaatgaggacatccaagaaagaagagaggaaaaggggaccagccctcctgactaccgacactaccttcgaatatgggctaaggagaaagaggctcagaaagaaactattaaggaccttcccaagatgaaccaggagcaattcattgagctgtgtaagacactttacaacatgtttagcgaagaccccatggaacaggacttgtatcatgccattgctactgtggccagccttctcctccgcattggggaggtggggaagaagttttcagcccggacagccaagaagtccagggacggtgcccacagcggggaccacaacagtgccacagaggaggatgagccactcatacccaaacctcatcaggacccaacacgagaatgtcagccaccagcttcaggggacccccaggccaaagccggtggtgacactcatcgtgtgaaagcattgcaggacagccatgtggtagtggaggcgggcaatggagaggggcggggctctccttctctacttttgtctgatgatgaaaccaaagatgacatgtccatgtcctcctactcagtagtcagcacaggctccctgcagtgtgaggacctcacagatgacacagtgctggtgggaggggaagccggtagccccaccaccacctcacgcatcgggggcactgtggacacggactggtgcatttccttcgagcagatcctggcctccatgctaacagagtctgtactggtgaacttctttgaaaagagggtagacatcggactcaagatcaaggaccaaaagaaagtggagaggcagttcagcacctccagtgaccatgagccccctggggtcttgggctgagttgctaaatggaagctggtctctttctccttccctttatccctttctgttttctccttgaagacacatctgatcttgaagcgtggtgtcacagaagcaaaggtcaggtcagtgagacccagttgccttacaaggattccctcagccagtgccctcttcctccctgcggctgggaacctggagagcctaccttgagcctgctgttcccatagcattagaggcttttggatctgtccctgcctgcttcttgtcgctgcaccccatgctatacacacactacaccagttgcttccgttcgtggaaatacctacagccatgtggccagactaccagttgtcacttggtggtgtgcttgagctccaatggatagaaccttctaggcaccctctgaagttcttcaagctaagctcaggttttaggactgaggaactcggggtctgttacactggcaggagccttgcactgcactactaatttatgaggtttccattcctctgcatcattaacttcagaagcacatccctcaggtcctcctctattcccttgccctcattttagttggctaaaactcacactgtgctcaatgccttaataaatccctaacagaaaagaaaaagcacactgtgtacagtgccttcatgtggctaaataaaaaattttttaaaaattaaaaaaaaaaaaaaaaaaaaaaaaaaaa

SEQ ID NO: 1859 - DNA, 2125 bp, Cricetulus griseus
  modified_base (36)..(36): a, c, t, g, unknown or other
ctatctggaaacaggaatgaaaaagcaaccagatcngtaaactgcagaaggaggtttaaacgccacaactctgatgctcacagtaccacctcaagtgcctcgccagccccagtctccctgctaacagtaaccagtcagatgatggctcagacacagagatggcttccagctctaacagaactccagttttttccttcttagatcttacctactggaaaagacagaaaatatgttgtgggatcatctataagggccgttttggggaagtcctcatcgacacgcatctcttcaagccttgctgcagcagtaagaaggcagctcctgagaagcctgaggaacagggaccagcgcctctgcccatctctactcaggagtggtgactgaggttcatgcagaagggaacaaagagcaatttaaactttgaaaagaccacaaagcaacagactgaccctcctatttttaacttggatacctgctattctgccaaaagacattttctagaatagtttttaatgggttacccatccccccatccaacaaactcggaagccagttctagcttactgcaagaagagagtgtacataatatttaatatgctgagtatttcataggaaggctgaatgctgctgtaaagtgctctttaagtcttttttttttttttttttttaatcccctctaatgaatgagattaggggggtttcaggggacagagatgggatttgttgtgtgataaaccatatgtagtttagtctttctgtggagaggcagtggttggggcattttaaatggctggctacacttgttttcccctcatggtaatttgtcataactcagtagcacgacctgcccctagaagtagttaaagatttttaaatgctaaggcgttgccaaggttctgatgattcagacctgtactactgattattaagcaggacagactgagctttctgcaaatagcttgaaggaggaagcaatatctgaacacacaggtagcactgtgttggctcccttcatggtaatatttgataaacgtcgttatgtgagtcttataaaacagaaccaccggggctccttctggggaaggcaagcctgtaggatgggcaaggtcctatagggatagtaccaaagcatcaccattcggcagagaacgcgtggttgtaaactacttaacagattgtgtgagtcctggggatgcgcggggcacagttgatgctgcttggggcacatttcttagagggcttgcattgtgtaaataattgacattggtgttacacaactgtctgggattcactgaaatccacacgattcagttctagctctggattacctcagttgacctttgtggaggttttatctatagagtagttctttgccttgtcataaccttattagggttttaggttttgttgttttattgttttctctcccactatttaaagttgattagaaggaaaagagttgtgtgttgaggctaagctgagttggttgggttggcttcttgaagttgtctgatggccgattctcaaagttcaggaaaaacaatagtgccatttcagacctctcctagagggaggggggtatgtggctgccttagtattcctcactcatgattattttaaaaactggatttttaaagtctgttagttttcacaacagggagggccgcagtttgtggcatcctatagttgtgtagtttttacattgtgtgtctcttcccttttgggaaaaacctacctagtacaagccaccacatgcacagacggcccagtgagtgggtttgttttccacagccttggtgtgttacagagtccagccattaccattctcctgcgttactttgacatgggattgtttttgtacattttggctgcagtattggtggtagaatatacttttgatggatcatctctacttctgtatttatttatttattactagacctcaaccacagtcttctcccctccactctctgcctgtaggatgtactgtacgtagtcatgcactttgtattaatatattagaaatctacagatctgttttgtactttttatactgttggatacttataatcaaaacttttactctagggtattgaataaatttagtcttattagaaaaataaaa

SEQ ID NO: 1860 - DNA, 2124 bp, Cricetulus griseus
gtctgtggcttgaaactaattgagtctgcacatgataatggcctcaggatgactgcaagactccgggatttgaagtaaaagatctactcagtctaactcagttctttggcttcgacacagagacgttttccctagctgtgaatttactggacagattcttgtctaaaatgaaggtacaggcaaagcatcttgggtgtgttggactgagctgcttttatttggctgtaaaatcgatagaagaggaaaggaatgtcccactggcaactgatttgatcagaataagccagtataggtttacagtttcagacttgatgagaatggaaaagattgtgttggagaaagtgtgttggaaagtcaaagctactactgcctttcaatttctgcaactgtattactcactcattcaagacagcttgccttttgaaaggagaaatgatcttaattttgaaagactagaagcccaacttaaggcatgccactgcaggatcatattttctaaggcaaagccttctgtgttggcattgtcaatcattgctttggagatccaagcactaaagtatgtggagttaatggaaggaatagaatgtattcagaaacattccaagataaatagcagagatttgaccttctggcaagagcttgtatccaagtgtttaactgaatattcatcaaacaagtgttccaaaccaaatgttcagaagttgaaatggattgtgtctggacgcaccgctcggcaactgaagcatagctattacagaataactcacctcccaacaattcctgaaacggtttcttagttggtaatctggttgttactctctgtgtacagaaaattttccagtgtggtaattttcttttataactgaagaattgaaataccatcttcagtataaacagtatgggattgaaagagtaaagggaaaactgaccttgttgatctagttagtgaatattggaagccatttcctgtggacaacagacagcaatctccagagaaagaacttagcaaacctctaaaatacatgttaacactttcttagtcaaattattagcttaggaaagagaatcctccaaactgaaaatttaaaagtagttaatgaccccgcaataaatatatgattgtgcaccttaaacatcatcagttcacctttagcagcttgcagtatgtaggtagatttctgttaaacctggtctgtgttgtttgcctaggcagtaggattgcaatagcaacaaaaactgttcctgaagtctttctctgccactctgaccatgagtttcccatggtacaggatttaagctatgaaacctcagcacatcatcacattagcagcatggtctcagtgttgggaaaactcctgattccaggcttggtagagctaggcttagatttgaattcacccatgaaacattcaaatcaaagctaaagacataaatgtgataaatgtgaaataaaactgtgaaccttcatttcaacattgatctaacttcctagattggaagttaggtggtattgaaaatggtaaactacttaatttaaatctcaaaatttaaattatgaggtttacatcaaaaccaacatttcacaaatgcacttttaaggtatcataaggagtagtttaagcagtaaatggtttcttggcacccataaccaagtaattgctaatttagaggtggaatttttattggtatatgagaatttcacttaaacttatgggtcttttttataaagcagatctcacaagttttgagactttgttacctttaatatttcttctagagaataggtggtttttatccataataaaagaaaaattctacagaactgctgcttcactctagtcccatttgagaaaacatattaataactggatgaattatcaccctgaaaacttatttattgcattaaacttaactcaggcttgataaagcactccagtatttttttatcgttaacctttgtaaatgatatccatgaaaacttttcagttcttcctaaaggctgatatgcttcaatttgaaaacaatgttgattttgagaagtaagctaaccaactaccattatgttttaaactaaggaatacacctttcaataaagttattgaaatgacaaaaaaaaaaaaaaaa

SEQ ID NO: 1861 - DNA, 2124 bp, Cricetulus griseus
gagaggctgcgcaccttgttcatcattgctgttgtaatgagcctgctgaattccctcagtaccagtgggggcagtatttcttggaccgactttgtcaatgagatgctggctaaaggcgaggtgcagcgtgtgcaggtggtacccgaaagtgatgtggtagaagtctatctgcatcctggagccgtggtgtttggccgacctcggctggccttgatgtaccggatgcaggttgcaaatatagacaaatttgaagaaaagcttcgagcagctgaagatgagctgaacatcgagagcaaggacaggattcccgtttcctacaagcggacaggattctttggaaatgccctctatgccctggggatgacggcagtgggcttggccatcctgtggtatgttttcagactgactgggatgacaggaagggaaggcggattcagtgcttttaatcagcttaaaatggcacgtttcaccattgtggatgggaagacagggaaaggagtcagcttccaagatgtggcaggaatgcatgaagccaaactggaagtccgagagtttgtggattatctgaagagcccagagcgtttccttcaacttggtgccaaggttccaaagggtgccctgttactgggaccccctggttgtgggaagacactgttggccaaggcagtagccacggaggctcaggtgccctttttagcaatggctggcccggagtttgtcgaggtaattggaggactgggagctgcccgtgtgcgaagcctcttcaaggaagcccgagcacgggctccttgcatagtttacattgatgagattgacgctgtgggaaagaagcgctccacctccatgtccggcttctccaacaccgaagaagaacagacccttaaccagctgctggttgagatggacggaatgggcaccacagaccatgtcatcgtcttggcatccacaaatcgagctgatgttttggacaatgctctgatgaggccaggtcgactcgataggcatgtcttcattgatcttcccactcttcaggagagacgggagatttttgagcagcacctgaaaggcctgaagttgacccagcccagcagtttttactcccagcggctggcagagctaacaccaggattcagtggcgccgacatcgccaacatctgcaatgaggcagcactgcatgctgcacgggaggggcacacatctgtccacacgttcaactttgagtatgccgtggagcgtgtcattgctggaactgctaaaaagagtaagatcctttccaaggaggagcagagagtggttgccttccatgagtctggccatgccttggttggttggctgctagaacacacagaagctgtaatgaaggtctccatagcacctcgaacaaatgctgctctgggctttgctcagatgctccctcgggaccagtacctcttcaccaaggagcagctgtttgagcggatgtgcatggcactaggcggtcgcgcagctgaggccatctcgttcagcagggttacatctggggcccaggatgacttgaggaaggttacccgcattgcctactccatggtgaaacagtttgggatggcacctagcattgggcctgtttccttccctgaggcacaagagggcctcgtgggcattggacgacgtcccttcagccagggcctccagcagctgatggaccatgaagcaaaactgctggtggccaaagcctacagacacactgagaaggtgctactagacaacctggacaaactgcaggcgctggcgaatgcgcttctggaaaaggaagtgataaactatgaggacattgaggccctcattggcccaccgccccatgggccaaagaaaatgattgcaccacagaaatggattgacgctgaaaaggaaaacaagccttagcagaggaggaagctccggctccctagcccccacctccaagacccagacaactacttcctcgactgcacctgcagttatctcagaacttgttggcaagctgccgtcagcctccaagagtatttcacctgaacttgaacctcaacctctgttagctctctctggtttctgacaaaaacttctgatgtctatttattggttcaggtattagtaaatcatttgcag

SEQ ID NO: 1862 - DNA, 2124 bp, Cricetulus griseus
gaggaggagaagatggaagcagtgcccgacacagagcgcaaggaagataaaactgaggcacagtcaccagtgaaggccgagtggcccagtgagactcctgtgctctgccaacagtgtggtggcaaacctggtgtcaccttcaccagtgccaagggcgaggtgttctctgttctagagtttgcaccctcaaaccactctttcaagaagattgagttccagcctccggaagccaagaagttcttcagcacagtgcgaaaggagatggctctgctggccacctcactgcccgatggcatcatggtcaagacttttgaggacagaatggacctcttctcagcactaatcaagggccccactcggactccctacgaagatggcctctacctgtttgacattcagcttcccaacatctacccagcggtgcccccccacttttgctacctctcccagtgcagtggccgcctgaaccccaacctgtatgataatgggaaggtgtgcgtcagcctcctgggcacctggattggaaaggggacggagaggtggacaagcaaatccagtcttctccaggtgctcatctccatccaaggtctgatcctggtaaatgaaccatactacaacgaagctggctttgatagtgaccgaggcctgcaggaaggctatgaaaacagccgctgctacaatgagatggcactgatccgggtggtgcaatccatgacccagttggtgcgacggcctcctgaggtcttcgagcaggagatccggcagcacttcagtgtgggtggctggcgtctggtgaaccgcattgagtcatggctggaaacccatgccatgctggagagggcccaggcactgcccaacgggggccctaaggacagcagttctctggagcccctggctgcagctgaactctcagactccggccgagaagagcctgaggatgtagggatggcccctggggaggtctcccagggctcagactcagaaggtggtgcccagggcctggcctcagccagtagggaccacacagagcagactgagacagcccctgatgcgtcagcaccgcccagcgttagaccaaagaggaggagaaagagctaccgcagcttcctgcccgagaagagcggctaccctgacatcggctttcccctcttccctctttccaagggcttcatcaagaccatccggggggtcctgacacagttccgtgctgccctgcttgaggcaggcatgccggagagcacagaggacaagtagcttccagggcttgagaaaggagtgtcatggtgggagaggccggccgctgcctgctccttcccttcctgagatcttgcccctccctgtccctgccccttcctgtccccagttggagccttccactgccctctcctccctgcagcggcaagtttgatgaagtgcaagaggtgtcccgagatgctgcgctctctccctcagtgaagtctcaatggcagggccctgaggcactgagactccgctggcgttcctcttgttgctctaggcagaatgtcttggcacttgtcccctagctgtctgtcccttctcaggtcagaggtggggtgttgagggccctgcacaggtcaggagggaggacgtgccttgcatgaagtgtggctgccctgcaatgctcccggccctcctctccagcttgactgtagcctccccacatccacaccttcgtgctgccacactgggtcctttacgtcccccgtacctccatctcttggagctatggctgctatggcctggctctggcctggcagtgcgttaaggagcatctgcacaaaccaggccagcagcagggcctcttcctatccagtcggctccctgtctgccttggcttacagactctgctagcgcagtcggaggaagggaggctggatggccagtgggagctgcaccccaccccaccaggcccagaggtttacaagtttctaagcttttcataatgtgaagctccaggtagaggatgccgttgagcatattgcagctatgtcatttctggtgtatgtatgtaatatttaaggttgggaaaataaatctcaaaagcaaagatactaactcttactagaaaaatgaaacaaaacaaaacagacaaaaaaaaaaaag

SEQ ID NO: 1863 - DNA, 2124 bp, Cricetulus griseus
ccgcggccaggagcttaagcttcaggttgatagtttggttactgaaagccaactgacaggtgctctggaaccgagtaaaaggagagacattttccaaagatgtatccagttaaaacaggcagtagatgaaaataaaagtgctcttcaaaaattaaacaaggctgatgggaaatcgtgcacctgtcgggaactatgagaagcgaaaggaggaggagtacagtcttctggagaagctgacctgccagctgcaggagcttgctgtgggcgtcagcaagaaggacacactcaaaaaatggggcacacagtgacaaagaggaagatgacttgactgaagaagatgaagaagaaactgaagaaactggtgaagaggaagaagaatcagaaggagacgaggaagaaaggcaggaacaagcctccccagaacaagcagaaattgtccagtactttgctcttggggacttcgctgctcagcaggccggagacctgacatttaagaaagggacattctccatataattagaaaaaagacctagatggttggtggctggctaaggacgctgaaggaggagggcagtgaagaggatgtggaggtggtggatgaaacagcaaacggagccgaagtcaagcagagaaccgattcccactggagtgctgtccgaaaagctatctcagagataaacactattgatgtgctagccacaatgggagctattcctgcagggttccggccttccacgctctcccagctgctagatgaagggaaccagtttcgagcaagctacttcttacagccagatctcacgacatcacaactggccttcagagatctgttgtgggacgctaaggcaggcacgattatgtcaaggccaagccgtgtctctttgattctgaccctgtggagctgtaaaatgattcctctcccaggagcaagcatacaggttctcagcagacacgtgcgcctctgtctgtttgacggtagtaaggttctgagcaacatccacacagtccgagcagtatggcagcccaaaaagcccaagacatggaccttttctccccaggtaactggcatcttaccttgcttgctggatggtgactgtttcatcaggtccaattcttcaactccagaccttgggatattatttgaacttggaatttcttacattcgaaattctactggcgaacgaggagagctaagctgtggctgggtatttcttaagctcttcgatgccagcggagttcccattccagcaaaaacatatgaactcttcttgaatggtggcactccttatgaaaaaggtgttgaagtggacccttcagtgtccagaagagcacagggcagtgttttccgtcagatgataagcatgcggaggcagcctcaactgctggtaaaacttcggtctctgaacaggaggtcaagggccgtgctcagtctgctgccagaaaccttggtggggagtatgtgctccgctcacttactgatattttaccgacaaattcttggagatgtgctcctgagagacaggacaaatctgcaaagtgctgatttaattagtcatccagtgctggccaccttccctatgctcctggagcagccggacgtgatggatgctctcaggagttcgtgggccgagaaagaaagcacactaaaacgatcagaaaagagagacagagagctcctgaaggccgagttcctcctggtctaccatgactgtgtgctccctctcctgcattccacactgctgcccccgttcagatgggcggaagaagagaccgaggctgctcgatggaaagccattgctgacttcctcaagcagagcagagagaatgagggttccctgaaggctctgctgtcaccagatggggttcatgaaccatttgacctttcagagcagacctacgacttcttgggagaaataagaaagaactcagcctgacagtggccatggctcctgcttcccactggacctcacaaactcccatgatgacttggctcaaataatagaaccaaaagaaatggactggttagaacttaggtcgttttcttttgtgtgcaaattatattttcaaagaaatatctaataattttattgtatgtaaagcaataaaataaattttataaaggaa

SEQ ID NO: 1864 - DNA, 2124 bp, Cricetulus griseus
gactgaaggagatgatgatgacggtcctgccagttcactgaactcagagaatctgggtacagaaaagagtcacacttgtccattgtgccctaaggaaaaattcagagcttgtagtagaagcttcgtcgacaccttcagaatttacactggaaaatctcagtcgagtttgaaggctacaggatgtgcatctgtcacttagcttgtcgaccagtaaaaccgaccattgttggagaacagatatccagtaaattgggtgcccattatcattgcatcatttgttcagcaacaatcaccagaaggactgacatgctagggcatgttaagcgccatgtgaataaaggagaaactaaatccaggtatattgctgcttctactgccaaatcatctaatgaaattttgaaggaggcagacacagatatacaagttggtcctaactactctattcctcagaaaacaagattcatatttcaatcccaaaatgaaactaaatcgtcagataatattctgtacattggctgctttggctgaggaacgaaaacctttggagtgtttagatgcctttggagcaactggaataatgggattacaatgggcaaaacaccttgggaatgcagtcaaggttacaattaatgacttgaatgaaaactctgtgactttgattcagaaaaactgccatttaaacaaattgaaagtggtggtagacagtgaggaaaaggaagagggtgatgcccttgaagaagatggcactcttggtgatatccaggtgaccagaatggacgccaatgtgctgatgcacctgagatcttttgatttcatacacctagacccttttggaacatcagtgaactacctagactctgcattcagaaacgtaagaaaccttggcatagtatcagtgacttctacagatatcagttccttatatgccaaggcacagcatgttgcccggcgtcactatggatgtaacattgtccgaacagagtattacaaggaactagcagccagaattgtcgtagctgcagtggcaagagctgcagcgagatgcaacaaaggtatagaagtgctatttgcagtggctctggaacattttgtgctggtagttgtgagggtcttaagggggcctacttcagcagatgagactgccaagaaaatccagtacctgatccattgccagtggtgcgaagaaaggatttttcagaaggatggtaacatggtagaagaaaacccatatagacagctgccctgtaattgtcatggaagcatgcctggcaagacagcaatagaacttgggcccctgtggtcaagttctctttttaatactggattcctaaaaagaatgctattggaatctcttcaccatggtttggatgacgttcagcctctaataaagacgctaatctttgaatcagagtgtactccccaaagtcagtgttcagttcatgcaccttcaaatctcaacaagcaagaagaaaatggtgtatttattaaaactaccgatgataccacagtagatatttacagtgcacagggaaagaggaaaagcagtgaaatgatcataaatacagccaagaagcagaagactgatgccagcgctgtgcatcctcccttttattacaacatccacagacacagcattaaagggatgaatatgccaaagttaaaaaagtttttgtgctgtctttctcaagcaggctttcgagtaagccgaactcactttgacccaatgggcattcgtacagatgcacctctgatgcagtttaagtctatcctgttaaagtacagcacccccacctacactggaggacaatcagaaggtcccatgcaatcagtatctgaggatacagtagctgacagggttgaaatgtcagtggctgacaaagcagaagcaagtggctgcagaaggtggtggtaaacctttcttctcagggttcttagaaaggcccaatgattgtgtaccaactgtaatccctttttattctttcaacttagtgattgatacaagagaaaaaatttaaaaagcaactgttttcattcagaaaattggctgtttctgacttggctagtgtgagagctttgctttttaagtttttattattttaaagaaaaaatttaataaaaacattt

SEQ ID NO: 1865 - DNA, 2124 bp, Cricetulus griseus
cagagctccaagtggcttcctgctgcttgcctctaaacccctccacattcctgcagcacttcagactgccagaactgttctgccgcctgcctgccgcctgcctgcctgcctgcctgcgccgagggctcccaacaccatgagggcctggatcttctttctcctttgcctggccgggagggccttggcagcccctcagcagactgaagtggcagaggaaactgtggcagaggaaactgtggcagaggagacaggggtaccggtgggtgccaacccagtccaggtggaaatgggagagtttgaagatggtgctgaggaaactgtggaggaggtgatagctgagaacccctgccagaatcaccactgcaaacatggcaaggtgtgtgagctggacgagagcaacacccccatgtgtgtgtgccaggaccccaccagctgccctgctcccattggcgagtttgagaaggtgtgcagcaatgacaacaagaccttcgactcctcctgccacttctttgctaccaagtgcaccctggagggcaccaagaagggtcacaagctccacctggactacattggaccatgcaaatacatccccccctgcctggattctgagctgactgagttccctctgcgcatgcgtgactggctcaaaaatgttctggtcaccttgtatgagagagatgagggcaacaacctcctcactgagaagcagaagctgcgggtgaagaagatccatgagaatgagaagcgcctggaggctggagaccaccctgtggagctgctggcccgagactttgagaagaattacaacatgtacatcttccctgtccattggcagtttggccagctggatcagcaccccagtgatgggtacctgtcccacactgagctggccccactgcgtgctcctctcatccccatggaacactgcaccacacgcttctttgagacctgtgacttagacaacgacaagtacattgccctggatgagtgggccggctgctttggcatcaaggagcaggacatcaacaaggacctggtgatctaagttcacacttccttctgcagtcctgaattctctccctccaatgtctccccttccactcccccctcatttaaaatgtttggatggttggccgttctgcctggggataaggtgctaacatagatctaactgaatacattaacggtgctaaaaaaaaaaaaaaaaaaaagtaaaaaagaaactataacctaagtcatggcagtttcccacataactcgactctggggcatggcccatccacagctcccttgtcccctgcactgcccagtgtctcactggctgtgttggaaatggagttgcacgagcttgccgcacacaagcatgaggtatctttagctttcattcctattttccacttgactctaacactctctcattcagactctgtgctgatttcattttggggtgtgggctccttggggtcttcccctggtggttcggagataggcaaagggaagtggcagacacagggtacaaaatctggacaaggatgctctgagacctgagggtccaccagtcagaacccagatagtcatggtagcctaggccaacgactgagagaatattccagagctgtgatacgcatgtacagagtcccagcagcccaagacctcactatctcctccactcttcaggcagtttctttctgtgtttggctgttggttcaaattttggcaagccatgggactatgggtggaccagaacatctcacaggattctcctaatctactgattatgggcactgggaggctgttttaggaaagtgagactcaagaggaagacaaagaaagctgtaccatagagaaagtgaagctgggcaattggtttgattgtcatgtcaagatggctgtcatacagtttcttagcatgcccccaccccccacccccaccctgctggcaaccatctactaaccaagagaaacttgcaagtcaatggaatggtcggatctcacaggctaagaatttgttcaccacctccaagcatttcatgaaaaagctgcttctcattaatcatgcaaactctcacaaagacgtgaagagcttgacaaatctttcaaaataaaaattaatgacttagaaac

SEQ ID NO: 1866 - DNA, 2123 bp, Cricetulus griseus
tgcagccctgttctctcaagaaagcaaaaaggcaaagtgctcttaggagaagaagaagccctggaagatgactcagagtccaggtcagatgtcagcagctccgcctttgcagcctctgtgaagagtgaaattggtggagagctcgctgcttcttcgggtgtctccactcctggttctgtaggtcatgacatcatcactgaacagcctcggtcccagcacacacttcaagcagactctgtggatttgtcaggctgtgacttgaccagtgctgctactgatggggatgaggaggacatcttgagccacagctccagccagttcagtgccgttccatctgaccctgccatggacctgaatgatgggacccaggccctcctcacccatcagtgacagctctcagactaccactgaaggcctgattcagctgtgactccttctgacagctccgtaaattgtgcagccacctccccagccagatcggagccctgcatggcatcctctacgtgttggagtgtgacctcttggatgacactgcaaagcagctcattccagttgttagtgactatctgctgtccaacctcaaaggaatagcccactgcgtgaacattcatagccagcagcacgtgctggtgatgtgtgccactgcattctatctgatggaaaactaccctctggatgtggggccagaattttcagcatctgtgatacagatgtgtggagtgatgctgtctggaagtgaggaatccaccccctccatcatttaccactgtgccctccggggtctggagcgtctcctgttatctgagcagctctctcggttagatacagagtctttggtcaagctaagtgtggacagagtgaatgtacaaagcccacaccgagccatggcagccctaggcctgatgctcacctgcatgtacacaggaaagaaaaaagccagtccaggcagaacctctgaccctagccctgctacacctgacagtgagtctgtgatcgttgctatggagcgggtatctgttctctttgataggatccgcaaggggtttccctgtgaagccagagttgtggcaaggatcctgcctcagttcctagatgatttcttcccacctcaagatgtcatgaacaaagtcattggagagtttctgtccaaccagcaaccatacccacagttcatggccactgtagtatacaaggtttttcagactctgcacagtgctgggcagtcatccatggtcagggactgggtcatgctgtccctgtccaacttcacacaaagaactccagttgccatggccatgtggagcctctcctgcttccttgtcagtgcatctaccagcccatgggtttcagcgatccttccacatgtcatcagcaggatgggcaaactggagcaagtagatgtgaaccttttctgcctggttgccacagacttctacagacaccagatagaggaggaattcgaccgcagggctttccagtctgtatttgaggtggtggcagcaccaggaagtccttaccaccagctgcttacttgtttgcgaaatgtccacaaggtcaccacctgctgagtagtacctgtggcacaagaggctgagaggaggcaactgctggagccagagcctctaggagcctgtgccaagcttctgctggggctgccttggtcatgcaggcttccacttgtgtcaggtggacagccaggcaatggcaggagtgctttgcactgtgggctgtgcaggaatatgcactatgttggggttgagcctgagtcctgggtcaacctggcctcgctgcatctggtggcagtgctaggttgaccaggtgtttatctttttcctagtgttcccctggccaaggttgccaggtggcagctgccctggtatgtggagcagaagtcctagctcttgccagatggttctgagccctcttgtcccactgggctggagagctctcacccacactttccccaggacgggtttacctgccacaccagtgtctggacataaaatgagtggtatgtggggcttggaactggggtgccaggtgtccagcatctattttccccttctctggtttcttctcaggagttaaaatttaattatatcagtaaagagattaattttaat

SEQ ID NO: 1867 - DNA, 2123 bp, Cricetulus griseus
gcccaagggaaacctcctcagagcctgcagccagccacgcgccagcatgtctgggggcaaatacgtagactccgagggacatctctacaccgttcccatccgggaacagggcaacatctacaagcccaacaacaaggccatggcagacgaggtgaatgagaagcaagtgtacgacgcgcacaccaaggagattgacctggtcaaccgggaccccaagcatctcaacgatgacgtggtcaagatcgactttgaagacgtgattgcagaaccagaagggacacacagttttgatggcatctggaaagccagctttaccaccttcactgtgacaaaatattggttttaccgcttgttgtctaccatcttcggcatccctatggcgctcatctggggcatttactttgccattctctctttcctgcacatctgggcagttgtaccatgcatcaagagcttcctgattgagatccagtgcatcagccgtgtttattccatctatgtccacaccttctgtgacccactctttgaagctattggcaagatattcagcaatatccgtctcaacatgcagaaagaaatatgagtgacatttcaagtatggaagcattcccaattcttttttccttattatttccttggtgccaatttcaagtttcaagttgaaatttatgaatggtttgtcttggtccagaacaaagaagttgttccctcagctttcatatgtactacttgtctcttttgagctactgcatctatttttgacagtctgaaatgtttaaacccattgctaccctttcttttgtatgtggaccattgttttattggctaagatacaaacatattgttgaaatagcgatcactatcaagttggagaccttaatatcatcatgataccagtaatgtcttattcatcttgacattttaacctgttattttgtgttcctgaatatttgttatatctataccgagacctgggtgccttctaatttttcttctccaataggctctaactcatcaactttcattatgccagcagctttcctaaaaaaacaaaacacagaaagaaactctgcttgctagttctctatactggtttctgactctgacatacagaacctgttgaaattgatctctgtgctttgtcatgtagcatctttctctatgacaaacctgatcaacattaacccaatgaaatgatttaaagcagacaaatggggctgagctctctctagagctggcaggggtggaagccagctttccctgcctctcagtgattgaatgtgtactgcattctcagctgatcagtgggcctccagggaaggctctccaagaaaggaagccaccaaaatgagactgccaaagctgttgcaagcatgatcccttctatgcatcgcacttggaatagtctgtaatgctgtgacacttgacctctccccctgccaggagcctttggactaatacaagcatcactttgttaggagagaaggtgggggaggggacaataacaaaagcttgaggtaatgttcttgctggagtaagttctaggtcttctgaacccaaactgaggaatttcacctgtatacctgagtcctctagaaaatggcctacctgagacagccaaaagctatttattcccccactcatattaaagctctgcccttgggggatatttttaaattccaggtgggcttttattttcattttcatacatttattggaattctgcttgactttcatttcctctctcagttttgctgacactttaactatgaacctgctacctactttgattgtttgcattttaaacagacactggcatggacacagtttgactgttaaactgtgtacataactgaaaatgtactatactgcatactttttaaatgtaaagatattctatatctttatagaaagagactcacttgggaaatggttctgcaattcagtctgtaaactgtgggtcccaagacatgtctgttcttcctagatgctcagtctcatgtaagtcagttgctggttcaaaaggttatgaaattttatatgcttactgatatattttacacttttttatgctgcatgtcctataaagatttcaaatctgcacaataaaaatgtttaacagt

SEQ ID NO: 1868 - DNA, 2123 bp, Cricetulus griseus
cccacctaagaaccaatgctctacttgacccgggggctgtccccaaaggcaatgccacaaaggaatacatggagagtttgcagctgaagcctggcgaggtgatctacaagtgccccaagtgctgctgcatcaagccagagcgtgcccaccactgcagtatttgcaagagatgtattcggaagatggaccatcactgcccatgggtgaacaactgcgtaggagaaaagatcagagattcttgtgctcttcactatgtacatagctctgtcttcagtccatgctctgattctctgtgggcttcagttcatctcctgtgtccgagggcagtggacagagtgcagtgacttctcacctcccataactgtaatcctgttggtcttcctgtgccttgagggcctcctgttcttcacgttcactgcagtcatgtttggcacccagatccactcaatatgcaatgatgaaacagagatcgagaggctgaagagcgagaagcctacatgggagcgaaggctgcggtgggaagggatgaagtctgtcttcgggggccccccctccctcctctggatgaaccccttcgttggcttccgattcaggcgactgcaaatggagggctaaggaaaggaagccctgagttctctgtatgagccttcagggcaggaatgtctgcagacatttgatgctcactggcctgcaagcacaacagccttgtgggtagatggagctggccagctgacggggccatgagcagcttcatggacttagggccacaggcacttgtcagttttgtgtgtactgccagaagaagcatgcagccccaggaggccatcttaccaccatcctgacacttgggatgtcatgtgtgagcatcccacaggaggagctgcttctcaatcatgaagaaagccagcatagccactgctaggagtccggctggcccatccccagcacactcccttactagaaggggttccacagagactgtggcttggagggctccaacacctagcactgaacagtgaagatggcttccagaacactccttgctgtcccagaatgggcatcctttgacccttccagcaagtctgtatgtgctcatctgtgtgtctctctgtgtgtgtgtgtgtgtgtgtgtgtgtgcatgtgtcagaatcggcagtgttgttcaggcactcgtgtggtagacaagctgtctttcagactccagtgtttcagggaagtgggacgcactgctggcccttgctggccttctatgaatgtatcatacagtgtccagatccaaagaacaggcatgcctggcatgggcccaccctcctgcttttatttcactgaaagtgtagtgttcgagggcagtgagctgaggttttgttgttccagccaaactaacagcatgcaacagtccctcaacaaggaaggtggtgccctgtgctgaggcccagcactgtaggggagggggccatggggagctcagcatgagaagcaagctgccttgggcccgtttgggcaggtgctgcaggggtgacagcctggtgcctgagctgtcagagcactgacatgacgactttatttctgtacccatggcactgcagtcagagtggacccttggtgcgggcttagaattacgtcagtacacacacagctcccctcaggggacttgccttaaacttctaggttgttcctttgctgctgagtgagagtggtctgacagagactggggacttcctgtgagtccactcctgtgcagagacacagtgtttccctgttgggaccagctgcctttctgtccctgtgacaccatgactgttttcggtgtcagtcgcttttgccctgccctcatctgggctcctatgctactgaggtgaaccccagggacctgtgagcctagccctaacgcagtgagcaaactgtggggcccgagtcactgcagagggacagcgtgacctcagattgtctctgcattcatttgcacatgtgtctgagcatgcaggctctggtggtgtcaccctccagtgtggagtctgtggcggtgaatccaagctgagtatacttgacttttcaattcctcagtgtgattttatatgaaataaagtaaaccgtccacagttaaaaaaaagaaaaaaaaaaaa

SEQ ID NO: 1869 - DNA, 2123 bp, Cricetulus griseus
ataacaattaatgggttcagtattagcaatggactggcaactacacagatcaatataaggctgcaaccggagaggaggttccccgtaccattattgtaaccaccgttcccagtacgggctaccagaagatgccattgtgtactgtaactttaatcagttatataaaattgacccttctaccctacagatgtgggcaaatattctgaaacgtgtacctaatagcgtgctttggctgttgcgttttccagcagtaggagaacctaatattcaacaatatgcacaaaatatgggccttccccagaaccgtataattttttcacccgtggctcctaaagaggagcatgtcaggagaggtcagctggctgatgtctgcctggacactcccttatgtaatgggcacactacagggatggatgttctctgggcaggaacacccatggtgactatgccaggagagactctggcctctcgggttgcagcctctcagctcacttgcctatcaaccttctgggggaagggtgtatctgtacagtaccgtgttgcagatgggtgatatatagcgataatagaatagcacagccagacttgcttcctgcatgatggggagagacaagagataagaaactgctatttcacaaggaatctctgtagagttttatagcaagcagatggtgcagaggtctggaaggtctggtctcccttggtcttccacgggatgcttaatgtgtgtggagggagatagagattgaccagctattttctgattccatggattgatcgagtcttctgtatttcctttttttttttttgggtattggagcttttaaaaatgtttgctttcaggtatttttaaactcatgtgaagtgattttgattcttctgagacaaggtttaaacttaaaatgttgcttcctgttttagtgtctgaactctgacagggacagggaccttgcttggtgttagtctttttattaggttttataaaccacttgagcctatatcagtcatttttagtgtttgacctaatgcttgatgctgtcagtgctttgttgatttaaatggtgactccaggtttttcagtctctttcctatttgtttcccccctccctttaatttttgtgactgataacaaaaccaagtcttgtttcaatcatcccagagtgtttctcttgaacacgccatctggtgccaaatgaaaattcttaggagtgaatattaatcatgaagggcacagttgtggtactgttgttgataataattagttctttgtctaatttttacctatttcaccagtgtttaagcccttgactgcccctcctatgctgcttccaaaagtggtagtgtgtgctaagatttttaccttcctttctaaagtttgttttttttttaaagtgagtcctgttcttcctatttcttttcagatatgactctgtttgtactgctctactgcacttggactctccagtcacagatcagttttctctgtttgtagtgctctatattatctttccaaagcacctaggcagtgcacctattctgtagttgcagctcttgcctgaatgtaccttagctgacaagttattgataattaagaccttgaatttgtgattcttactgctatttaaaacctaagcaaggagtctcatgtgtgattctgaagcagaattacattataatgaactgtgtacctttagtaatgtaaatcaaggaacaccagggagtttcttaatttatttttaactgaataaatatcagttaaaggttgccagcatggttacaggtaaactgattttcaaaattcactgaactactaaatgtgggcttggataatagacctccagtgccgctatggctgtgatctgtggccattttacatagcacatcattcctcctatagggatgaactttttcccggcacgaaaagtagccactctggttgtagctttgcttattgtaacaggcttttatttccaggtaacatgtctgtggaagacttaattcagatagttatagatattattggaaactaatttgtggttttttttcctatttattactctgctttattgaaaaaagtaaagacatttaaaattgtgctccagatattcagatgttgtcttgcg

SEQ ID NO: 1870 - DNA, 2122 bp, Cricetulus griseus
cgaagagacgatgatgcgtgggcggacgagaaggtggaggagggcgttcgtggtgaaggtccggggcttgccctggtcctgctccgcggatgaagtgcagcgggttttttctgactgcaaaattcaaaatggggcccaaggtattcgtttcatctacaccagagaaggcagaccgagtggcgaggcttttgttgaacttgaatcagaagatgaagtcaaattggccttgaaaaaagacagagaaactatgggacacagatatgttgaagtattcaagtcaaacaacgttgaaatggattgggtgttgaagcatactggtccaaatagtcctgacacggccaatgatggctttgtacggcttagaggactcccttttggatgtagcaaggaagaaattgttcagtttttctcagggttggaaatcgtgccaaatgggataacattgccggtggacttccaggggaggagtacgggggaggccttcgtgcagtttgcttcacaggaaatagctgaaaaggctctaaagaaacacaaggaaagaatagggcacaggtatattgaaatatttaagagcagtcgagctgaagttagaactcattatgatccaccacgaaaacttatggccatgcagcggccaggtccctatgacagacctggggctggcagagggtataacagcattggcagaggagctggttttgagagaatgaggcgtggtgcttatggtggaggctatggaggctatgatgattacaatggctataatgatggctatggatttggctcggatagatttggaagagacctcaattattgtttttcaggaatgtctgaccacagatacggggatggtggatctactttccagagtacaacgggacactgtgtacacatgcggggattaccatacagagctactgagaatgacatttataattttttttcaccactcaaccctgtgagagtacatattgagattggacccgatggcagagtaactggtgaagcagatgtcgagtttgcaacccatgaagatgctgttgcagctatgtcaaaagacaaagcaaatatgcaacacagatatgtagaactcttcttgaattctacagcaggagcaagcggtggtgcttacgaacacagatatgtagaactcttcttgaattctacagcaggagcaagcggtggtgcttatggtagccaaatgatgggaggcatgggcttgtcaaaccagtccagttacggtggcccagccagccagcaactgagtggtggttatggaggtggctacggtggccagagcagcatgagtggatatgaccaagttttacaggaaaactccagtgattttcaatcaaacattgcataggtagccaaggagcagtgaacagcagctactacaatagcggaagccgtgcatctatgggcgtgaatggaatgggagggatgtctagcatgtccagtatgagtggtggatggggaatgtaattgattttgattgatcactgactcttggtcatttttttttttaaaaaaaaaaccttcagtttaacagttttgcaatccagccttgtgatttatgtctactctcttaagtgaacattggcatcactcaaaggactaaggttgagaatatagtcacctaggatgatgatacagtgaactataactgttaaacaattcccagcttttctctagttactgtaggatgtgtgtaagcagtaagcgtatttaggttaaagcagttgaattatgttaaatgttgctcttatacatacattacattgaacactgttgatgcatgttgaaaagacatgcttttttgtaaaactctataggagctgcgtctacaattaaagtgaaacatttggcatgtttgttctaatttcatttgataaacctgtaaggcacgtgagtttaaagcttttctcttttttttaagttgatggagaaattttgagacgcaataccattactttaggatttttggtcttggtgtttgtatgaaattctgaggccttgatttaagtctttcattgtattgtgatttccttttaggtgtattgcgctaagtgaaccttgtcaaataaatcttccttttaaaagctaaaaaaaaaaaaaaaaa

SEQ ID NO: 1871 - DNA, 2122 bp, Cricetulus griseus
catttttggataaacccaaaacggaaaaacacaatgctcatggtgctgggaatggtttgcgatacggcctgagcagcatgcaaggatggagagtggaaatggaagatgcgcacacagctgttgtgggtattcctcacggcttggaagactggtcattttttgcagtttatgatggtcatgctggatcccgagtagcaaattactgctcagcgcatttattggaacacatcactactaatgaagacttcagggcagctggcacaccaggctctgctcttgagccctcagtggaaaatgttaagactggtatcaggactggccttttggaaattgatgaatatatgcgtaacttttcagacctcagaaatgggatggacaggagcggttcgacggcagtgggcgttctgatttcacctacacatatccactttatcaactgtggtgactcacgagctgtcctgtgtaggaatggagaagtctgcttttctacccgggatcacaaaccttgtaatccgatggaaaaggagcgaatccaaaatgcaggaggcagtgtgatgatacagcgagtgaatggttcattagcggtatctcgtgctctgggggactatgactacaagtgtgtggatggcaagggcccaacagaacagcttgtctctccagagcctgaggtgtatgagattttaagagcagaagaggatgaatttgtcgttttggcttgtgatgggatctgggatgtgatgagtaatgaggatctctgtgaatttgttaagtctaggcttaaggtcgctgaggacctggagaatgtgtgcaattgggtagtggacacttgtttacataagggaagtcgagataacatgagtattgtattagtttgcttttcaaatgcccccaaggtctcagatgaagcagtgaagaaagagatacagttggataagcacttggaatcacgggttgaagaaattctggagaagtctagggaggaaggaatgcctgatcttgcccatgtcatgcgtgttttgtctgcagaaaatatcccaaacttacctcctgggggaggctcgctggcaagcgccatgttattgaagctgtttatagtagactgaatccacacagagacaatgatgggggcgctggagatctagaagactcatgatagccttataacccttctaaaatgcttttgacttcaatacaaggggaaatattcttgtggattcccactgttttggatatgagcagaaaaccattagcatttcccatcatttgttcacatttgtatttcctggtaattgccactcatagcattacctgtactctgcagtattttttaacaaatgtgcctgaggtgcatgggaatacagttagctatactctgaagatacattaagggttttgtttttgtttttaaagcaaaacaaaaacacaacatatacgcatgttaagagtaaagaattgtaagaaaagttccagttttttcagttcaccaagttggaagccttttgtggttctgtggtttgaaatttaatttgagcaattactataggatatgtatttattattaattgttatttaaatttttaccaatttccttgtattaccaaactgggttctccaataatgttcacttgtaacattatcttgcttcaagatggtgtttagcaataatataaactattacaaattttacacatgtgtctactacattcttcagctcttactagaaaatcttttgaaaccaaatgaattaatttatggttatttataatttgctttgtcatcttactgctttgagttcttttaattgatgaaatttgcctttataatgtaaattgtgatttttctttttgttttacatgtgggtttctatagttttaatttttcagcttttaagatacaagttttatgtaatttgatacaatttttaactgttttaaaagctcagaatatcacattgaaatactataaatacattttaaagtatctattttagatctaaggaaatctacagagatattttcatgggtttagtaaccgttcattttgtaacactggacgcggtacagcgtggctgtcacataaggtacttaaattatttagttttattttacaataactttgaatt

SEQ ID NO: 1872 - DNA, 2121 bp, Cricetulus griseus
ctcctcaagagccacagcttggggtgaccttctggcttggaggccgggaaccatggtgaggggcagccatcgctgaagtcagcgaaactgagcctggtctgaagcaggcgacgctggagtctagagccatggccattgccacgtcggcccagcttgccagggcactctacgataacactgcagagtccccccaggagctgtcgttccgcagaggggatgttctacgggtactgcagagggagggtgccggtggactggatggctggtgcctttgctccctgcatggccagcagggtattgtgcctgctaaccgagtgaagctccttcctgctggtccagcacccaagccaagtctcacctcagcatctcccacccaacctggctcatgtcccaccccagagcatggcagtgaggagcaagaggtgtatgtggtaccaccaccagctcgaccctgccctgcctcaggacctctagctagatcgtgctcatcctctcctgactccatctacaaggtccccagagtcaatgggacacagctaactgcccccagagatgtgttagaggtctatgatgtgcctcccagcatcctccgggctccctccagctgtccctatgactccccagcttccttctcctgtcctctggctccagctgtccctcaaccccctggagaggatgaagctccctacgatgtgcctttggccttgaagccatctgtccgtagctggagccagatctggagtggggaagggggccgggaaccagggcctcccctctattctgccccttcgaacctgaaacgggcctcagctctcctcaacctgtatgaagcccccgaggaactactggcaaatggggaaagcagggactcagatgaaggcatctatgacgtgcctctgctgggaccagagtcaccatctccagagtccccaggagcttcttcctccgctgacctggacactgtggcccagcttctgaccaaaagccctccactccagcacaggcctcggctgccctccaccgagagcctgtcccgccgccctctgcctgccttgcctgtctctgaggctcccaccccttccccagctccgtctcctgccccaggtcgaaagggcagcatccaggacaggcctctaccccctcccccaccctgcctgcctggttatgggggcctcaaacccgagggagatccagagtgcagggaggtagacgatgactcagcggaccctcacaatgagtacgaaggcatcccaatggctgaggaatatgactatgtgcacctgaagggtgtggataaagctcagagttccagacccctggataaagcttccgccatggatcccgaattgctggagaggggactgcaggaacagcaggaatccctgacccctgaggagccactggtcctgtccactggagacctacagcttctgaatttctacgccggacagtgccagagccactactcagctctgcaggctgctgtggcagctctcatgtccagtactcaggccaaccagccaccatgtctctttgtgccccatggcaagcgagtggtggtggctgctcatcgcctggtatttgttggggacaccctaggccggctggcagcctctgcacctctgcgagcacaggttggggctgcaggtacaatgctaggccagactttgcgggctactgtgcttgctgtcaagggggctgccttaggctacccatctggcactgcggtccaagagatggcacgatgcgtagcggagctcgcagggcaagccctgcgctttaccactctgctcactggcctccttccctaagggcctgttcgtgcagccttagtctccctgcctgccagagccctggctccatgttgagggtggctagaggttcatctctttttggtcatcttagccactcaccgaggcatctcttcccccatacctactgctttttgtatgagccatttttgtataaattatttatatttaatatttcttgctttgcccaggcaggcatcaggccctctaggggtagggagggactggactctcctcatcagcctggggtggaggtcgctgtactgccttctgcctttggggttttggaacacgaaagtctggtggctga

SEQ ID NO: 1873 - DNA, 2121 bp, Cricetulus griseus
ggaagtcaacatttgatgcccacatctatgaaggccgtgtcatccagattgtgctgatgagggctgctgaagacccactgtctgaggttaccgtgggtgtgtcggtactggctgagcgctgcaagaagaacaatggcaaggctgagttcgtggctggacctgcagcctcatgccaaggtgctgatgtctgtgcagtatttcctggaggatgggggactgcaaacagtctatgcgtagcgaggaggaggccaaaattcccaaccatgaaccgccgtggagccattaaacaagccaaaatccactacatcaagaaccacgaattcatcgccaccttctttgggcagcccaccttctgctctgtgtgacaaagagtttgtctggggcctcaacaagcaaggctacaaatgccggcaatgcaatgctgccatccgacaagaaatgcattgacaagatcatcggaaaatgtgaagactgtggcatgaatgtgcaccacaagtgccgagagaaggtggccaacctatgtggcatcaaccagaagctcttggctgaggccttgaaccaagtgagccagagatcttcacggaagctggactcgggattgccagagagttttggaatataccagggattcgagaagaagatgacaatttctggggatgacgccccagacaacaacgggacctatggcaagatctgggagggtagcacccggtgcagcattgatcgcttcgtcttccacaaagtgctaggcaagggcagctttggcaaggtactgcttgcggagctaaagggcaaagaccagttctttgcggtcaagtgcctgaagaaggacgtggtgttgatcgacgatgatgtggagtgcaccatggtggagaagcgggtgctggcactcgcctgggagaatccctttctcacccacctcttctgtaccttccagaccaaggaccacctgttctttgtgatggagttcctcaatggaggtgacctgatgtaccacattcaggacaaaggccgcttcgaactctaccgggctacgttttatgcagctgagatcatttgcgggctacagtttctacacagcaaaggcatcatttacagggacctcaagctggacaatgtgatgctggaccgggatggccacatcaagatagctgattttgggatgtgcaaagagaatatatttggggagaaccgggcctgcaccttctgtggcacccctgattacatcgcccctgagatcctgcagggcctgaagtacacattctctgtggactggtggtcctttggggtcctcctctatgagatgcttattggccagtcccccttccatggtgatgatgaggatgaactctttgagtctatccgggtggacacaccacactatccccgctggatcaccaaggagtcgaaggacatcatggaaaagctgttcgagagggagccaggcaagaggctaggagtgacaggaaacatcaggattcacccctttttcaagactatcaactggtgcctgctagagaagcggaaggtggagccgcccttcaagcccaaagtgaaatcctctgcagactatagcaactttgaccaagagttcctgagtgagaaaccccgcctttcatacagtgacaagaacctcatcgagtctatggaccaggcagccttccatggcttctcctttgtaaatcccaaatttgagcagctcctggacaagtgagatcccagacctactttctgtgccaacagaacaggcccgtctaccctgattctcatccgcatgcccatgcccagcagcagatgactgggtgattgctgctgccgcccccttaccctcagaaggttcagctcttgttggctgggctcaaagtaccttcctctgtgaactgtttgtgaatttgctttccctttgcctttcagagggatactgtaaatcctgtgtttcattacttgaatgtagttattgaaatatatattatatatatgcacatatatataataggctgtatatattgctcagtatagaaagcatgtaggagactggcaatgtgttgaccttttttaaaaaacatatgtatatgtatgtatatgacatatatatatatatatatatatatatatatatat

SEQ ID NO: 1874 - DNA, 2121 bp, Cricetulus griseus
cctgggaatcaacctgttggggggaccccttggtgggaagcaagtgatcagggtctcctgtggtgatgagttcaccattgctgccactgatgataatcacattttttgcctggggaaatggtggcaacggccgcctggcaatgactcccaccgagagaccacatggctctgatatctgtacctcatggcctcgacctatttttggatctttgcatcatgtcccagacctttcttgccgtggctggcacaccattcttattgttgagaaagtattgaattctaagaccatccgttctaatagcagcggcctgtccatcggaactgaagtgtctggctgaacaacagaagctacaacaagaaaacctccagatttttacccaactacaaaagctaaacaagaaattggaaggaggccagcaggtggggatgcattccaaaggaactcagacagcaaaggaagaggtggaaatggatccaaagcctgacttagattcagattcctggtgcctccttggaacagactcttgtcgacccagcctctagtctcctgagtccacatagccctcaggaaactgggacccaaagaacttcaccgcacacttaccgagtgcagagagcagctttcctggctttgttcacttgcagacacggagcgcagggcagagggaggctctgaagcactttcctgtgcatttggagagtggcattgccttttagataggatctaggagcgatattattgttttggagaatggaagggctctgtggccctagctttgtcatcagtgactgccatagcaacagcagctctgtacctcatcttttgatcccaccttttgaagaggagacatagtactcaccttaattgcgctggtagcagctcatatcccacttatcattttcaacattaaattggaagctaccttgggattttagaaccaggcattgcatctctggatggtctgactgggataagtagccccaggcaccctctttctatgtctagtcagtatttttcctctttggtgtgttttgaagccatatcatacccagtaagtcagtatcatgtttcatacttgagtggcccaaaaccagcaccaaatccttggggtcccaaaagcttgacaggtagaacctgccaaatgaggaaattggctgcaagctcacttctgctgtgttcttgttgagaggagcaagctaccttttccaaagacaggatgtgtcctagaagagccaaccttctaggcaagcttatgacggtttcccttaaatgtgagcctagtgcttccaccaagtcgaatgaattgcttgtgtttggggccacagcagctgcttcgataagtaccacatcctccatgctacatacaactaaattaatattgtttcatttaattaatatttcaggaggacctacctgtgcaggagaaattttgccatctccctaaactggtggtgtaaaggctggtgctgggaggaaaccccatctctggggtgggcaactctgtccaatgggattgttgatgtcccattgttttctcaattctgagaagcctagtacagtagtactgatgtaatcactgaagccttttcccagaacaagggaaggcccaatcctgacagaaggtctcaagttctaggggtctggctgttggctgtaaaccctgtcagagagtttggttcgtaatgtcaatgcaactttggttttcttcaggactggctggcctttcaaggtcctgtatccttatcttaccatctcagcaggcctgagaggcagggtgtaaggtcttcattatgagcactgcttctgcttgggagctgaggggcatggcatgttgctgactgtggggtgacagtgagtatggaggtgggcaggagccctggggggtcattctctaggtgagcatggtggtcattttctctggtatattcccatgggaactctagtttgaggctttccagtagtgttgctttgattacagtatagcctgcattatcctctgtgccaacactttgctgacaagccagcttattgttagccagatgctggaaagggtgagggtggagtggtgtggcatttctgttttaaataaacatttcaactctacaaaaaaaaaaaaaaaa

SEQ ID NO: 1875 - DNA, 2120 bp, Cricetulus griseus
ccgggcccgagcagcgaacagttgaatagatttgctggatttggtattggacttgcaagtctctttactagaaaatgtactggcccatccttgcatgttttacgtccgccaatgtcaggttaattaccatgctcggcattaccatctcactccgtttacagttatcaacattatgtacagcttcaacaaaactcagggaccaagagccctatggaaaggaatgggaagcacatttattgtccagggagtcacacttggagcagaaggcataattagtgaatttacacctttaccaagggaagttttacacaaatggaatcctaaactaataggtgaacaccttcttctgaaatgcctaacatatgtggtggccatgcctttttactcagcaagtctgattgaaacagtacagagtgagataatccgagataatacccggtatcctggagtgtattaaagaagggattggaagggtgataggcctgggcgtgcctcacagcaagcgccttcttcccgttgctctcactcatcttcccgacagtgctgcatggagctcttcattacatcatcagctccatcattcagaagattgtcctcctaattctgaagagaaagacctgtaatagccacctcgctgagagtaccagccccatgcagagtatgctggatgcttactttccagaacttattgctaactttgctgccagcctttgctctgacgttatactttacccattggaaaccgttctgcatcgccttcatattcaaggaacacgcacaataattgacaatacagaccttggctatgaagtacttccaattaatactcagtatgagggaatgagagactgtataaatattattatacagtatacactgcatgcggccatcttacagattaccaaaaattattttactccacacttcttcagaatagcattttgagatttaggttctatcattggtccaaaaatgtggtctggataatttgctctgaaattgtaagtaatgaaagtaaaatgctgggtggaaagaagtagactgggaattgagactggtggaaaagctcatgctaactatacaaacctctcatttttcttaaggcataaatatatagacatatagctgtgtaaataatactggatcaaaacctttccaaaattgaaaactcaataaaggtaatactttaaatgcaaaatgtaaaattacattttggtataacactcatgctgaagtaaattgatcctgggtagaagcaaaaatatatatattatatggattcctttgtgtgtgtacatgtaacttgggattcccttcatgcctgcaagttctcatagaccagcttattgcatcagatgaagggagacaccttctgcttgaccatcaagagtaagccatcaaaacaccaggaaatagctttcttgtctgcatcacacccagcaatgcagtgccagaaacttgaaatttttcatatgcttatacatttggctcatcggatgattttagagccacttttaaagatacctaacaatcatggcagccattaccgttcccacattacctaaaggagcctcacttgtctttcatttcttaaaagaaacttgtcttagaggggacaaaattaaagttcacctggaattgtgcttcttgtgtttgtaaagttttattctccaaatgagctaccctaaagataaaaatgagagatccttgttactttttatttaaacttgcttggataagtactgaagaaaaatacaaacttcataggaaatttgctcttatgttttatgaaggaaagggagaatcagtattccaacaaatgaaacttgttaatcagtttaataaagcaaagttgatgtgttcctatggtggattagactttgtaatgaagtgatacgcagttcactgatcattcatgcaacatttaatgtttcatttcttcccgagtatgagcaagtttacaaactattctgaagtgcagtgcctgcagatgttgcccaaccgagcatgcatgcaaaactaaaactggtgttacatgttaaacatcacagagagtgttacttcgactgataagagcttaacatggccaaaggaaaagcatgaagtaatgtgtgagtagc

SEQ ID NO: 1876 - DNA, 2119 bp, Cricetulus griseus
accagttaagcatgaggatgctgtcctcctgctgcaagatgacagacatcatgaccgagggaatcacaattgtggaggatatcaacaagcgcagagagccgctccccagcctagaggccgtgtacctcatcaccccgtctgagaagtcggtccactctctcatcagtgacttcaaggacccaccaactgctaaataccgggctgcacatgtgttcttcacagactcatgtccagcctgtttaacgagctggtaaaatctcgagcagccaaagtcatcaagacgctgacggaaatcaacattgcatttctgccctatgagtcccaggtgtattccctggactctgctgattcttttcaaagcttctacagccctcacaaggctcagatgaagaatcctatcctggaacgcctggcagagcagattgcaaccctgtgtgccaccctaaaggagtacccagctgtgcggtatcggggggagtacaaggacaatgcattgctggctcagctgatccaggacaagctggatgcttataaagctgatgacccaacaatgggggagggtcctgacaaggcacggtcccagctcctgatcctggatcgtggctttgaccccagctctcctgtgcttcatgaattgacttttcaggctatgagttatgatctgctgcctattgaaaatgacgtttacaaatatgagaccagcggcattggagaggcacgtgtgaaggaggtgcttctggatgaggacgatgacctgtggatcgcgctgcgtcacaagcacatcgcagaggtgtcccaggaggtcacccggtctctgaaggacttttcctctagcaagaggatgaatactggagagaagaccaccatgcgggatctctcccagatgctgaagaaaatgccgcagtaccagaaggagctcagcaagtattcgactcacctgcaccttgctgaagactgtatgaagcattaccaaggcaccgtagacggaaacttacggtgccgcgtggaacaggatctggcaatgggcacagatgctgagggggagaaaatcaaggaccccatgagagccattgtccccatcctgctggatgcaaacgtcagcacttacgacaaaatccgcatcatccttctctacatcttccttaagaacggcatcactgaggaaaacctaaacaagctcatccagcatgcccagatccctccagaggacagtgagatcatcaccaacatggctcaccttggtgtgcccatcgtcacagactcgacactacgtcgtaggagcaagccagagcggaaggagcgcatcagtgagcagacctaccagctctcacgatggaccccaatcattaaggacatcatggaggacactattgaagacaaactggatacaaagcactacccatacatctctacccgctcctctgcttccttcagcaccaccgctgtcagcgcccgctatggacactggcacaagaataaagcccccggggaatacagaagcggcccccgcctcattattttcatccttggaggtgtgagcctgaatgagatgcgctgcgcttatgaagtgacacaggccaacggcaaggtgggaagtgctgataggatccacgcacattctcaccccacaaaacagatgaagaaataagcagttaaaaacataagccgcccccacaaaaaccctgactcccttcccacagtgctctgcagctccccagcgcaatgcctcggttactctgctgcctccccagccctgcacgccctggccacccccttgccacgctgagtccttctcctgtgcaaagacatcctatcttgtcctttgaaaagcaagagagtaatgtgttgttttttaaaaagtgagtatcttctgtatgtatcccacaagaagttgacatgcaagagccacactgcagaagcatcaagaactctagaccaagtggactctctccttatttatgatcccgtgacctgtatttaaaaaaaagactagtctgtcttgaaacttgttaacttgaaattctcaatctcagtgtttaaagtatggaagcacaactgtgtaccactctgtactgtcctgtactgcagcatttgagtctaataaagacatcatcgctca

SEQ ID NO: 1877 - DNA, 2119 bp, Cricetulus griseus
  modified_base (1237)..(1237): a, c, t, g, unknown or other
taagacgagctctccagaagtagaaaggactgaaaaggacagcaaagctgaggaagaggagcgagtgccagatgaggagcggccacctgtgagaaatgaattttccagacggaaacgttctaaatcagaagacatggacaatgtgcagtccaaacgtcggcgctatatcgaggaagaatacgaggcagagtttcaagtcaagattacagccaaaggagacattaaccggaagcttcagaaggtcatacagtggttactagaagagaagttgtgtgctctacagtgtgctgtgtttgataagactttggcagaattgaaaacacgagtggaaaagatagaatgcaacaaaagacacaaagcagttctcaccgaactacaggccaaaatagaccagaattaaccaaacgttttggagacagccaaagacgatacttaagaaaagaacaaagaaagaccctccaaacccacctacatcaccaggaaagcctgccagtgatgccagcagcaataacaatgtgacctatagaaatgcaggcacagtacggcagatgctggagtccaaaagaaatgttagcgagggtccaccaccatcctttcaaactcctgtgaatacagtgtcttcagccagtcttgtccctcctccagcagtcgtcagtagtcagcctaagctgcagccttcagcaagctcgggttctctgccggcagcctctcttcttcccgctcccagcacagccacagtagttgccactactcaggtgcctagtggaaatcctcagcctacaatctccctgcagcccctgccagtgattctgcatgtccccgttgccgtgacctctcagcctcagctccttggggacaacgctggctgtacaggccgtcccgactgcacattctattgtgcaggccacaaggacttctttacccccggtaggcccatcaggactgtatagctcatcaaacaatccccgaggcccaatacagatgaaaatcccagtaatctgcttttagcacttcatcttctgcagaacaaaatagctctgccaccccaagaactgaaaaccagacaaacaaaacagtagattcttctgttaagaaagtggcagatagcacatcgcagagtgggaaagcttctagcaatgattcaagtggtgtcattgacctcacaatggacgatgaagagagtggaactacacaagcagatcccaaaaagctaagtcagccgacctgcgccaactangagcacttctcagccatatctcgaccgttgcaatctcagacaactatccacttacctgcccacagctccaaccaccgtgaatgtaacacatcgaccagtaactcaggtgaccacaagactccctgtaccaagagctcctgcaaaccaccaggtggtttatacaactgtcccagcaccaccagctcaggctccactacgagggactgttatgcaggctcctgctgtccgccaggtcaaccctcaaaacagtgttacagttcgagtgcctcagacaaccacgtatgttgtaaacaacgggctgaccctgggatcagcagggcctcagctcacggtgcatcaccggccgccacaagtgcacaccccagaagctgtccagcacttctctgcctcagaaaccacacttgaagttggcacgagttcagagtcagaacggcatcgtgctgtcctggagtgtcctggaggtggaccgaagctgtgccgctgttgacagctaccatctctatgcttaccatgaggaacccagtgccactgtgccctctcagtggaagaagattggcgaagtcaaagccctccccttacccatggcttgcactctcactcagtttgtgtctggcagcaagtactactttgcagtgcgcgccaaggacatttatggccgttttgggcctttctgtgaccctcagtccacggacgtgatctcttcctcccagaacagttagaccttggagcctttagcttcctcttttcaaagttccacattttgggcttgttttaatcttgtgcatgaattcaatgtaaatccaccttgtgcaagatctcttggacagatgagtgtacactacttacgtttgtttataactgaagtataataattcagcccat

SEQ ID NO: 1878 - DNA, 2118 bp, Cricetulus griseus
gagacaaattactcaaggacgctgtctgtgatcggaacactgtgccgtcagtgagttccaccgaatcctgaggagtaaatttggaaaaggagaagaggaggaggcggatctagagaggaaggaagcagaggaaagcgagaaaaaggctaaacacagcatcgacggcatcctgagcgagcgagcctcagcgcctcagtcggacgaaggctctgacattgactctgaacctgacttaccactcaagaggaagcagcgaaggagtagaaccaccttcaccgctgagcagctggaggaactggagcgtgctttcgagagaacccatacccagacatttacaccagggaggagctggcccagagggcgaagcttacagaggcccgtgtgcaggtctggtttagcaaccgccgtgcaagatggaggaagcaagctggggccaatcaactgatggctttccctccgagcacggtacaccaaagcagtattccttcgaacccagacagcagctctgcctactgcctccccagcaccaggcatggattttcaagctatacagatagctttgtgcctccgtcggggccctccaaccccatgaaccccgccattggcaatggcctttcacctcaggtaatgggacttctgaccaaccacggtggggtaccgcaccagcctcagaccgactatgctctctcccctctcactgggggcctggaacccacgaccacggtgtcagccagctgcagtcagagactggaacatatgaagaatgtggacagtcttcccacatctcagccctattgtccccccacctatagcaccacaggctacagtatggaccctgtcacaggctaccagtatgggcagtatggacaaagtaagccttggacgttctagggggtagttcctcctggaagggagagagatcacctcttgcctgagaaaggggacctggaagtgtgattaagcctttcatcccagtatcagttttgtggcaaatccagctgagcaagcagaatgtccccatatatcacagttgaattcttgaaactgaacaggtttgatgtccaaggctgaccaagtttatcacattcacactgcttaagtaatgaattgggaatggaggaatccttgactttgacacactggaacctgatatgaaaatcaacaccatcatttcataggaagttagactagctgtgaaggatctccccaataaattattaccataccctcatttgtaatctagttgtcaatcgatgtcccagatatgtcttgtacaggatgtgagatgaggaggaaaaccgtgttttctgctgtggggatggatggatggcatttccttcccaagacacattcatttggaagccagtctgggtggggggaaggggccatgatggagaagaagtgtcacctattatgtatctgcttctcattgtgcaatactgtgtacctcaccgaatgctttggcaatggccaaggtgatagtcatgaaatcagaactatattttgcaggtgtttttatttttgtcagcccgttactcatcgtggtagaatgcagtgatatttgctcattgccaaatcaacaatgccctgacctgcttgctccttttgctcagagaccatgcccaagatttatgctttctacagtgatgccgtttacatttgtctcttttctacgaaaggcagggcgagaacagaaatgtccatgtggctctcttgtacttttaaattatacaattatacctgatattaaaggatgatagggaacagaggtttacatacatttatgtggtgacatttaggatgtcaataaatctgtgttttgaaatgttaagaggaagaaggtgggaggtgctgttatttatttctttctgttcctggaaccatgaatgaggtaggcacaaatacattccctttagacttaagaacaatgaggtagttcattagtgggattagacatagagctgagctattttatacgttgggcaagggtgatggaacaggagacatagtatctttgtgttgcagcctcaaccaacaatgatgtgttgtaaaaatgtctttcatgtaaaaagtgcagtaaatattactatttataatgaataaacagttaatgaaaat

SEQ ID NO: 1879 - DNA, 2118 bp, Cricetulus griseus
gggccaagtgctttcggggcaaaaaagtccttggagattatgacatcaaggtggaacaggcggaattttcagagcttaacctggtggcccatgcggatggaacctacgctgtggacatgcaggtgctccggaatggcacaaaggttgtccggtccttcagaccagactttgtgctcatccgacagcatgcatttggcatggcggagaatgaggacttccgccacctggtcattggcatgcagtacgcaggcctccctagcatcaactcactggagtccatttacaacttctgtgacaagccatgggtgtttgcccagatggtagccatcttcaagaccctgggaggggagaaattcccactcattgaacagacatactatcccaaccaccgagagatgctacactgcctactttccctgtggtggtgaagattggtcatgctcactcaggcatgggcaaggtcaaagtggaaatcactacgacttccaggacattgctagtgtggtggccctcacccaaacctatgccacagcagaacccttcattgacgccaagtatgatatccgggttcagaagattggcaacaactacaaggcttacatgaggacatccatctcagggaactggaagacaaacactggctctgcaatgctggagcagatcgccatgtcagaccggtacaagctctgggtagacgcctgctctgagatgtttggtggcctggacatctgtgcagtcaaagctgtacatggcaaagatgggaaagactacatttttgaggtcatggactgtagcatgccactgattggggaacaccaagtggaggacagacaactcatcaccgatctagtcatcagcaagatgaaccagctaactgtccaggactcctgccctgtcctcctcagagacccttaaaccacccagcagccacagagtggagcacttaaggaaccggactccagcaagaccccacctcagcggccaccccccaaagggggtcctgggcaaccccaaggaatgcagccccaggcaaggtgctgcctccacgtcggctcccctcgggaccatcactgccatcttcttcctcttcctcctcctcctcttcttcctcttcctcggctcctcagaggcagggcggccccaccgccacccacggagatgcaccctccagcagcaactccctggcagaggccccaccgccccaggctgctgcatcacagcaagtcgcagtccctgacaaatgcgttcagcttctctgagtcctccttcttccggtcttcagccaatgaggatgaagccaaagccgagaccatccggagcttgaggaagtcctttgccagcctcttttcagattagctcttcagatacacgagggcgcccggcccaaccaggaaaggcatctaagacattcatcaacaacagtctgccatgtttggtggcaatgttccatgacttgacatgtgtggtcccttcttctgttcctttgtgctcagtaattcgtgcagcccaggaatgaccaggtgatggtctcagggcaggtgcctaccctgagagggactgacaggagaggaaagggctgtttccctgtagtcttaagagctttattctgaagtcattgttgctgtgaatttagtggccttattgtgacagagccattgtgtcttactcttccctgtgaagccaaggatctctgtaatggagtactcctagcagcttaaacccagctcagatgcagagctaagcatgtccttgtagtcagtgctacctgtgggaagaatgtacttgcctagaagtaccgttggctctgagttttaggaactttccccaaagctgggtgtcctgtgacacccgttgaaagcacactcaccagaccctctgctccctaaactgctgtggtagtgaagttcctgtgtctgttgaaccaagagaaccaggactgccgtgtctcctctctcccctccagagagcacttctgttgtgtgaactgcagtaaccttggcctcccaaagctgctctgtagaagagaatgcatgccgctataacagcagtcgccagcctttgtgttcctcacctaatgaatgtcaagatcttggtgtaataaaagcagcagcattaacc

SEQ ID NO: 1880 - DNA, 2118 bp, Cricetulus griseus
cctcatgctagtggaggcagccaagaaaacctggacaatgacacggagactgactccttggtgtctgcccaacgagagcgtccccgtcggagggatggcccagagcacgcagcccggctcaatggaactgcgaagggggagcggaggcgagagccaggtggctatgacagttcatctacccttatgagcagtgagctggagactaccagcttctttgactcagatgaggacgactccaccagcaggttcagcagctccacagaacagagcagtgcctcgcgcctaatgaggagacacaagcggcggcggcggaagcagaaggtctctcggattgagcggtcttcgtccttcagcagcatcacagactccactatgtctctcaatatcatcacagttactctcaacatggaaaagtataacttcttgggcatctccattgtgggccaaagcaacgagcgaggtgatggaggcatctacattggctccatcatgaagggtggggctgtggcagccgatggacgcattgaaccaggagatatgctgttacaggtgaatgagatcaattttgagaacatgagtaatgacgatgccgtccgagtacttcgggagattgtacacaaaccagggcccatcactctgactgtagccaagtgctgggacccaagtccacgtggctgcttcacattaccgcggagtgagcccatccggcccatcgacccagcagcctgggtctctcacactgcagccatgacaggcaccttccctgcctatggcatgagcccctccctgagtaccatcacctccactagctcctccatcaccagctccatccctgacacagaacgcctagatgacttccacctctccatccacagtgacatggcagccatcgtaaaagccatggcctcccctgaatcagggttggaggttcgagaccgcatgtggctcaagattaccattcccaatgctttcattggctcagatgtggtggactggctgtaccacaacgtggaaggattcacggaccggcgggaggcccggaagtacgccagcaacctgctgaaagctggtttcatccgccatactgtcaacaaaatcaccttctctgaacagtgctactatatctttggtgacctctgtggcaacatggccaacctgtcacttcacgaccatgatggctccagcggcgcctctgaccaggacaccctggctcctttgccgcacccaggggctgccccttggcctatggctttcccttaccagtacccaccacctccgcatccctacaatccacacccaggcttcccagaactgggctacagctacggtgggggtagcgccagcagtcaacacagtgaaggcagtcgaagcagtggctccaacagaagtggcagcgaccggcgcaaggagaaggacccaaaagctggggactccaaatcaggtggtagtggcagcgagtcagaccacactacacgcagcagtctgagaggtccacgggagcgggcgccaagtgagcgctcaggcccagcagccagcgagcacagtcaccgcagccaccattcgctgaccagcagcctgcgcagccaccacacacacccgagctatggcccgcccggagtgccccctctatatggtcccccgatgcttatgatgaccccaccacctgcagccatggggcccccaggagcccctccaggccgtgacctggcctcggtgcccccggaactgacggccagcagacagtccttccgcatggcaatgggaaaccccagtgagttctttgtggatgtgatgtgatcagggcccctctcccgctcccaccccctgacgccggctgcatccctttctccatcagtcggttcttttttcctggtgctccaccctcatatttaggagccgacccccagtggtgtcacaccctcattcccactccccgtccaaacccttttgcctacctcctcaagcatgtatacagagatcttgattttaccccactatactgacaccaaaaaacggcctttcccttcctaactgccccgtccatggctttagtccttcaccctacagctgtagccacctctagtaggcatccatgctgtctgtcccttcttggaccca

SEQ ID NO: 1881 - DNA, 2118 bp, Cricetulus griseus
ctataatggcaaggtggattactttgaccttcagcgccttgggggcctcctctcacaccttcgaaagacccttaaagatgaccttgcttccaaagccaatatcgtgattgaccccctcggagctccaggcagctaccatggatgacctggatgaggatgaagagcaaaccccaacggcggcccagcgtcccatacaagccctggccatcggaggggcactgcctctgccccggccaggctggctcagttctccaaccctgggccgagccaaccgcttcctcagcacagcagctgtgagcctcatgaccccacggcggcctctgagcaccatggagaaggtgaaggttcgctcgctgaccgtggagcagaggtctcgtgaggacattgagggcagccactggaatgagggcctgctgttgggaagaacccctgaggagcccgagcagcccctcaccgagaactcactgctggaagtcctggatggcacggtcatgatgtcaacgagtatgcaatggccctgagagacacagaggacaaactccgccggtgccccaagaggaggaaggacatccttgcagagctgaccaagagccagaaagttttacttcagagaagctggaccacctgagccgccgtcttgcctgggtccacgccaccatctactcccaggagaagatgctggatatctactggctgttgcgtgtctgcctacggaccatcgagcacggggaccgcacagggtctctttttgccttcatgcctgagttctacctaagcgtggccatcaacagctacagtgctctcaagaattattttggccctgtgcacagcatggaagagctcccaggctatgaggagaccctgacccgcttggctgccacccttgccaagcactttgctgacccacgcatcgtaggcaccgacattcgagactcactgatgcaggccctggccagctatgtgtgctacccacactctctgcgggctgtggaacggatccctgaggagcagcgcattgctatggtgaagaaccttttggcaccctatgagcaacggccctgggcccagaccaactggatcctggtgcggctttggaggggctgtgggtttgggtaccgctatacacggctgccacatttgttgaaaaccaaaccagaggatgccaatttgcccagcctccaaaagccctgcccttccaccctgctacagcagcacatggcagatcttctacgacaaggccctgatgtagcacctagcttcctcaacagtgtccttaaccagcttaactgggccttctctgagttcatcggcatgatccaggagattcaacaggctgctgaacgcctagagcgaaactttgtggacagccggcagctcaaggtctgtgccacctgctttgacctctcggttagcttgttgcgagtcttggaaatgaccatcacactggtgcctgagatattccttgactggtcccgtcctacctctgagatgctgcttcggcgtcttgcacagctgctgaaccaggtgctgaaccgggtgacagctgagaggaacctgtttgaccgtgtagtcaccctacggcttcctggcctggagagtgtggaccactaccctatcctggtggcagtgaccggcatcctggtacgcctcctggtgcatggtccagcctcagagacagagcaagccacctctgtgctcctggctgatccctgcttccagctccggtccatatgctacctcctggggcagccagagcccctagcacctggcactgccttgcccgcccctgaccggaagcgcttctctctacagagctacacagactacatcagtgcagaggagctcgcccaggtggagcagatgctggcacacctgacagctgcgtcggcccaggcagctgctgcctccctgcccaccagtgaagaggacctctgcccaatctgctatgcccaccccatttctgctgtgttccagccttgtggccacaaatcctgcaaagcctgcatcaaccagcacctgatgaacaacaaggactgcttcttctgcaaagccaccattgcatccgtagaggactgggacaaggcagccagcacaagtgccgcctcctcagctacctag

SEQ ID NO: 1882 - DNA, 2118 bp, Cricetulus griseus
ggatggcgaggagccaatggctgttgatggtgggtgtggggacactggagactgggaaggtcgctggaaccatgtaaagaagttcctcgagcgatctggacccttcacacaccctgatttcgaaccaagcactgaatctctccagttcttgttagatacatgtaaagttctagtgattggagctggtggcttaggatgcgagctcctgaaaaatctggcattgtctggttttagacagattcatgttatagatatggacactatagatgtttccaatctaaataggcagtttttatttaggcctaaagatgttggaagacccaaggctgaagttgctgcagaattcctaaatgacagagttcctaactgcaatgtgatcccacatttcaacaagattcaagattttaatgacactttctaccggcaatttcatattattgtatgtggcctggactctatcatagccagaagatggatcaatggaatgctgatatctcttctaaattatgaagacggtgtattggatccaagctccattgttcctttgatagatggggggacagaaggctttaaaggaaatgcccgggtgattttgcctggaatgactgcttgtgttgagtgcaccctggaactttatccacctcaggtcaatttccccatgtgcaccattgcatctatgcccaggctcccagaacactgtatcgagtatgtaaggatgttgcaatggcccaaagagcagccctttggagatggggttccattagatggggatgaccctgaacatattcagtggattttccaaaagtctgtggagagagcatcacaatataatattagaggtgttacctatagactcactcaaggggtagtaaaacgaatcattcctgcagttgcttctacaaatgcagtcatcgcagctgtgtgtgccactgaggtttttaagatagccacaagtgcatacattccccttaataattacttggtattcaacgatgtagatggactgtacacatacacatttgaagcagagagaaaggaaaattgtcctgcgtgtagccagcttcctcaaaacattcagttttccccatcagctaaactacaagaggttttagactatctgaccaatagtgcttccctgcaaatgaagtctccagctatcacagccacattagaggggaagaacaggacactgtacttacagtcagtgacatctattgaagaacgaacaaggcccaatctttccaagacattaaaagaattgggactcgttgatggacaagaactggctgttgctgatgtcactacaccacagactgtactattcaaacttcattttacttaaggaaaataaatctatatataatagaaaattcatagaaataatatactttatgaatgctaaggaatttaattaaagagcgggggaaaatgaggcagaggagacacccagaaaaggaaatttaattgacgtcatttttagcattagtgtcactagaatttgacttttatatatgtaaatatataatgaatgactcttttttaactttataagtttctcttgaaaattgaactttggggttgggctagtaagcattttcgctagtaataaaaacaatgcctggagagaaagattatgaacaaatgtattgcttctttagagcaggacaaacactgtcttttgcgtgagtttgttattatggtcaaagaacgtattcctcagctcatatttgagcattcacgtgtataggaatgtatccttgagcagaaatgaggaactatgttttaacaacattaaatattacaacctgacagctagagtatatcagacataggctgtttcttcattactactcatataattgtggctatccaaatgtgtattaattattgtagagtttaacttgtccataataatttgtaaacagtattacagattagtacctgtgcatggaaatatgaagtattttcatgtgtttatttgcaatgttatagaggccattgtgcacaaacttaaaccaagacaatgggtgttcaaagaaaattaatgtttaaacagttatcactgatgcttttgcactatttattaataaagtcatacattgtctttttattgaaaaa

SEQ ID NO: 1883 - DNA, 2117 bp, Cricetulus griseus
atcgaggacttctaccgcaaggagattgaagtggattcgtcgccgtcggtgctggagatcctggacaccgcgggcaccgagcagttcgcatccatgcgggacctgtacatcaagaatggccagggtttcatcttagtctacagcttggtcaaccagcagagcttccaggacatcaagcccatgcgggaccagatcatccgcgtgaagcggtacgagcgcgtacctatgatcctggtgggcaacaaggtggacctggagggcgagcgcgaggtcgtcatacggagagggcaaggccctggccgaggagtggagctgccccttcatggagacatccgccaaaacaaagcctcagtggatgagctgttcgcagagatcgttcggcagatgaactacgcggcgcagcccaacggcgacgagggctgctgctcggcctgcgtgatcctgtgaggcgccggctgctgccgggcgctggccatgctctgtgcacaaagccaaacacacccgattctcttaatgtgattgtcttcttgtttgagattggagacgactttgtgttggccgggatgtccgaggaatctggctgacttgcgtggccagcatccccagccttcagccggggtccgagggggtgtcggttcctgaccatccaagaccctgatggaaatgtggctctttaccgcgtgtacgttcctcattgatttcggttcatgcataattttcccgtttaagtggccattaaagcgcagtattggctgcttgacaccggcaagcaaaagtttcaagcctgaaaaaaaaatgggggtggggaggtggaggaagtgggggagggttcgcccaaacaactgttcatattccaagttctaaatacaaggaaggaggtctgagaaaaccatatgaaggagccagagaaggggaagaaacttgttttttgtttattttttccccttgtttttccaggattatttggaaattaagaccaggggttccttttctgccagcttggaagggcaacccagggactgattaggattctgaggatgtctatgcaaagttgggttcttgttacagtgtatccaatctgaagtattgcacatgtgaactgggactgttaacactgatgccaatacagtgtggggtgccaggaagtgtctgctgatatttgtgggaaaaaaaaatctattttgattacctactgtatcaaaggggagtctggggaagaatggtagtattttttttaatcagctgtgaaaaaatgttaaaagatctgcacatttttttgtgtgtgctattgtgtgcgtgtgtgctattgtgtgtgtgtatagcatatttttttttttttttttttttttgtggttggcagcgacagattttgctgactagcttttaaaaatacaatacaaagactttgtaaatgtgattcagggcccccagcacccctgtgtctgcagagtgccttcaaactcagctgttccagccggtgccaacctgtgaattcccaccatatcccagaatctgctgttctgctgccccccaaaccactttaaatatcttcctgaaagagccaggacaaatggggcctgttagtccattgagttgcttcattaattttagctttttaaatgttaagcccgtgtctggaaattttctccccttcattttgtgcaaatttcaggttttagctcccctttctgttgttatcagagtgtctgcgttatttgttgcagggtgtcctccagaagcaaagagcagaattttattgttgtgatgtaccaagagaattctaacaaattgtaacttttaattccactcatttagtcgttgtctcttcattttaagacttttaatacaaatgtcatttttaaagaaaccccaaactatttgtgtttttgtgtttcatattcattgatttacaatatctgtgataatgctgtcaggtggtggtggacagggccagatacatgatgccttccggagttatttgtcaaattttgaagatagaattatttcagtgacaaattgggtgacagtatttccaatttttttttaaatgggagaaaattacctaggcctaagaatcacagggtatgaccataccatgtgactcccagaagaggaag

SEQ ID NO: 1884 - DNA, 2116 bp, Cricetulus griseus
gctcagtttagcgactaacgcagatcaggtttgttgtctgcggcgaagaggcggagggggctacgcgtcaccgggtcttttctccaccgagctttcagccgccgagggtgcaccccagaggcgatcctgtttccgcctccctctcctctcgcagcttcggcgttcaccccatcgtctaggcgccactctcgagaagcggaggcaggatggagttcaagctggaggctcaccgcatcgtcagcatctccctcggcaagatctacaactcgcgggtccagcgcggcggcatcaagctacacaagaacctcttggtgtcgttggtgctgcgcagcgcccgccaggtctacctgagtgacccgtgccctggcctctacctggccggccctacggggatcccgacggtgccgccgcctcagcagcccggagagccggtggccgggccaccctccggttggggagagccgcctccgccgtccgcccgcgccgcctggccggagcccgagccgcagcctcagccgcagcctcagcgcccttcggtgtgccacacgccgggaacgggaagctcggagccggtggccgccgtggccggagctggggacgctctcccgggccgagaggcagactcggcggcagctgcttggggccgcgtggagcgtccgcgcgcgatggcttctggaggcggcccggacacgtgccccgaggggccccgggcagtgcgccgcccgtgcggctgtcccccggcccgggaggagcagccagccgaggacggttcccccgcgccacccgccccgtgtcccaggaagcgcggcgcagcgggagtgggtggtggccgcgctggctgcccggcgcccggctcgacccctctcaagaagccgcgccggaactcggaagagcagccgagcaccggcgaggaggacacggacacggacgaggagatggagaccgggaacgtggcaaacctcatcagcatcttcggctctagcttctcgggactcctacggaaaagccctgcgggcggccgggaggaagaagaggcggaggagagcggcccggaagccgccgagcctgggcagatctgctgcgacaagccggtgctgagagacatgagcccctggagcacagccatcgtggccttctgagtctccggggcccgagcggctggagcttgagcagcgggcgtccccgaagttcggccgtggcctttcccggccccgaggacgagccgagaccgtaggcgctgggcgcgtagggggagactggttgctgccgggcagcacatcgccccgaacggggcagcccggctgggccgtggctctcgagtctcacgcagagagacctagagttggaggcttatcggaagaggacgatcgatcgttaaattttgtgtctgtgtccgtccgtgtgtaagtttgtcttgtgttgttgagactgttctgtggttctggaatgcaccaccccttccccggggcttgagacttttgggggcgcagacagggactttcctctgccagcagcacagaaaaggaagctgctgaatggctcgaggcaggggagttccccatttgatcttgggggagagagggactttacacactctcatgaaagctagaacctcatcggcgcgccgagtggcgtttcctcacaggatttcctcagacgagagggagttcgcctggagtagagacttgtattatttttctccctccctacctttctctggcacggaagaagcgcttctaccctgtgattactctgggacagcagaacattaagggaccttcaattcctcaaaggggataaaaaagcttggtgaacttcacagaagagttcaagcttggaaatacggagtttatagagaaaagatatatttttaaaagctctagctcagaacttactacacagtgcttttaaaaagtgtttaatgaaacaaagtttacagacgagctctaagtggaaggaccttatggttttgtagatacggtgactccagtctttgttgtataaaggttgggggagctgataaggtttttgtacagtattttctcctcctctgtattgatttttgtataaaaatgtaactttacgtgtctaacacgtattaaatattttgaagcaa

SEQ ID NO: 1885 - DNA, 2116 bp, Cricetulus griseus
  modified_base (566)..(566): a, c, t, g, unknown or other
tgtgtgtaccgggcagtaatgagaaataccacatatgctgtgaagagactgaaggaggaggctgacctagagtggactgtggtgaaacagagcttcctaacagaggtggagcagctgtcaaggtttcgtcacccaaatattgtggattttgctggctactgtgcagaaagtggcttctactgccttgtttatggcttcctgcccaatggctccttggaggatcgactccatcttcagacccaggcctgctcccccctatcctggcctcaacgactggacattcttctgggcacagcccgggctattcagtttttactattcaggacagccccagcctcatccatggagacatcaaaagttctaattgtgcttctggatgagagactgatgcccaagctgggagactttggcctggctcgtttcagccgctttgcaggggccaacccaagccagagcagtactgtagcccggacttgcacagtacggggtaccctcgcctacctgcctgaggagtacatcaagacgggccggctggctgtggacaccgataccttcagctttggggngtaatactcgagaccctttctggtcagagggctgtgaggacacaaggtaccaagacgaagtatctgaaagacttgattgaagatgaggctgaagaagctggagtggccctgaacagcacccaggccactctacaggtggatgtggccacagatgcttgggctactccaatcgctgcccagatctataagaagcacttggactccagacctggaccctgcccaccgaagttgggcctggccctggctcaactagcttgttgctgcatgcaccgtcgggccaagaagaggccacccatgacccaggtgtacaagagactagagtggctgcaggcagggcctccttgggagctagaggttgccagccacggcccctcttccccacaggagaactcctacatgtccaccactggcagtgtccagagtgggggtgaaccatggcagcctctggtagtgcccacaagagccccactccaggctgctcggcagctccagaaaagccccaaccagccagtagagagtgatgagagtgttcccagcctctctgctgccctgcactcctggcacttgactccaggtagccacccaagcccatcatccttcagagaggctggctgtacccgggggagtaccacccaagaatcaagtttgaggattgtcacaggcttccagcccacaactatggaaggctcatccatgggcagttcctcctccctgtcatcagagccaccacagatcatcatcaacccagcccgacagaagatggtacagaagctggccctgtatgaggagggactcttggatagcctgcagcttctgtcatcaggctctttcccaggcttggatttagaacctaaaaacagacagggacctgaagaaagtgacgaatttcagagctgatttgtccacccaggcaaattccctcagactcagatgtcaaagttctcatggttggaagttctcatggtgtgcaacctccacagtagcccaaaggagtcaggtgtggggcgtactctggcaaaggagaaagagtggtgaacctgctgttctcagggtgtgaatacagtaaattacaaaaaaaaaaaaaaaaaaaaaaaaaagagtccaaggtactggttgtggcagtaatgtctaacaaagccaagctttgtggtacccagacagtgagaaaaccccaaaagcagaaacagggaacaaagtaaaagtatttgaggagggaggaaggccccattttaagaagcaacaaatttttgtgtaaccaagtgtcttcaaaagtaacccagggttataacccaggcttatagtgattctgtgtttgagtcacgagtcacactacatgcccctgtgaagcactggtaacaaacatccaatttgtccttgagtagtaaaagtgtgcattttactgtctggttaaacttgtggagtttgttgcactaaaagctttgtgcttttctaatgctttacatgtcctggttcttgagtatcccaccaaaactaagggccccaacatctttgctattctcttgccatgcccagactggggatcgattccc

SEQ ID NO: 1886 - DNA, 2116 bp, Cricetulus griseus
aggagcatttggtcctggtagagacaggaaggaccctgtatttgcagggggaaggtcggctagactttgcagcatggaatacagccattgggggtgctgctggagggggtggcacagggctgcaggagcagcagatgagccggggagacatccctatcattgtggatgcttgcattttgtaacacagcatgggcttcggctggaaggtgtatatcggaaagggggtgctcgggcccgtagcctgcgactcttggctgaatttaggagggatgcccggtcagtgaagctccgaccacgggaacactttgtagaagatgttactgacacactcaaacgcttctttcgagagcttgatgaccctgtgacctctgctaggttgctgcctcgctggagggaggctgcagagcttccccagaagaatcagcgcctggagaaatacaaagaagtgattggctgcctgcctcgagtaaaccgccgaacactggccaccctcatcgggcatctctatcgggtacagaagtgtgctgctctaaaccagatgtgcacacgaaacctggccctgctgtttgcacctagtgtgttccagacggatgggcggggagagcatgaggtgcggatactacaggagctcatcgacggctacatctctgtctttgatattgactctgaccaggcagctcagatcgacttggaggtcagtctcatcaccacctggaaggatgtgcagttgtcccaggctggagacctcatcatggaggtttatatagaacagcagctcccggataattgtgtcaccctaaaggtgtccccaacactgactgctgaggaactgagtaaccaggtgctggagatgcgagggacaacatcagggacagacttgtgggtgacatttgaaattcttgaacacggagagcttgagaggccactgcaccccaaagaaaaggtcctagagcaggccctgcaatggtgccagcttccagagccctgctcagcctctctgcttctgagaaaagtctccatggcacacgctggctgccttttcacaggagtccggcgtgagagcccacgggtggggttgctacggtgtcgtgaggagccacctcgcttgttgggaagccgcttccaggagaggttctttttggtgcgtggccactgcctgctgctgctcaaagaaaagaagagctctaaaccagaacgggagtggtctctggaaggtgccaaggtctacctgggaatccgcaagaagttaaaacctccaacaccgtggggcttcactttgatactggataagatgcacctctgtctgtcctgcactgatgaggatgagatgtgggactggaccacaagcattcttaaagcccagcatgatgaccagcagtcggtggttttacgtcgtcattcctcctctgaccttgctcgtcagaagtttggcactatgcccttgctgcccatccgaggggatgatagtggagccactcttctctctgccaatcagaccctgcggcggctacacaaccggaggaccttatccatgttctttccaatgaagtcaccccaggggtctgtggaggagcaagatgagctggaggagcctgtgtatgaagagccagtgtatgaggaggtcggggctttccctgagcttaccaaggacacggccgccttctcttccacatgggagtggacagccaagtcaaagacaccccttgccagccacaggtcctttgatcaaacccctgtctccaaagcaagccaggaggagaagacaccagactattctccaggccccccttcaaagagcggtcctcaggcacgggggtccctggaggaacagctgctccaggagctcaacaacctcatcctgaggaagggagagcctgccacatgtccagaaagtccttcccagcccaccagtccccaagcccccagcgccaccagcatttcaacacaggcacccagtttacctacccaaactcccaacacttccaacctagcctccagccagcctctcacatgaccccagggggagctgcttttgccctaggatggacgactctggaatccagtatggtaccatggaaggagcactggactgagagccctggagactgtgtgtctc

SEQ ID NO: 1887 - DNA, 2116 bp, Cricetulus griseus
gcggcggcggcgctgagcgcgatggcggcggaggaggaggtggactcggcggacaccgcaggagggtcaggatggctgacagggtggcttccgacctggtgccctacgtctacatcacaccttaaagaagctgaagagaaaatgttaaaatgtgtcccctgcacgtacaagaaagagcccgtccgcatatccaatggaaacagaatatggacactgatgttctctcacgacatttccagtaagacaccactcgtcctcctccacggctttggaggaggtcttggactttgggccctgaattttgaagatctaagcactgacaggcccgtctatgcctttgacctcttgggctttggaagaagtagtcgacctaggtttgacagcgatgctgaagaggtggagaaccagtttgtggagtccattgaggagtggaggtgtgccctcgggctgaacaaaatgatcctgcttggacacaaccttggagggttcctggccgctgcttactcactgaaatacccatcaagggttagtcacctcattttagtagagccatggggtttccctgagcgacccgatctggctgatcaagaaagaccaattccagtttggatcagagccctgggagcagctttgactccctttaaccctttggctggcctcaggattgcagggccttttgggttaagtctagtgcagcgtttaaggcctgatttcaaacggaagtactcctctatgtttgaagatgacactgtaacggagtacatctaccactgtaacgtacagaccccaagcggtgagacagccttcaaaaacatgacgattccttatgggtgggcaaagcggccaatgcttcagcggataggagacttgcatcctgacattccagtttctgtgatctttggcgcccgatcctgtatagatggcaactctggtaccagcatccagtcactgcgaccgaagtcctatgtgaagactatagccatcctaggggcagggcattacgtgtacgcagatcagccagaagagttcaaccagaaagtcaaggagatctgccacatggtagaccgagcttccacatttaaaccaattagtgccttctagaataatggctttcctttctcctacacaagattgaaatacacaaaagtcttccgatttaatagtagccttaaattaaaaggttattttgtccttctggtgtactcaaaaattgtggtttttcagctgagacttttctgtatttttacctaactttgctagttaggtctatatgccaaatttaactaagtgacttctgggtctgtcatcttaaatgctacaaaggtgcactttgttttgtttgcatgtatttactatctctaacaactaacatagttaatccaagtatttttaagtaaaaaaaaaaattcaatttagaatacttcatttttgaaatggagtttagaatatttcattttgaaatggaataaaagggtaagttttgattaaaaagatgggagttgatcactagcactaactcctctggttttcctgtttaatatttaaggctgcaaagctgtgctcagcatttttagtgtgctccatgatgacatgttgccttctagtaaaccaagtcatactgtgtttccatgaacaactaacgtatacggtgcttaaactggattacatttttaccactaacatttaaaattaagtggtgctgtcatgtctcacggcaccagaaatgagctagaatgtgtgtttattttttatcgattattatgttaatctaatcatttatatgcttgaatcaagattattaaaaaaatctataatgttgtttgaattgtctggcagaaaccaccattgaatttataactttctcacagttttaaaatgagggaaacttggaaactatgaaaaagctctgtatggtagccggatgctgtgaaagtcccctatacagaaaacaaagagggtgtcaccagcattgtctgtccaggacaaaagcaggccacacaggtcaaaaactggacagcacgaaccatgggcttggtgatttgggctattgcatttttagtggctaattaggattttttgaaaatgtaagattatatcacagttaattaactgtcag

SEQ ID NO: 1888 - DNA, 2115 bp, Cricetulus griseus
gaggagaagacgaaggaaggaggcaagaagaagaacaaagatggaggtggagatggaggtcgagcagagttgaatccttggcctgaataatattaacacacgcctggatatgtataataagctgaaagcagagcatgattctctgctggctgaaaaggcagcaaaagatagcaagccaattaaagtcactttgcctgatggcaaacaggtggatgcagagtcctggaaaaccacaccatatcagattgcatgtggaattagtcaaggcctggctgacaacaccgttgttgctaaagtgaataaagttgtttgggacctggaccgcccactggagaccgactgcactttggagcttctcaagtttgaggatgaggaagcacaggcagtttattggcactccagtgcccacattaatggggtgaggccatggaaagagtctatggtggatgtttatgtttatggtccaccaatagaaaatgggttctactacgatatgtaccttgaagaagggggtgtgtccagcaatgatttctcttctctggaaactttgtgtaagaaaatcattaaagagaaacaaactttcgaaagattggaagtgaaaaaggagacattactagaaatgtttaagtacaacaagttcaagtgccggatattgaatgaaaaagtgaatactccaaccacaactgtctataggtgtggccctttgatagacctctgccggggccctcatgtcagacacactggcaagattaagactttaaaaatacacaagaattcctccacatactgggaaggcaaggcagacatggaaaccctccagaggatttacggcatttcattccctgaccccaaactgctgaaagagtgggagaagttccaagaggaagctaaaaaccgagatcataggaagattgggagggaccaagaactatatttcttccatgaactcagccctggaagttgctttttcctgcccaaaggagcctacatttataatacacttatggaatttatcaggagtgaatataggaaacgaggattccaggaggttgtcactccaaacatcttcaatagccggctctggatgacctccggccactggcagcactacagtgagaacatgttctcttttgaggtggagaaggagcagttcgcccttaagcccatgaactgcccaggacactgtcttatgttcgaccatcggccaaggtcctggagagagctgcctctgcggttggctgattttggtgtgcttcataggaatgagctctctggggctctcacaggactcacgagagtccgaagattccagcaggatgacgcacacatattctgtgccatggagcagattgaggatgaaatcaaaggttgtttggattttcttcgcacggtatataatgtctttggattttcatttaaattgaatctttctactcggccagaaaagtttcttggggatattgaaatatggaaccaagctgagaaacaacttgaaaacagtttgaatgagtttggtgagaagtgggaactgaatcctggtgatggcgctttctatggtccaaagattgacatacagataaaagatgccatcggccgctaccaccagtgtgcgaccatccagctggattttcagctgcccatcaggtttaatctttcttacgtaagccatgatggtgatgacaagaagaggcccgtgattgttcaccgagccatcctggggtcagtggagagaatgattgccatcctcacagaaaactatgggggcaaatggcctttctggctctctcctcgccaggtgatggtagtgcctgtgggtccaacatgtgatgaatatgcccaaaaggttcggcaacaattccatgatgctaaattcatggtggacattgacctggatccaggctgcaccttgaataagaagatcagaaatgcacagttagcacagtataacttcatcctggttgttggggaaaaagagaaagccagtggcactgtgaacatccgcaccagggacaataaggtccacggggagagaactgttgaggaaactgtggagcgactgcagcagctcaagcaatcccgcagcaagcaggcagaagaggaattttaacaggaaca

SEQ ID NO: 1889 - DNA, 2115 bp, Cricetulus griseus
ccaacctagcagggcttttcttcccgtcccagctcaatggcacagccaatgatacatcaggtcctgagctgcctgaccccctggggggcctgttagatgaagctatgttggatgaaatcagcctgatggacctggccattgaggagggcgttcaacccggtgcaggcctcccagctcgaggaggagtttgactctgactcaggcctctccttggattccagccactagcccttcctccctgagcagctctgaaggcagctcttcttcctcttcctcctcttcctcttctgcttcctcctctgcctcttcttccttttctgaggaaggtgctgttggttacagctctgactctgagaccctagatctagaagaggctgagggtgcagtgggctaccagccggaatactccaagttctgccgcatgagctaccaggatccttctcagctctcttgccttccctacttagagcatgtgggccacaatcacacatacaatatggcacccagtgcccttgactctgctgatctaccaccacccagcaccctcaagaaaggtagcaaggaaaagcaggctgacttcttggacaagcagatgagccgagatgagcacagagcccgagccatgaagattccattcaccaatgacaaaatcatcaacctgcctgtagaggagttcaatgagctgctgtccaaataccagctgagcgaggctcagctgagcctcatccgggacatccggcgccggggcaagaacaagatggctgcacagaactgccgaaagcgcaagctggacaccatcctgaacctagaacgtgatgtggaggacttgcaacgagacaaggcccgattgctccgagaaaaggtagagttcctgcggtcactgcggcagatgaagcagaaggtccagagtttataccaggaggtgtttgggcggctttgggatgagaacgggaggccctactcacccagtcagtatgcacttcagtatgccggggatggcagcgtcctcctcattcctcgcaccatggctgaccagcaggcccggcgacaggagagaaagccaaaggaccggaggaagtgagcctggggaggcagggggtggacgctcactaagaccgaaactggagaagggctgggcctggacctaacattggggacttaaatgccttcttatccaatatatcttctcagatgggacgactgcgggtcagtgcacagaagaggcgggcgcaggcgctgtctggcttagcttcccaactgggagtgggtggaaatgaccagactatttagtaattggggtccccagcccattcccttctttctcccgagggaagggtggtgttggcatgctggaagagaggggctgtgtggagtgaaggtctcatttctggaaggagaaaaggaaatcccctaaaagcaaagcagtcagaaaaatcagggggactgttaagggctttggccagcattccaggcagtgaatgtaagtgacgaggagggcagagggtatagaaagtgataatgaggcctgtgttgcagcagccccaacatcaagcatgtcactcactgccctaccacagccacctccctccctagctaccctggagctgaggttccttcccactgtcctcatgagagcctgcatggaaatgctgtactcttcccactctcctctctttgtggtacccaccctcactagctgcctatagctctctggagtggggtgctattctggcagtaccggaacttggcctacagcttcctctgcaggggctaaacagaagcaaggtgaaggtatggagggagaagccagctcagtgacctccaggcactgttcagcacaacattgggaagtgaatcttcccgcccctctgcctacaaacatctgggcttgtcactgggggaaaacaaaaacctataaaccccagcaacaaaacctagtccttttagaatttacttgcgctttgattttttagggcgtgtgccctatttcacttatagggcctaggatgcttgtgttgagtaaaaaggagatgccccatattcaaagctagctaaatgttctctttgccataaagactccgtgtaactgtgtaaacacttgggatttttctccta

SEQ ID NO: 1890 - DNA, 2115 bp, Cricetulus griseus
tatgaaagaaggtcaaagcgagtgtcatccttagaaaattctacttataaatcaagtgataaagtggaggagactctaacacgtgaacaaaaggaaggagccttctccaatttctccatttctgaggagactataaagcttctgaaaggtcgaggggtaacatatctctttcctattcaagttaaaacctttggtcctgtatatgaaggaaaagatttaattgctcaagcccggacaggaacaggaaagacattctcttttgccatacccttgattgaaaggctccaaagaaatcaagaaacagttaaaaaaagccgctcaccaaaggtacttgttttggctccaacaagggaactggcaaatcaagtagccaaagatttcaaagatataactagaaaactcagtgtggcgtgtttttatggtggaacatcatatcaaagccaaattaatcaaattcggaatggtattgacatccttgttgggaccccagggcgtatcaaagaccatctgcaaagcggccgtttggatctttcgaagctacgccatgttgtgcttgatgaagtagatcaaatgttagatttaggttttgctgaacaagttgaagatattattcatgaatcctacaaaactgattcagaagacaatcctcagaccttacttttttctgcaacttgcccacagtgggtatacaaagttgcaaaaaaatacatgaaatccagatatgaacaggttgaccttgttggaaaaatgactcaaaaagctgcaaccactgtggaacatttggctatccagtgccattggtctcaaagaccagcagtaattggagatgtcctacaggtctacagtggatctgaagggagggctattatcttctgtgagactaagaagaatgtaactgaaatggccatgaatccacacataaagcagaatgcccagtgtttgcatggagacattgcacagtcacaaagagaaattaccttgaaaggcttcagagaaggtagttttaaagttttggtggcaaccaatgtggctgcccgaggcttggacattcctgaggttgacttggtgattcagagttcccctccacaggatgttgaatcctatatccatcgctctgggcgcacaggtagagctggccggactggaatttgtgtatgtttttatcaaccaagagaaagaggacaactgagatatgttgaacagaaagcaggaattacttttaaacgtgtaggtgttccttctacaatggatttagttaaatctaaaagcatggatgccatcaggtctctggcctctgtttcttatgctgctgttgatttcttccgaccatcagctcaaagactgatagaagagaaaggggccgtggatgcattggctgcagcattagctcacatttctggtgcatcaagctttgaaccacgatccttgatcacctctgataaggggtttgtgaccatgactctggaaagcccagaagaaatacaggatgtcagctgtgcttggaaagagcttaacagaaagctgagtagtaatgctgtgtctcaagtaaccagaatgtgcctcctaaaaggaaatatgggtgtttgctttgatgttcctacaagtgagtcggaaagactacaggcagagtggcatgattcagattggatactctcagtgccagccaaattaccagaaattgaagaatattatgatggaaacacatcttctaatcctagacagaggggcggctggtcaggcggcaggtcaggccgttcaggccggtctggtggtcgatctggtggccgatcaggtagacagagtcgacaggggagtcggtcaggaagtcggcaagatggtagaagacgaaatgggaaccgaaatcgatcaagaagtgggggccataaacggagttttgactaagtgtttgatcgttaatcttccagtgtgagcttgcctatttctgtctaatcatgtatattattcaccaaaaattaggtcatcatagttgaggtatttgtctgtaatttgcaaagaagttggtcgtatttttttaaaatatttcacaagaatggttgtaaacaaatctacttatccagctatacctttgaattaaaaaaagccccttttattgtc

SEQ ID NO: 1891 - DNA, 2115 bp, Cricetulus griseus
ggggaggtgtgcaccgagcaggctaggcgacccttgccccggccccactgagccaggacccgacagagatgttatgatggatcagcatgtttccaccattaaaccccgacgaatccaaaatcagaatgtcattcaccgcttagaacgccgtcggatcagttcaggcaaggcgggaacccactggcatcaggtccgagtgttccaccagaatgtcttcccgaacttcacagtggtcaacgtcgagaagcctccctgtttcctgcgtaaattctcacccgatgggcgctactttattgctttttcttctgaccagacatctctggaaatctatgagtaccagggctgtcaggcagcagaggacctcttgcaggggtacgaaggggagatcttgtccaatggcaacgaccagcggtcagtcagcatccgaggccggctctttgagcgcttttttgtcctgttgcacattaccaatgtggcggccaatggtgagcacttgaaccgggagtgtagcctcttcactgatgattgccggtgtgtcatcgtaggttccgctgcctatctcccagatgaaccccaccctcctttctatgaggtttatcggaacagtgagtccgtgacccctaatccacggtcccctctagaggactattccctccacatcattgaccttcacactggccgtttgtgtgacacacgcacattcaagtgtgacaaagtggtcttgtcacacaaccaagggctatatctgtaacaaaaaaaggcacttttattgacgttcggaccattggccgcttctgctatgaggatgatctgctcactgtgtcggctgtttccctgaggtgcagcgggacagccagacaggcatggccaatccctttagggaccctttcatcaactccctgaagcaccggctgctggtttatctgtggcgcagggcagagcaggatggtagcgcgatggccaagaggcgcttcttccagtactttgaccaactgcggcagctgcgcatgtggaagatgcagcttctggatgaaaaccacctgttcatcaaatacaccagtgaggatgtagtgacacttcgggtcacagacccgtctcaggcatccttctttgtggtgtacaacatggtgacaacagaggtgatcgccgtgtttgagaatacatcagatgagcttctggagctctttgagaacttctgtgacctcttccgcaatgctaccctgcacagtgaagtccagtttccttgctcagcttctagcaacaattttgcacggcagatccagcgccggttcaaagacacgattataaatgccaagtatggagggcacacggaggctgtgcgccggctgctgggccagctccccatcagtgcccagtcatacagtgggagcccctacctggatttgtctctcttcagctacgacgacaagtgggtgtcagtcatggagcgacccaagacttgtggagatcacccaatcaggttctatgcccgggactctggcttgctgaagtttgagatccaggccggcttgctgggccgccctatcaaccacacagtgcgccgtctcgttgccttcacctttcacccctttgagccgtttgctatttctgtgcagaggactaatgcagagtatgtcgtcaacttccacatgcgacactgctgcacctcggtgcctcaccacacccgcgctgtccaggactttgcccctgcctgactcagtggattccagagcaaaagcagctggcttcccagctttgggaattccacactggaacccctccttcacctgagacggagcctgagaggagtggaggatggggtgccaccgagtgggactttgttttcctgttacccagtctatcgttcttacagttttctcgattttccctgtgggaacacctagcattaagtccattctattttgtttacttaacattttatggctgtgaagatagaagaagcattacacctttcccctggatgccactctttggcattatggtctgaagcctgcagcaggtatatcatgtttactcctgagaattatgtactcctttccatttctcaaacaggcagggctctttataagagaaaataaagccttggttattttc

SEQ ID NO: 1892 - DNA, 2115 bp, Cricetulus griseus
ccggacagcaggcactgttagggctgaagacggctgttgtgcagactacacctccccgggatctggcagccacccaagtccctccctctccaccttccccttccattcaaggtcagagtgtgctaagttatagcccatctcgttcaccgagtcccagtcccaagtttgctgccagctgtatgactgggtacagccctcagctgcaaggtctgtcctcaggcggcagtggctcatacagccctgcagtgacctactctccagtcagtggttataataagctggcaagctttagtctgtctcctccttctccctaccctaccactgttggcccagtggagagcagtggattgagatctcgctaccgttcttcacccacggtctataactcacctactgacaaagaagactacatgacagaccttcggactttggacactttccttagaagtgaggaggagaaacagcatagagttaagctggggagcccagattccacgtctccttccaccagccctaccttctggaattacagtcgttctgtgggggactatgcacaaacattaaagaagtttcagtatcagcttgcctgtaggtctcaggccccgtgtgcgaacaaagatgaagctgatctcagttctaagcaagctgcagaagaggtatgggcaagagtgactatgaatagacagcttcttgatcacatggattcatggacagccaagtttagaaattggatcaatgagacaatattagtgccacttgtgcaagagattgagtctgtcagcactcagatgagacgaatgggctgtccagagctacagataggagaggcgagtgttaccagcttgaaacaagctgccctggtcaaagcacctctcattccaactctgaatgcaattgtgcagtatttagacctaacgccaaatcaggagtacttgtttgaaagaatcaaagagctttctcagggaggctgtatgagctccttccggtggaacagaggtggagatttcaaaggacgcaggtgggacacagacctgcccaccgactctgctatcatcatgcatgtgttttgcacctaccttgattccaggttacctccacaccctaagtaccctgatgggaaaacatttacttctcagcacttcgttcagacgccaaataaaccagatgttaccaatgaaaatgtgttttgtatttatcagagtgctgtcaaccctccacattatgagctaatctatcagcgacatgtctacaatctgccaaagggcagaaataacatgtttcatacattgctgatgttcctttacatcataaagaccaaagagtcaggaatgcttgggagagttaatcttgggctctctggtgtgaatattttatggatttttggagagtagtccattatttactcccaaacatttggactttggttttaattgacctggaagaagttgaagctgagcatctcccagtaagcgcctcttctgaaataggatgtgtgttttgcagacttgttagatgtaacaagaacaactattaggaagcttcttatgacgtaacaactcctgtgtcttctaccgcacggaacagtagttccattggatgactctacgcctctccattgtaaccccgtgagaatcaacacttcatccttcaccatcacaaactgtatttcgttgttgtgtagtagtgtaaatgctcaaaatgaaccttgctagttttctttgttgtatctctatatttccccactgttctgcaagtcagcctaaagctgatatgaaattaatttcaaagtgatgtagtaattaatcctgctgagccatctccccagccccctattggttttttttatattaaaagagatttgataatattggcatcttgaaaggtcacacttgcattaaatttagttgataaaattaaaacttttgggtttagttaaatgtctaaggacatcaagaaaactgttaatactttgattagcacgacagggtttctctgtgtagctttggagcctatcctggcactcggtctggagaccaggctggcctcaaactcacagagatctgcctgctgctgtctccctagttctgggattaaaggcgtgcaccaccaacgccc

SEQ ID NO: 1893 - DNA, 2115 bp, Cricetulus griseus
  modified_base (130)..(130): a, c, t, g, unknown or other
  modified_base (257)..(257): a, c, t, g, unknown or other
gtgccatgtatcgaggctctgtccatgacttcccagactttgatccaaatcaggatgctgaagctttgtacacagccatgaagggcttcggcagtgacaaagagtccattctggattgatcacctcccgnagcaacaagcagaggcaggagatctgccagagttacaagtccctctatggcaaggacctcattgcggacttgaagtatgagttgacagggaagtttgaacggctgattgtgaatctgatgaggccgnttgcctattgcgatgccaaagaaattaaagatgccatctcgggcattggtacagatgagcagtgcctccagggaacccgggagaatgacgatgttgtaagcgaggacttggtccaacaggatgtccaggacctgtacgaaggcaggggaactgaaatggggaacagatgaggctcagttcatttatattttgggaaaccgcagcaaacagcacctccggttggtgtttgatgagtatctgaagaccacgggcaagccaattgaagccagtatccgaggggagctgtctggagactttgagaagctgatgttggctgtggtgaagtgcatccgcagtaccccggaatattttgctgaaagactattcaaggccatgaagggcctggggactcgcgacaacaccctgatccgaatcatggtctccaggagtgagctggacatgcttgacattcgggagatcttccggaccaagtatgagaagtccctgtacagcatgatcaagaatgacacctctggtgaatacaagaaggctctgctgaagctatgtggaggagatgatgatgcggctggccagttcttcccggaggcagcacaggtggcctatcagatgtgggaacttagtgcagtggcccgagtcgagctgaggggtaccgtgtgtgcagccaatgatttcaacccagatgctgatgccaaggccctgcggaaagccatgaaggggatcggaactgatgaagccaccatcatcgacatcatcacacaccgtagcaacgcccagcggcagcagatccgacagaccttcaaatctcactttggccgggatttaatggctgacctgaagtcggagatctctggagatttggcaaggctgatcctggggctcatgatgcctccagcccattacgatgctaagcagctgaagaaagctatggagggagctggcacagatgaaaaggctcttattgaaatcctggctactcggaccaatgctgaaatccaggccatcaacgaggcctacaaggaggattatcacaaatccctggaggatgccctgagctcagatacatctggccacttcagaaggatcctcatttctctggccacggggaatcgcgaagaaggaggagaaaaccgagaccaggcccgggaagatgctcaggaaatagctgacactcccagtggagacaaaacttccttggagactcgcttcatgacggtcctgtgcacccgtagctatccccatctccgcagagtcttccaggagttcatcaagatgaccaactatgacatagagcacgtcatcaagaaggagatgtctggggatgtcaaggatgcatttgtggccatcgttcagagtgtcaagaacaaacctctcttctttgctgacaaactgtacaagtccatgaagggtgctggcacagatgagaagaccctcactagggtgatgatctcccggagtgagatagatctgttcaacattcggagggaattcattgagaaatatgacaagtctctacaccaggccattgagggtgacacttctggagacttcctgaaggctttactagctctctgtggtggagaggactagagctactggtcttggtggcccctctgccaagcagtggccagcagcaccagccaccgtgacctgaccaagccattgttccagcttcagagactaaggaaggaggagtgaggggtggggttagactgtcattcagctggggctctctctagccatcgagggccccaggccatcccttctgttatccctcctgctcatggctgagtggctggagaaccacagccatatatcacattcacccctgctctccttctacttcctcctcagccctccc

SEQ ID NO: 1894 - DNA, 2114 bp, Cricetulus griseus
agaaggaaggccaggggaatgggccgcgggtgtggcagcaagtcttagcagtggacgcgaggtacaacgcctaccgcacaccaacgtttccacagtttcggacccagtatattcgccggcgcagccagctgcttcgggagaatgccaaggctgggcaccccccagcactgcgtcggcagtacctgaggctacgaggccagctattgggtcagcgctacgggccactgtctgagccaggaagtgctcgtgcctatagcaacagcattgtccgaagcagccgcactacacttgaccgaatggaggactttgaagatgatcctcgagccctgggggcaagaggacaccgccgttctgtcagccgaggctcctaccagctgcaggcacaaatgaaccgtgcagtctatgaggacaggcctcccggcagtgtggtacccacatcggtggcagaggcaaggtcgggccatggccggggacacgatcgctgagtgaaaactatgcctttgcaggcaacaacaacctcactgtggtggggaagtgccaagaacaacgtgcatgtcatgaacatctccacaggcaagaaagtgaagggtggctccagcaagctgacaggccgtgtccttgccctgtcttttgatgcccctggccggcttctctgggcaggtgatgaccgtggcagcatcttctcctttctctttgacatggccacagggaaactgaccaaagccaagcgactagtagtacatgagggcagccctataaccagcatctccgcccggtcctgggtcagccgtgaagcacgggacccttcactgctcatcaatgcctgcctcaacaaactgctgctctacagagtggtggacaacgaagggacgctgcaactgaagagaagcttccccattgagcagagctcacatcccgtgcgaagtatcttctgccccctcatgtcctttcgccagggggcctgtgtggtgacaggcagtgaggatatgtgcgttcacttctttgatgtggagcgggcggccaaggctgctgtcaataagctgcagggccacagtgcacctgtgcttgatgtcagcttcaactgcgacgagagcctgctggcctccagtgacgccagtggcatggtcatcgtctggagacgagagcaaaagtagggctttgccagcccagcactgagcattgctctcttctctcactccagtcttggaggcaagcaacggtagacaaagaagtacagccattccttggagtataatttgctttatcttttgtcaactttttgaccctatcgtgctacagaaccacacatacacccagtcttgtttttctcctttcagtatggtgttgagtaaactaacatgagctagtcaacattttgttctaaaatagacttttcattaggtaagtttgcctacctgtagaatcatgtcagtgctctgagcacatttaaggtaggtggggtaagctagggtgtttggtaggttagggacatgaatgcattttcaatatgatagttgcagttaagacagattggttggggtataagcctatttaatcgagaagcatctgtatataataggatagttaaagaggagctgtgtgaagaaaaacagagggctccatcagacagatcttaagcaaatggttatgagataaggatatcagtgagctggagtggtcatgttgtccaaatcatggatgtgtgccaacattcctaatccagcttcagggtcagtgacttcctgtgaggactgtaaggctaccagacacccagtaaatgctaatctttaaagagaccctcccaaggatagcagctcagagctgtgcagtgactcttttctgttccaaataggtatacggtttcaaccaaggtctataggtagcaagataatttagggaaataccacttttctctaacttccttctttacttcacgctctttaatgttttctttaatgagtctggttctaggatgattgatgatgaatattgtttgcatgattttgggggtcttccttgtaaaaattttgaggtggcagagtggacagtctactttaaattcatcttggtgacacttttgacttacaacctaaaggaaactaaacactgagcaa

SEQ ID NO: 1895 - DNA, 2114 bp, Cricetulus griseus
gaagctgagtcctatacagctctcgctgctctcctgatcatggcttcttcgagttccttctcctactattgtcctccatcttcctcccctgcctggtcagaaccgctgtacagtctgagacctgagcacgcgcgagagcggttgcaggacgactcagtggaaacagtcacgtccatagaacaggccaaagtagaagagaggatccaggaagtcttcagtaattacaagtttaaccacctagtaccaaggctcattttgcagagggagaagcacttccattatctgaaaagaggtcttcgacaactgacagatgcctatgagtgtctggatgccagccgcccctggctctgctactggatcctgcacagcttggaactcctagatgaacccatcccccaaatagtggcttcagatgtgtgtcagttcctggagctgtgtcaaagtccagatggtggctttggagggggccctgggcagtacccacaccttgcacccacgtatgcagctgtcaatgcgctgtgcatcattggcacggaggaagcctacaacgtcattaacagacagaagcttcttcagtacttatactccttgaagcaacccgacggttcttttctcatgcacattggaggtgaagtggatgtgagaagcgcgtactgtgccacctcggtggcctctctaaccaacatcatcactccagacctcttcgaaggcactcctgaatggatagcaaggtgccagaactgggaaggcggcattggtggagtgccagggatggaagcccatggtggctacaccttctgtggcttggctgcgctggtaatcctcaagaaggaacgctctttgaagctgaagaacttgctacaatgggtgacaagccggcagatgcgatttgaaggaggatttcagggacgctgcaacaagctggtggatggctgctactctttctggcaggcaggactcctgccccttctgcatcgtgccctgcacgctcaaggtgatcctgccctcagcatgagccactggatgttccatcagcaggccctgcaggagtacatcctgatgtgctgccagtgcccagcagggggtttgctggacaaacctggcaagtcacgtgacttctaccacacttgctactgcctgagtggcttatccatcgcccagcatttcggaagcggagccatgctgcatgatgtggtcatgggtgtgcctgaaaatgctctgcagcccactcaccccgtctacaacattggaccggacaaggtgatccaggccaccacacactttctgcaaaagccagtcccaggctttgaagaatgtgaagatgaggtgacctcagatccgggcaccgactagaggaccccatggctcccccagctcccctggcagacaaggtttctccgtttgggtacaaagcactctctgtgcttatgggagtcttggccaccgtggagctgtggtttctttgtcctttcctgtcaaacaaaacaaagccatcagctgtgggtttggaatataagtggtgtgattttttaaaattattttcatacctgtcaaaccaaaactctgtgagcctgtgcagtggggttggaggagagcagtgcatgctgggaagaagctgcctctgccggcagccagcagcctggcccaccatgctgaaatggagggtatctgtgagtatctcagtatcccggccactgctgtgactcccacctgcacagcactgttcagtcacccgatgggcatcctctggggtccgtgccatgccagggtggggctggtgggtcccgcctatgtgagctccctggaaaagaccattgggctacagaagcacgtgcttctacttgtctccttcaccccagccatctgcaaggcagcggctgggaatggataaaggtcttaggtcggtagggtgctgagtatggtcatccgtccactgctacagtcacagctggtgtcactgtcccagccttcaagtgagtaggcagacaggagcttggagaagcagcatgaggctcttcccaaaccactggccatttgctgcctctaattccctattgctttggtgtactgggctatgtattacctccttgaaataataaaagagtaacattttc

SEQ ID NO: 1896 - DNA, 2113 bp, Cricetulus griseus
  modified_base (253)..(253): a, c, t, g, unknown or other
  modified_base (267)..(267): a, c, t, g, unknown or other
  modified_base (301)..(301): a, c, t, g, unknown or other
ctgacaacaaaggagagacggccttccattacgctgtacaaggggacaattcccaggtgctgcagctcctaggaaagaacgcctcagctggcctgaaccaggtgaacaaacaagggctaactccactgcacctggcctgccagatggggaagcaggagatggtacgcgtcctgctgctttgcaatgcccgctgcaacgtcatgggacccagtggctttccatccacacagccatgaagttctccagaagggtntgctgaatgattancagcatggacagcagccagatccacagcaaaggntcctcgactagtggagcccagccccgctccatgctgctgacctacggggccaacgcaggcaccccaggggagcatgggaacacgccgctgcacctggccatctcgaaagataacatggagatgatcaaagccctcattgtatttggggcagaagtggataccccaaatgactttggggagactcctgccttcatggcctccaagatcagcaaacagcttcaggacctcatgcccatctcccgagcccggaagccagcattcatcctgagctccatgagggatgagaagcgaatccatgatcacctgctctgcctggacggagggggcgtgaaaggcctggtcatcatccaactcctcattgccatcgagaaggcctcaggtgtggccaccaaggacctcttcgactgggtggcaggaaccagcacgtgggggcagtcctggccctggccattctgcacagtaagtccatggcctatatgcgtggtgtgtacttccgtatgaaagatgaggtgtttcggggctcacggccctatgagtctggacccctggaggagttcctgaagcgggagtttggggagcacaccaagatgacagatgtcaaaaaacccaaggtgatgctcacagggacactgtctgaccggcagccagcagagctccacctgttccgcaattacgatgctccagaggtcattcgggaacctcgcttcaaccaaaacattaacctgaagccgccaactcagcctgcagaccaactggtatggcgagcagcccggagcagtggggcagccccaacctacttccggcccaatggacgtttcctggatggtgggctgctggccaacaaccccacactagatgccatgactgaaatccatgaatacaatcaggacatgatccgcaagggccaaggcaacaaggtgaagaaactctccatagtcgtctctctggggacaggaaggtcccctcaagtgcccgtaacctgtgtagatgtcttccgccccagcaacccctgggaactggctaagactgtttttggagccaaggaactgggcaagatggtggtagactgttgcacagatccagatggtcgggctgtggaccgggcccgggcctggagcgagatggttggcatccagtacttcagactcgaacccccaactaggatcagacatcatgctggatgaggtcaatgatgcagtgctggttaatgccctctgggagacagaagtctacatctatgagcaccgggaggagttccagaagcttgtccaaatgctgctgtcgccctgagctccccagcacactgggggccaagctgggccaggcggctgtgtctacctgaggactggggctcagagcacaaacaggttcccacaaggcacctctcctgacccatctgcactttgccactctaggctgaaagcccagagttcccctcagcccctttatgtgactgtgaaggacaactggctccatcaactgccctaaatatcagtgagatcaaacactaaggtgtccagtgtacccagggtccatggccaccaaagcccaccccttctttccacttcctgaagtcagtgtctacagaaatggagttccaccccatcatcaggtgaaatccaggctattgaaatccagtctgttcgactttgcccctctgcacctgccaatcaccccacccctgcagccaccccaccttaagagtcctcccagctctcaaaggtcaatcctgtgcatgtactcttctctggaaggagagtggggaggggttcaaggccacctcaactgtgaaataaatgggtctagactcaa

SEQ ID NO: 1897 - DNA, 2113 bp, Cricetulus griseus
tgcagtgtggcacgctctccttgcaggagggtgtccgtggaggacatggcacatgcggcaaggaagttaggcctcagaattgacgaggacttggaggagtgtcagaaggccaaggacaggatggagaagatcatcagaaagatcaaggatgtggatgcctacaagagagacgagctgaggctgcagggagaccctgcaaggaaggcagcccaagttgaaagagagttttgccagctccagtgggtttcggacccccggagaagcaccgggctgagctgaggcggcgggtcctggagctccgggtgcagcagaatggccaagagctctcctcaggggtgcaggagttcattctggggataagcagcccctccctgggtgagaggcagtacttcctgaggtggatggagtggggactagctcgactaggccctccgcggccaagacagcctccagagacccttcttaccctgagaccgaaacttggtggggcctcagacttgaatgagccactctggcctgagcccctgggagtggagcacttcctgcgggagatggggcagttctatgaggctgagagctgcctggtggaggcagggaggctatctgctgcccagaggcgctctgcccactttccaggcctggctgtggaactgctgctgggtgggctgccactggagctggtagatggggctaccctgagcatccctgttcgctgggtcactgggcttcttaaggagctgcatgtgcgactagacaggagatcccgactagtggttctttcagctctgggggtgcccggcacagggaaatccacactccttaacaccatgtttggcctgcggtttgccacagggaggagctgtagtccccgggggtccttcatgcagctcctccctgtagctgagggcttcagccaggacctaggctgtgaccaaatcctggtgatagactctgggggtttgatcagtggggccttggcctctgctggagacaggttcgaacaggaggcttccttggccaccctgctaatggggttaagcaatgtcactgtggtcagtttagctgaaatgaaggacattccaccagctattcttcatgctttcctaaggttagaaaaaacggggcacatgcccaactatcagtttgtataccagaaccttcatgacctctctgtccccagtcccaagatgagagacaggagacagcccctggatccgcccagcgacctgagcagggctgctactcacatggagaagcagggtggtagcttccggacactggcaggcctggcagagaggcaacatgtatggcacatcccagccctgtggcatggagcgccacccatggcctctgtgagcctgggctacagtgaggccatttttgaattgaagagatgcctgctagaaaacatcaggaatggcttgtccaaccaaaacaaaaacattcagcagctcattgagctggtgcggaggctgtgaatgttttgagggtggtgcctcctgctgtggcctgttgtaacagcagccagcaaggctgtgcctcgtcacagtggtaagaagcagtctcagactggcgtcagaaatattgagggcagaggcccaggacggggtgttacaagcagtgagttctctcttcctaacccatgtcaaggctcctggaagttggccctctgggtagctgttccttcattggcccctgaaattagggaacagctcccttagtcaccacaggtgctggcagacagggatgttgcaggttgttccgaggaagcacacaggccctttgtgggccacccttcaaggttttggtgatgtggcactgaagtgcaaggcactgccatggcactgagcttatatactggtgtatgaagcactctctgaccctttcccaggaagtgttcatcagtcacccttttgtgctccagcacttggtcatactttctcaacacttcatggcacattgtcacttgtgtgtttactgtctgcccctagactgtgagctgcttgagggcaggacctaagcaccattacagctctgggtccctaggacctggcacacataggcgcttaataaatgtttgttgaaattaatgagttgaatgaatgctcaaatg

SEQ ID NO: 1898 - DNA, 2113 bp, Cricetulus griseus
ctgctgccccgggcggttagaagtcggtcgtcggcggctcgagcagaggcagcagccggacgagcagctgaggcgggcgggagcgatggtgaagatggccgcagcgggcggcggaggcggcggtggtcgcgtagttacggcggcggcgaacgagggaggccgagcccctaaacggctgaagacggaaaacgccggcgaccagcacggaggcggcggcggcggcggcggatccggggcggcgggcggcggcggcggggagagttacgatgacccccacaaaacccctgcctccccagttgtccacatcaggggcctgattgacggtgtggtagaagctgaccttgtggaagccctgcaagaatttggacccatcagctatgtggtggtgatgccaaagaagaggcaggcgctggtagagtttgaagatgtgctgggggcttgtaatgcagtgaactacgcagcagacaaccagatctacattgctggtcaccctgcttttgtcaattactctacaagccagaagatctcccgccctggggattcggatgactcccggagcgtcaacagtgtgcttctgtttaccatcctgaaccctatctactccataaccacggatgttctttacactatctgtaatccttgtggccctgtccagagaattgtcatttttcggaagaatggagtccaggctatggtggaatttgattccgtgcaaagtgcccagcgggccaaggcctcacttaatggggcggatatctattctggctgttgcactctgaagatcgagtatgcgaagcctacccgtttaaatgtgttcaagaatgatcaagatacttgggactacacaaaccccaacctcagtggacaaggtgaccctggcagtaatcccaacaaacgccagcggcagccccctctcctaggagatcatcccgctgaatatggagggccccatggtgggtaccacagccattaccatgatgagggctacgggcccccccacctcactacgaagggagaaggatgggcccacctgtggggggtcaccgtcggggcccaagtcgctatggcccccagtatggtcatcccccaccccctcccccaccacccgactatggcccccacgctgacagccctgtgctcatggtctatggcttggatcaatctaagatgaactgtgatcgcgtcttcaatgtcttctgcttgtatggcaatgtggagaaggtgaaatttatgaaaagcaagccgggggccgccatggtggagatggctgatggctatgctgtggaccgagccattactcaccttaacaacaacttcatgttcgggcagaagatgaatgtctgtgtttccaagcaaccagccattatgcccggccagtcttacgggctagaagacgggtcctgcagttacaaagacttcagcgagtcaaggaacaatcggttctccaccccagagcaggcagctaagaaccgcatccagcaccctagtaatgtgctgcacttcttcaatgctcccctggaggtgactgaggagaacttttttgagatctgcgatgagctgggagtgaagcggccaacctctgtgaaagtattttcaggcaaaagcgagcgcagttcctctgggctgttggagtgggactctaagagcgatgccctggagaccctgggcttcctgaaccattatcagatgaagaacccaaatggcccgtacccgtacactctgaagttgtgcttctccaccgcacagcacgcctcctaattagatgctgggaagagcacatctgagcaggaaaatgtttttttcccttatgctgttggttttctttggttttgttctgttttttattttttttttttttggtttttgttctgttttgatttatttttgcagttcttgtttcctttttaaatgctaggtcagtagaggcttaaccacaacggaaatgctggaactctggagggggggaggggaactggtatctcccaagaataaccttcactttttaagataactgtatgtgtgatttttttttcccctgttcatatatttgtgctgcccatgtatcttggcacatttgaataaaatggtttggaaaataaaactctttgctggg

SEQ ID NO: 1899 - DNA, 2113 bp, Cricetulus griseus
tccaacaagggagctgtatgtgttcctggaagccttggccaggctgaactatctgctcagagtgaatgccagtgagcaaacagttgttgccttcttcatcatgccggcacggaccaacaacttcaatgtggagaccctgaagggccaagccgtgcgcaaacagctatgggacacagccaatacagttaaggagaagtttgggaggaagctctacgaatctttactatgggagcctcccggacatgaataagatgctggacaaggaggacttcactataatgaagagagccatctttgccactcagcggcagtctttccccctgtcgtgcacccacaacatgctggatgactcctcagatcctatcggggtctttccctcctactatgagccctggggctacacgcctgcggagtgcacagtcatgggcatccccagcatttccaccaacctctccggctttggctgctttatggaggaacacatcgcagatccctcagcttacggcatttacattctggatcggaggttccgcagcctggatgattcctgctcgcaactcacctccttcctctacagcttctgtcagcagagccggcgacagcgcatcatccagcggaatcgcacagagcgcctgtcagacctgttggactggaagtacctaggccggtactacatgtctgcacgccacatggccctggccaaggcctttccggatcatttcacctatgagccccatgaggtagatgcgacccaggggtatcgttacccacggccagcctccgtgccaccatcgccctcactgtctcgacactccagcccacaccagagtgaggatgaggaagagccccgggatggacccctgggggaagacagtgaacgttatgatgaagaagaagaggctgccaaagaccgccgcaacatccgagcaccagagtggccacgccgggcctcctgttcctcctccacaggcggaagcaagaggagcaactcagtggacactggaccctccagctcactcagcacgcccactgagtgcagagagagggtatctgaaccccactccagaccgattggattcttacccagtgtggtccatagtccaacctgtttcaggcactccagccctttggctccaatcttggagtcaccacactcctcaccactgtgcctttcttggattgcaaaattcattctttgtgctctggttggagtctccaggcttagcctgggtcccagaagccaggaatctgcctttgttcttcagtgccacaggttttaggacacctggtttattgctttccaggctgcagcttcttttgatcctacaaatatacagagtatgctatgtgcaggcctgcccccagggccacctcatgttaaaatctgtgtgacctccctgcaaccgggacagccaagttcagagttaggacaactcagggattaacagagttgaatatgggcctggaaagggagctcagctgtcagagtacttgcctagcatgccgaagccctgggatctaactctagcacctcatagacctagtgtggtgatcatcctctgctgcacagggagttagttcatggccatgctcgacaacttgagagacggtctcaaaatcaaacaaagttaacaatgctgatggtcctccatttcaacccacagctgggatgccaggacaggcggcaagcctggtctccctggatgtgtcacatttatttcttcaagggagcatgcagagttgaaccagtcacctttctgcctttttatggaccagagcttattattcccctcggtccagtgtaccctccaggaaatggctccgttgagaacagaatggctgtcaacctgcttcaacccaccattaaaccaccgggctctgactcccagtggctgaatcaggagtattgtcaccagtgctgcaccctggccccctttcctgatatggaaccgagcccactggcttcttgaagccccacatgtacctcgaggcctttctgcctgcaagcttccctcacgtgttctgtgtctggcctgaggcccttcttggtttgcatttgggagggggagggcagaaggtgtgtgattggagtgtgtccagagatagaaaaaaa

SEQ ID NO: 1900 - DNA, 2113 bp, Cricetulus griseus
agctatggcacctcgcgtgacccgtcgacagaccctggaacgttgtctgaaggaagtcaataaagccaccaaccgacccgagtgtttcctcacgattcaaaatggactagcatcaaacttcacttctttaaccaaagttctttatgattttaataaaatattagagaatggccgaatctctggaagtcctttacagaaacttgagataaacaattttgatgatgagcagatttggcaacagctagaattgcaaaatgaaccagtcttacaatacttccagaatgcagttagtgaaaccattgaggatgaagatctcagccttctcccagaaagtgaagatcaggagtgtgaagaggatgcctcggaggtggagcaggaggtagagagccaggagaaactggagactgatgcagaggaggaacagctgtcagatgtggctgctgatgctcctaaagtggggcagagagaccgaagttcaaccaaacctgatccaaggaaaagccccgtcttcagtgatgaggattctgaccttgactttgatattagcaaactggaacagcagaccaagatgcaaaccaaaccacctggaaaaccaagagaaaagtctgtagtggatgataaattcttcaaactatctgaaatggagagctttctagagaaggtagaaaaagaagaagaaaaaagacccgatgatgaagaggaggaggaggagattgacttttttgaagacattgattcagatgaagatgagggagggctgtttggacgtcagaagattaagtcaagcaaaagttccaggaatctgaaatacaaagatttcttcaatccagttgaaagtgatgatgacatcgctagtgtcgtttatgatgacttaggttctaacaaagaggaagaatttgctgaggaagcagaagaaagcatttctgaaatggatgaagataacgacctggaagaaagtgagggtggcgagcaacttaaagaaggctcgaaaagagtaaccttcgctttgccagaggatgaggctgaagacacgagtcccttagctgtaaagcaagaatctgatgaagttaaatcctcttttgaaaagagacaggagaagatgaatgagaaaattgcatctttggaaaaagaattgttggagaaaaagccttggcagcttcaaggggaagtgacagcacagaagcggccagaaaacagcctgctggaagagacactccactttgaccatgctgtcagaatggcacctgtaatcacagaggaaaccaccctccatctagaggatatcattaaacagaggatacgagatcaggcttgggatgatgtagaacgaaaagaaaagcccaaagaggatgcgtatgaatataagaagcgcctgacattagatcatgagaagagtaagctgagccttgctgagatttatgagcaggagtatatcaaactcaaccagcaaaaaaccgaagaagaagaaaatccagagcatgtagaaattgagaagatgatggattctctcttcctacaattggatgccctatcaaacttccacttcatccccaaaccgcctgttcctgaaattaaagtggtatcgaatctaccagccataaccatggaggaagtagccccagtgagtgtcagtgatgcagccctcctggccccagaggaaatcaaggagaaaaataaagctggagatataaaaacagctgctgagaaaacagctacagacaagaaacgggaacggaggaaaaagaaatatcagaagcatttgaaaataaaggagaaggagaagcgtagaaaattgcttgaaaagaagaacccagatcagcctgggaagtccagcagagcagcagctacagagaagctgaaacagttgactaaaacaggcaaagtgtccttgctaaaggatgaacgaaaagacaagcccttaaagtcatctcaggcattcttttctaaattgcaagatcaagtaaaaatgcagatcaatgaggcaaaacaaccaggaaagataaagaagaaaaaacaggacatttctgttcataaattaaagctgtaatatatttgaatttaatgtacaaatctgtaagtttctgtcctactgttttatattaaaattcttgag

SEQ ID NO: 1901 - DNA, 2112 bp, Cricetulus griseus
aggggaccggtcggactcagagatggcggcgtccatgttctacggccggcagttggccgctgccgtcctgaggagccaccggccgcaggctacactgcgggccgccgcccaggttttgggaaattctggattgtttaacaagcatggcctccaaatacagcagcagcaacaaaggaatctctcactgcatgaatacttgagtatggaattattgcaggaagctggtgtctctgttcccaaaggcttcgtggcaaagtcaccagatgaagcttatgcaattgccaaaaaattaggatcaaaggatgttgtgataaaggcacaggttttagctggtggcagaggaaaaggaacattttcaagtggcctcaaaggaggagtgaagatagttttctctccagaagaagcaaaagctgtttcctcacagatgattgggaagaaattgatcaccaagcaaactggagcaaagggcagaatatgcaatcaagttttgatctgtgagcgaaaatatcccaggagagaatattactttgcaataacaatggagaggtcatttcaaggtcctgtattgataggaagtgcacaaggtggtgttaacattgaagatgttgctgccgagaatcctgaagccatcttaaaagaacctgttgatataataaaaggcatcagaaaggaacaagctgtggcacttgcacagagaatgggattcccagctaacgttgtggattctgcagcagaaaacatggtcaagctttataatctttttctgaagtacgacgcaactatggtagaaataaacccaatggtagaagattccgatggagtggtgttatgtatggatgcaaagatcaacttcgattcaaattcagcctatcgccaaaagaagatctttgatcttcaggactggagccaggaagaccaaagggacaaagatgcagctgatgcagatattaactacattggcctcgatgggaacataggttgtctagtaaatggtgctgggttggctatggccacaatggatataataaaactacatggagggactccagccaactttcttgatgttggtggaggtgccacagtccagcaagtaacagaagcatttaagcttatcacttcagataaaaaggtacagtctattctggtcaacatttttggaggaataatgagatgtgatattattgcaaaaggaatagttatggcagtaaaagacttagaaataagaatacctgttgtggtacggttacaaggtacacgagttgatgatgctaaggcactaatagcagacagtggacttaaaattctcgcttgtgatgatttggatgaagctgctaaaatggttgtaaagctctctgaaatagtgaccttagctaaagaagcccacgtggatgtgaagttccagttgccgatctgagcaagaacttggtggctgcctgacatattaatgtgctgtaattctttattatactgtggtctctgctattgtccctttccttttcagtgtgtggagaatgtaatcgcccatagcacctcacaaacccttgaaagcatttggtctgtgtttgattcttctgctcagaatggactgtttgtataaagaatgtatgtatggtgcacattgctggtttcttttgttgcagccatctttttcttcctctatagaaagtcacttgcagtatatctcttttctgttgttggatacagagttcttcattgctaagagttctataaataaaataactacaaagataaagctttattctttagtatgaaaatatatctaataactgcctcattagaacagtggtgtgttaaaacaatgtttatataagaaatatttatcttcagcgtcaaatggatcttaaatgtatcaatcattatttatacatagaactttcaagcactcctcagaatatcttctaagtatttcagagaagtaacttgttgattatttgaacatcattttaatcattataggacaatgataaccacaagtcttcatgattctgtggtggtgaaaacatctgcaggttgatatctcagacatttattaagaacatggtgggcaaaattaagattgccaaatttaagttaataaaaggttcccaatgt

SEQ ID NO: 1902 - DNA, 2112 bp, Cricetulus griseus
aattatagacatgctggaaggcgctttctatggcctggatctcctaaagctacattcagtcaccactaaactggtggggcgagtggacaaactggaagaggaagtttctaaaaacctcaccaaggaaaacgaagcaaatcaaagaagatgtacaagaaattcgaactgagatgagtaagcgaggcaaagagaactgctctgataccatcctagacagcatgcctgacatccgctccgccctgcagagggacgcagcagcagcctacgcccaccccgaggaacagtatgaagagcggtttctgcaggaggaaactgtgtcacagcagatcaactccattgaactcctgaggacacagccactggtcccacctgcagcgatgaagccacagcagcccttgcagagacgggtgtacctgagaggtcgggtggcctccaagcccactgtcatcaggggaattacctactataaagccaagatctctgaggaggaaaatgacattgaagaacagcatgatgaacttttcagtggtgacaatggagtggacttgttgattgaagatcagctcctgagacacgaagacctattgacaagtgctacccggaggccagctaccactcgccatggtgctgctgtaacaactgatgcaagtgtccaggctatatccttgtcctcagcccaggcctctacctcaacagccagcattgttggccccgactctcaggcctctccagcaattgttcctgaggacatatttgtggaagctccacacttggtcccagtgttgcctgacacagctggaacagacatgccagaggaagaggggactgcagggcaggaagcaacctctgctggccccatcctgagccccgaagaagaagatgacatccggaatgtcataggaaggtgcaaggacaccctctccacaatcacggggcccaccacccagaacacatatggacggaatgaaggggcctggatgaaggaccccttagccaaggacgaccggatttatgtaaccaactattactacggcaacacactggtagagttccgaaatctggagaacttcaaacaaggtcgctggagcaactcctacaagcttccgtacagctggattggcaccggtcacgtggtgtacaatggcgccttctactacaaccgggccttcacccgaaacatcatcaagtatgatctgaaacagcgctatgtagctgcctgggccatgctccatgacgtggcctatgaggaggccacaccctggcggtggcagggccactcagatgtggactttgctgtggatgagaatggcctgtggctcatctacccagctctggatgacgagggcttcagccaggaggttattgtcctgagcaagctcaatgctgtggacctgagcacacagaaggagaccacatggcgcactgggctccggaggaatttctatggcaactgctttgtcatctgcggggtgctctatgctgtggacagctataaccagcgcaacgccaatatctcctatgcctttgacacccacaccaacacacagattgtccccaggcttcttttcgagaatgagtattcctacaccacccagatagactacaaccccaaggaccgcctcctctatgcctgggacaatggccaccaggtcacctaccatgtcatctttgcctactgacacacatgaccccacaaagaggagcgccgaggggccgctagcaccttgtgtgtgtctgtctgtgtgcatgtctgtgtgtgagagtggtgtaggtgggtgtgtgttgttttaaaatatatattattttgtataatattacaaatgataaatgacagtttgggtctatattttttatacggattgtagatcaatccatacatgtatgtgctggtctcatcctccacagtttttatttttgtgcaaatgagcttctccttttgaccagtaacctaccttccttcgagcgctcacctccagctcctgagcacatggttgaagagtttcctcctcggggtcttgcagccaggagcaggagtgaaggcttcaagaaagaagtgttaagtggcagcaaattttttgtgtattagagaagttcttaaaactcagaaaaaaa

SEQ ID NO: 1903 - DNA, 2112 bp, Cricetulus griseus
gtgtcggggaggagcccggtgcgggggtacgcggagtggagctcagggctgcggaagggagcagagctgaacggctgggcgggcctggccaggccagcggagcggagacgtcggccgagtggctgcgaacatgcgcttttgacacgttggcggctttcttgatcatggatggtgaagatataccagacttttcaagtttaaaggaagaaactgcttattggaaggaactttccttgaagtataagcaaaagcttccaggaagctcgggatgagctagttgaattccaggaggaagcagagaattagaagcagagttggaggcacagttagacaggctgaacaaagaaatagagacctgcaagctgataaccaaagactgaaatatgaagtggaggcattaaaggagaaactagagcatcagtatgcacagagctacaagcaggtctcagtgttagaagatgacttaagtcagacccgggccagtatgtgagagagctggagcaggccaatgatgacctggagagagcaaaaaagggcaacaatagtttcactggaagattttgaacaaaggctaaatcaggccattgaacgaaatgcatttttagaaagtgaacttgatgaaaaggaatctttgttggtctcagtacaaaggttaaaggatgaagcaagagatttaaggcaagagctagcagttcgggaacgacaaacaggaagtgacccgcaaatctgctcctagctctccgactctggactgtgagaagatggattctgctgtccaagcctcactctccttgccagcaacacctgttgggaaaggaacagaaaacagtttcccttcaccaaaagctataccaaatggttttggaaccagtccactaactccttctgctaggatatcagcactaaacatcgtgggggatctcttgcggaaagtaggggctttagaatccaaattagcagcttgcaggaactttgcaaaagaccaagcatcacgaaaaccctatatcccagggagcgttaactgtggggtgatgaatagcaacggcccagagtgcccaaggtcagggcgagggaccttcttccataaaggggcagtaaacggctttgatccagctcctcctcctcctgggctgggctcctcacgcccatcgtcagcaccgggtatgctgcctctcagtgtgtgagtgcccagcctccaggtggggtccctgccctcttccagcagcccaggacacctacgcctcgcccctcggtacctgggtccagccctgtgcccctgtctgcctcttcaccgctggcagagggcaggctgcatgcagtggcggctgctgggctctgcccagccccaggactctgcgcgatatcaatactggctattttctcttctcgccgtagtgccgttggtttcacatgattgcacttttgtgggtcacaagtgatacatacgtgtattactcgatcactggatgtggaagtacccgtttatcacatctgcctcatagcccccattttgctgtgctgataggatttagttatgtttaggacattgcagatcttctagaagttctcctcaatcaggttgacaagacccttctaaactcccacccatgcatcttcagtgctcacaatcatgtgtcccccctcagactcagaggaggcaagtggcaacctccttaccagctttttagtccttcagttcaatgacatctcttagctcattttgttttctcttctgaaggtccgtctagttgctttgggaaaggttgaggggcctgattctggggctggctggtgctagctcttgggggcagactggccagaagtgtttgtcccttgcatcctttggttattctcatgctgcacttactgtttacatttgttttattgtatataggtttgtaaacattattgcctaagatatttgtatataacttgggctttgtagcttttatttattcagactcatatggcatgttaattaacgacttatgatggtgtcctattctgggcagctgtataggatcatcatgtggttaaaagaagatacttccctaccaaaaaaaaaaatcttttaatgtggaaacaataaatttcacaagaaaaaaaaaaaaa

SEQ ID NO: 1904 - DNA, 2112 bp, Cricetulus griseus
aataatttattatatatatataataatatatatatatatatatatatacatatatatacatagatctctatatagttgtggtacggtctaaaagcagtcttgttcctggaactgaaaattgggatcttaacttgttttttgcactttagaataatagcatgagaatctcactaatttagcattctgataaaagaaactttagagcgagtcaaaagtagagaggtgtctttcctttgaagggtaggccaagttagccaataaatccttctcagcaaatggttctgtcacaaaatgctttcctatggcttcaattttgtaaacactgcattgtcttgagtcgcttttcttgtgtccccacgttgttttgttttgttttgtttttcaaaagtagaaattccctccagttttattagcctctttatatgtctcaaattgcatgaatattttctggctgttggaaacctgaatgcttttagacccaaatggaaaatttctgaaatgctggattatctatttttaaacaagcagttgacttaaaactttctgtggcaacttctggttttctgacagttcccagtgagagaacttgtgacagtacactgggtcactgggactgtctctgtgaaggtttgcttgagatgaaaaagggtattgcagcttcagcagtgttgaactgtgtgtttaaaatgtgaattactgttcttgtatactgtaattgattacacgggctgggggggtgtcaaagaacttgacaggttgtgttgatgctcttagttgagtcttgaaaagtaaatattaacgctacagaaatgcatgagtttcaatatattttttgtctttgtttgcattgtataactttaacgagtgagtttaaaattatttaatttccttagaaaattagcaccatttggggaaaaaaactggtgttacgaagaacgtaaatgcactgtttttattttattttatataatttaaattgacttttcccactgtctttaagttgaaactgttaagctgaataaaaacttaagctgcaaattgataacttcgctacattacaaggaacatataaatgtttacaaacggcttaaagatttgcatgtgcagtgtgcatttataacacacttgtaattgcacagaacccatgccagctcagagtttaggtgtacccatgtacccagctgagcatttttagaataactactgcacaaattgacaataggtcataggtcattctctctctctctctctttttgtctttccctttctttttctcccctatttcctttccttcccctaccccctaactcatgaaaagattctatggactgaaaaagccccaggctgaaaggactgaactgccttgattgacgtggggaaaggggttagtagactatgtgtatcggcagcagaggctgcagcccaccgtgtggttttaatgaccagcacgcaggggagaagcattttgcacagtgtttgttttcctgtcttgcacttacaaataaggtctatgggagtagcatggaaaatgtttgttgtttttccctttttcttttttaattgcttttgtttaaaatttgatcgccttaactactgtaaacatagcctatttttgtgcttaagatactgaatggaaaactccattgtgtgttgctggactgttttggaaatatttggtcaaatgtatgttaatttggctgtaatggcatttaaagcaaacaaacaaacaaacaaagctgtgaagatggccttgagcattatctttagttacttgaagagtttctagttttttgtttttttttaatacagtttatgttaaaataatctttattaatttagagaagacaatcaatgtctgtgagagaacggactttttttgaattttttttttgtggtcattgtgagtgattgctttttctttttcttagtttcacattcttcctttgttctaaatcttagactgacatctagctttgacaatcatagtatgttttatttcctgagggggaataacttataatgctgtttagttttgtactattggtgtgttggtgaatttttaaactgtgtgctaactgcaataaattatatgaactaagaagaaaaaaaaaa

SEQ ID NO: 1905 - DNA, 2111 bp, Cricetulus griseus
gctttcgggagcaggcggttgaagagatggagcagcttcctctggagctcccgaccccttagaaacgctgctgaccagagctgccttcctccctgcagcttcagcagggatggagtgaaaggggacacctcgacctgcccgcggggatcagcaatggagttaaagcaatctctgtctgtccatctggaagccgagaagcctctgaggcgctatggggcggtggaggagacagcatggaaagcggagggactgggaagccagctggacatcatctctatggctgagaccagcatgatgccagaggagatcgagctggagatggcgaaaatccagcgtctccgtgaagtcctggtccgtcgagagtcagaactcaggttcatgatggatgacattcagctctgcaaggacatcatggacctgaagcaggagctgcagaacttggtcgccatcccagagaaagaaaaaaccaagctacagaagcagagagaagatgagctaatccagaagatccacagactggtgcagaagagggacttcctggtggatgacgctgaggtggaacggttaagggaacaggaagaagacaaggaaatggctgatttcctgaggatcaagttaaaacctctagacaaagcaaccaaatcttcagccagctcccgggcagagaagaaggcagatcccccacctagcaagccaactgtggccaagacaggcctggcactcatcaaggattgctgtgggaccacccagtgcaacatcatgtagcccctatgtggggtgccccagagccatggggatcatccctcctaccctcttgtcctcatagcccccattttacaggggtctaagagatttccaaggcagaaggggttgaaggcaagcccatgactgctatcacgggccatgggcatggcagatgggcccagccattgctgtgcagagtgtagcaatagagagcccctcactgtcgcatggccctccccagagcatgcccaacccaggagtctgtctcattgtttatctaaccaccaagagagcccctcccttaaaacagtatgcccctcacaacctaccatgtgaatgaactgggaaaggggcatgacccccaggtgtgtatagctgtgagtttcaataatctagcactatgttggacccactccccttccaccctcccagctttgctgtcagatacaagtcctgttccctgtttgtcctcttccagggactgtagcctggaggcttccacacagcccacacatctcttaggctccattataatcactttcctagagacgctggcctgtctgtgaaggctgagcttgtgtgtggtgttgggtttatgcctcctgctccctcccaccctgtatccgccaggctccaggacctttctggatttgccatgtccagcctacagtggagcagggtagggatgggtggacaagaacagatccagtgcttggaccaggttgcagagagctgcaggtgccaatgtcaaagtcaagaggatgaaaaaggacccagaacaaatgccaacccacgctctcttcagccactggggctgctgcagagaataccagcaagaggtcaccctgctggcccaacaaacaaggaagcctgacccaactgtgtctcgtctgtctggtggcgtgtttgaaccagccccacaactcctcctgtgtaacttgatgtacatttgccatggtcagctcggcacagcccatgtgacctctctgtgcatatatgtgtgttgtgattggcctaagtagttagcaccagtcaagatttgctgatgtgcaaactatccatcagagaaaataaaaatgaaaaatacacacaacattttataagttctctttcttgattatggacacaactcgtgtacataggaaatcactttaaaagtacagaaagcatattaaaaaattaacaactcacaactttcccaatgacctctgatattttgacatatttccttgaagtcttctcagacatttcttttgtcatgattggcatcacattgaaacatttaatatccagtctttctttccagttatttattgtaccacataggtcttctcctacatcattaaatgctctttgttaacatcaaa

SEQ ID NO: 1906 - DNA, 2111 bp, Cricetulus griseus
  modified_base (278)..(278): a, c, t, g, unknown or other
gatggcgctgctcgtaatacattcttggcgctgggcagccgcggcggctgctttcgaaaagcacaaacattcggcagttctgaccaggcctctagtctccatctgtggctcggccctgcgatggaggtcgcagcagggcggcgcgtcaggaagctctcggatgttccagaatacagagtcattaagaaatgatacatggcagagatggggaaaagacaattcaagacagttactagatgcttcaaaggctctccaggcatggccactgatagaaaagngaacatgttggcatgggcatgcagggtttactctgctcaaggtagacacacggattaaaagacaaagtgatggcatcaaccccttcaaataacaccacagacagccacagtggcctttgataatgtgcattttgaatacattgaaggacagaaagtccttagtggagtatcttttgaagtccctgcaggaaagaaagtggccattgtaggaggtagtgggtcaggaaaaagcacaatagtgaggctgctgtttcgcttctatgagcctcaacagggtagcatttaccttgctggtacaaaataatacaagatgtgagcctggaaagtacttcgaagagcagtgggagtagtaccccaggatgctgtcctcttccataacactatctactacaaccttttatatggaaacatcaatgcttcaccagaggaagtatatgcagtagcaaaattagctggtcttcatgatgcaattcttcgaatgccacatggatatgacacacaagtaggggaacgaggactcaagctatcaggaggagaaaaacagagagtagcaattgcaagagccattttgaaggaccccccagttattctctatgatgaagctacttcatcattagattcaataactgaagagactattcttggtgccatgagagatgtggtcaagcacagaacttctattttcattgcacatagattgtcaactgtggttgatgcagacgaaatcattgtcctgagccaggggaagtagctgaacgtggtacccactatggtctgcttgctaactctagcagtatctattcagagatgtggcatacacagagcagccgtgcacagaatcatgataacctcggatggggtgaaaagaaagaaagtccctccaaagaagaggaaaggaagaagctccaagaagaaattattaacagtgtgaaagggtgtggcaattgttcctgctaaggcacacaagacacatttccttgtctttttgttgtcttgtttggttttggagtacacatttgcactgaggcaaaactagttcataaaaatgcaaatcatacattcccattcctttaatcctattaaataagatatatttacaggagggtttgatttttatgtctttcaacatcttttgaatttgacatctataattgtccccaaattataatcttgttcctgccccgattatgctcagtgcattttttttttaccatttgattttgccctgtaactgtttttgaagtctgatactcatttgctatcaataaccagaagaaatagagtgatttctaaatggatgtagttttttaaaacttcctttatactgacaagttgtagggacacagttttttttctcttaaaattaaataggattaaaaagagaggtggttctattgagggaaataatagacagatgaagtcgaaagagaagcttcctgggatgattcagtcgtgggaaatgccaagaaaagggcatttaattataatgcactaattttacatcacaatattacataattatacaaaaggataatgtgtataaatttttaaaatatcagtgttgtggcaatgtttttaatgtattaggaggaataatttgagctctgaaaatagagcaagataatgggggttcatttcttgcatctctttattttaaggattaaaaaatttattttcttccttaggaaattcccagtttacaaaaattaacttgaagccaaggtaatttggatcataaaactgggccagatgccttactgatcgtccttaacatagaactgtcttgttgtgcagatgggctgtttgtaattacagtttgtgttaattatagaa

SEQ ID NO: 1907 - DNA, 2111 bp, Cricetulus griseus
accagcaattactggaagatctcaggaaacaagctcgacagctggaaaatgaacttgacctgaaactagtttccttcagtaaactgtgcacaagttacagtcacagcagcgcccgagatggaggacggcgataggtatagttctgacacaacacccctattaaatggatcaagtcaagacagaatgtttgagacaatggcaattgaaattgaacagcttttggcaaaggcacacagggtaaagtgagtaaaatggacagagtatacaacagtgcaaggggtcccctcattgaatgcagcggagtaaacaacaggagaactgaactgtttttgaaagaacatgaccaccttcgaaactctgatcgtctgatagaagaaacaataagtaattgctataggcaacaaaagaaaataatgacttcacagagaggaatgctcaagtcaattcacagcaaaatgaacactctggccaaccgttttcctgctgtaaacagcctgatacaaaggatcaaccttaggaagcgacgggactcgctcatccttggaggggtcatcggcatctgtaccattctgttgctgctgtatgcgttccactgaaaggacagccccaggactctgcccaccgccttcatgccctgatctggagtggggaaatgaggaaggagaaaactgccctggctatgagcctggtagccagatgaattctaaactgcacccatgactcggacctggtcagactgagctgaagccacagttttcctgtgctatcttttctaatacacattactctgttttttaattttaaaaacaacaaaaggttttcagtcgcttgtgtctccctaggaggtaagcaagcagaggccgagaacctgggcttcagtgactggtgaagcctgatgaccagcaggcctcatagctggactcctcacagtaccaggctctccacatccaaagatggctttgctttcagccacgagattgggtgtgaataaaaataattcttgtccttttatttaacacttgtgatgagaagtcagctgtcctttgctgatactcggtgatctagattctcctctgtgtccctaattcttggtagtcaagaaaattccaattttgcgacaattttgtcagatgctgatagaccagcttcatcacatgtgaggttgtctgaaatggaaagctctgtagaaagggtgtgtcttttctgtttcagttgtgagcactaggtcagctgtgcggctggaaacgtcaagaatgcagatcttgcgagctcttcaccacctcatggtgtggggatggtgccgctgggcggacttgatacacttaatgctcatggatagactgacatcggtctgggactgactgagaggtttgtcttctggtgttgaagtgttagtacattctgggtatgaaaggcattcgatatatttttcttaattatggggtttattttctaaatatgggttaatcagcttgttgactgggcatgcccttaaaaggaatttaaatttcccactgtggaccttaaagaatcagggaattttgtttgttaaattctctttgggagaacagaacttctcttccctgaccactttattatctttgatttttttctaaagggcctcgattggtggttgtgcctcagctagactttatgggactttggttgttatatagtgggcatatataaagcctgaagtatactaaataaagttatttatttaaatatattgccagtcttttctactggtttgattatttggtttgtccactaaagctggtagggagaataagctaggacagggcctgatctgatctaaaattgtaccaaaatacttgcatcacaccctagtagctcttagagatgggagcagaatcagttctgatcacactattcctgatggaagactatattcctcatgaaaaatgccaatactgattttttttaatctattcttttccaaatgcactttctaattttttgcttttaaaatagcttcttggaaccaatattattgtatttgtacttaatttttgttctcatctaaatgtgcattttctgactgtataagaaaaactttgttatataattaataaattaattatactaaa

SEQ ID NO: 1908 - DNA, 2111 bp, Cricetulus griseus
gatgcccggcgcatcaaggagctcatcagcgagggcgcagatgtcaatgtcaaggactttgcaggctggactgcactgcatgaggcgtgtaaccggggctattatgacattgccaagcagctgttagccgctggtgcagaagtgaacactaagggcctggatgatgacacgcccttgcatgatgccgccaacaacggacactacaaggtggaggcaggaagaccaaaaaaggtacagacacagagtccaaaccttcagctgaagtccccaaggcccctaacggtggaagaagttcctcagcgcatgaccaggaaccgtgcccagatgctggcaagccagagcaagcagaacataaccccaacagagaaggatccaatgcctgccccaacctctagagccaagggccgtgcctctgaggaggaagatgcccaggcccagcacccccgcaagcgccgcttccaacgttctagtcagcagctgcagcagcagctgaacacatccacacaacagactcgggaggtcatccagcagacgctggccgccattgtggatgccataaagcttgatgccattgagccctaccacagcgacaggtccaacccatactttgagtaccttcagatcagaaagaagatagaagagaaacgcaagatcctctgctgcatcactccgcaggcaccccagtgctatgctgagtatgtcacctacacggggtcctacctcttggatggcaagccgctcagcaagctgcacatccctgtgatcgcaccccctccctccctggcagagcctctgaaggaactgttcaagcagcaagaggctgtgcggggtaagctgcgcctgcagcacagcatagaaagggagaagctgattgtgtcctgtgagcaagagatccttcgagttcactgccgggcagccaggaccattgccaaccaggcagtaccattcagtgcatgcacaatgctgctggactcggaggtctataacatgcctctggaaagccagggtgatgaaaacaagtctgtgcgagatcgcttcaatgcccgacagttcatctcttggctgcaggatgtagatgacaagtatgaccgtatgaagacatgtttgctgatgcggcagcagcatgaggctgcagccctcaatgctgtgcaaagaatggagtggcagctgaaggcccaggagctggaccccgctgggcacaagtccctgtgtgtaaatgaggtgccatccttctacgtgcccatggttgatgtcaatgacgacttcgtactcttgccagcatgacattcagaggaaagtcacaggacacaaacaagggccacataggtcgcccagtgctgccgatgagtcccggcagcggaggagggagcaccgcatccaacaagtgggaggagcccagagactgcacctggccactcgtctcctgcttcagatgccagtgaggcagaatgcatctctttttaccagttgctgtggggagcaggaggcccagacactgcagagctttgccaaggagacaaggagaccatggccacagacaaggtagctctgtctcagccatgccctctgggttttcttccagccaacagggcacttgaggagtcgcagaacagagtgtttttaattcctcgttccattctgatcaactaatggaaaatagactaaggcgtccacctcgcataagcagtgaccttcaggtcaaagaggcaggaaagtgctgtcccgctatggtccccgggacaggcttggacactggtgccggcaagggtccggctgctgcctgcctggacacagggacacagccaggactctccaatagtgtttttaatggagtcaaatccacgtggtttgtatatttttcctttaatcttgggcattttgtttctctttctgagaacgtaacttgaaacactacagagccaataatcctatagagtgtatccgcaaacctgtacagttttatatacattcacaatgtacttttgctgccttctagataatttattttgcaacacattactgcacagttgtaaataacttatgtactgtaacatcactttcagttatgtgtaaagaaataaataaattaattaaaatgctctttgtacatg

SEQ ID NO: 1909 - DNA, 2110 bp, Cricetulus griseus
ctccgagctacaggagccgaggctctaggaaagctccttcgacagagcaagtccattcagagcctcaccctagagtggaacaacctaggcatgtgggaagatgcctttgcctctttctgtgggggcctagcagccaatagcaccctgcgccagctggacctccgaaacaaccaaatcagtcacaagggagccgaggaactggccctggccctgaagggcaacaccaccctccggcacctggacctgcgctggaataacattggcctcctggggggccgggccctggtgaactgtctccccagcaacagaaccctgaggaggctggacctggctgggaacaacatccctggcgacatcctgagagctgtggaacaagccatggaccacaaccaggaccggctcactgcgttttgggagaaccaagcccgcaccaacatccttagcaaggaggttcagcacctccaggaagagaagtccaagcagtttctggatttgatggagaccattgataagcaacgagaagaaatagccagaaacggcagggcgtcagcagcacgagttgggcagcttcaggaagccctcaacgagagacagtccatcatcaatgccctcaaagccaagctgcagatgacagaggctgctctggctctgtcagaacagaaagcccaggacctaggggaactgctgaccacagcggaacaggaacggcagagcctgtcacagagacaggagaaggagcgcaagctggagcagcaggaagctgcagatcgggaatctaagctcctcagagacctgtctgccgccaatgagaagaacctgctgcttagaagccaggtggaagagttggaacggaaggtaaagtctcagcaggagcagctgtttctgaccaggcaggagctgactaacacatctgccgagttgaagatccgtgctattcaggctgaggagcgcttggatgtagagaagaggagagccaaacagaatatggaagacttaggaaaagctgcactccaaggaggtggatcacatgacccgtcacctggaggagagtgagagagccatgcaggagagaatacagagactagaggctctgcggctgtccttggaagaggagctgagccgcatgaaggcagcactgctcagtgagcgaggccaagctgaggaggagctcatcaaagccaggaaccaggcccgcttggaggagcaacaccgccttgctcatctagaagagaagattcggctgttggcacaggcaagggatgaggctcagggtacttgcctgcagcaaaagcagatggtggctgagtcccaggcccgggccagccagctgaacctgcagatggagggccagcagaggcgcctggaagagctgcaacaggagctgagcaacaaggaccaagaaaaagtggctgaggtgaccagggtgagagttgagctgcaggaacagatgggccgtatgcaggctgacctggtggcccaggaggtgctgaaggagaaggtggcagccctggagcggcagctgaaagtgatcgggaatgaacaccgggaggcgctgctggacagagagagtgagaacgcttctctccgagaaaagctaagactcaaagaagcagagatctcacgcatccgggatgaagaggcccagagggcaagcttcctgcaaaatgctgtcctggcttacgttcaggggtctcctctgagagccttgagtccgcctaaatgaatggacgcagggaggcccggagctccctgcgagtgtagaaatgccatatctcattttcaaaggcaggcctggggttcaaaagcgtcagctgcagtgtcagggtggggttctgccaacattggtgctcaccggcacacctgcccatccaagggtagttcacccgaaggtcaccactaatataggcgagacgaagtgcacagaaacgctgtcagaagacccaatcccggaacaacaaaccagaacagtactgctgtaggaggaaacagatgcccagtggcagggtggaaatacaggacttttatacttggtgataaaaaaaaaaaaaaaaaaaaaaaaaaaaaaaaaaaaaaaaaaaaaaaaaaaaaaaaaaaaaaaaaaaaaaaaaaa

SEQ ID NO: 1910 - DNA, 2110 bp, Cricetulus griseus
tcggcggcccagctgtccattgaccctgaaggtgcaggagttaacccgaccctcaaggtgccctatgagacactgaataaacgcttccgagctgcccagaaaacattgatcgggaaaccagccacgtcaccatggtggtagctgagcttgagaagaccttgagtagttgcccagctgtcgactctgtggtcagcctactggatggtgtggtggagaagctgagtgtcctcaagaggaaggcagtggaatccatccaggctgaggatgagagtgccaaactctgcaaacgtaggatcgagcacctcaaggagcacagcagtgaccagccagcagcagccagcatgtggaaacggaagcgcatggaccgcatgatggtagaacatctgctgcgctgtggctactacaacacagctgtgaagttggctcgccagagcggcattgaggaccttgtgaatatcgagatgttcctgacagccaaagaagtggaggagtctttggagaggcgtgagacagccacctgccttgcatggtgccatgataacaagtcccgactccggaagatgaagagctgcctggagttcagcctcaggattcaagagttcattgaacttgtccggcagaacaaacgtctggatgctgtgcgacatgcaagaaagcacttcagtcaggctgaagggagccagctagatgaggtccgccaggtcatgggcatgttggccttcccgccagatacacacatctccccatacaaggaccttctggacccagcccggtggcgaatgctgatccagcagttccgatatgacaactaccgactacaccagctaggaaacagctctgtcttcaccctcactctacaggctgggctctcggcaataaagacaccgcagtgctacaaagaggatggcagctccaagagccctgactgccctgtgtgcagccgctctctgaacaaactggcacagcccctgcccatggctcactgtgccaactcccgcctggtctgcaagatctctggtgatgtgatgaatgagaacaacccacccatgatgctgcctaatggctacgtctatggctacaattctctgctttctatccgtcaagatgataaagttgtttgcccaagaaccaaagaagtcttccacttctctcaagctgagaaagtatatatcatgtaggccctgcgttgccatgtgcacgcctccggccagaggctgtggtgggtgggagccataccctcctaccctgaccccagaccccagaccccagcctgtcttggcatttgtttcttgcgaccaaagatcagtgagcaacggcaaatactcttagaaaaagaggaagtgagatttaataagtctgtgcttgacaacagcgtttgattggtaggattttgtaacataagtcgactgatgcctctgcaaattcttgcacctctcaaaggaaacttctctacagtgtgacctgaacagcaaggaaatccagagcatctcagaagtaggaattggttcatcagttatttccctgtgtttctccatttccttccttttgctagtgatgggactcaggggagcttgaggagcaggctggtcctttgccaactcctgttggccacagcctgggctaagtgttgccacaccaggttggctgcagtgacttgtgacgtggtgccgaggcctttcctgacttcactgtctagctgctgccaaagcaccatgcacctcacacgcctgggctgctacttgaggaggctctgcccacatggccagggtgtctggggctgtgtctgtgcacaggttcaatatttcaccttccagcaccgccttatctcctgctttgagaatgtattcacgggaaagccactggactgagtttctgcagaggccttgccaggtggttccgtagtcctagagtgtaaatgcttttcattacagaaaactgatagttgagctaaaataagtactgacgggttttcagaacagatgaaccattgtaattcacatacaaccatatgtagaggtttgtatctagcgcttatttttgcatgttgatgttgattagctaatgaactgtaaatgtaaagcgtgttaataaaatagctttctatttctca

SEQ ID NO: 1911 - DNA, 2109 bp, Cricetulus griseus
tgtggccatcccgcagcgccagcccaggtgccatggctgctatgtacctcccgagtctgcgggttagctggcatgggttgaggccctcgtgctggtcaccacgccgtagcatccaaaccctgcgtgtgctcagtggagatctgggccagcttccagctggagttcgggactttgtggagcgcagtgcccgtctgtgccaaccagagggcatccacatttgtgacgggactgagactgagaacactgccacactggccctgctagaaaagcagggtcttatccggaagctccccaagtataagaactgctggctggctcgcacagaccccaaggatgtggcacgggtagaaagcaagacggtgattgtaactccttcacagcgggacacagtgcccctcctggctggtggggcccgtgggcagctgggcaactggatgtccccagatgaattccagcgagctgtggacgagagattcccaggatgcatgcagggccgcaccatgtatgtgcttccattcagcatgggtcctgtgggctccccactgtcccgaattggagtgcagctcactgactcggcctatgtggtggcaagcatgcgtattatgacccgcctaggaacacctgtacttcaggccctgggagacggtgacttcatcaagtgtctgcattcggtgggccagcccctgactgggcatggggatcctgtgagccagtggccatgcaatccggaaaaaaccctgattggccacgtgccagaccagcgggagatcgtctccttcggcagcggctatggtggtaactctttgctgggcaagaagtgctttgccctgcgcatcgcctctcgcctggccagggatgagggctggctggcagagcacatgctgattttggggatcaccaaccctgcagggaaaaagcgttatgtggcagctgctttccccagtgcctgtggcaaaaccaatctggctatgatgaagcctgcattgccaggctggaaagtagagtgtgtgggggatgacatcgcctggatgaggtttgacagtgaaggtcaactccgggccatcaaccctgagaatggcttctttggggtggcccctggcacctctgctaccaccaatcccaatgccatggccacaatccagagcaacactcttttcaccaatgtggccgaaaccagtgatggtggtgtgtactgggaaggcattgaccagcctcttccacctggtgtcactgtaacctcctggctcgggaagccctggaaacctggtgacaatgaaccctgtgcacatccaaattcacggttttgtgtcccggctcgccagtgtcccatcatggacccagcctgggaagcaccagagggtgtccctattgatgccatcatctttggaggccgcagacccaaaggagtacctctggtgtatgaggccttcaactggcgtcatggggtgtttgtgggtagctccatgcgctctgagtccactgccgctgctgaacacaaaggaaagatcattatgcacgatccctttgccatgcggcccttttttggctataactttggacactacctccaacactggctgagcatggagggacacaaaggagcccggctgcctcgtatcttccacgtcaactggttccggcgagataaagcaggccgcttcctgtggccaggttttggtgagaatgctcgagtgctagactggatctgccgacgattagaaggagaagacagtgcccaagagactcccattgggctagtaccaaaggaaggagccctggatctcagtggcctccaagcagtagacaccattcagctgttctccatccccaaagacttctgggaacaggaggttcgagatattaggagctacctgacagagcaagtcaaccaggatctgcccaaggaggtgctggctgagctcgaggctctggaggggcgtgtgcgaagaatgtgacctgaggctctaggttggcaagaacacggcacccccatctgggtagcgaactcccaggctcatagaaaagatgaacaatttgatattaaaatgtgcaagtgttgggaagccaggccacagaccttttcccatgctgtctgataagagattcaca

SEQ ID NO: 1912 - DNA, 2109 bp, Cricetulus griseus
ctgatgccgaggtctctgaagcagagtctcatgcttcaggggtttcttctgtgcttgaggtccaggagcccattataagaataactaggaagaggaaggtcgtaattgcacccaccccaaagtccagtgttaggaaaaggcagaaaatagcccctcaacatgagtctctcgaggaagaagttgtttctgaagcagagtctcatgcttcgggggtttcaatggttgtaccttccgcaaaaagaagcaaaagaagtaaggctaaatctcagagagattcaagccaagaatcacaggcagaagctatatctgatggtgagtcctcgtgctcaggcatttcatcatttgagatttcacctaggagaacaaccaggaatatgcagaaggaattacagtcccaagctgagaagaaagataccaagcttgtaccaggaaataaaaagcaaataatgggtacatctgtgaattcagagaactcagatactacagacctgtcagttaccagtgagaccacattctcagataaataggccaaatttttctaataatgaaacttataatgactttgatgattccatccacagaaattcaggaaaaaaacaaacaacacaaaaccaccaatgtttacatatacaaaaagaaaaagaagccagtgttgagtctcttacagaaatcaggaaggagaactgtaacaacctggatgaagaggacaccaaaatgacagaagaagaagaaattaatgagaaacgttccccattgaatctttctgaagttcaagacaccagccttcagcagtcagtttctcaaaatcattcaagcatcctaaatagtgaagccatgtcgaagccttcaagtccaaatcatggggctctaataaaatcattagagtacaagtttgcagttgtgaagatagaaaggttgaatgaagaaagagcgggcagccttaaaaggagtgacttgacccaactcagtgatcgtggttcagtgaaaacaacagccgccaaagtgatgtgggtcttgaatgtgataccaaagcatgcaagtctgaactcagtgtgtctcaggatatggatagttctgttttattatttcttagcagtgatgaaagccagcagtctgaaaacagtgagaatgaaaaagacactgtgtgttctgttgaaaacagtggccaggaggagtcagcacgtggagacttggaagacacagcgtgtggtggtgcgctgtttgtaattgacagaactcctggactgagtgccgataaaaatttctacctggaagacaaggcccccagtgaggttgctattgaggaagaagaaaaggaggaggaagatgaaaacagtgaagaagaatcatcagacagtgatgaaaataaagatgagtccagtgatgaggaagacttactgagtaacaccaagtcgaagcttctgaagttgacaagtagcagcatagatcctggactaaatatcaagcagttgggtggtttgtatattaatttcaatgtagacaaaccgaagcctcacaagaaaaccctaacacagatcaaggagaaaaagaaaaacgagcttctgcagaaagctgtcattacacctgattttgaaaagaactattgtatcccaccatatagtgaatcgaagcatcaacttcagaaacagcgcaggaaagagcgccaaaaaacagctggtaatggttggtttggcatgaaagctccagaactgacagatgaactgaaaaatgatctcaaagcattgaagatgagagcaagcatggacccaaaaaggttttacaagaaaaatgacagagatggtttccctaagtacttccaggttggaaccatcgtagataacccagctgacttctaccattcaagagttcccaagaagcaaaggaagaagactattgtggaagagctgctggctgattctgagttcaggagatttaaccgaaggaagtattcggaaatcatggctgaaaaagcagcaaatgcagcaggaaagaagtttcggaaaaagaagaaatttcgaaattaaaatccacaaagcaaaccagagcattttatagatccctttatttgctgaaggtcatcacataatttatataaataatatataaata

SEQ ID NO: 1913 - DNA, 2108 bp, Cricetulus griseus
cccgagcccgtggtgtttgtacccattctaccgggtgtgagaagaaaaggaaggagcggttccgagtagcggttgccaaaatgttccggtgtggaggcctggcgggtgctttcaagcagaaactggtgcccttggtgcggacagtgtgcgtccagaggtcgagacagaagaaccggcttccaggcaacttgttccagcgatggcgtgttcctctagaactccagatggcaagacaaatggctagctctggttcatcggggggcaaaatcgataattctgtgttagtccttattgtgggcttatcaacaataggagctggtgcatatgcctacaagactataaaagaagaccaaaaaagatataatgaaaggatatcagggttagggctgacaccagaagagaaacagagaagggccattgcatctgctgcagagggggagtcagctcctcaagtcagaataccaagtcatgttcctttcctgctgattggtggcggtactgctgcttttgctgcagcccgatccatccgggctcgagatcctggggccagggtcctgattgtatctgaagaccctgagctgccatacatgcgacctcctctttcaaaagaattgtggttttcagatgatccaaatgtcacaaagacactgcagttcagacagtggaatggaaaagagagaagcatatatttccagccaccttctttctatgtctctgctcaggacttgcctcatattgagaatggtggtgtggctgtcctcactgggaagaaggtagtacagttggatgtaagagacaacatggtgaaacttaatgatggctctaagataacttttgaaaaatgcttgattgcaacaggaggcactccaagaagtctgtctgccattgatagggctggagcagaggtgaagagcagaacaacacttttcagaaagattggagactttagagccttggagaagatctcacgggaagtcaagtcaattacagttatcggtgggggcttccttggcagtgaactggcctgtgctcttggcagaaaatctcaagcctcaggcattgaagtgattcagctcttccctgagaaaggaaatatggggaagatccttcctgaatacctcagcaactggaccatggaaaaagtcaagcaagagggagtgaaagtgatgcccaatgcaattgtgcaatcagttggagtcagtgggggcaagttactcattaagctgaaagatggacggaaggtagaaactgaccacatagtgacagctgtgggcctagagcccaatgttgagttggccaagactggtggactggaaatagactcagattttggtggcttccgggtcaatgcagaactacaagcacgttctaacatctgggtggcaggagatgctgcatgcttctatgatataaagttgggtcgaaggcgagtagagcatcatgaccatgctgttgtgagtggaagactggctggagaaaatatgactggagctgctaagccgtactggcatcagtcgatgttctggagtgatttgggtcctgatgttggctatgaagctattggtcttgtggacagtagtttgcccacagttggtgtttttgcaaaagcaacagcacaagacaaccccaagtctgccacagagcaatcagggaccggtatccgctcggagagcgagacagaatcagaagcctctgaaatcacaattcctcccagtacccctacagtcccacaggctcctgtggaaggggaggactatggcaaaggtgtcatcttctacctcagggacaaagtagtcgtggggattgtgctatggaacgtctttaaccgaatgccaatcgcaaggaagatcattaaggacggtgagcagcatgaagatctcaatgaagtagccaaactcttcaacattcacgaagattgatgccccatcatggaatacacacgcacttttccatccttgacgggttgggtgggaaaaaacacattttttattcagcatactttctctttatgtaggagcaagaatggaacaagcctctgtgaatattttcatctatatagttgcatatcacaaattaaaatctgattcttttaaaaaaaaaaaaaaaaa

SEQ ID NO: 1914 - DNA, 2108 bp, Cricetulus griseus
cagtcagtgggctcctatggaccctttggtcaggatgccagcatacagtcagttcagtccaagcacattggtcgggcagcagtttggtgccgttggtgttgctgggagctcattgacatcctttggaacagaagcatcgaatagcagtaccttatccccagagcagcgcagttggttctgccttcacacaggacacaagatctgtaaaaccacagctagcccaaggtcgatcaagccctcagttagtaccctttgagaaaaagtccaaccatggaacaagcagtacagaccgcctcggcccacttacctgctccagcacctgttgggagaaggagccctgtaccagccaggcctttgccatccaccagccagaaagcaatagacaaccaagagcacaggcgagctgaagttcataaagtcccaaggccagaaaatgagcagctcagaaatgataccaagaggcaaatagttccaggtgttccttctgctccaaggagaggacgtgggggtcatcgaggtggcaggggacgatttggtatccgtcgagatggtccaatgaaatttgagaaagactttgactttgaaagtgcaaatgcacaatttaacaaggaagaaatcgacagagagtttcataataaacttaaattaaaagaagacaaacttgaaaaacaagagaaacctgtaaatggtgaagataaaggggactccggagttgacactcagaacagtgaagggaacgctgatgaggaagatcctcttggccccaactgctattacgacaaaactaagtccttcttcgacaatatttcttgtgatgataatagagaaaggagacctacttgggctgaagaaagaaggttaaatgctgaaacgtttggaataccccttcgtcccaatcgtggccgtgggggctaccgaggcagaggaagccttggcttccgaggaggcagaggacgtggcagtggccgaggagggactttcactgccccacgaggatttcgtggtggatttagaggtggtcgtgggggcagggagtttgcagattttgaatataggaaaaccacggcttttggaccctaaaaggtctggattggtcatactgctttctgaaagaaagacaacaaagttgctgcatagtctacaaacaagtctttgaaaataggtgactcctagctcttcatggtcctggaaagtggtttcagtctttgtgaagaatgaagaagtgaagttgctgtctgtctgtcaccagcacttggttgtgtctgtctgtgtttctgcttcatttcaaagctgcactgcagttgctttggggcaggaaggcttgtcttaaaacatgagcataggttatgtggagtagcagaaggctgtgatccttgctagagttgaaccacagtgagctgaatggaaccgcttaagttttttttcatcactgaaaggatttttcttgtcactaattaattgtatttggtgattacttccagctgcctgcagataggccgtgatactgtgtttgagccacgtgcgtgtgcgtgtgtgtgtgtgtgtgtgtgtctttttcttttttggagagcctataatatgaggtagcttattttgacacttaattagggtgctggatggtagagaattttgtcagtcaactatgtacacacaggtaaatactgtttcttaggcaaaggtaacttttttatatagttgtaaaattccattatattccattgccaaagaaacattaagaactttgtatagctgtataaaaagcaactaattttttaaagaataaacgtttaaagtcagcaaacatacgtgtccttgcagaagtcagtgtgctgaggagcagggctacgggtgggtcctttccctttgctttccagggttaaggtttttgatttcttttttaatgtttggaacacaaatgaagatttgataactttattccattatctaaaaagaataaattattcatgcatagtgtatggacttcattttgtagcagatcacaggatttgtccaaataacagatattttcagtgtatgaatgtaaatgatcacagatgagaatgtacctcgctgtattttcagatgagtaacctttttaagacattaaa

SEQ ID NO: 1915 - DNA, 2108 bp, Cricetulus griseus
tggggtgtttatctataccacaagcaaccacatcaaatatgccgtcaccactggggaccatgggatcatccgaactctggatttgcccatctatgtcacaagagtgaagggcaacaatgtatattgcctagacagggaatgtcgtcctcgagtactcaccattgaagttcaaattcaagttggccctcatcaacagaaagtatgatgaggtactgcacatggtgaggaacgccaaactagtgggccagtcaatcattgcttatctccagaagaagggttagtcctgaagtggccctgcattttgtaaaggatgagaaaactcgcttcagcctagctctggaggtgcggaaacattgagattgctctagaagcagccaaagccctggatgacaagaactgctgggagaagctgggagaagtggctctgctacagggtaatcaccagattgtagaaatgtgctatcagcgaaccaaaaactttgacaagctttccttcttgtaccttattactggcaacctagagaaacttcgcaagatgatgaagattgctgagatccgaaaggacatgagtggccattatcagaacgccctttacctgggtgatgtgtcagagagagtacgaatccttaagaactgtggacagaaatccctggcctatctcacagctgctacacatggcttagatgaagaagctgagagtctaaaggaaacatttgaccctgagaaggagacaatcccggacatcgatcctaatgccaagcttctccagccgcctgcacctatcatgccactggataccaattggcccttattgactgtgtccaaagggttctttgagggctccattgccagcaaggggaagggaggagcgttggctgctgacattgacattgacactgttggtactgaaggctggggagaggatgcggaactgcagttagatgaagatgggtttgtggaggcttcagaaggtttgggagaggatgctcttggcaagggacaagaagaaggaggtggctgggatgtagaagaagatctggagctcccacctgagctggatatacctgctggggttgccggtggtgctgaagatggcttctttgtgcccccaaccaagggaacaagcccaactcaaatctggtgcaataactctcagcttccagttgatcacatcctggcaggttcttttgaaacagccatgcggcttcttcatgaccaggtgggagtaatccagtttggcccctataagcaactgttcctacagacatatgcccgaggccgcaccacctatcaagcactgccctgcttgccatccatgtatagttaccctaatcgaaactggaaggaggcagggctaaagaatggtgtgccagctgtgggcctaaagcttaatgacctgatccaacgattacagctgtgctaccagctcaccacagttggcaagtttgaagaagctgtggaaaagttccgttccattttgctcagtgtgcctcttcttgttgtggacaataagcaggagattgcagaggcccagcagctcatcaccatctgccgtgaatacattgtgggtttgtgcatggagatagaaaggaagaagctgcctaaggagagcctagagcagcagaagcgcatctgtgagatggcagcctatttcacacactcaaacctgcagcctgtgcatatgatcctggtgttgcggacagccctcaaccttttcttcaagctcaagaatttcaaaacagctgccacatttgcccggcgcttgctagaacttgggccaaagcctgaagtggcccaacagactaggaagatcctgtctgcctgtgagaagaaccccacagacgcctgccagctcagttacgacatgcacaaccccttcgacatttgcgctgcatcttaccggcccatctaccgtggaaagcccgtggagaagtgtccactcagtggggcctgctatgcccctgagttcaaggggcaaatctgcagagtcactacggtgacagagattggcaaagatgtgattggtctgaggatcagtcctcttcagttccgctaagtctccttccttcaagttcgtggattaatcacatcctgtccttcagagtctc

SEQ ID NO: 1916 - DNA, 2108 bp, Cricetulus griseus
gaaggtgttagtaaaatggcttttcgtcatttaattgagttcacgtacacagcaaaaactaatgatacaaggagaagaagaagccaatgatgtgtggaaagcagcagagtttctacagatgctggaagctattaaagcccttgaagtccggaacaaagaaaactcagctccattagaggaaataccacaggaaaaatgaggacaaaaaaaagaaagattgcagaaacttaccaatgttatcactgaatcattgccatctgcagagtcagagcctgtgaattgaggtggagattgctgaaggcacaacctcactgcatgccaaactggagtgggggcaaaaaagggaaggaagaagctttacgaatgccaggtctgtaatagtgtgtttaacagctgggaccagttcaaagatcacttggtaatacacactggagataaacccaaccattgcactctgtgtgacttgtggtttatgcaaggaaatgaattaaggaggcatcttagtgatgctcacaatatttcagagcgtatagtaactgaagaggtcctttcagtagaaacacgtgtgcagactgaaccagtgacatcgatgactatcatagaacaagttggaaaggtgcatgtgttaccactgcttcaggtccaggtggattcagcacaagtcacagtggaacaagtccatccagatctgctccaggatggccaagtgcatgactcacctatgagtgagcttccagagcaggtccaagtgagttatctggaagtgggccgcattcagactgaagagggtactgaagtgcatgtggaagaactgcatgttgaacgggtaaatcagatgccagttgaagtacaaactgagcttctagaagctgacttggatcacatgacccccgaaatcatgagccaagaggagagtgagcctagccatgcagatgctgctgtggaagatcacgaagatgcggaggggttagagactaaaccaagagaatattcccaagctggaaaagcagaggatgacagaacatctgtgccagttttagaatgaaataacaattgtatttttaaatttacatttggggtaagctgatgggcagtgtgaccttaagctatcagataagtggaccaaagttaaactatttcctgttgtgctgagctgtttctatggaaacagactgatgtccttccttccagttaatgccacagagtgggaatatctcttataatgagtgggagctttgagaagtatatttctggtaacttaaatgaattatattcttattatagttgggtacgaatgcatctattttcattgtggtaagggtctccgtattctcttccctaggtcatgtccttccttaaattctttgcatattataaaaattatacataaaaccattagaatacatacatttgtattctaatgcatgctaggaaattgagtatgtaggcaacacaaagctgcatgagggaagtgcattgttactgtgcagttaaatgtagggtcgggctggctttattttgaacaacattcttgtctatccagtggttacaaatgctgtctccgaaatagaaacggtggtggcagaatgttaaagaaaagggaaaaaaaaaaaacaaaaaaaaaaaaaaaaaaccccttaagtgccttttcaaagtccaacagaacttcagtaaaacatgctctggtacttggtattttttgcttataatgacaactatcaattctttttccttttaagtttacattgaaatggtttcatttaacggcagctgaagggccatttttcaattgcaaaaattcatttgcatctgtggtaaactttatttgatgagaagttgcactagtattttaccaccggatgaaaaaaatataagatgagcatcatttttaaattaatgtatttaaaataaagtacagaggaaaagtatgtatataatatatcaggctttgttttgaatggaatcttttccccccaatccttaatgtaaagattttgtgctataacttttaaagccatacaaataagagtgctaaactgtggacttaaaagtaggtgtgtaaatatttttaatcagtattacttgggaaataaaaatatagcaaccac

SEQ ID NO: 1917 - DNA, 2108 bp, Cricetulus griseus
catcctaaagtatgtgaaaaactgaaatctctaatggtggaatggtcagaagaattccagaaggacccccaatgcagtctgatatctgcaactattaaatctatgaaagaagaaggagtgacttttccttcagcaggttcccagactgtctcggctgctgccaaaaatggtacatcattgaacaaaaacaaagaagatgaggacatagccaaagctattgaattatcattgcaagagcagaagcagcagcacacagagacaaagcctttgtatccacctgcagacattcagttaaataataaggctgctcggagagtcagagctttatacgactttgaagctgttgaggacaacgaactcacctttaaacatgggacaaatttaatgtaaatgatgatgaagtggaggaaattaagaaatcagagcctgagcctgtttatatagatgaggataaaatggatagagccctgcaggttctccagagcatagatccgaaggattcagaacccgattcccaagatctcttggacttagaagatatttgccaacagatgggtccaatgatagatgaaaaacttgaagagattgataggcgacattcagaactgtctgagttgaatgtgaaggtcttggaagtcactggacctgtataacaaattggtgaatgaagcgcctgtctattctagtctattcaaagcttcatccagcccattactcatccccgtcagctggggttccagtacagaatatgcagttccatcacatagtggaaactacctgggtcataacgttcaccaattatctgttgcccagagctatggcctaggacctgatcctatgggctctttgagatctctgccgccaaatatgaactcctcagtaacaacacacactgttcaaactccgtatttaagcactacacaggacacggtttccaacccttcctacatgaaccagagctctcatcttcagtcagctgctggtccagctgcttacacacagcccatggggatgtcagcgggtgtgtcttcttaccagaacacagcgtccagtttgccacagctggctggctttccagtggcagttcctgcacctccagctgcacagccaccaagttaccaccagcagcctctcctttagacatgccagggctgttggaagtccttgtaggcctgtcactcaaccccgggggttctgatctgaaatattcaaactcccttctcaatcaaaagaccatgaataacaccctattattttaaaagatgaacatcttttagtgtaagccttaagattgccagtgtattccttttggctccttaaattacagttgtgtttgcagtactgtcagttttgctcctagtgttatgctgagtaataattagcatataattgtgtacagaagcaagagcaatttggaaagaacaaaagtattttctgttattaacagtgaaagccatgtaaatgcaaatgtggtgaagcagttagccagtcctgtgatagcagtgggcctaggaatgcctcacacaatgttagccttccccgaggaaaggcatagccagtaaagttcagctgttttggaataataagacatgcaacatgatctgtatataaatagtatataatggtgtctgtgaagtttaatatatgcagaagtttctcctcagtgattttattttttccattcataaatttgtgttacagagttattgatagtataaaatgatattaaatctgtattgatctggtttcagtattaatatgaaatgtaaagatatatttttttccttcccatgatcctatgaactgtacttattttaagatgtttgtagttatttattttctgccaaaggcatagtctaccttcagatttctacattgggttcatatttaatgtttttctaacaaagaattaatttcatttttcacatgaatcttgatatactagaaaaatccctaaaaaatatacaattttgtgctataaaacatcccctgaatgttaaaatgggatatgtttgaaaatgaacagtcagccaatgttcttttaatgggaaaattggttaacaaaattacctatacattatctttttacttagtcatctaacgatgta

SEQ ID NO: 1918 - DNA, 2107 bp, Cricetulus griseus
gtccctgttcttctacgtggtaacggatggccaggaagtcctactaccagaagttggagccaaaggacagttgaagttcattagtggacataccagtgaacttggtgacttccgccttacacttctgccaccaaccagtccaggagacactgtccctaagcatggcagctacaatgtcttctggtcctccaacccagggctgccactgctcacagacatggtaaagaatcatctaaacagctggtttcagcacggcccccaggggcctctcccgaacgctaccttggcttgcctggatctctgaagtgggaggagagaggccctagtgggcaaggacagttcttgatacagcaggtgacactgaaagttcctttctctgtggagttcatatttgagtctggcagtgcccaggcaggaagaacaaagcccttgggcagttggtaggcagccaactgacccaggccctggagaaccatgctgcagctttccaagagcgttttgagaggaccttccagttaaaggagaagggcctgagccctgaggagcaggctttgggtcaggttgcccttagtggcctccttggtgggattggctatttctatggacagggtttggtgttgccagacactggcgtggaagggtctgagcagaaagtagaccctgccctatttccacctgtccctcttttctctggagtaccttcccgatcattcttcccacgaggtttcctttgggatgaaggctttcaccagctagtggtccagcgatgggatccccacctcactcgagaggccctaggccactggctgggactgctcaatgctgatggatggattgggcgggagcagatactgggggatgaggcccgatcccgagtgcccccagaattcctagtgcaacgtgtagcccatgctaaccccccaaccctgctcttgccagtattacaaatgttagaaggtggtgaccctgatgacttggccttcctccgaaaggcttttccccgcctgcatgcttggttctcttggctccatcaaagtcaggcagggccagtgccactatcctaccgctggcggggcagggaccaggctttgcctaccctacttaatcccaaaacactgccctcgggcctggatgactaccccagggcatcacatccttctacatcagagcggcacctggaccttcgatgctgggtggcattgggtgcccgagtcctatcacagcttgcagaacagcttggggaggctgaagctgctgcagagttgggcccactggctgcctccctggaagaacccaggaatctagatgagctgcactgggctcctgaactgggagtctttgctgattttgggaaccacacaaaagcagtacagctcaagtccaggcctcctcaagggctggttagggtggtaggccggcctccacctcagttgcagtatgtggatgccctgggctatatctctctttttcccttcttgctacagctgctggaaccccagtcaccccgcttggggcccctgctaaatgttctagctgacagccgccatctctggagcccctttgggttacgctccctgtcagcctccagcctcttttacagacagcgtaattctgagcatgaccccccttactggcggggtgctgtgtggttgaatatcaactacctagctttgggggcactccaccactatgggcatgtggaaggtccctacaaggttcaggccaccaagctctatcatgaactccgtgccaatgtagtgagcaacgtatggcggcaataccagactacagggtttctgtgggaacagtacagtgaccaggatgggcggggcatgggctgccgccccttccacggatggacaagccttgtcttactgatcatggctgaagagtactgaagggactggaggaaagctaggccacttgtgtcacttggaatatgcagagacaaggtcttaggtttctggtcttgttccctcagatcttataagctcatctcaggtgtctccttgtcatcccgtacagctctggggtgaatgtgaactcaagagtctatttttctaaataaactggagaaagaaaaaaaaaaaacaaaaaaaaaaaaaaa

SEQ ID NO: 1919 - DNA, 2106 bp, Cricetulus griseus
agatagaagatgaaccgtggtacgaccaccgggacctccaacaagatctccagcttgctgctgaacttggaaagacgctactggatcggaacacagagttggaggattctcttcagcagatgtacacaaccaatcaggagcagttacaagaaattgagtatctgaccaaacaggtagagcttctacggcaaatgaatgagcagcatgcaaaagtttatgagcagttagatgtcacagcaagagaactggaagaaaccaaccagaagctagttgctgagagcaaagcctcacaacaaaaatcataagcctgacggaaacaattgaatgcctgcaaacaaacattgatcacctccaaagccaagtggaggagctgaagtcttccaaccaaggaagagggaggcagaagacatgtgaccgggagaaaccagcacccagcttctcctgtctgaaagagctgtatgacctccgccaacactttgtatatgaccacgtgtttgctgagaagatcacttccttgcaaagccaacaaagccctgatgaagaagaaaatgagcacctgaaaaagacagtgacaatgttgcaggcacagctgagcctagagaggaagaagcgagtgagcgtggaggcagagtataaggtggtactgaaggagaactgtgaactagagcagcagctgggtgccacagatgcctaccgagcccgagcactggagttggaggcagaggtggctgagatgcggcagatgctgcagtcagagcatccttttgtgaatggtgttgagaagctggtacccgactctctgtttgttcctttcaaggagcccagccagagcctgctggaagagatgttcctagctgctccagaagcacataaaaaaccactcaagcgcagcagcagtgagacgatgcttagcagcatgttagggggtgatatcgtgaagggccatgaagagacttgcatcaggagagctaaggctgtgaagcagaggggtatctcccttctgcatgaagtggacactcagtacagtgccctgaaagtgaagtatgaagaactactgaagaagtgccagcaggagcaggactcactgtcacacaaggctgtgcagacctctaagctgccggccagggacctgacaggactggtaacccagtctgaggctggagccagtggctgggaacccactcctgttaccccagagcccatcagttcccccaccactacacctccagaatacaaagcactatttaaggagatatttagttgcatcaagaaaacaaagcaggaaatagatgaacagagaacaaaatacccatctctctctccttactcttaatgatacctccagttatgatctgctggttttctctcatcccctcccattcagacacataagcgcaatttccaaagcttcatgttgctaaagatacttgtctcattgctttgcttaattggcaaaagcgggaagagagatggctgataatgttgactctagggtccctaggaagtctcatgatagactggcctctggttggtgcattgatttagcttctcaaactacttggaactccaatggtctgcttaattaactaaaatgcttttcagaaacacccattccaaagaatgttgagaaagctgaaatctaattggaaatatgacattaacaagctccttaaacccctaagttttgttgcatctgctaccagttgaacgatgactgacaggtaatcctaatatttccaaattcaaatgaatgccagttgaaatggcaagttttgtttgattaatgcctattggtatatgccgagcattcagctgttttactcaaatctatatgtagtattctgttttcaaatagaaactaaggagaaatgttaaggtgtgatctgcgctgaccacttggcagcacaagctgctctcagttcttaacattcctagacttgcagaagttcctgtctactgcattacacggtattgatgttctgactgtggaaacactcttctcacttgtacacttttaatttaaaaatatttaagagaaccatggttctgattgttgtatatatttttctaaaagccaaataaagctatctatgaatgtagaaaaaa

SEQ ID NO: 1920 - DNA, 2106 bp, Cricetulus griseus
tctgaagtcgtgcagcgtgcgcgacggtagtgacgcgttttaccgggagcatggcggataccggcttgcgccgcgtggttccaagcgacctttatcccctcgtgctcggctttctgcgtgataaccaactctcggaggtggccaacaagtttgcaaaagcgacaggcgccacgcagcaggatgccaatgcctcttccctgttggacatctatagcttctggctcaagtccaccaaagccccgaagcggaagttacagtcaaatggaccagtgaccaagaaggcaaagaaggagacttcctccagtgacagcagtgaggatagcagtgaggaagaggaaaagccccaggacttccggcaaagaaggctgctgtacctgctaagcgaaccagtttgcctcagcatactgggaaggcagtagccaaagcctcagagagcagcagtagtgaagaatccagtgatgaggaggaggaagaggacaagactcaagctctgaggatgaagcaccacagaccacgaagctaaagacagctgcagcagccaaagctcagcctaaagccgcagctaaaccaggtacaccagctagagcacaacctaaagtagccaatggcaaagcagccagcagcagcagcagcagcagcagcagcagtgatgactctgaggaggaggaggagaagccaactgcaccccccaagaagactatacctaaaaagcaagttgtggccaaggcaccagtgaaagtagctgccacccctacccaaaagagttctagcagtgaggagtcttctagtgaagaggaagaacagaaaaacccaccaagaaaaaccaggtccctacagttcagtcccaccgccttctgtttctttgccaaagaagtccttgggaacccagtctccaaagaaagctgctgtgcagaaacagcctgcagggagcagtggggacagcagtgacgagtctgattcaagttctgaggaagaagagaagaaagctccagctaaagcagttctctccaagacacccgccaaaccagctccagccaagaagaaagagagctcttcagacagctcagattctgatagttctgaggatgaagctcctgccaagccagtcagtacccccaagaatcctgtaagcaaggcagctgtcactcccaagccatctgctgctaagacagctgtaactcctaagcaaccagtaggcagtggccagaaacctcagaccagaaaggctgacagcagctccagcgaggaggagagcagctccagtgaggaggagacagcaaagaaaactgtgacaacccccaagcccaaggtgactgctaaagcagcaccatctctgcctgccaaacaggctcctcaggctggggacagcagctccgactcagacagttccagcagtgatgaagaggagaagacacctaagcctccagccaagacgaaggcagtgggagggagaaccccttccaaaccggcctctgtgaagaaagcagccgccgcccagagcagcagccaggaaagaaacagaagcggaatgagacagcagaggaagcagggacgcctcaagctaagaaagttaagctccagactcccaacacatttccaaaaaggaagaaagcagaaaaaagggcatcttccccattccgaagggttagggaggaggagattgaggtggatgcacgcgtagcagacaattcctttgatgccaagcgaggtgcagctggagactggggtgagagagccaatcaggttctgaagttcaccaaaggcaagtccttccgccatgaaaaaacgaagaagaagcgaggcagctaccggggaggctccatctctgtccaggtcaattctgtcaagtttgacagcgagtgacctgtggtcatcttagcgaaggaagggtgatgatggaaggctggccagtcacctccaatggacccagaaactcagtgttaggagagggtcttgcaagggtagatttgagcaggtcctgaggttgtcattgccttcctgttctgtgggtcttcatactgagaagtttgtatattttatattaaatgatttcgtatagattgttgtgattttcagagatgaattccacagattaaagacctagct

SEQ ID NO: 1921 - DNA, 2106 bp, Cricetulus griseus
tggccacttcctggggtgctgtctttttcatgctgacgataacctgtgttggcagcactgtcttctacagagaacagcagacttggtttgagggtgtcttcctgtcttccatgtgccccattaatgtcagtgccagcaccttttatggaataatgtttgatgcaggcagcactggaactcggattcatgtttacactttcgtgcagaaaacagcaggacagctcccctttctggaaggtgaaatttttgattctgtgaagccaggactttctgcttttgcagatcaacccaagcagggtgctgagactgttcaagcactcttagaggtggccaaagactcaatccccagaagtcactggaaaaggaccccagtggttctgaaagcaacagctggactgcgtttactgccagaacagaaagcccaggctctgctcttagaggtagaggagatcttcaagatgtcacctttcctagtcccagatgacagcgttagcatcatggatggatcctatgaaggcatattagcttgggttactgtgaactttctaacaggtcaactgcatggccacggtgaggagactatggggacccttgacctggggggtgcctccacccagatcacatttctaccccagtttgcgaaaaccctggaacaaacgcctagggactacctcacttcctttgagatgtttaacagcacttttaagctctatacacatagttacctgggatttggattgaaagctgcaagactggcaaccctgggagccctggaaacagaagggactgatgggcatacttttcgaagtgcctgtttaccaagatggctggaagcagagtggatctttgggggtgtgaaataccagtatggaggcaaccaagaaggggagatgggcttcgagccctgctatgcagaagtgctgagggtagtgcaggggagactccaccagccagaagagattcggggaagctccttctacgccttctcctactactatgaccgagctgccgatacacacttgattgattatgaaaagggcggtgttttaaaagttgaggattttgaaagaaaagccagggaagtgtgtgataacttggagagcttcacctcaggcagtcctttcctatgcatggatctcagttacatcacagctttattaaaagatggctttggctttgcagatggcaccctcttacagctcacaaagaaagtgaacaacatagagacgggctgggccctgggagccacctttcacctgctgcagtctctgggcatctccagctgaggctaagcatgtccttggaaacctgcatttctgaacttttttttacaggaaggagaggactcaggcattgtctgaactactctggggataagcctgtactaaaacccattgactggctttcttatgagggagggggtttatagatgagtgttaccccttgagcctagtgatttgggcttaatcaattttgcacatctaatgtgaacaactccctaaccacttggcaagtgcacagctggtgccagagtacaaatcttttgagattctttgtatgtcacagagtcctgtgaagaaaatagagtaggtttggaactccatgttagattgggaggttcagagaacggtccctgggaaccaaagaaaaatctcatttcaacccttggagtgcctcattcctttgaatggttcctgaggcctcggcagctgattgtgcagtgaggttgtctattgttttaataacagaatgaacagaggatgacatcacacagaggagccgaaaacaaaactgaactgtggtactgtgataaggtcaatagcattagtaagatctggctgttacttgtctttgcttcccccttaaagtccagtgtactttgtcaaggcaatttgtatgtaattggcatgccagtgttaattttaaaataacactctaacaaaaatgtaccaagtgtttctaattcttactctatcaagataattgtataaatttatgaccagcattaaagtattctgtttagcaaagattgttaccaagtgtaatgagggagagggcatctcagtcatttgtttgtttagtaataaaaagctcctttcaatcaaa

SEQ ID NO: 1922 - DNA, 2106 bp, Cricetulus griseus
ccgcccgcccgcctgcccgcccgcggcccggcccgccgccccgccgccgacatggcgacacgctcttgtcgggagaaggctcagaagctgaacgagcagcaccagctcatcctgtccaaactgctggagggaggaggacaacaagtactgcgccgactgcgaggccaaaggtcccgatgggcttcctggaatattggtgtgtttatttgcatcagatgtgctggaattcatagaaatcttggtgttcatatatccagggtcaagtcagtcaatctagatcaatggacgccagaacagatacagtgcatgcaagatatgggaaatactaaagcaagactactttatgaagccaatcttccagaaaactttcgaagaccacagacaatagctattacaaataaagaaaaggaaaaaaaggaagagaaaagagagaaaaggagccagaaaagcctgccaaaccactaacaactgaaaagctgcagaagaaagaagatcaacaattggagcctaagaaaagcaccagcccgaaaaatgctgcagagcccactgttgatcttttaggacttgatggtcctgctgaggctccagtgaccaatgggagcacaaccacagtgccacccctgaatgacgatctggacatttttggaccaatgatttctaatcctttacctgcaactgtcatgcccccagctcaggggacatcctctgtaccagcagctgctaccctgtctactgtaacacccggggatctggatctgttcactgagcaaactacaaagtcagaagaagtagcaaagaaacaactctccaaagactccatcttatctctgtatggtacaggaacacagcaaagcactcctggtgtgtttatgggacccacaaatataccatttacctcacaagcagcgactgcatttcaaggctttccttccatgggtgtaccagtgcctgcagctcccggtcttataggaaatatgatgggacagaatactagcatgatggtgggcatgcccatgcccaatgggtttatgggaaatgcacagactggagttatgcaacttcctcagaatgttgttggccctcaaggaggaatggtaggacaaatgggtgcaccacagagtaagtttggcctgccacaatctcagcagcctcagtggaatctctcacagatgaatcagcaaatggctggcatgagtctcagtaatgtgaacccgaccgcaggttttggtcagcccccaagcacaacagcagggtggtctggaagctcatcggggcagactctgagcacacaactgtggaagtgaaaagctgcagcagagttgcatccagaaccaacacctgacattcctcgctaaaaaggcatctagttcctgtttactcatgtacatatgtattttcttttcctccttttgttcacattaagaattacctgattgaccgtgttggtctgtgctgattaaatttgatgtgaaagcaggttgagaaaccatcttctgtggagggcagctttgctcatatttcccatgatgtcataaaccacattgagaagctgctcagttaactcgcataatcggttttattctcaaaattatagctctaatgtttgcatataagggaagtagttatcatgttagtaatacttctaacagtataaaaccccacccccaaattagccagtaatcctgtaggaaggtactgtatgatcaaatgtttaatcatataaatagaatgtaaatgtatcactgaacactgttttctagtgtatcaaattcttttagtcatcactcacttcactgtgctgttgttatgatgtgcttaacagggaacgtggttagtgaaaggagataaacctggatgttactgtacaacttaatgtttcaagaatttcaaatttttgctgtctcttgtaatttggacctcttctcatgtacatagtgctaatattaagaccttttttctgcactatatgcacacagggtaactaaaacaaagccactcttaatccttgaaggtatatccaggtttatgacagtaattgtgtttacattttatggtgcctagtattgacaaaatgttatttccctatattaaacagatgaatccaca

SEQ ID NO: 1923 - DNA, 2105 bp, Cricetulus griseus
tgtgaagatgccactcccaaccagtatgtgtccactccatggaatattggcctggccgaaggaataggaattattgtgtttatagcagggatattcttgctggtggtggtgtttgtcctctgccgtaagatgatcagccggaagaagaaaccccaggctgaacctgaggacaaacgtttgggaccaacgacagctttcttacagagaccttatttcgattctaagctgaacaagaatatttactctgacataccaccccaggtgcctgtccggcctatttcctacactccaagcattccaagtgactctagaaacaatcttgacagaaattcctttgaaggctcggccatcccagagcatccagaattcagtacttttaaccccgagtctatgcatggacaccgaaaagctgtggccgtgtgtagtgtagctccaaatttgcctccgccaccaccttcaaactctccttcagacagtgactccatacagaaacctagctgggactttgactatgatgcaaaagtggtggatctcgatccttgtctttccaagaagcccctggaggagaagccctcgcagccctacagtgcccgtgagagcctgtcggaggtgcagtcccttagctccttccagtcagagtcctgtgatgacaatgggtaccactgggacacatcagactggatgccgagtgttcccctgccagacatacaagagttccccaattacgaagttattgacgagcacacacccctgtactcggcggatccaaatgccattgatactgactattaccctgggggttatgacattgaaagtgacttcccacccccacctgaggacttccctgcgcctgacgagctgccaccattgcctccagaattcagcgaccagtttgagtccatacacccacccagagacatgcctgctgcaggtagcttgggatcttcctccagaagtcggcagaggttcaacctgaatcagtatctgcccagtttctaccccgccgatatgtctgaacctcaaaaacaaggcactggtgaaaacagtatgtgtagagaaccctatgccccgtaccctccagggtatcaaagaaacttcgaagcccccactgtcgaaaacatgcccatgtctgtgtacacctccacagcatcctgctctgacgtgtcagcgtgctgtgaagtagagtctgaggtcatgatgagtgactatgagagtggcgatgatggccactttgaagaagtgacaattcctccactagattcccaacagcatacagaagtgtgacactcagactcctccccaaagtgcctggactttaaagaacctagagagggtatcaatgatctccgcattgttctttgcagcagtcttatgcgcttctcagtgagctgcagtgggcatggctgcacggaatcacacgcctcttgacatgctagccatttccagttcctaaccgactgtacctgaggggttctcatcgcctgtgccatttctgagcatcttttcgtatttagatgtgtctctgttaaaataatgaaaccgaaatcagtcctgtcatcctgttagcatgattcatgtatttatatagattcgattttattttaattttgcttttttgtgtgtgtaaattttctgtacagatttgtattttttttttcctttcatagttttaactatgttttcagaacgcattgtgcatttgttttcctctggatctgggtggcgtagtgtcgtccgtcgcctagcaccctgattttctaatgtaaccagggtttcactgtgttctttcccactgaagtatgacatttcattaacgcatttcggtccagtcatttatttctagctgtacatacaaggtgaggaagacctgttactggacatgtcttaaatgggttgctgtattaggattgtaaacatttttcattactggaaagtgtaaaggggaccttctgcatacctgtttagaaccaaaaccaccatgacacagtttttatagtgtctgtatatttgtgatgcaatggtcttgtaaaggtttttactgaaaactatcattagccagcctttcttactgacaataaattattaataaaatactttagctttaa

SEQ ID NO: 1924 - DNA, 2104 bp, Cricetulus griseus
ggaacagccacctctgcctgaggcttctggccgccacaagcatctggagaggatgtatagtgttgatcgagtgtctgacgatgttcccatccgtacctggttccccaaggaaaaccttttcagcttccagacggcaaccacaactatgcaagcggtattcaggggctacgcggagaggaagcgtcggaaacgggagaatgattccgcgtctgtaatccagaggaacttccgcaaacacctgcgcatggttggcagtcggcgggtgaaggcccagacgttcgctgagcggcgcgaacggagcttcagccggtcctggagcgaccccacccctatgaaagccgacacttcccacgactcccgagacagcagtgacctgcagagctcacactgcaccctggatgaggcttgtgaggacctggactgggacacagagaaaggcctcggaggccatggcctgtgacactgagggcttcttgccacccaaggtcatgctgatctcctccaaggtgccaaaagccgagtacatccctaccatcatccgcagggatgacccctccatcatccccatcctctacgaccatgagcatgcaacatttgaggacattctggaggagatagagaagaaactgaacatctatcacaagggggccaaaatctggaagatgctgattttctgccagggtggtcctggacacctttatttgctcaagaacaaggtggccacctttgccaaagtggagaaggaagaggacatgatccacttctggaagaggttgagccgcctgatgagcaaagtgaacccagagccgaatgtcatccatatcatgggctgctacattctggggaaccccaatggggagaagctatttcagaacctcaggaccctcatgactccttacaaggttacctttgagtcacccctggagctgtctgcccaagggaagcagatgattgagacctactttgacttccggctttaccgcctatggaagagccgccagcactcaaaactgctggactttgatgacgtcctgtgagaagcatgggtcatgcccaggcaccaccaggccatttcctctggactgggaacttggggctgggccgccacttgcacctagaaccacgtggccctggtcttgcccacagctacttcagggaccctcagacattgctcaggttctcgcagggtctggtcctcgctgcaccagtgggccacagaggccacagtcctgcctgtcatgcctcgcctggaggccgcagcattggggcccctccatggggttcatagaaataagtgcaatttttttacacccctgaaacaatttgaagggaagcagcattactagttaactagttaagcactctgctactagttacagtgtagacaaccggcccagtgtgtgttcaggtcctcctgtcccccagcccctcagccctgccgtatttgatcaccagcaccaggatggcccgtctatgtggggccggcactgtcaggctgcctggcctggcccggtctatactggccaaatctgtctgctttcacccccttgtaaccccttgcttactttgacctcatcttggcaaggggcagcctgggcaggaggagggaagagcctcacctttcccttttctcagagggggcactgggctgccagctgctgcccacctcctcaagcctactcattccccttgctgctgttgagctcagcttttcccagtcttgatctggaagccacatcccagcacagaggcttaggggctgggtgggggccagctggggctgggccctggaaggcaagaacctcaccaacactgtagtgggggcctagatctgtctgtcacccaggctagaaagtcaagtagctggtgaactgtgaagtccccatgactcccttcacagtcttgcccggggtctagcagggtgggctctcttgtacatagttggagcttgggggcaggccccccttatgtagagcctggggtctgggggcacctggctgtgtccctgaccaaggggagttaggattgggttctgaacaatgtacgatatcccctagagtgaccattaaacttgaccctctgctgacaaaaaaaaaaaaaaaaa

SEQ ID NO: 1925 - DNA, 2104 bp, Cricetulus griseus
ggctgcgcggtgttccccacgctggttgctagtggcggcggggaccccccggctgccggctgcagcggggagaggggccaagcagccccaggggggagtactggcaacatcgttgggtcgcaagccgagcgtctctgccttcgggctttccatgggcgctcacggccccgggacgctgctgacattgagaccgggtgtccgccacacaggaacaaaaagtttcctttttgtttgtactgcctccttccacacaagtgcttccttggctaaagatgattattaccagatattaggagtaccccgaaatgccagccagaaagatatcaagaaagcctattatcagcttgccaagaaatatcacccggacacaaataaggatgatcccaaagccaaggagaagttttcccagctggcagaagcatatgaggtgttgagtgatgaagtaaagaggaagcaatatgatgcttatggctctgcgggctttgatcctggggccagcagctctgggcagagctactggagagggggtccctctgttgaccccgaggagctgttcaggaagatctttggggagttctcatcatcttcttttggagatttccagactgtgttcgatcagcctcaggaatacatcatggaattgacattcaatcaagctgccaagggtgtcaacaaggagttcactgtgaacatcatggacacctgtgagcgctgtgatggcaaggggaatgagcctggaaccaaggtgcagcactgccactactgcggcggctccggcatggaaactatcaatacaggcccttttgtgatgcgttccacatgtcggagatgtggtggccggggctctatcatcacaactccttgtgtggtttgcagaggagcaggacaagccaagcagaagaagcgagtgacaatccctgtgcctgcaggagttgaagatggtcagactgtaaggatgcctgtgggaaaacgagaaatctttgtcacattcagggtgcagaaaagccctgtgttccggagggacggcgcagacattcactccgacctctttatttcaatagctcaagctattcttgggggtacagccaaagcccagggcttgtatgagacagtcaatgtgacgatccctgctgggattcagacagaccagaagattcgcttgtctgggaaaggcatcccccggattaatagctatggctatggtgaccactacattcacatcaagatcagagttccaaagaggctaaccagtaggcagcagaacctgatcctgagctatgccgaggatgagactgatgtggaggggacagtgaatggtgtcacccagacaagcactggaaaacggtcaactggaaactagatcaggaacagcagtccctctccatggccagggcgtctgacacaggaggatcccagaacagcagcacggagccctgtctacagagccctctgaaccacctaccaaccgcaaaactacgtgatgacacgtctctgcatagaaggtcatggtgactgcccttaggtagtgatgtgtggcctttgggctaatggaaatatcctgcccaccttaggtgacttgcttctagctcaggcagtgtaaaacacttggactcttcttgcagcactaaaaataatctggaatcgcatgtagtagagcttaaaaaattaaaggccgtgcttaagcttaaaatgaagccttaagctgcacacgttgtgaagtgattaatttccctctcaacaaacctcatggaggttctgaaatacgtccttcctgacatgtggtcttctccaggacccaggggcagcacaccccaccagcaccatctttcctgacagcatcggtgaagactctccaccatgtaaagcaacctatttccagcctctgctggtggtagcatgttgcagtttctgtgttccaagatcctggagctagtgtaagacaggctaatgaagaacacttatctctgtagtttctttcttttcctttataatttacaaaagtaaagcatttcttagtgtctgatttaatgtaaagtgattctgtatcaatgtaaataagatgatctactacaaaagatatttaaaaccaaaaaaaaaaaaaaaa

SEQ ID NO: 1926 - DNA, 2104 bp, Cricetulus griseus
cggaggtcagatgagccactaagacaaagaaagggtttagcagtatcctagaccctgctcgctggaaccgggagagccacctgctcctgatttcgacatctaaaggtcgaggttgatggcgagaagccaggccctacagaccggaagggaggcctgggtatgccttctagagacagggctgctgggactcctgggcaggacaacccagggatctctctgcaccctctgtctgcagacagccctgaccaccgggaacctggtgtggataccccccaggagctgggggacacgctcccacagggccctccaagcctggagcccctggcacccccagagagcacggaggagaatgcagagacagagagcttccccctggaagagctgcagaatatcttccccagcttggatgagctcattgaggtgcactccctattcctcgatcgcttgatgaaacggagacaagagagcggctacctcattgaggagattggcgatgtgctgctggcccggttcgatggtgctgagggctcctggttccagaagatctcctcccgattctgcagccgccagtcatttgccttagagcagctcaaagtcaaacagcgcaaggagcctcggttctgtgcctttgtgcaggaagctgagagccggccgcggtgccggcgcctgcaattaaaggacatgatccccactgagatgcagcggctcaccaagtacccactgctgctgcagagcattgggcagaacacagaagagcctgcggaacgggagaaagtggagctggcagctgagtgctgccgggagattctgcaccatgtcaaccaagctgttcgcgacatggaggacctgctgcggctcaaggattaccagcggcgcctggacttgactcacctacggcagagcagtgaccctatgctgagcgagttcaagaacctggacatcactaagaagaagctgatccatgaaggcccactgacatggcgggtaacgagagacaaggctgtcgaggtccacgtgctgttgctggacgacctgttactgctgctccagcgccaagatgagaagttgctgctcaagtcacacagccggacactcacacccacgcccgacggcaagaccatgctgcggcctgtgctccgccttacctctgccatgacccgagaggtggccactgatcacaaagctttctatgtcatttttacctgggaccaggaggcccagatatatgagctggtggcacagacatcatcagagcgcaagaactggtgtgccctcatcactgagactgctggctccctgaaggtccctgcccccgcctcccgccccaagccccgacccagcccaagcagcacccgagaatccctgctcagcagctctgagaatggcactggaggccgagagatgcctccagctgacacccggacggagcgtatcctcagcgacctcctgcccttctgcagaccaggcccagaaggccagcttgctgccacagcccttcagaaagtgctgtccctgaaacagctcttgttgcctgctgaggaagacggtggcctggggcctccccaggatggggatggggttcctggaggtggttctccaggcccagtgcagattcaggagattcaggaaaacctgctcagcctagaggaagctgtcaagcagctggaggagttagaggaagaattttgccgcctgagacccctcctgtctcagcttgggggagctctgtcacccagtctggctgccccggagcgctctgttcagactggcctttcatgaagagaagaatgggggagaggatgtgagggccccccaccccacggctgccacagcgtctctcaccccagaggccttgaggaggaggagactggccacactcataggggacctgccgggacccctgcctcccatgctggcctctgcctttctccctcctgccttcgcttgggggactcagggcatcacccccagagtaccaccacatccccggttttcaggccatgtcagtattgcctatggtgggcgccccctcctcacccccatcccaagtgcctttgctctggttttataccctgaatggaggtttatttttaatatatattat

SEQ ID NO: 1927 - DNA, 2104 bp, Cricetulus griseus
cccaccagtcactactggccactcgagtgcgcacacatgatctcaaaaagattgcgccctatgttgcccacaacttcaacaagctcttcagcatggagaactggggaggggccacatttgatgttgccatgcgcttcttatatgagtgttcaagttctgtgaggtggccaaggagaatggtatggacgtcttccgaatctttgactccctcaactacttgccaaacatgctgctgggcatggaagcagcaggcaatgctgggggcgtggtggaagctgccatctcgtatactggtgatgtagctgaccccagtcgcacaaaatactcgctggagtactacatgggcttggctgaagaactggtgcgagctggcacccacatcctatgcattaaggacatggccgggctactgaagcctgcagcctgcaccatgctggtcagctccctccgcaacagatttcctgacctaccgctgcacatccatacccatgacacatcaggggcaggtgtggcagccatgctggcctgtgcacaagctggggctgatgttgtggatgtggcagtagactccatgtctgggatgacttcacagcccagcatgggtgccctggtggcttgtaccaaagggactcctctgaacacagaggtgcccctggagcgtgtgtttgactacagtgaatactgggaaggggctcggggcctgtatgcggcctttgactgcacggctaccatgaagtctggcaactcagatgtgtatgagaatgagatcccagggggccagtacaccaacctacacttccaggcccacagcatggggcttggctccaagttcaaggaggtcaagaaggcctatgtggaggctaaccagatgctgggggacctcatcaaggtgacaccatcctccaagattgtgggggacctggcccagttcatggtgcagaatgggttaagccgagcagaggctgaagctcaggcagaagagctgtccttccctcgctctgtggtggaattcctgcagggctacattggaattccccatggaggcttccctgagcccttccgctctaaggtgctaaaggacctgccaagagtagaggggaggcctggagcctcccttcctcccctgaacctgcaggagctggagaaggacctgattgagcggcatggggaggaggtgaccccagaggatgtcctctctgcagccatgtaccctgatgtcttctcccaattcaaagacttcacagccaccttcggcccactggacagcctcaatacccgcctctttcttcaaggacccaaaattgcagaggagtttgaggtggaactggaacggggcaagactctgcacatcaaagccctggcagtgagtgacctgaatcgggctggccagaggcaggttttctttgaactcaatgggcagcttcggtccattctggttaaagacacccaggcaatgaaggagatgcacttccatcccaaggctctgaaggatgtgaagggccagattggggcccctatgcctgggaaggtcatagacatcaaggtggcggcaggagacaaggtggttaagggccagcccctctgtgttctcagtgccatgaagatggagactgtggtgacctcacccatggagggcaccatccgcaaggttcacgtgaccaaggacatgacactggaaggcgatgaccttatcctagagatcgagtgatcttgcttcagactggcagcctggccaaccctaccccaagcctcccaacagaagctgtgcagccagggcaggcccaggccagccagtacctgagagaggatggccagacccctgaggccctgttccatgggacaacacacacacacgacacacacaacttgcagtggcccattcctgtcagccatttgtccttgccttactggcaggcagttgctcacatactcatctcttgccaaataaccatctgctccttgttggagactacaggtgtccagcaggtggccttgggacctgggggagatggtttaggggttctacctctgggggtagggggaagacctaatttgcaggtcctgggaaatttgctcaataaaagtggccttcccttgccctcca

SEQ ID NO: 1928 - DNA, 2103 bp, Cricetulus griseus
ggatatcacagctcgcctgcatttcatcaagtttgagaatacttacatggaagcctgtctggacttcatcagagaccacctagtcaacacagagaccaaggtcatccaggccacaaggggtggagcctacaagttcaaagacctcattgaggagaagctgcgtctgaaggtggacaaagaggatgtaatgacctgcttgattaaggggtgcaactttgtgctgaagaacatccctcatgaggccttcatgtaccagaaagattcagacccagagtttcgatttcagacatgaaggtggagacagaggatcggttcgagtggattggtggaaggctcccgattggaggaggcaccttctgggggcttggggctctgctcaccaaaacaaagaagtttgatgagcttctgcagctggcctccagaggccggcatgccaacgtcgacatgctggtacaggacatctatggcggggcccaccagaccctggggctaagtggcaatctcatcgcaagcagctttggaaagtcagccactgccgacagagagttctccaaagaagacatggccaagagcctgctgcacatgatcagcaatgacattggacagctcgcctgtctctacgccaagcttcatggcttggacagagtctactttgggggcttcttcatccggggccaccctgtgaccatgcgcaccatcacctacagcattaacttcttctccaagggcgaagttcaggcactcttcctgagacatgaaggctacctgggagccatcggggcatttttaaaaggagctgagcaagacagtcctaaccagtacagctggggcgagaactacgcagccagctccgggctgatgagcacatctcccgagctgtgcccgactcaacgggcaaggagcggcacatttgacctactggagatggaccggctagagaggcccctcgtcaacctgcccctccttctggacccatcttcctacgtacctgacacagtggacctcaccgacgatgctctggcccgccaatactggctcacttgctttgaggaggccctagatggggtggtgaagcgagctgtggccagccagccagaatccatagatgcagctgagagggcagagaagttccggcagaagtattggagtaagcttcagacactgcggcaccagccctttgcttatgggacactgactgtgcgcagcctgttggacacaagagagcactgtttaaatgagttcaactttccagatccctactccaaggtaaagcagaaggaaaatggcctcgccctaaagtgctttcagagtgtgacacgctcactggactcgttaggctgggaagagcggcagctggctctggtgaaggggctgttagctgggaatgtcttcgactggggagccaaggccgtatctgatgtccttgaatcagacccccagtttgggtttgaagaagcaaagagaaaattgcaagaacggccctggctcgtggattcctacaccaagtggctccagaggttaaaggggccccctcataaatgtgccttaattttcgcagataacagtggaatagacatcattttgggagtcttcccctttgtcagggagctactctttagagggacggaggtcatcttggcatgcaactcaggccctgccctgaacgatgtgacctacagtgagtccctcattgtggcagaacacattgcagccatggaccccatcatctgctctgcactcagagaagacaggctgctgctggtgcagactggttccagctccccgtgcctagatctcagccgcctagacaaggggctggccgtgctggtgcgggagcgtggtgcagacctggtggtcatcgagggaatgggccgtgccatccacaccaactatcatgcattgctgtgctgcgagagcctcaagctggcagtggtgaagaacgcctggctggcagagcggctaggtggccagctcttcagcgtcatcttcaaatatgaggttcccaccgagtaagacatccactctgccagacagacctacctgcctgtccctcgtcgggaatatgatttactgcgaagaacctatgtcacacgggagtattga

SEQ ID NO: 1929 - DNA, 2103 bp, Cricetulus griseus
gcattgagaacttcaaacgttcctaagagtgaggttgacgggctgctggacctagcccgacagaagttcagctgcttgatggaagaacaggagaagctacagaagcatggggtatgtatccgtgtcttaggtgatctgcatttgttgcctttggacctccaggagaagattgcacatgctgtccaggctactaagaactacaacaagtgtttcctcaatgtctgctttgcatacacatcccgtcatgagatcaccaacgccgtgagagagatggcctggggagtagagcaaggtctgctggaacccagtgatgtctccgagtccctgcttgataagtgcctgtatagcaaccactctcctcatcccgacatcttgattcggacctctggagaagttcgtttgagcgacttcttgctctggcagacctcgcattcctgcctggtgttccagcctgttctgtggccagagtacacattctggaacctctgtgaggccatcctgcagtttcagatgaaccatggtgcacttcagcagaaggcccgggacatgtatgctgaggagcggtaagagacaccagctggagagggaccaggctgcagtgacagagcagctgcttcgagaggggctccaggccaatgcggatgcccaactccgccggacacgcttgcacaaactctccgccaaacgggaagagcgagtccaaggcttcctgcaggccttggaacttaaacgggctgactggctggcacttttgggcactgcacctgcctaagtgaggctggctactggccactttgccctgccctctgccttgtgggccccaacttccttttcttttcgtgggaagggcaggaagaaaatttgcccatctgctgctcctccccttggctctccacctgggatttgctattgaatctccaccccctcccaccagtacccactgctcactgaaaggctcagcgcccccaatggctcatggaagccaggcgggtgattacaatccaattacctattgttgactcagcccacacaagctttactcccccttgcagggcatggggccagactccactccccaatgagacccaaccccctccatagctacagacagggtagcagaagggcctgtagaggccctactaatccaatacaggccaacttgtaacacatcaggactgaacagaacgaagcacttcctgattgactgtctccttccatcaccagcgcaaactgattcccactcccaatcttcaaggctcctcacagctctttgacctgactccctaagtagatccggagacaatttactctcatcatggcagaacttactccaggctctcagcctgtgagggtcaacactaccttacaggaagagacaagatcctatccgttccttgcctctccatagggctgagaagagattactacctttgaagagaggtctccagagctattgtttcaggtgcccccagaacagtaaatactagccaggaacaccgatcaaatgccactctggctttctcattctgtcttgtgaaccccttacccagcacctccctcccagaaagaggtgggctattgtgcctagatatctgtcactggtgaccttttggccatcattccatctcagaatcaaggataaaatcctgacactgcaaccagaagccaatcaatgcaccctttggcaaggccccctatacacctggcacttcccgaaatcaatccctggcacagagttccccaagagcaggtgctgtacattttccagctttacaatgaggctgttgacagctttaattagggaggcatgaattatgtggctataatgcagagccctacaattaagacgggaatgagaggctggaggcagcaaacggaatctgcccagcaagcatggctgttgagtcctggctgactttctcttacgattggagtacagtacaggtgattaatggagaaggtatcttccagcctggagacctgtattctgggaaaggtgcagaggggagggggaggaggctcgtcgggaggcaggtgggaagtggaaggaagaggcagaaccattgctgccaagaagcaaaggctaagaaaatgcttgatttg

SEQ ID NO: 1930 - DNA, 2103 bp, Cricetulus griseus
gcgcccgccctcgcgaggctcctcgcggccaccgtagagggagtgcggtggccgcagggacggaagccgggaggtgccgccgaccgcgcctgcgacagcgtcagctctgcgcggagcgccggcccatggcggcggcggcggcggcgatggcagagcaggagggcgcccgcaacggcgcccgcaaccgcggtggcgtccagcgcgtggagggcaagctgcgtgccagcgtcgagaagggcgactactacgaggcgcaccagatgtaccggaccctcttcttcagatacatgtctcaaagcaagcatgcagaggcccgagagctcatgtactcaggagcgttgctcttcttcagtcatggccagcagaacagtgcagctgacctgtctatgctggtcctcgaatccctggagaaggcagaggtggatgtagctgatgagttgttggagaatctggctaaagtgttcagtttgatggatccaaactctcctgagcgagtagcttttgtgtccagagccttgaagtggtccagtggaggatctgggaagcttggccatcctcgtctccaccagctgctggccctcacgctgtggaaagagcaaaactattgtgagtctcgatatcacttcctgcactccactgacggcgagggctgtgccaacatgctggttgagtactccactgcccgaggcttcagaagtgaggtggacatgttcgtagcccaggctgtgctacagtttctctgtttgaaaaacaagaacagtgcactggtggtctttacaacgtacacacagaagcatccatccattgaggatgggccacccttcgttcaacctctgctcaatttcatctggtttctgctgctggctgtggacggtggcaagctggctgtgttcacagtgctatgcgagcagtatcagccgtcccttcggagggaccccatgtacaacgagtacctcgacaggattggacagctcttcttcggtgtgccaccaaagcagacatcctcctatggaggcttgctagggaacctgctaagcagcctcatgggctcctcagagcaggaggagggggaagagagccaggatgacagcagccccatcgagctggattgaagctgcctggccagcgtggagatgcccatggccggcaccgctgggatggattcagtgctaggctgggcacgaggccccttaccagtgggcttctgctctgtggctggaggagccgcctgtgcagtctgtccctatttatgtatggtggctgagggctgtgtggccaggaccaagagcaaggctcagctcctgctggccaaccgtgttccttcagatcacccacaataaagcgcaggccttgctgcagcaccccgctgccatccttgtctctggttccttggggagggctgcagggtgacaggcagcctggcgtcagcgactggtatcccttctcctgtgtccagtgcagccatggcatgccagaggattggtggccactgctgtgagccaggcaggatcctgagtcctgcagatgagatcgggtttcttgtttgtttgaattttgtttggacacagtgtcgttttgcaatcatggtgagcttcccagggacagtgcacatatgctgtggtggctagactccttggaggtcacaagcagctggctagggcgatgtcctgtcgtctgtagggctgtggccccagctgtagtctgtgggctcgtccgttcaagctgcagccctgctggtccccatgagcctcacactgctgctctggagatatttttaaagggtgccgtagattttcatgtccttcatgttgcagtatttatttttactgggtgagggatttttcaacctaatgttttaggacttaaccaaataaccagtccaggaatgagcaaacccatccattaccacagataatatccacactacccgtctgattataaagggagacactttattttttcacaattaaaatagagttgtagattaatacacctctatcttgcatgggaaggagggaaatacgcgttatttactgtaaaaaaaatggaatttaaaggaaggcttgtgtcacctgttgactataaataaatcctttctactgg

SEQ ID NO: 1931 - DNA, 2103 bp, Cricetulus griseus
  modified_base (614)..(614): a, c, t, g, unknown or other
aggagctgggttcagatgaagacaccatcgatcccgacctgatggcctacctaagttccctgcaccaggacgccctggcaccaggcctggatggccaagacaagctggtgcgtaaacgccgttcacagatgccccaagagtgcccagtctgtcacaagataatccatggggcaggcaaactgccacgccacatgaggacccataccggtgagaagccctttgcctgtgaggtttgcggcgtccgcttcaccaggaatgacaagctgaagatccatatgcggaaacacacaggagagcgcccctattcgtgcccacactgcccagcccgcttcctgcatagctatgacctcaagaaccacatgcacctgcacactggggaccggccctatgagtgccacctgtgccacaaggcttttcgccaaggaggaccacctgcagcgccatctcaaaggccagaactgcctggaggtgcgcacccgaaggcgccgcaaggatggactgcaccacctcacctaccccccaccccgacctcccgccccgtcccctgctggccttgacctctccaatggccacctggaccaccttccgcctcactctggcccgattcctgggancagtcagccacacacacacacacacacacagcaacaaagggggggtcccctgtctccagctgctactggggaattgaagcaataatctatctctgatttgtggggtcccacttcggctatgcgggtttctaggagactggggcttgggaccaaagccttgccccactcccatgccccctgggttttggctgtgtgtgagggggtggactgcccctcccttccgagaccccttcctggtttctgttcccttttcctggcagtaaattatgcaaaggggggtggcaaaggaagggtaagtgaggggaaacaaggcaaggtggaagcttgaaagcctggagggggggactgggcctgtaaggacggagccatcccagtcccccctccacccagttccaatgctgagtcatggggtcctggagaagggggcagggtggcttgattggctcgcccgcccctgggggtagcagaagggctccgcccaactaagggagctctccacctctcccctcccgcgtcctggggcagggaatgtcttgttcctggcgctccctccctgaggccagagggcagggcgggccgggcgtcttaccctcttctcctccctacctccccgcccaggtgcaagccagagccgcctctgccgcatgctgcccctgactcacgccgcccccgggctggcgggtgctgggtgtgggatggggtgacgggttgaggtagccttgcggggagcgggcgagccagcgccatctggtggccatgccctgaaagggcgagcgccacttgtccctgggaaaagtgagctgcggagcggatctagaggaaaggactcttttttcctgagaccttgcttgtcactcttaaggactgagtccacccccattctgtacatagcctcttctgatggtcttgttgaaatccaatttcacattttaaactaccaattctcctggggtggagaagaatcttcaatcctaccccttcctcgctgggtgctggacccccattgcggcctgggctctgccttgcactattttccccctttggcctggtggcccttccccctccttaaaaggggcaggttcaggggcccggtgctctcctctccccatgcacctccatgcccatttgcacagctgcccaggtacccccaacagtggggaggggtcaaacagggaggggtggcgggaccagtccctgtatctatttaaaagtgatgatgtaatatattaggagggaggtcgggtgccttgggcctcatcttagcatttcaggtgataggggagcccagggctggagaaacctggggcttagtcccagaaagtggggacagtgtggcctccatctctacttgtggctctcccactcagtgccttagtgggggaaagcatttcccccctctcccgttcccttcatctacccctgcccccacctcgggtgtaagtgacaggaagaaataataataatttaagaaattaaaaaaaaaaaaaaa

SEQ ID NO: 1932 - DNA, 2102 bp, Cricetulus griseus
ctccgtgggaggtggaggagcagcgtctgccccaactgcgttgtgctacgctcctctttccgctctccggcaccggcccgctcaccggctgtgaaagatggtgaaagaaaccacttactatgatgttttgggggtcaaacccaatgccacccaggaagaactgaagaaggcatatagaaaattagccttgaagtaccaccctgataagaatccaaatgaaggagaaaagtttaaacagatttctcaagcttatgaagttcttgctgattccaaaaaaagggaattatatgataaaggaggagaacaggccattaaagagggcggagcaggtggtggttttggctcacccatggatatctttgacatgttctttggaggaggagggaggatgcaaagagaacggagaggtaaaaatgttgtgcatcagctctcagtgaccttagaagacttgtataatggcgcaacaagaaaattagctctgcaaaagaatgtgatttgtgacaaatgtgaaggccgaggtggtaagaaaggagcagttgagtgctgtcccaactgtcgggggaccggcatgcaaatcaggattcatcagatcggaccaggaatggttcagcaaattcagtcagtgtgcatggaatgccagggtcatggagaacgcatcagtcctaaagacagatgtaaaagttgcaatggaagaaagatagttcgagagaagaagattttagaagttcatattgataaaggcatgaaagatggtcagaagataacattccatggtgaaggagaccaagaaccaggactggaaccaggagatattatcattgtgttagaccagaaggaccatgctgtttttacacgacgaggagaagatcttttcatgtgtatggacatacagctggttgaagcattgtgcggcttccaaaagccaatatccactcttgacaaccgaaccatagtcatcacttctcatccaggtcagattgtcaagcatggagatataaaatgtgtgctaaatgaaggtatgccaatatatcgtcggccatatgaaaagggacgtcttatcattgagtttaaggtaaactttcctgaaaatggctttctctctcctgataagctctctttgctggaaaaactccttcctgaaaggaaggaagtggaagagactgatgaaatggatcaggtagaactggtggactttgatccaaatcaggaaagacggcgtcattataatggagaagcatatgaggatgatgaacatcaccccagaggtggtgttcagtgtcagacctcttaatgggccagttcctctttgtcattctaaatgcagtagtgaatgtgggaaggactgtaatcataatatactcactacttggctattgttttgttttaatattcaactatagtagtgttttaaaagttaaatgaagaataaacacaaatataaaagctctgacttgccctgtatgtatgatgacttcaatgtgcaagatgaagtttaataacttaagtaaaaaggtatgtgttgtgacccttaattgttaagctatggaattaaaattctgtatttaatggtaatcagaaaaagaaaatatttagtaatcacatgttgggtctgtctagttgtatgaagtggactaattgtaatgcctctgcaatgtattgcctcagccattactagaaggtggcataatacataattttgcctgttactagtgatagaaatgatacattcctaaagtttatcaagctactgcttaagggcttgctcttctagattgcattcccttctgctgtgccattctcaaaccatgataagcccttgggtggtgacttccaaagcccaagtaatttacaaattaaaatgaagagaccttgtatgtggagaagtgatttgcatgtgtaatccaagaaaggtgtttcttaggtctgttacaggcttgctatttgacttaggtcccaacgtaactgcaatttaatgttggtagtatagcaaattatgaatagctttgttgtatgttttaaagtcacatgttcacatgcttaaatctgggtatcagaatttaagcagttattgaaatgtatgactgtcttctaatatactgatt

SEQ ID NO: 1933 - DNA, 2101 bp, Cricetulus griseus
acctgctgtggatgttgttgtccattggtcttatgtctggtcaggttgtcattcacaacattaagtttgatgaaacattaatgaagttccgtcaggactggggacccattacttccatttcatttcgcacagatggtcatccagtaatggcagctggcagcccgtgtggccatattggactctgggatctggaagacaaaaaattaatcaatcaaatgagaaatgcacattccacagcaatagctgggctgacatttctgcatagagaacctctgcttgttacaaatggcgctgacaatgctcttaggatatggatatttgatggccctacaggtgaaggacggctgttgagattcagaatgggacatagtgcttctctaaccaagatcagatattatggacaaaatggacagcagattttaagtgcaagtcaagatggaactctacagtcattttctacagttcatgaaaaattcaacaagagcttggggcatggattaataaataaaagatagttaaacgtaaaggacttcagaacaccatgtcagtaaggcttccgcctatcacaaagtttgctgctgaggaagctcgtcaaagtgattgggatggtatcattgcttgccaccaaggtaagctatcttgctcaacctggaattaccaaagatctacaataggtgcttattttctcaagccaaaagaattaaagacagatgacatcattgcaacagcagtagatataacttcctgtggaaactttgcagtaattggcctctcctcaggaactgtagatgtgtataacatgcagtctggtatacatcgaggaagttttggagatgataaagctcatgcaggttctgttagaggtgttgcggtggacggattaaaccagctaactgttacagctggtagtgagcgattactcaaattctggaactttaaaagcaaggttttaatccattctttgagccttgattcatctccaaatatgatgctgctacatagggacagtggcattctggggcttgctttggatgacttctccatcactgtcctagatatagaaactaggaagattgtcagagagttttctggacaccaaggccaaataaatgacatgacattcagtcctgatggccgttggttgataagtgctgcaatggattgctctattaggacttgggaccttccatctgggtgccttatcgactgctttttgttagactcagctcctctcaatattactatgtcccccactggagactttctagcaacttcccatgtggaccaccttggaatttacctgtggtcgaatatttccctctattcagttgtctccttacgaccacttcctccagattatgtcccttcagtagtgatgcttcctgggacttgtcaaacccaaggtacagaagtgttggaagaacagattgagccaagtgatgaaatgatagagtatgagtcgccagaacagttgagtgagcaactggtgactctatcacttctcccagagtcacgctggaaaaatcttctgaatcttgatgttatcaagaaaaagaacaaaccaaaagaaccacccaaagtaccccagtcagcaccgtttttcatcccaacggttcctgggcttgtacccaggtttgctgtacctgagcagaatggggacccccagcagtctaaggtggtaaaccttgggattttggctcaaaaatcaaatttctacctgaaacttgaagaaggattgctgaataatcagtatgaagctgctcttaaccttctgaaagaattaggcccatcaggaattgaaacagagctgcgaaacctgtctcctgatgatggtgggtcagtaaaagtcatgcagggctttttgaaaatgatcgggatgatgttgaacagaaagcgtgattttgagttagcccaggcataccttgccttgtttttgaagttacacctcaaaatgcttccttcagagccggtgttgttagaagaactggtaaagttgtcatcacaggtagaagaagactggactcacttacagtcactcttcaatcaaagcatgtgtgttttaaattatatcaaaagtgctctgttgtaaaaaataaactta

SEQ ID NO: 1934 - DNA, 2100 bp, Cricetulus griseus
  modified_base (1056)..(1056): a, c, t, g, unknown or other
gccctgggagctgcacgcagcacgcggcttgttgacctgaaggacgtgcaggggctgggcggacaagcggtccgactctgaacagacagacgtttcgctgccatagggctcctcggcaggatcgcacccagaagcgggcagcataccgtgcctggtggaatctcgctgtcctccgccgcctggccccggtgcaggcgtccaacggccgccgcatccaaagtgatcgctgcctcgcagtctccaccacgttcgggaccatgaagctgctgccgtcggtgatgctaaagctctttctggctgcagtgttgtctgcgttggtgaccggtgagagtctagaacggcttcgcagaggtctggaggcagcaaccagcaaccctgactctcctactggacccacaaaccagctgctacccacgggagatggtcgtggtcaggaagtccaggacttggaagagacagatccggaccttttcagagttgctttctcctccaagccacaagccctagccacgccaagcaaagaaaagaatagggaaaaaaaagaagaaaggcaagggattgggaaagaagagagacccatgtcttaggaaatataaagacttctgcatccatggggagtgtaaatacctgaaggatctccgggctccatcatgcaactgccacccaggttaccatggagagaggtgtcatgggctgaccctaccggtggagaatcgcttatatacatatgaccacactaccatcttggctgtggtggctgtggtgttgtcatctgtctgtctgcttgtcatagtggggcttctcatgtttaggtaccataggcgaggaggttatgatgtggaaaatgaagagaaagtaaagttgggcatgactaactcccactgagaaggacctgtgctcaaggaaccttcagaggatggttccctctgagacactggttcatacaagttctacagaggggaaagacttcagaagcagccatgaagacttcttcattcccagttgctaccctgactgggcctcccataattactctgacaaaagactggaaaaaanaaaaaaaaaggagttgagaaaccatgtgttcaagtacaagggatctgctgtttggaccctccagcacgctggatttgatgagctaactgtgaaataccacaagcccaagaactctaaattttgggacttctacccagatgggaaaaataacaactattttttgttttgttgtttttgttatttgtttgtaaaatgcctcttaaattatgtatttattttattctatgtatgttaatttatttagtttttaacaatctaacaataatatttcaagtgcctagactgttactttggcaatgtcctggcccacccctttgcagctctaccatccagctcggtgacacactcccatgtgctctgtaacccatctgtagtaatttattgtctgtctacatttcagaagatatcccaggagcagagtatccaggggggagttgtgtatggtcagagtgcagggaatgatttgggcagagccactctgtgagttggactgcaatcttgcctaggtgatttttgtctactgtttgtgttttgaaagcccaaggtgctgatgtcaatgtgtaatagattttggtgtttacctgtgtcctctccctgccaaatctcagaagacattgggcatccatgcctgcagtttcctggccccttttcctctatcaccctttcccactctccctgtgtcaagacatttcccttactcctgccattctcctggtgctactccatacagacagagtttgtagagagaggacagtttggggaagtgattagtaaggaaaaggctgaggaggagcagggaacgttggagttgactactcctggtaattgattacctatcaattgctacagggaaggttggtgttagggaaggttttgggtaagaactatacagtctcaccaaaactgtaatgttgttatggttcccatgaaagtttctggtgccacttatgaactgttacaacctatatttccaaaacctggttcatatttatactttgtgatccaaataaatataacccttactccatccaaaaaaaaaaaaaa

SEQ ID NO: 1935 - DNA, 2100 bp, Cricetulus griseus
gactgacggtggcctaggttttccaagaactgctcgccagggagcccatctgcagccaccatgtcgggcaggaacaacaacaagctgcccagcaacctgccgcagttacagaacctgatcaaggccgggacccgccggcgtacatccgaggtacgttccctccagcagtataatcactataaatccaatatggagattttcaagttacaaccaaataaacctagcaaagatctggcagagctggtgatgttcatggcacagattggccactgctacccggagcatctcagtaacttcccgcaggagctgaaggagctgctctcctacaatcacactgtcttggacccggatctccgaatgacattttgcaaagcattgatcttgctgagaaataaaaatctcatcaatccatcaagtttgctagagctcttctttgagcttctgcgatgccacgacaagctcctacggaagactctgcacacacatattgtgactgacatcaagaacataaacgccaaacacaagaacaataaagtgaatgtggtgctgcaaaatttcatgtacacaatgctgagagacagcaacgccactgcagccaagatgtctttggacgtgatgatcgaactctacaggaggaacatcgtggaatgatgctaaaactgtcaatgttatcacaactgcctgtttctccaagatcaccaagatactagttgctgctttgacatttttctcggcaaagatgagggagagaaacaggacagtgactcagaatccgaggacaagaagaagttggaaaaggcaatgaaagtgctaaagaaacaaaagaagaagaagaaaccagaagtgtttaatttttctagctattcatttgattcatgatccccaagattttgcagaaaagcttctgaagcagctagagagctgtaaggagaggtttgaagtgaagatgatgttcatgaacctcatctccagattggtgggaattcacgagcttttcctcttcaacttctacccttttgtgcagaggtttctgcagccccaccagagagaagtcacaaagatccttctgtttgctgcacaagcctctcatcacctggtgccgccagagattattcaatcactgctcatgacggtggccaacaattttgttactgacaagaactctggggaagtcatgaccgtaggaatcaatgctataaaagagataacagctcgatgtcctttggctatgactgaagaacttctgcaggacctggctcagtataagacacacaaagataagaacgtaatgatgtctgccagaactctgattcatctcttccggacactgaaccctcagatgctgcagaagaagttccggggtaaacctaccgaagcctctattgaagcaagaatacaagaatatggagagttagatgctaaagattacattccaggagcagaagttctagagattgagaaagaagaggatacagaaaatgatgaagatggatgggaaagtgccagtctcagccctgaggaggaggaggatggcgaatgggttgatgtgcaccactcttccgacgaagagcagcaagaaattgccaagaagctggacagcatgcccatggaggagcggaaagccaaagctgcagccatcagcacgagtcgggttttaacacaggatgacttccagaaaatccgaatggcccagatgaagaaagaaatggacgctgcccccgggaaagcccagaaaaggaaatacatcgaaatcgacagtgatgaggagtccaggggtgaattgctgtctctgcgggacattgaacgccttcataaaaagcccaaatctgacaaggagacgagactagcaactgcaatggcaggaaggacagaccgaaaggaatttgtgaggaagaaaaccaaaataaatccattttccagttccacaaataaagagaaagaaaaaacagaagaactttatgatgatgcgatatagccagaatgtccggtacaaaaaacacaacgctccttccgggagaagcagctggcactacgagatgcacttttgaagaagaggaaaagaatagaagtaacttagcagcaagttgtccatctcctgcc

SEQ ID NO: 1936 - DNA, 2100 bp, Cricetulus griseus
  modified_base (20)..(20): a, c, t, g, unknown or other
gccagacaagaagagaaggngagaaaaaggagaaggagattctggagtcccaggagaagcagcagagagaagcattggagcaggctgtggccaagctagagcagaggcactctgccctgcagaggcgctccaccctggacttggagatccaggagcagaggccgagacttggctctctccacagcatggagaagtcagggctgtgggccaacctggacatcaaacaagaggcccttgagaaggaccctgtacggctagaacatgaaatccaccagctgaaacagaagatctgtgaggtggatggtgttcagagacctcatcctgggaccttagaggggaaggctgctctttccagcttgccgcccagggctgaaaactctcaccttgctccactgatggatgccaggatcagtgcttacattgaggaagaagtccaaagacgccttcatgatttgcacaggacgattggtgattctggccacacacctgctgatgtgataaagagtaacgaggaacttcacaatggtgccattcaacgtaagctaaaatatgagcggatgtattctcgttctttgggagcaaatccagacgacctgaaggaccccattaagattagtattccccgctatgtcctgtgtggtcaaggaaaggatgaacactacgagtttgaagtcaagatttctgtcctagatgagacatggactgtattcaggcgttacagtcgttttcgagaaatgcataaaacattgaagctaaagtatgcagagctttctgctcttgaatttcccccaaagaagctgtttggaaacaaagacgagagagtggttgctgagaggcggacacacttagagaaatacctcagggagtttttcagtgtgatgctccagtcttcgacatctccccttcacatcaacaaagtgggactgaccctgtcgaagcacaccatttgtgaagtctcacccttcttcaagaaaggcgtctttgactacagcagccatggaacgggatagatgtgaggtgacagaggaaccaccaacacagtgccttctcatcaaagtgactccaatgcaggcagatgccttcctgcaccaggatgccagcctgcctcctcccgttggggcaacatgcagcagcccacccagaccacctcacacaccatatctagtgcctgagtttgggagtggggcagcgaccaagagcgaccctgaccggcagttgttactgtacctctgcacttgaacgtaggcccttctcattgtgcagcaagtcagtcccctctggcaaatggatgtgcagcttgctgctcttatggctcccagagccaagcctacttgggacctcccaaagtgggtggcttaccagaccacccttcagtgactttcatctggtttcctctttcaccaaaatatgcttttttttttatactccttccatgtggctggctatatttcaaagatgttttaagttatgttgtattgttttgcttaattggattgggacttaatatacctaaacactgaagtttacaccaaatgccctattctgcaaaaaggatctgtcggtcaatcatgaaaagagtcttccatgcctgataaactggatgtaggcaacatcacttaaaactcataaaaacccctgcaaataagacattgcttaaaccttcaatatttgagggcattttcccaaacctcaatggctgttgtccattcgtgagctttttctgcataaaacaagtgcaaagctggatgcaatcttttaaatatccttttgttcatgttttagtacagaatcttcaggatcattagctaaaaaaagagaattttcagtagtttattaataatccctcaattactcaggacataatgtagcattgcacatctgtgtacagtgaaactgcttcgtttatcgaaaaggaattgtgagtaaggaaaaaatatgtggtatatattgaaatgtacataactctacctatagatttatatgtatacactcctgtacaatagtccaatatcaggctgtataatcacaccaaatttattaaaggtgtttgcttttttcaactgttaaattgaagctgctatcaatattaaatgaagtcat

SEQ ID NO: 1937 - DNA, 2099 bp, Cricetulus griseus
gccaaaacagaaatggaagccatttagtcagaagcagataatgtcactggagcagtcctaaaacatctgacgtcacaagaccggggctggatcaaactggatagcaattttgaggtcaattttgacaaagttccaatggaaatgcggcttcctatccggtgccctattaaacgggacttcttatcagggattcaagttgaatttaagcagtctcctcaccagagaagcttaagggcccggttatactggctccaggttgacaatcagttaccaggcaccatgtttccagtggtatttaatcccgtggctcctcccaaatccattgctttagattcagagcccaaaccgttcatcgatgtgagtgtgatcacaaggttcaatgagtacagtcaagtcttacagttcaagtattttatggttctcatccaggaaatggccttaaaagttgatcaggggttccttggagctattattgccctatttaccccaacaactgcccctgaagctgaaagaaaacggacaaagttaatccaacaagatatcgatgctctcaacacagagttaatggagtcttcaatgactgacatgtcgatcctaagtttctttgaacattttcatatatctcctgttaagttgtcatttgagtctgtctttgggttccggaggtgaggaatcaagacaaagaagaaacaggaaatgattgcaattcattctgtgaacctgctgttgaaaaagcataggtgccactctgactgacgtggatgacctcatattcaaactggcctattatgaaattcgctatcagttctacaagagagatcagctcatgtggagtgttgttagacactacagtgaacagttcctgaagcagatgtatgtgcttgtactgggcttagatgtgcttggaaacccatttggactcattaggggcctgtcagaaggagtcgaagcactattctacgagcctttccagggtgctgttcaaggccctgaagaatttgctgaaggattagtgattggggtaagaagtctctttggacacacagtaggtggtgctgcaggagttgtctctcgaatcaccggttctgttgggaaaggcctggcagcaattacaatggacaaagagtatcagcagaagagaagagaggagatgggccgacagcctaaagattttggagacagtctggccagaggagggaagggcttactgcgcggagtttttggcggggtggctggaataatcacaaagcccgtggaaggtgccaagaaggagggtgctgctggtttctttaaaggaattggaaaaggactcgtgggtgcagtggctcgtccaactggcggaatcatagatatggctagcagcaccttccaaggcattcagagggtagcagaatcaactgaggaagtgtccagcctccgtccacctcgcctgatccacgaagatggcatcatccgtccatatgacaggcaagaatctgaaggctccgacttattagagaaccatatcaagaagctggaaggtgagacctaccagttccactgtcccgttcctgggaataagaaggcagtctttatgattacaaacaggcgagtgctttttgtaaaggaagttgagatcctaggccatatgtctgtggactggcagtgtctgtttgaagattttgtgtgtcctcctgaagtcagtgaaaatctgctgaagatttcagttaaggaacagggtctcttccataaaaagacagtgccaatctaggctgtcttcggaaaatttatctgaaggattccatcaccgcaaagagagcatttgatgccattgagagtgcacagtcatcaaggtaccagcagaagctgatgaagcagccttcactcaggctccacaggccccaagttccatcttgaccacagattttacaaggcttctgagagggaaactgtcacttcaaaaatccttcgaaaagaaatttccagcaattccttgtgttgtttttcactgtgttttcctttggacttcttagttttgagttctgggttttgcaactctgcatacattaggactctgctgctgcagcatgtaggtcagacctcaaagaataccacttcag

SEQ ID NO: 1938 - DNA, 2098 bp, Cricetulus griseus
ccgaccatatttagtacgcactgtatgcccagtgaccccaggttctgggccacagtaaccaactcgtacctgggtacacgtgtatatcatgacaccatacacgtaaacggtgtgtacaatggagctggagggcacactcaccgggcaattctgcccagccccctcaatgtccagctggaggcgcctgcaggaacaaaaccactgactgagacctttaccctggatactaacacaggttccttcctgcacaccctggaaggcgctggcttccgggcttcccaatgcatctatgctcaccgtgtgttaccccatgtcctggccttcagcgtgtccattgaacgcttgactacaggcaacaagcccatcacagtgttgctaccgtcatccttctcccagaaagcccagacttggcctgcaagtagggcctgacttccagggagcccggtacctacatgggcacacactcacccctgagcagccaggagagccacagcctgggactttctgactgtggttggtggtagccagtctgaggcccagggctgctttgctgaggccctgcagctgcaaaccaggggtgatctgtatacagtccatgcagacacttgggtccagctctgggcaggctgtggcctggatgtgactgggcccttggccctgcgccaagcccttcgtggttctctctactacctgctcagtgagcttccccagccaggcaccaaaggattcatcaaccatgggcttagccctggaggcctcgctaatgggagtcaggaggagtgctactggggccatatattctgggatcaggacctctggatgttcccaaatattctgatgttccacccagaggctgccagggccatcctggaataccgagtccgtacactgggaggggccctgaagaatgcccagaacctaggctaccggggagccaaatttgcttgggagagtgcaagcactggcctggaggtctgccctgaggacatttacgggatccaggaggtccatgtgaatggagccgtggtgctggctttccagttgtattaccactgcactcaggatctgcagctcttccaagaggctggtggctgggatgtggtcagtgctgtggctgagttttggtgcagccgtgtagaatggagcccccaggagaagatgtaccacctgaaaggagtcatgccccctgatgagtaccactcaggagtgaacaattctgtgtataccaacgtcctggtgcagaacagcctgcgctttgctgctgccttggccaaggacctgggtctgcctatccccaaccagtggctggaggtggctgataggatcaaggtgccatttgactctgagcagaacttccaccctgagtttgatggctatgtgcgtggagaagaagtgaagcaggcagacgttgtgctcctgggatacccagtccccttcccctgcgacctgacatccgaaggaaaaatttggagatttatgaggctgtgacatccccccagggccctgctatgacctggagtatgtttgctgtgggctggatggaactgaaggagccctctagagcccaggtcctcctgagcagaagtttcatcaacgtcactgagcccttcaaggtgtggacagagaatgcggatgggtctggcaccgtgaacttcctgacgggcatggggggctttctgcagacagtactcttcgggtgcacaggattcaggatcactgaggcaggtatgacctttgaccccctgtgtccagacctggtgtccagggtgtctgtctctggcatctcctacctggggaacaagttcaacttcaccttttccaaggactctgtgacacttgaggtcacagcccatgcagagccatgggcacccctgctagaagctgagttgtggccatcactggcccggctccccctaacgccaggacataaggtctcatttccccactcagcaggccggatacaaaagtcatcgccctagctgctgagaaattacaacgcttcagtgtttcctgagccgagttttgacattagaaccacctttcagttcctcggagacatttttgcgttctcagctgcattggacagggttccagacca

SEQ ID NO: 1939 - DNA, 2098 bp, Cricetulus griseus
tacctggcttcctgggtcctcgaactgctggcctatctgggagtcagggcagcctgacccagctgtttgggggccagcctcctcctcctcctcttcctcttcttcctctgctgctgacaaacccttggcattgagtggctgggccagtggctgcccatcgggaacattgtcagactctggccgaaactctttatccagcttgcccacctacagcaccggaggtgctgagccaaccaccaactccccaggtggccacttgccctcccacggccccagccgaggggcactgcctggtccagccagaggggtccctacggggccctcccactcggacagtggccggtcctcctccagcaaaagtacgggttccttggggggccgtgtagctggggggctcttgagcagtggtgcccgggcctcccctggcagcagttcgggtggagaccgctctcccccccctccgccccctccacccccttcggatgaggccttgctacagtgtgtcctggaagggaagcttcgtgaccgagaggcagagctgcagcagcttcgggacagtatggatgagagtgaggccacggtgtgtcaggcttttggggcccggcagaggcactggccacgagagcgggaggactgtgcgacccaggggcagcaggccacacagcgtgtccagcgggcccaacagctgctgcagctgcaggtgttccagctgcagcaagagaagcgccagctgcaggatgactttgcacagctgctgcaggagcgagagcagctggagcgccgttgtgctgcctttgagcgggagcagcgggaactcgggccacggctggaggagaccaaatgggaggtgtgccagaaatccggtgagatctccctgctgaagcagcaactgaaggaatctcaggcagagctggtacagaaaggcagtgagctggtggctctgcgggtggcccttcgagaggcccgggctgccttgcgggtcagtgagggccgtgccaggggcttgcaggaggcagcccgagctcgggaggtcgagcttgaggcctgctcgcaggagctgcagcggtaccgccaggaggctgaacggctccgggagaaggctgggcatctggatgctgaggctgcaggactccgggagccccctgtgcccccagccaccaccgaccctttcctcctggcagagagtgatgaggttaaggtgcagcgggcagcagctggggcagggggcagcctgcgggctcaggtggagcggctgcgccaggagctacagcgggagcagcggcgaggagacgagcagcgggacagctttgagggggagcggctggcctggcaggcagagaaggagcaggtgatccgctaccagaagcagctgcaacacaactacatccagatgtaccggcgcaaccggcagctggagcaagaactgcagcagctcagcttggagctggaggcccgtgagcttgctgacttgggcctagctgaaccagccccctgcatctgtctggaggagatcactgccactgaaatctagggctttgcaaagggcactagccacacaaccacctgggtcccaggatccactgagcactccaggtctcagagccaaagggcctctgccaagcattcaggtggccttgtgacttggaggagaaagatcagacccctcgatgttccaattcactgtcacccagaggctcctaccgaccccaccacttcactccccagctgtccactccagcgggaaaagaaaggggctaacccatctccacattctacctgcctgaagccagagagagccagatggcaccagctgctccagatgtgcctgccaccgacaggcccaggtggaaggacagggctaggactggggtctgatccccatgtcccagctctgcaagcctcttctgggctgagggggctgaagtcagaccaaaggaagaactcagcagtgtcttgtttatttgtgtttgtgaccaagcagcctctcctaataccagggttatggccccattttcacttgtatatttttcactgtaaatttcttgtacaaatccaaaggaaaaaaaattaaaaaaaaaagaaaaaatttttttaaaaa

SEQ ID NO: 1940 - DNA, 2098 bp, Cricetulus griseus
caagacagtggaggtggagtcatccaagaccaagcaggccctcagcgagtcccagacccgaaaccagcacctgcaggagcaagtgggccatgcagcggcaggtgcttaaagagatggagcagcagctgcagaactcccacacatgggcagatgctggaggagatgcagtccctggaggaggataagaaccgggccattgaggaggccttcgcacgggcccaggtggagatgaaggcagtgcacgagaacctggcaggtgtcaggaccaacctgctaacgctgcagcctgcactgaggaccctcaccaatgactacaacgggctcaagcggcaggtgcggagcttccccctgctgctgcaggaggctctcaggagtgtcaaagctgagattggccaggccatcgaggaggttaatagcaacaaccaggagctgctgcgcaagtaccgccgggaactgcagctgcgtaagaaatgccacaatgagctggtgaggctgaagggaaacatccgggtgattgcacgagtccggccagtcaccaaggaggatggggaaggacctgaggcaaccaatgctgtgacctttgatccagatgacgactccatcatccacctgctgcacaagggcaagcctgtgtcctttgagctggacaaggtcttctccccaagggcttcacagcaggatgtattccaagaggtgcaggccctcattacctcctgcatcgatggcttcaatgtttgcatctttgcttatggtcagacgggtgctggcaagacatatacgatggaggggacccccgagaaccccggcattaatcagcgggccctgcagctgctcttctctgaggtgcaggagaaggcctctgactggcaatacaacatcaccgtcagtgcagctgagatttacaatgaggtcctcagagacctgctggggaaagagcctcaggagaagctggagatccgactgtgcccagatggcagtgggcaactttatgtgccagggctgactgagttccaggtgcagagtgtggatgacatcaacaaggtgtttgagtttggccacaacaaccgcaccacagagtttaccaacctgaacgaacacagctcccgctcacatgctctgctcattgtgacagtgcgtggtgtggactgcagcacaggcctccgcaccacggggaagctgaacctggtggacctggctggttcggagcgtgtgggcaagtcaggggctgaaggcactcgccttcgagaggcacagcacatcaacagatcactgtctgccctgggggacgtcattgctgccctgcgttcccgacagggccatgtgcccttccgaaactccaagcttacctatctgctgcaggactccctcagtggcgacagcaagactctaatggtggtgcaggtgtccccagtggagaagaacaccagtgagacactgtactccctcaagtttgctgagagggttcgatctgtggagttgggtcctgggtcccgccgcacagagctgggctcctggtcaagccaggagcatctggagtgggagccagcttgccagacaccgcaaccaacagcacgaacccactctgcccctggctccgggaccaacagccgcccgggctccatccgaagaaagctgcagccatcagcctgacggctggggctgcagtctccagggaagttgaagccagtgcctgtgtgaagatgtgccatgctgccagggctctcctgccctgcctcctcctcagagatgagaaacatgttcagaaggaagcgagtgtctgtggtggctctaggcactcaagcattactagtggggaaggctgaggaaccagctaggggttagggagagcaagaacatctctttttaccctcctgaggaggggatcccttagtggagtatgtatataatgttccaaggtgtatataggagccctcaccctgtcaggggtctgggctgtatttaaggctggcagaggccaggggacagggctgggtcctgctcatctgcctgacaccaggcattctccctacccaccttagtcatttttactttattaaaatagaatgtctttttactacaaaaaaaaaaaaaaaaaaaa

SEQ ID NO: 1941 - DNA, 2098 bp, Cricetulus griseus
gcttgctgaggcctatgcagatctggtaaagcagacctggtctggctaccaccgctccattgtgccgaatgtcttcaagaacaaggttggccattttgcatcccagtttctgggctaccagcagcatgactcacaggaactattgtcattccttctggatgggctacatgaggacctcaatcgagtcaaaaacaaagaatatgttgagctgtgcgatggtgctgggcgcccggatttggaagtggctcaggaagcctggcaaaaccacaaacgacgaaatgattctgtgattgtggatactttccatggcctcttcaagtctacgctggtgtgccctgattgtggcaatgtgtctgtgacctttgaccccttctgctacctcagtgtcccactgcctgtctcctccaggagggtcttggaggtcttctttgttcccatggatccccgccgcaagccagaacagcaccgggttgtggtccccaagaaaggcaacatttcagatctgtgtgtggctctgtccacacacacaagtgttgcaccagacaagatgatagtagctgatgtcttcagtcaccgattctataagctctaccagctggaggatcctctgagtagcatcttggatcgggatgatatctttgtatatgaggtgactggtcggattgagcctgttgagggttcaagagatgatatcgtggttcctgtttacctgcgagagcgaacccaatcccgagacttcaacaactcctactatgggctgatacttttgatgaagaggaggaggaggatgacaacgaagacagcagcagcgatgaagaaaaagaggaaattcctgaaccttccactagcaatgatgatcaagaaacagagcaggagcaggctgggcccagctctgggggcaccaggagatgcccatttctcttagacaacagccttcacacatctcagtggcccccaaggcgacggcgaaagcaactgtttaccctgcagacagtgaactccaatggaaccagtgaccggaacacctcccctgaagaagttcaaacccagccatacattgccatggattgggagccggagatgaagaggcgttactacgatgaagtagaggctgagggatatgtgaagcatgactgcgtgggatacatgctgaagaaaagtccagtgcagctgcaggagtgcatcaaactcttcaccactgtggaaacccttgagaaggagaacccctggtactgctcctcctgcaagcagcaccagctggccaccaagaagctggatctctggatgttgcctgaagttctcattatccacctgaagcgtttttcattctccaaattttctcgggagaagctggacaccctggtgcagtttcctatccgggatctggatttttccgagtttgtcatcaaaccaaagaatgagtctactccagacatgtacaaatacgatctcatcgcagtttccaaccattatggtggcatgcgtgatggacactatacgacatttgcctgcaacaaggacagtggccagtggcactactttgatgacaatagtgtctcacctgtgaatgagaaccagattgagtccaaggcagcctatgttttgttctaccaacgccaagatgtgggtcgccgccagtcccagactgcttcatccaataccccagcttctcctgcctctggttctccatccaatcctgaagtcatggatgttaactaaggggaactggaactaccacagagaaagaagccccctttgccacttcctcttgtcaaccccctcccttaacctgtgttcattgcccccccccccaggcattgcaggcttagttcgtggctactgtattcttgtatcgctgtattactctctcagaaagaagaggccctgcgcccctggccaaccgtgtgcccctgcctgtgtgtgcccgtacaacagtgacttcccttcctagtcttatttatgctccccttcccatcttttccttaccccaaagtgttcttagtggctgataatgggggttcacatgaacacagagtgtattttcttattgacaccatataccttctgctgtgtgttaaatatacataaaaagctccag

SEQ ID NO: 1942 - DNA, 2098 bp, Cricetulus griseus
gaagaaatttgcgtgccctgagtgccccaagcgtttcatgaggagtgatcacctgtcaaagcatatcaagacccatcagaacaaaaagggaggcccaggtgtcgccctgagtgtgggcactttgcccctggacagtggggcaggttcagaaggcagtggcactgccactccttcagcccttattgccaccaatatggtagccatggaagccatctgtccagagggtattgcccgtcttgccaacagtggcatcaacgtcatgcaggtgacagagctacagtccattaatatcagtggcaatggtttctgagattagatacctagagccaagagacatatgggccaatacccaccaagcctgggatgcaagatagcatgggtccaagagacatgtggaagagagagccactcagtgcatttgacaccgagacttaaatgcaaccagaattgtcctcaaggcccagccattaaagcattgtctctcttgaccttctggtatcttgtcagagagcctttcactgtgaggaagtgtggaagtggttgtgtgtatgtgtgtaatctattaggttggggataggttttctgttagccaatatttaaagagacctgcaataaaaaattaccctgatctgatagagaaagtaaattgtgtatgactgtgtgtatgaatgggtgtttgtgcctgtatatatctacgtgcagatgagaacttatatttgaaattgttggaaagtaaattcagattaaaaatgcctttcaggcctgttacctaggaattggttataaaacttgggtatgttcttgaggtcagttctctgcttatgctaaatcagttacaattatgaatggggtggggatctcctagtgctactttctaaagaagaaacttatttttgtgtttgaaaatgaaatcaacagcagaaatagtaatcttaaacgcattcatccctttgttctgggttgcccattcataattcatctgcatcctatttgactgtcacctttttcctagaaaggaccaacccaccatcttcctctggggacctcccagcaggcactctcttttggggtgctatgcaaaattgcaatataatggatatttctcagtctggtttcagaataaatagaacctttaattgcagaaagtatagactgaagtatggggtgaagggtgttataatttggggagggttggagactaaagctgtaaattactatggctgatttatttctactatatgcatatatattttttgcttttgtatatcctatatagaaaactaagcattgtattttttaactaaatctgagaaagcactatgaactgcaggtgtttgtttttttcttcatctgccccttctttaccaaacagcccaaccttgtcttggctaagaaggtcagggactcatctgtccttcagcttctctaagtcccagcttttggggggtggagcaagacaaattaggctggtgctgcaggtagagaagaatgttggtacatctgcttggttgtgtgctttcctatttcttgccttcaggaatcacactgtgccttctccactagggaattgattctatctacccagcttttttcagtaactgctcttgaaaactttggataatggcagttcttcatatttctgatgattcttttctccctgtaacatcctgatagcccttacctagttaaagactaggcaagaagtctgaagggaatatgctgatactgatctgaggaaaccagaggcagctgtcctagagcctgcttccctctcccaagtctgtcatcccagggcagaggagtagtgctccaatttggtgcctaaagcaagtttatctttctttatactggcaataaccagtctccataccactgttgcctttaaacctcaagctatgtttgttgtgggttccaatccaattaccaccagggctgtgggtaaatacttctaaacagtcactcaccttgttctctaccctcactcttgtgtacgtatgatgttaatatcttgtcttcctgctccttttgtatcttccttgtctctctccccctaactttgttcctgggtgttttggggatctcaatatctctttctcta

SEQ ID NO: 1943 - DNA, 2097 bp, Cricetulus griseus
  modified_base (1805)..(1805): a, c, t, g, unknown or other
gaagaacttcgcctaccttcaccccaccaagactatgaaatgcgtatagcctcttcagatacagtccctcctgccccgggaactgttccaccagtcaaactggagggatgaggatgagtccgactctgagctggacttgagcaagttgtcaccatcatcctcttcttcttcatcctcatccagctccagctccagcactgacgagagtgaggacgagaaggaagagaagttaactgctgaccggtcccgcccaaaacctgtatgatgaagagagccttctgtccctcactatgtcccaagatggatttccaaatgaagatggagaacaaatgacccctgagctgctgctgctgcaggaaaagacaaaagagcctctgaatggcccaaggatcgtgttctgataaaccgcattgacctcgtctgccaggctgtactctcagggaaatggccttctaaccgtcggagccaggaaatgacaacaggaggaattttggggccaggcaaccatttattagacagtccctctttgaccccaggagaatatggggactctccagtccccacaccacgaagtagcagtgcagcttccatggtagaggaagaagcatctgcagtcacaacagcagcagcacagtttaccaaacttcgccgaggcatggatgagaaggagtttacagttcagatcaaagatgaagaagggttgaagttaacattccagaaacacagattgatggctaatggtgtaatgggagatggacatcctctgttccataagaagaagggaaacaggaaaaagctagtagagctggaggtggaatgcatggaagagcctaatcaccttgatctggacctggagacccggatccctgtcatcaataaggtggatggcactttgctggtgggtgaggaggcccctcgccgggcggaactggagatgtggttacagggtcatccagaatttgctgttgatccccgatttctagcgtatatggaagaacgtagaaaacagaagtggcagagatgtaaaaaaaataataagacagaattgaactgtttgggaatggaaccagtacagacaaccaactctagaaatgggaaaaagggtcactatgctgaaactgcattcaaccgggttttgccagggcctattgcaccagagaacagcaagaaacgtgtccgtaggacaagaccagacctttctaagatgatggccctaatgcagggtggaagcactgggtccctgtctctgcataacacctttcagcacagcagtagtaacctacagtctgtgtcatctctgggtcacagcagcaccacttcttcgtctttgccttttatgccgtttgtgatgggtggtgcagcagcatcccctcatgtagactccagcaccatgcttcatcaccaccaccaccacccccacccccaccatcaccaccatcaccatccaggcttaagaaccactggctacccttcttcaccagctaccaccacctctggtactaccttgcggttaccaacactgcaacatgaggacgatgatgaagaggaggaggaggatgatttatctcagggctatgatagctcagaaagggacttctcactcatcgatgatcctatgatgccagccaactcagactccagtgatgatgctgatgactgaagccccagcatagtccccattgctgggtggctgctggattatcttcctctggcccttggactttggaaatgtgggaggggcagggaacaatatggggaaacccaagacttaaggaggtgaaaaggaaaagaaaaaaacaaaaaanaaaaaaaaaaaaaacttgtacctgattgctcccaattttgagaggattgggtgggcaggggaactcctaaaaaaaaaaaataaatgaccacttcctcaattctggggaagcaaaggagcctagagcagctggtgtgctcgcccctccccagacacctccattaaccacagactatgtagcgctggccctagcctctggcagagcctgttcctggccaaactgtgggtacagctggagggtcaggaactgttaccttccttcccttggcattaataaattaagttaatacctt

SEQ ID NO: 1944 - DNA, 2097 bp, Cricetulus griseus
tgcgtgctgacgtcaggcgcgtgcccctgtccggcagccgaggaggccccgcgcagtgctgccaacgccccggcggagaagctgaggtcaccatctaatttgaaatattaaaagtggatacaaaactatttccacaatgcagacaattaagtgtgttgttgttggtgatggtgctgttggtaaaacatgtctcctgatatcctatacaacaaacaaatttccatcggaatatgtaccaactgttttcgacaactatgcagtcacagttatgattggtggagagccatatactcttggactttttgatactgcagggcaagaggattatgacagactacgaccgctgagttacccacaaacagacgttttcctagtatgtttttcagtggtctctccatcctcatttgaaaatgtgaaagaaaagtgggtgcctgagataactcaccactgtccaaagactcctttcttgcttgttgggacccaaattgatctcagagatgacccctctactattgagaaacttgccaagaacaaacagaagcctatcactccagagactgctgagaagctggcccgggatctgaaggctgttaagtatgtggagtgttccgccctcacacagaaaggcctaaagaatgtgtttgatgaagcaatattggctgccctggagcctccagaaccgaagaagagccgcaggtgtgtgctgctatgaacgcctctccagagccctttctgcacagctggtgttgtcatcatactaaaagcaatgtttaaatcaaactaaagattaaaaattaaaattggtttctgcaataatgacaaacgccctgcacctacccacatgcactcacgtgagacaaggcccgttggtatggctccctccttgcccttccagtaatagttaattttgaataattgtgtattgtctgaaaagtgacgagtgttagtttttgtttccttagtttaaaaaaaaaaaaaagatcccaccaatcttttgttttgttttgttttgtttaaaagcaaggcatgcttgtgatgactttgtaacagactaatttgaattgtcaaagctgctccctggttccattttggagagcaatctggagcatcttcccttctctccttttggggtgtgtggggagggttgtttcttagtcttgtttttaaaatttgttaaccagtggacagcccttagcaggaggacagattatttccacattccactccccaggtctagtttagcaaatgtgtccccacctggtgctcttaggaaggagtgtagaaacgcctcatttaataacatactccttcttgaaagttgccttttctctccacccttgagtggatccagtctttgatgaaactcataaaggtggatggaagctgtcttgcccctcttttaggatgcactctgtatgtgactgtgactttcaagggtatttatttgccctttgctgatttggggaggggggataatttctaacttctttcattgataaatgaaaaaaaagtattgcaccttttgaaatacaccaaatggattgagttcctaattaaaagaagacgttcttttgcccctgtcagtcattttcttatatgcttagcatagatttacaactgactgtagtgttccttgattcagctgaagacctggtacacagggttccttaagggatggtgctagaagacgaatggttatgaagactaccatctcctttcaggtggtgaggttacaggcctgcttcattaagaagctatgagcatgtggggtggggagcatacttaaccaacatggggaccagtcagggctatccccttttttcttccatgcctctgaggaacccttgaacaactggctgaagctttcacattcaagaaaaatggcaagagcctcatgactcttcataagtgttaatagagatttatcagattattttgtttgcaggttccaatttttaaaaaatgtttaggtaatcttcccagtcctaatcttgtggattcgtcagtgctgaaccaatgctttcttgtgtcccagttctttgtatatgaattcttttcagatatattaaacaaacaaaacccttcacaaataaaaaa

SEQ ID NO: 1945 - DNA, 2094 bp, Cricetulus griseus
acgaggcgcaagcaagaaacatgctctgaactgtcacagaatgaaaccggcgctcttcagcgtcttgtgtgagatcaaagagaaaacaggtctcagcatcagaggagcccaggaggaagaccctcccgacccccagctaatgagactggacaatatgcttttggcagaaggggtttcaggtcctgagaaaggtgggggatcggcggcagcagctgcagccgcagcagcctctggaggttcttcagataactctattgaacactcagattacagagccaaattgacccagatcagacaaatctatcacacagaactggagaaatatgaacaggcatgtaatgaattcacaacccatgtgatgaaccttctccgagaacagagtagaacgcgtcccatttccccgaaagagattgaaaggatggtgggcatcatccatcggaattagttccattcagatgcagctcaagcaaagcaacgtgtgaagcagttatgattttaaggtcaaggttccttagatgccagacggaaaaggcggaacttcagtaaacaggccacagaaatcttgaatgagtattttttactcacacctcagcaacccctaccccagtgaagaagccaaagaggagctggccaagaaatgcagcatcacagtgtcacaggtttccaactggtttggcaacaaacgaatcaggtacaagaagaacatcggcaaatttcaagaagaggccaacctctatgctgcaaaaacagctgtgacagctgcgcatgcggtggctgcagctgtgcagaacaaccagaccaactcacccaccacacccaactctggttcttctggttcttttaacctcccaaattctggggacatgttcatgaacatgcagagtctgaatggggattcttaccaagggtcccaagtcggagccaatgtgcaatcacaggtggataccctccgtcatgttatcaatcagacgggaggctacagtgatggccttggagcaaactcactgtacagtccacataacttaaacgctaatggaggctggcaggatgcaacaactccatcttctgtgacttctcctacggaaggcccgggcagcgtgcactcggatacctctaactaatccccggggctttcccagctgacatgccttgataagcgcattcagagcaataggaggagaaggaaagcgtttgtaactcaccacctacagctttatgtaaaccctgtcttcttagagaactcgggaaacctgtttttaaggaatcattatcatttgtatttaaacttaagacacacgtttaaaagaaagcactttatccaattaggccaaggtgtaacattgttgacagttctgtgactgttttatcataatttattattgatcttttacattaatggttccacagttgccagttacttggccttaagggtaagaagtaccatctatgctagatcccagctatagagtatgcaaggttcactttgcctgagctgaacccttgcagatttccatgcagactctcattgtcatccttctgtcaccgatgggcttggagaggaggcactgtctgcctgtctcccctaaggaaggcatatttcagaacttccctcgtcatgtttgtgttgccatctcttaagttgtaattaggtcaaagactggtggcctcctttctccctctgaagcaccagagcctggagtctgcactgatgagaccatggatccagattgcctgagatgaagatctcactgctacagaggtgaaaacaaaacctgtctgggtttgaccatgtgcactgggtgctgcacagacttgtcaaggtgtgctcgtcctctgggcagccgggaaaggccctgctcttgggagtgctgtatatagtgtagcaaaagagtatttatacatcccaccaatcaaaacacagctttattacctcatgcgaactcatacaaaccaatagaatcccaacatgttctgtagcttagagcgctcacttactacctctgaacaatactcacgctgtagtttgtctctttcttatctttttgcatcttgtaattaactctttgtttcccttcacaaaatgtaatgtacatt

SEQ ID NO: 1946 - DNA, 2093 bp, Cricetulus griseus
  modified_base (2034)..(2034): a, c, t, g, unknown or other
gaagcgggcaacacagtgaccctccggatcatccccggggatgagtcctcaatacactgctgaccaatgctgagaagatcgccaccatcaccactactcatgccccatctcagcaagggacccaggaaacaaggaataccaccaaaccaaagcaggattctcagtttgagttcaaaggaccgcaggctgcacaggaacaagatttttacacggtggaactggaaagaggaaaccaagggatttggctttagtctccgaggagggcgagagtataatatggacctctatgttctgcgcttagcagaggatggtcctgcagaaagatgtggaaagatgaggattggtgatgaaattctagagatcaatggtgagaccaccaaaaacatgaaacattctcgggccatagaactgataaagaatggtggccgcagagttcgtctgtttctgaggcggggagacggctcagtcccggaatatgaccccagcagcgaccggaacggaccctccaccggtgcacaaggtgttccggaagtgaggcccgggccgcctgaccgcagaccgcatccagccttggagtccagttacccacccgatcttcacaaatcatcacaacatggggaaaagcgggcacacgtgaaggatccaaaaaggcaatagggagcatagcaaacaacccaacgaacaccacacctggaatggaacttctagaaaatccgacagtggggcatgccggcccaaagaccggccacccgatgcatggagagacgcacagccggagcggacagccaccaatggccccaagaagaggtccccggagaagcacagggaaggcacccgcagtgccgacaccactttggaaaggagggagaagcatgagaagagaagggagatgtcccctgagaggaagcgagagcggtcacccacccggagacgagacagctcccccagccgccggcggaggtccttggaaagactcctggatcagagacggtccccagagcacagaagagggggctcacctgagaggagagccaagtccaccgacaggaggagagccaggtcccccgagcgcaggcgagagcggtctctggacaaaagaaaccgggacgacaaggttggccaccgagaaaaggacgaggctggtctgaagcctgaagctgggagaagccccagaaatcctccagagcagagaaggcggccttacaaagagtgtagcactgacctcagcatctgagactcctgagtcacactgcaacctttaccgtgtcaaaggttctaagaggaaggtcgcaaacatgggataatttagtttcttacctgagaaagcatctacacctgacagacctatgaatagtaatggactattttatgatgaccctgttctttgtatctggggatagcaaaataaaatggaattgttttttctttctaaaatagacccattttctgaaccctcagatggtgtggttgggtgagctgtagccctgagatgtggtttaagtggattactgcctagctgagccaaagtgtttgcttgtacctgttggaccactacggcaaactgctgctgacagtgcatttgtatttctgtagtccttttttttggtaaaaaagagaatttatgacaaaagtctagctgtgaggaatgtggtatgtgtctatatttctgaatatgaacagattgattcttgggaatatactttaatgtaaagtaaatcaggtatgtaaagttgttttaaagagggagactgtataagtaatcactaaagctttagttggcgctatcatttctccacggagagcctactcatgaataatcaggcattcatttgcattctctgttcttcactcttttatttcatgcttagtgctccctctgtgttgatgaaaagcagtgtgtgggccaatctttttataaaacactatgcacatataaatattacattgttcatagctttatttgacttggggtttatacaagaaattacaccaagtagctatagttaatgtggacgtgatcaacgttctttctcngaatcagacacaatgtacattccgtagctaaaggggcggggagtctgtgattgctactt

SEQ ID NO: 1947 - DNA, 2092 bp, Cricetulus griseus
  modified_base (209)..(209): a, c, t, g, unknown or other
  modified_base (214)..(214): a, c, t, g, unknown or other
  modified_base (323)..(323): a, c, t, g, unknown or other
  modified_base (404)..(404): a, c, t, g, unknown or other
gtacaccggagcaccagtgctgggtctgtcgcttcccatatgggctatagcactcatttcctttggcgtggctgctgtttgccttctttgtgtggctcttcgtgtgtccgtggatgaggaggaaaatagcaggcaaattagaaaaggagagcgctctgtcacgcacttctgatgaaagcctaaggtccaggaggtggagtccccccttnaaggngctccctggtgccaaagccagcgatgacagcgctgtccccctcacccaacccgactggggaggctgtggggccctcagaaggcacatcgacagggaaccacccccgganagcctatggacgcgcactttccatgactcacggctctgcaaagtcacccatctcctcggggctctacaaagacttgttgcncaaaatccatgtagacaaaggccctgaggaaaagctctctcaggaaaacaactacaggctgcttcggcggaacaatagctacacatgctacacagccgccatatgtggcatgccagtgcataccaccttcagagccactgatgcctcctctgcccctgaggacagcgagaagctcgtgggcgacaccgtgtcctattccaaaaagaggctccgctatgacagctactccagctactgcaatgcagttgccgaggcagagatcgaggctgaagaggggggcgtagaaatgaggctggcctcggagctggcggatcccgaccagcctcatgacgaccccacagaagaagagaaggaggagaaggacacggcagaggtccacctgcttttccactttcttcaagtgctcactgcctgctttgggtcctttgctcatggtggcaatgatgtaagcaatgcaattgggccccttgtggctttgtggctgatatatgaacaaggtggagttatgcaagaagccgccaccccagtctggctactgttttacggaggagttgggatttgcacaggtctctgggtttgggggagaagagtgatccagaccatggggaaggacctcactccaatcacaccatccagtggcttcactattgagctggcctctgccttcaccgtggtgattgcctccaacattggacttcccgtcagcaccacacactgcaaggtgggctcagtagtagctgtgggctggatacgctctcggaaggctgtggactggcacctcttccggaacatatttgtggcctggttcgtgactgtccccgtggccggattattcagtgctgctatcatggctatcttcatgtagggacggtctaacgtgggtatgcgtattcacacctctccacccccactgtttgacacaagcacacccctcccacataccttcccagatggtttgacgccacacactgcttacccaggccacagaagttcatcttccagaattaacctaactactgtacatagtagtgtatatcaaactgatattgtgatgacataatgtggtgcagttacttatattaaatatatattgtgtacctagaatatgtagcatttattccaaacaaactcagaatgaaagtggagagtaccgcctggaatgcaatattctgttaagtgtatataatgatttcagcggtggcaagtgtgctgccataccaggtcctggtaggcttttcagtggcctttcattgtcaccagcgtggacaacttacagcaatgggggtgtagaattaaacactacatacatatcgagtccaattccagtgtccctccttgctctggcctgtagcctgaaaggaggaattcttgtcgcaaacattgaagccagtgaggctttgatgcgcctggatgctgtaaaactcagggctgagtggggaatattagaggggacactgggcttggggatctttgaggcctttttttgtgtaaacatgtgaggtcctcctgtagagccactattgtcttctgacggtgagacacagtatgactaaaatgttaagagcctgaaaccatggaaatgctgctaatatttttatattgacatacattttcacggtacttcattgttaattttttcattaatcaaccatattaaatttataataaaaaaagtgcccctacaaaaa

SEQ ID NO: 1948 - DNA, 2092 bp, Cricetulus griseus
gttccctaacgatggagggccctttgtccgtgttcggggaccgcagcactggagaggcgatccgctcccagaatgttatggctgcagcttccattgccaacattgtgaaaagttctctggggccagttggcttggataaaatgttggtggatgacattggtgatgtaaccattaccaacgatggggccaccatcctgaagttactggaggtagaacaccctgcagctaaagttctttgtgagctggctgacttgcaagacaaagaagtgggagatggaactacctctgtggtaattattgcagcggagcttctgaaaaatgcagatgaactagtcaaacagaaaattcatccaacatcagttattagtggctatcggcttgcctgcaaggaagcagtgcgctatatcagtgagaacctaattattaacacagacgaacttggaagagactgtctgattaatgccgctaagacatccatgtcttccaaaattattggaataaatggtgatttctttgctaatatggtggtagatgctgtacttgctgtcaaatacacagatctgagaggccagcctcgatatccagtcaattctgttaatattctgaaagcccatggaagaagtcaggtagaaagcatgctgatcaatggctatgcactgaactgtgtggtgggatctcagggcatgcccaagaggatagttaatgcaaaaattgcatgtcttgacttcagcctgcagaaaacaaaaatgaagcttggtgtgcaggtggttattacagatcctgagaaattggaccaaattagacagagagaatcagacatcaccaaggagagaattgaaaagattctggcgactggggccaatgttattctgaccactggtgggatagatgatatgtgtctgaagtactttgtggaggctggtgccatggctgttagacgagttctaaaaagggatctcaagcgtatcgctaaagcttctggagcaagtatcctgtccacactggccaatttggaaggcgaagaaacttttgaagctaccatgctggggcaagcagaagaagtggtccaggagagaatttgtgatgatgagctgatcttaatcaaaaataccaaagctcgtacatctgcatcaatcatcttacgaggagcaaatgatttcatgtgtgatgaaatggagcgatctttacatgatgctctttgtgtggtgaagagagttttggagtcaaaatctgtagtcccaggaggaggtgctgtagaagccgccctgtccatataccttgaaaactatgcaaccagtatggggtctcgggaacagcttgctattgcagagtttgcaaggtctcttcttgttattcctaatacactggcagtgaatgctgcccaagactccactgacctggttgccaagttacgagcttttcacaatgaggctcaagttaacccagaacgtaaaaacctgaagtggattggtcttgatttgatcaatggaaaaccacgagacaacaagcaagcaggggtgtttgaaccaaccatagttaaagtgaagagcctgaagtttgcaacagaagctgcaatcactattcttcgaatcgatgatctgataaaattacacccggaaactaaagacgataaacatggaagttatgaaaatgctgttcactctggagcccttgatgactgattggatttcccttttatttatagcagtgtcaggtgcaatgtagccttgggtatctcacattaaagtacagtgagctgtccacctgagttcctgttctcactttggtcctctgatttcacacattagtgtttcactcatttaacaagaatcctttaagggcgatggctgtcaagcagctcatcctctctgaacacacattgctatccccatcccacccccaatgcacagggctgccacaccacgagtcccgcccgttctctcaaggctgtgtaacaaggtcactagaatcctacagccagatgctcccaggggatggcccaaggcaatggctcctccatcgatgttgacctacagagaaggagaggggtttctctgtgtggctctggctagttctggaacaaactctgtag

SEQ ID NO: 1949 - DNA, 2092 bp, Cricetulus griseus
taccgcggcctgactcgcgaccaggtgaaggccatcaacttcctgcctgtggactatgagattgaatatgtgtgccgggggagcgcgaggtggtggggcccaaggtgcgcaagtgcctggccaacggctcctggaccgatatggacacacccagccgctgtgtccgaatctgctccaagtcttatttgaccctggaaaatgggaaggttttcctgacgggtggggatctccctgctctggatggagcccgggtggatttccgatgtgaccccgacttccatctggtgggcagctcccggagcatctgtagtcagggccagtggagcacccccaagccccactgccagggtgagtcaaaccgacagcgttttccaacgttcttccgaacacatccatccgccacactccacaatcccacccgggtgaaactctttgaaaagtggggctggaagaagattgccaccatccagcagaccacagaggtcttcacctcaacgctggatgacctagaggagcgagtgaaagaggctgggattgagatcaccttccgccagagtttcttctcagatccagctgtacctgttaaaaacctgaagcgtcaagatgctcgaatcatcgtgggacttttctatgagactgaagcccggaaagttttttgtgaggtttataaggaacggctctttgggaagaagtatgtctggttcctcattgggtggtatgctgacaattggttcaagacctatgacccatcaatcaattgcacagtggatgagatgaccgaggcagtggagggccatatcaccactgagattgtcatgctgaaccctgccaacacccgaagcatttctaacaaagacaccagaggagactggaggcttccaggaggcaccattggcctatgatgccatctgggccttggctttagccctgaacaagacctctggaggaggtggccgttcgggtgtgcgcctggaggactttaactacaacaaccagaccattacggaccccaagatctggtgggtccacacagtcttcacaaagaaagaggagaagaaggaatggaggaagaccctagagccctggaaactgtatgccacagtaggtctgctggtgggcatggatgttctgactcttgccatctggcagattgtggatcccttgcaccgaaccatcgagacatttgccaaggaggaaccaaaggaagacattgatgtctccatactgcctcagctagagcactgcagctccaagaagatgaatacatggcttggcattttctatggttacaaggggctgctactgctactgggaatctttcttgcgtatgagaccaaaagtgtttccactgaaaagatcaacgaccacagggctgtcggcatggctatctacaatgttgcagtcctgtgtctcatcactgctcctgtcaccatgattctttccagccagcaggatgcagcctttgcctttgcctctctggccattgtgttctcttcctacattactctggttgtgctctttgtgcccaagatgcgcaggttgatcacccgaggggaatggcagtctgaagcacaggacaccatgaagacagggtcatccaccaacaacaacgaagaagagaagtcccggctgctggagaaagagaaccgtgaattggaaaagatcattgctgagaaagaggagcgtgtctctgaactgcgccatcagctccagtctcggcagcagcttcgttcacggcgccaccccccaacacccccggacccctcctcgggggccttcccacgggggaccctccggagccccctgaccggcttagctgtgatgggagtcgcgtgcatttgctttacaagtgagggggtatcaagaaggatacagccagtaggggagggaaggggtgtgggaagagggtgggggactggggaggagggcacacacacacacacacacacacacacacacacacacacacaccattgtgccgtggtgtgcttgggtaggtgtgcagatggactgatgggtggaggcaatgtccctttcacactgtggtgtctcctgggaaggatctccctgaatctacaataaccagtgaaca

SEQ ID NO: 1950 - DNA, 2092 bp, Cricetulus griseus
ggaaactaaccagaccccagggcccatgctatgtagtacaggatgtggcttttatggggaatcctaggacaaatggaatgtgttctgtttgctacaaagaacatcttcagagacaacagaatagtggcagaatgagcccaatggggacagctagtggttccaacagtcctacctcagattctgcatctgtacagagagcggatgctagtttaaacaactgtgaaggtgctgctggcagcacgtctgaaaaatcaagaaatgtgcctgtggctgccttgcctgtaactcaacaaatgacagaaatgagcatttcaagagaggacaaaataactaccccgaaaacagaggtgtcagagccagttgtcactcagccgagtccatcagtttctcaacccagtgcttctcaaagtgaagaaaaagctcctgagctgcccaaaccaaagaagaacagatgttttatgtgtagaaagaaagttggccttacagggtttgactgccgatgtggaaatttgttttgtggacttcaccgttactctgacaagcacaactgtccatatgattacaaagcagaagctgcagcaaaaatcagaaaagagaatccagttgttgtggctgaaaagatccagagaatataaaattactacatgtgaagagactgaaactttgtttttattttaatatatcgtaggaaaacattaaagagcagatgcatggccattttcctttgatgttctccagagttttgctttatatttgtctgtcgtataattgatattttaggatgttttgggtgtttgttacaggcagaattggatagatacagccctacaaatgtatatgccctcccctcaataaaattggacaaaaatactgcacaacaaattgaaataacacagataataggaacaaaatttagttccacgtgccaaattaaatgaatgaaatctctgcatgtttgcagcatatctgccttttgggaatgtaatcaaggtataatctttggctagtgttatgtgcctgtaacttaaaaaaaaaaaaatggtacaccagaaaaggactggcagtctactaccatagtcaaacttcaccttaatttcaacatgacttttggaagcaggaagaaagctacaaaaccagtattttggtgccatgtgtaagcctggttaaattggtcttctaaaagctgtcaattaggacattcttcgaaaggtaacgtcacagctggttataagtaaaaccatcaagtcaacaacagggtgcctgagataatctttgaagcttattgtgctggcctgcaccagaagatatctgcattctctactaaaattatagcacagaactgcactaggatttgtttacaagaagaaattaaactctgtttggttttcacatacagcagctctgttaaataacatgcatctgaattttaagttgcaaaggtatctgaacagttaatttttcatgtgcatcttttgttgaatgttttggttcaagaaagaatgtttaaagctttttaaagacttcagtttttaatgtaactgtacccttctgcatggaaaatcataaccaacatggctgcagtagacttctttagtggtatccagcaccacttgcagagggctgctttatcatattgtatttgggtgtaggactctagtgttcttgggtgtattgcatgggctgcattatctacagcattgtacaataacaactagaaaaggcagtatacttcactgatgcttgtctggtaatatcacttctgtgttataatggaaggttttttgtgatgtatgaaacttgtgttttttatatataaatgagtatagttagattagtgttgtggtaatgcctgttatcatctgtaaatagttaagtatgtacacaaggcactacttctgatttattgcagtgttcagtcctagtttttcattataaaacattcagttttgcttcgattttatgtactttagttctgagttagatttgcagatgtgtacagatagttcatatttatgtattgcacataatcatgctattcagcattgatgctatattgtattatgtaaataataaaagcagtgtacagaaggga

SEQ ID NO: 1951 - DNA, 2091 bp, Cricetulus griseus
ggcggctgcaggaggaagcccggcggctgcggaggaggggaggcggagaggccgaggccgctcgcgaagacgctccccggctccgcagggaaaggctcctagaaggtgagtacggacggtatgcaaagttgtgaatccagtggcgacagtgcggatgaccctctcagttgtggcctacggagaaggggacagcctcgtgtggtggtgatcggtgctggcttggctggcctggctgcagctagagcacttctcgagcagggcttcacagatgttactgtgctcgaggcttccagacacattgggggccgtgtacagagcgtgagacttggacacgccacctttgagctgggagccacctggatccatgggtcccatgggaatcctatctaccatctagcagaagctaatggccttttggaagagacaacagatggggagcgcagcgtgggccgcatcagccactactccaagaatggcgtggcctgctaccttaccaaccggggccgtcgggtccccaaggacgtggttgaggaattcagcgatttatacaacgaggtctataacttgacccaggagttcttccgccatggtaaaccagtcaatgctgagagtcagaacagcgtcggggtgttcacccgggagaaggtgcgcaatcgcatcagggatgaccctgatgacacagaggctaccaagcgcctgaagctcgccatgatccagcagtacctgaaggtggagagctgtgagagcagttctcacagtatagatgaggtgtctctgagcgcctttggagaatggacagagatccctggcgcccatcacatcatcccctcaggctttgtgcgagttgtggagctgctggctgagggcattcccccacatgtcatccagctggggaaacctgtccgttgtatccactgggaccaggcctcagctcgcccccggggtcctgagatcgaaccctgtggtgagggtgaccacaatcgcaacactggggagggtggccagagtggagagagttcccagcagagaaggagggacgaggatgagcagtggcccgtggtcgtggagtgcgaggattgtgaggtgattccagccgaccatgtgattgtgaccgtttcgctgggcgtgctcaagaggcagtacaccagtttctttaggccaggcctgcccacggagaaggtggctgccattcaccgcctgggcattggtaccaccgacaagatcttccttgaattcgaggagcccttttggggccctgagtgcaacagcctgcagtttgtgtgggaggatgaggcagagagctgtaccctcacttatccccctgagctctggtaccgcaagatatgtggcttcgatgtcctgtacccaccagagcgctatggccacgtgctgagtggctggatttgtggggaggaggctcttgtcatggagaggtgtgatgatgaggccgtggctgagatctgcacagagatgctgagacagttcacagggaatcccaatgtaccaaaacctcggcgaatcctgcgctcagcctggggcagcaatccatacttccgaggttcctattcatacacacaagtgggctccagtggggcagatgtggagaagctggccaagcctctaccctacacagagagctccaagacagcgcccatgcaggtgctgttctccggtgaggccacgcaccgcaagtactactccaccacccatggtgctctgctctctggccagcgtgaggcagctcgtctcatcgagatgtaccgagacctcttccagcaggggccctgagggtgtcctcactgccatatgtgttccttaaagaaccactaactcgtgactgctgtcccttcccttgcccatgtactcgtaatttcctgattgtctgtaggatgaaattatatcttttgtagtggacactgggctgtcttcagacctggccctatagcttttctttttctctaggctgggtaatgcccaggtgggatttggcttcctgctttccccctctccatgttattgcaagtgccttcaatactttgcattttgggataataaaagaagtgacccttcccatgcaaaaaaaaaaaaaaa

SEQ ID NO: 1952 - DNA, 2091 bp, Cricetulus griseus
gaaagtccgtttagaatgtcagaaccgggcaagagtttagaccagaaaggcattgaagagcttgatggtgttctcgcttctatattcaagcatgagataccatattatgaattcaaacctctccaaactgaaacttaccctcaaaaagaatatactcacaccagagagctcccaacactcctccactgtgcagcaaagtttggcttaaagcatctggctcttcaccttctacagtgctcaggggcaacctgggcagccggaacaaagaatacggatggttcagacctgctgcatattgctgagcagcatggtcatgaagaacttctgaaaatctttgaagaattcatgatccaaaacattagcagaaataatgagacaagaaaatgactatgaagaggatgttacctcattttctacaaatccaccctctacacagcccccagtatttcatcatgaactcgggaagacacacagacggagcacagacagatctgaagaacctgaaagggctggggacataggggagaaagaaccaagtgctgaggcaagagccagcctgccagaggtcgatggtgacagctctgagaagcagtatgacgatttgtatgtgttcattcctggaattgatgcagaaagcaactcacaggagcctctcccatactgcagaccgcctctgcccccaccccgaccagggactgctgcctcccaactagaaagacctcacctcacctcacaagggaggatgatggaagaccaagtggaaagaagtcaaaactggagttatctcagtgcgagacaagagacaagagaggaacccagacaaagaagaaaaagacagaaggcaggagcaggaggaggaggaggaaaacccatatgcatttgcggagactgatgacaatgagtacgacatgatactggccagtaagagtgtaaagaaaagaactggaaatcgctctttcattataaatagacctcctgctcccaccccccggcccactcacgtccctttcaaagaagaaacgacaccttacatagctcaagtgttccaacaaaaggcagccagaagacaatctgttgatgataagttctacagtctccctaagaaaccagacaaagctcggatagagggtccaaccttctctagtgcaaaaggttatgtaaccactgggcagaaagaattgatcctcctgcaggagaaagtcaagaatgggaaaatgtctatggatgaagctctagagaaatttaaacgttggcagatgggaaagagtggtctggaaatgattcaacaggaaaagctacgccaactacgagacagcattgttgggaaaaggccagaagatgaaaatgcatatgataaactcaccattgtgcaccatccaagtggtaatactacccacaatgaaaatacattgtacagtagtcccttcaacaataagcttcctcctagactccaagttgaaaaggaatttggtttctgctgcaagaaagatcactaaagaagattactgtaattaaactcaagaatcgccaaacattttgatatctggatgaaacaagcctgctggtggagtttctgatctgtaggactaattcacatgtagaaggacacaaagcatgactttggattccagaatgtgttatcaccacaattcattggtaccatagtgcttcagatggacattctctgaaaatccattcattttgcattttgccatggaagcacctaattttcccatattgaaaattaaagagaagaaatcatcaaagttaaatgcaggctagcaaaattatgggaccagactatatagattattcttcctactctttgtcaccttcaaataaaaatgtgttttgtatttgctttgtaaatgacagtcctctgtcctccttctcacatttaagccataatgttcttgttacatcatgtttccagatagcttcttttagttagtgcctatttgcttgtacccttgaaatgtatttttattgacattttccctagttgatggtttgtttttcagtgttaaccaagcactatgccactgagccatatcttcagccctctacattgttttctgaagtcatattaat

SEQ ID NO: 1953 - DNA, 2090 bp, Cricetulus griseus
ctcagatgtcatccacgcaacacgccgagacattccatgtatattcagggtgacggcctctctcttaggttcgcctgctaagaccaactcactgctcatcctgacagagaatgagaacgaaaagaggaagtgggttgggatccttgaagggctacaggctatcctccataagaaccggctgaagagccaggtagtgcatgtcgcccaggaggcctacgacagtactctgccactcatcaagaccgttctcgctgctgctatcgtggatggagacaggattgcagtcggcctggaggagggactctacgtcattgagctcacacgggatgtgatcgtcagagctgctgattgcaagaaggtgtaccagatcgagctggccgccaaggacaaggtgatcatcctcctgtgcggccggagccgccacgtgcacctgtgcccctggtcctcctttgatggagcagaagcaagcaacttcgatgtcaagcttccggaaacgaaaggctgccagctcatagcaacagggacagtcaagaagagctcgtgcacctgcctgtttgtcgccgtgaagcggctgatcctttgctacgagattcagagaactaagcctttccacaggaagttcagtgagatggtggcaccaggacacgtgcagtggatggccgtgttcaaggacaggctctgtgttggctacccttctgggttctctctgttgagcatccagggggacgggcagcctctagacctggtaaatcccactgacccctcgcttgcgttcctctcacagcagtcttttcgatgccctgtgtgctgtggagctcaaaagtgaggagtacctgctttgcttcagccacatgggactgtacgtggaccctcaaggccggaggtcacgcatgcaggagctcatgtggcctgcggctcctgtcgcctgtagttgcagcccctcccatgtgacagtgtacagcgagtatggggtggacgtgtttgacgtgcgtaccatggagtgggtgcagaccatcggcctgaggcggatacgacctttgaactccgatggcaccctcaacctgcttggttgtgagcccccacgtctcatctacttcaagaacaaattctcaggagctgttctcaatgtgcccgacacctccgacaacagcaagaagcagatgctgcggactcggagcaaacggcgttttgtcttcaaggttccagaggaagaaaggctgcagcagcggcgagagatgctcagagacccagaattgagatccaaaatgatctccaacccgaccaacttcaaccatgtggctcatatgggccccggggatgggatgcaggtgctgatggacctgcctctgagtgccgcaccccctgcccaagaggagaagcagggccctgcccctcctccaggcccccctcggcagccctcgtccaggagcaagccctacatctcatggccctcctcaggtggggctgagcctggagtgactgtgcctctgagaagcatgtctgatcccgaccaggactttgacagagagccggactcggattccaccaagcactcaactccatccaatagctccaaccctagtggccctccgagccccaactctccccatcggagccagctccctatggaaggcctggaacagccagcctgtgacacctgagatggccagcatagcagcatggggccaggaagccacgtggccccaacgtcagtgccaagactgagctgaccctccagtgttgtccaaggaaatgtagaatcagtttgtagatagataaaataatctttattataatgagcagttttgtgccacgttgttggtggcaatcgaccagatgtgttcgtctgcacagccgtaaggcaacactgttccgtttgcacatgaaggaccaccactcacctctcccaccaggaccacacaggccctaaccagtgggcttcctcagcagatgctgggggtgtggccctaagccctccctttctcctcaaactgtctcaaggaccttagaagactcaagttgtgcgtcaccccagtgtcaaggaggcagaggctagtttgtggcctttttatttacttagccctgacaca

SEQ ID NO: 1954 - DNA, 2090 bp, Cricetulus griseus
cgtttggcttgttgatttttgggcccgtggtggttgttttcatcacaaaagttttccgttcccgtgactatccagcccctgctatggatcttccagcagctgttccaccgtgtccaggccacgaagccccaggcctctcgccatgaatctgcagaaatttttgtagtctgccaagggtttctggctcctgacaaggttgacagtaaattcttcgatcctaagtttgcctttaaggaggttgaagttcaggctaaaactgttaccgagttggtgacaaagaagaagccaaaggctgaaggctatgctgagggtgacctcactctttatcaccgaacctcagtcactgacttcttgcgagctgccaatcctgttgactttctttccaaggccagcgaaatttcaatagatgatgaagagttagcacagcatccagctacaactgaggatataagagcatgctgtcaggacatcaaagttctggggcgcaaagaactaaggtctctactgaattggagaacaaaacttcggcggtatgtggccaaaaagctgaaagagcaagcaaaggcactggacatcagcctcagctcagagaagaagaagaacgtgatgaggatgagtcaatagctgagacaaagcaggaggattcagaggaagagaggaggaggagcagcttaaccagaccctggcagagatgaaagcccaagaagtggcagaacttaagaggaagaaaaagaaattgcttcgagagcagaggaagcagcgggagcgagtagaactgaagatggacctgcctggggtttctattgcagatgagggggaaacgggcatgttttccctgcgtaccatccgggggcagcagttgctagaggaagtaacacaaggagacatgaatgctgcagacacatttctgtctgatctgccaacggatgacatctatgtgtcggatgctgaggaggaggatgagacttctctggaaagtgacctggattcagaagagctggcaggagtcaggacacattccagtcagaaggacaggaagtgcttgcagtctgctcaagtggatgacactaaagaggaagaaggagagaatccattgctggtaccactagaagaaaaggcagtgctgcaggaagagcaagctaacctgtggttctccaaggacggcttcagtgggattgaggatgatgctgatgaggccctggagatcagtcaggcaaagctgctgctcaagagtcgtcagaaggagcagagccatctacaccacctagtagtctgaagactgaacagaaacacccccgtgccagaatgaggtccctaaggagacagaggctgtctcagggacagaagctgtcattgaccctaggggggaggacaaagtcaacagctcagacagtgacagcagcagcagcagtgaggatgaagaaagttggaaagcatcccgtggtatcaagcgaagccgaggttctaaggcagatgatgatgggtttgaggtagtccctattgaggacccagtgaaacatcgaattttggatcctgaaggccttgctctaggtgctgttattgcctcttccaaaaaggcaaagagagaccttatagataactcattcaaccggtacgcatttaatgaagatgagggggagcttccagagtggtttgtgcaggaggagaagcagcaccggatacgccagctgcccattgacaagaaggaagtagaacattaccggaaacgctggcgggaaataaacgcacggcccatcaaaaaagtagctgaggccaaggccagaaagaaacggaggatgctgaaaaagctggagcagaccaaaaagaaggcagaagctgtggtgaacactgtggatatctcagaacgagaaaaggtggcacaactgcgaagtctctacaagaaggctggacttggcaaggagaaacgccaggtcacctatgttgtagccaaaaaaggtgtaggccgtaaggtccggcggccagctggagtcagaggtcaattcaaggtagtggactctaggatgaagaaggaccagagagcacaacaacggaaggaacagaagaaaaaacacaagcggaagtgagcagaa

SEQ ID NO: 1955 - DNA, 2090 bp, Cricetulus griseus
ggcagcgtggccgtgttcgccgccgtggctgccgtgttcaccctgacgctgccccgctcgctgccgggggagactcgggggaactgatcacagccgcacatgagcttggagttgcccatccccccgggtatcctttgttcacactggtggctagcctggcaatcactctctttccatttggttccgttgcctaccgagtcaatcttctctgtggcttatttggagcggtagctgcttcactccttttttcaccgttttcaggctttctggctcacatgctggaggaatccttgctgcggggtgtttcattttctcgcctaacatggcagtggtccattgcagccgaggttttagcttaaacaatctgtttgtggggctgctcatggcgcttactgtgcgtttgaggaggcagcagccgcaaaggagagatcaaagatggccacacttgtgtctgagactaaccgagtgctgaactgcaatgggattcaatatctggaatggctgtcagcaactctttttgtaacttaccaaatatattcaaattacagcatttgtgaccaaagaaccaataatgtgatcgatcagtttgcacggaaaccttctggactccatgcctcgtgatgcaatcatcttactcaggggagatttgccagggaattctctccgttacttgcattactggtggaggggttgaggccagatgtttccctagtggatcaagaaatgcacattcaatctttatcactttctggaaatgaataaacaaaagaaacatttgtttgcataggaattcatgaaggtgacccaacttggaagaagggctattcactttggccatgggggtcttgtgacaaattggttccttcaaggattgtattcaacccagaagagtggattaaaagcaccgcaagtatctataactggaccgaggaatatggaaggtttgatccatcttcttgggaatctgtggccaatgaggagatgtggcaagcaaggatgaaaacaccgttcttcatctttaacctggcagagactgccaaggtgcctccaaatgtgaaagcacagctctacactcatgcatataaactttataaggagatagtgtactttcaagaggaacacccagtgaattggcacaagaactacgccatcgcctgcgagcggatgctgcgccttccagggacagacgcaaagcctgaagtcctgctgtctgaaaccatcagacattttcgctctacactcagaaagcacagagtgacccacagcgagcagacattatagctgctctcaagcacctcagaagagaactgcaaagtctaaagaaataacaaaaaaggtactagagccagcaaacagtggcagcctgctcgctgttctgctctcagtagtttaaggaaagctaatttcatgttttcttatttcagttgcagaaaacaggcaaattaaaatggcattttaacatgtccttaattaatttcatatttatgttttactgctatttggattcacagatctagacccaataattagtaggtagctggctgcccagatgcacaaaggtcactcagagtccttcagcattcctaagtagaggccagaatctgtagggattctttcccccttgattgtatagctcctagactccaagcactatataggcccctgtatagaaatgctcactaatgaagagggagggctagaagcttgtctgcattcaaagatcactggtgagtcattcagcaagaaaggccccttaccaggaatagtcacagttccgtggcattgtactagcaaaagggtctgatcaaaggtctcccgtggagcttgcatggttccctttcatactacgaccataattaaaaccactaattctcttttaaaatgctgcaggatgccatgtaggcatctgtctggagtgtcctttgtgatgtcataagctgttaaggaccagtgccagggcttttgagtgaaatgccagtcatgactcaaaggggaaaagctgaagtttcattaccttgtatccatggggctttgttggttttggcatcacacaggggaagctcttgcccctccattctctgggttttgaa

SEQ ID NO: 1956 - DNA, 2090 bp, Cricetulus griseus
ccgccgcctgccgccagcagccatgagcgcgcccggcctcggtgtagtctgctgtcctctagattagtgctctccaccgcgaccgtccacagcatggagtctcccgccgcgagtccaccggccagcttgcctcagaccaaaggaaaatctaaaaggaaaaaggatttacggataacctgtgtgtccaagccacctgcacccaaccccacaccaccccggaacctggactcccgggccttcatcaccatcggagacagaaactttgaggtggaggctgatgacttggtgactatctcagaactgggccgaggagcctacggggtggtggagaaggtgcgacatgctcagagtggcaccatcatggctgtgaagcgaatccgggccactgtgaactcacaagagcagaaacgtctgcttatggacctagatatcaacatgcgcacggtcgattgcttctacaccgtcactttctatggtgccctcttcagagagggggatgtgtggatctgcatggagctcatggacacttccctggacaagttctaccggaaggtgctggagaagaacatgacaattccggaggacatcctgggcgagattgctgtgtctatcgtgcgggccctggagcatctgcacagcaagctgtctgtgatccatagagatgtgaagccgtccaatgtcctcatcaacaaggaggggcatgtgaagatgtgcgactttggcatcagtggctacctggtggactctgtggcaaagacaatggatgctggttgcaagccttacatggctcctgagaggatcaaccctgagctgaatcagaagggctacaatgtcaagtctgacgtctggagcctcggcatcaccatgatcgagatggccattctgcgattcccttatgaatcttgggggacaccgttccagcagctgaagcaggtggtggaggaaccatccccacagctcccagctgacaagttctcccctgagtttgtggacttcaccagccagtgcctaaggaagaaccctgcggagcgcatgagctacctggagctgatggaacaccctttcttcaccttgcacaaaactaagaagacagacattgctgcctttgtgaaggagatcctgggagaggattcataggggaccggcctgggatctcactggtctgccagcatcccgtatccctctgctggggcagcacttacctacagccataagctactgccattctggtcctgggcattccaggaggaattgagggggttgttcctgtctggcttggcaactagctctcccaagtgccaaagaatcagacctcagggggcttccagccaggcccacatgggccttacagtgcctctgctgttgctgctcccagggtctcaggcctccgcccaaaggatgaatttggaggggcctgtgtaccccctgcagatgctgttgcctcttgaagaggagtcagctggtgcttctgtggacaggccaaagccttggtactgtcctggatgccacccaggttgtatatatattttaaatcacaactgaatggactttgtacactggcctggatcagggacatctctatcctgtctcaggtgctgaggacacactatagggatgagctgaatcccctaagactttcctggggggtgtgttgagctgcctaaggccttcacccatcactggccaatggtctctagggggcacactgacctagcccctagccgccacctctagtggtatctgcctttctttttaaactattatccttgttgccttttgctttgtgggtgtcgctggtttttcttgcatggtttgaagctggtcacttaatgctaggtaccagcaggatcacagctacccctgtgctcaggctggagtctacagaatggctcaagctctttgcacaaggccaccagggagccatatcaaccctccaagtgtgaccagctcatgggagctaataggtttactttggtggtgtttttaaaaaaaaagaagaaaatatatttttgtgaagaaaggcctgcctatccaagcctttctctgggcaggaacctattgctgttttaattaaaaaacaaaaaaaaaaa

SEQ ID NO: 1957 - DNA, 2090 bp, Cricetulus griseus
cggaaggcaaaactgggaaccccttccaacatgcctcccaccttccagtatatctcttctccctccatttctcctcccactcccgaacctctgcacaaggggtatgaggagaaagctaagctgccttcatctgtggatgtaaagaagaagttgaaaaaagaactgaagactaagttgaaaaagaaagaaaagcagagagatagggagagggaaaaagagagaaacaaagaaagaagcaaagagaaggataaaatgagagagagggagaaggaaaaggaatctgccaaggaggtcaggtacccatggaaggaatttatgaaagatgaagatcccgatccctataagtttaagatcagagaatttgaagacattgatccaaaagtgcgattgaaagatgggatagtgagaaaggagaaagagaagcataaggacaagaagaaagatcgagaacgaagcaagcgagataaagataagagagaaagggaaaagattaaaagaaaaaagacagaagaagacaagataaaggcccctaccaacacagctggtattacctcccaaaagaaatggcactacctttgttcagcccttctgcagcagtgagggtcccatccatgctgcctgccttgtcaccaatgctcccggaaaaactgtttgaggaaaaagagaagccaaaggaaaaagaaaggaaaaaggacaaaaaaggaaaaagaagaagaagaaagagaaggagaagaaaaggagaagaaagagagggagagggagaagagaaaaaggagagagagaagagagaaaaagagaaggagaaacacaagcatgaaaaaataaaagtggagcccgtcatcccagccccaagtccagttatccccaggttgactctgcgagttggagctggccaagacaagattgtcatcagcaaggtggtgccagctcccgaggctaagccagccccttctctgaacagacctaaaaccccgcctccagccccagttcctgttcctgtgcgtgtgagccctactcctctgccaccaccacttctcgcccaggctgcaatgtgcccagccctgatgccatccccagcccctgccctctctggagcagggagtgccaaagccccagtgcgtagcgtggtgacggagacggtcagcacttatgtgatccgagatgagtggggcaatcaaatctggatctgcccagggtgcaacaagcctgatgacgggagccctatgatcggctgtgatggctgtgatgattggtaccattggccctgtgtgggattaatggccgctcctccggaagagatgcagtggttctgcgccaagtgtgccaagataaagaaagacaagaagcacaagaagaggaagcaccgtgcgcactgacgtcagcgtgggcaggactgatgccccgcgccggttgggctgggccggttctgccatcctgtctcccccaggccctgtggactgcgcatcccggaggggcaaggacaagaatgtgctatcactctggatgctcccttctgaaacacatgggcctgagctcccacggcgtgtgactgaagaaaaactccagtggaggcatggcctgagggctagcacctccatatgcctattaccagtgacaagtattaataaagacaccacacatcttccctcttgatttcctttcttctctccagaaccttttattacgctgttagatgagaaggtaatgtacaaatgccttgattgtaactgaaggatgcatcattagctatagtttccaagccctctccctcacagagataatcataaggaaagaatgccccagtcagtcagaggactggtaaatatttttgtgatgagaatatatgaaactcccccacctgaccccacttttattactaacatgtaaaatgttcaggcttttgtgagataccttatattttttaagaaaaaggtttctatcatgtcctgttcacctccatgcaaattattttcctttagtctattttataacttggttgtgttctaatcctgctcttctgtaaactgctggagcctcttctcaccgccacgtgtacatttatcaacttgtataaaactcttgatactaag

SEQ ID NO: 1958 - DNA, 2089 bp, Cricetulus griseus
cacttctctttctcccagcgagctctttgctggtgactgcagctgctggtccggaggaacgcgtctgagcgagtcgaggcaccatgacaaccctggatgataagctgctgggggagaaactacagtattactacagcaccagcgaggatgaggacagtgaccatgaagacagagacggagacagtggagccccagccagcagctccatacctgtggaagctgagctggccagcgaaggcatttcaatcaatacaggcccaaaaggtgtgatcaatgactggcgccgcttcaagcagttggagacagagcagagggaggagcagtgccggggagagtgggaacggctgatcaaaagctatctatgacctgcaggtgaaacagagaatggaagagatgcggcagcagtttcagaagggcccagttcaagcaagtttttgtagatccccagcggagaagggtttttagacatgatcgataagaacagaaaacaccttatcatggttcatatttatgaagatggcatcccggggaccgaagccatgaatggctgcatgatctgccttgccacagagtacccggctgtcaaattctgccgagtgaagagttcggttattggggccagcagtcgttttacccggaatgcccttcctgctttgctcatttacaaggcgggtgaattgattggcaattttgttcgtgtcactgaccagctgggggaagatttctttgctgtagaccttgaagctttcctacaggaatttggtttactcccagaaaaggaagtcttggtgctgacatctgtgcgaaactctgccacctgtcatagtgaagacagcgatctggaaatagattgaactgataatctagttccatagctatctcattgtttgggctggaggacacatgtctgtttttatttctgtccttcctgtgtcttctggctttacagctgtccttcgtagtctcatttagtatatggaaagtcaagaaattcttagattaaatcagaatgctgactcactttgtgactagcagtgactagcaaattatataagcaggaagctagacttttgagctgtttacttctctagcgtgacatctctgatactgtttctagtcaatattgacatgacacccttttaggcaatgtcttgaaaattgtcttctggtgacctcagaattctaccaggtctgagagtagaattccctagtgagtgttatgtgcaatattaatagtgcatttccacaatcacttgattgaaaatcatgtttacttgtaatcagactcagctctactttttttccctctagatccttctctaccaggatcagcatctattcctgttacgtaagaaggtaacttcttttttaacctagattttttttaaaaagctttttttgcatattagaaaaaatcatatttaatagaattggccaaaataccgatgcaaaagtggcttaaaatgtatatctataattctaccacctaaaccctaggttttgatatatttcatatgtaggttttttttaatgtattaaaaggcttttgtttgtttttaaaatggcattgggatcaattttgagcatactgtctaatgtatggtcagctactaacatcggaatttttttcatattagtaaatactcttctgtaacattttaatagaatgtgttcattgtagaacatataatagaatttaagctaaaaagatatttaaaagccataaaattttactagtaataattcctgtcatcatttttacagatctctttctagctttatgtatatgtatatatttatataattcattgtcattcaagtttttatttccttttgattctttcttaaattaaatgtcctagtatcagggggaaattaaatataaccaggaagtaaaattagctttagtgttcacagtggggttttttggttgctcagaagctaactgtaaatgagtcttgaacgtacctgttggatttaatcatcaaaaacagtctgtcattttgctgactaaagagctcattatagaagtcaagaaaatcattaggagcagagatgactgatgtcagtgttctagttttattttttt

SEQ ID NO: 1959 - DNA, 2089 bp, Cricetulus griseus
tcttccacctcaacttcagaggattgtctttctctttccagttagactcatggacagaggctcccaagtaccgagcccaattttgccatggtctagcttctcttcaaataccccatggagcaactgtaaaacgaatgtacatctacagtggaaacagcctccaggataccaaggctcctgtgatgcccctgagctgtttcctggggaatgtatatgctgaaagtgtagatgttcttcgagatggaactggaccctcagggttgcggcttcgcttactcactgcagggttgtggacctggagtattagcagatgccaaaatgcgagtatttgagcgctcggtgtattttggtgattcttgtcaagatgttcttagcatgcttggctctccacacaaggtcttctataaatccgaagacaagatgaaaattcactctccttcccctcataaacaagttccatccaagtgcaatgactactttttttaactatttcactcttggagtggatatcctctttgatgcaaatacacacaaagtgaagaagtttgtcctgcataccaattaccccgggaagaaagaaaatgcaggtggtcaaactgaaacatgcacgacctacagcaagtgggacaatatccaggagcttctgggccatcctgtggagaagcctgttgtcttgcacaggtcctcatccccaaacaataccaacccatttggctccacattctgctttggtcttcagcggatgatctttgaggtcatgcagaacaaccacattgcctcggtgaccctgtatggcccccctaggcctggtgcccacctgagaacagcagagctaccctaaggacatcactacccattctcttctctgtccatggacctgtgcatcacatcagctgagtgggtctctgtgccaccctgtgtgttttcttgggcacctgggcagtgttggaagggtctgggattcagaagggttcagaagggattcggtctgagtcctctatcttgggacagagaacccagatatccctctgtcctaagcctgctgttgccagcagagaacacagtctgcaaagagaagcacaaactttgggccttgatacattgccatgtggcccttaaggtgagcagagcaggtagcatgtccagagtacttggttgcaatatttgcactacatccacttcagttacttgatgagctggctgtggctggtgtggcccacgtgcccttctgtttcttttgtgcaagtgctccctgccatgcccaggtgacatacctaagtagttgaaatataggtttgtaccaggtatctacccaagcctggttcccactgctgctctgggaatcagccttcaaggtcacctgtatctcttggtccaacctggctgacagggctgcatgtttccatcttgtttgcctcttttatttaatgccaaagtgttagccaaagacaccttcctccttctgttacattacagcattctgttgtgcactgtgggccagctccctgccccacttctgggcactggcctggcctggccacatggtttaaggcctaggggctcaaagaagattgggctgctgcgtttcttacatgggtcttgctaatggaaagtagtatatatgtgctttaaaatattaatccttttgaaaagaattgaaaagagaaacatataattttatcccattttaatattttggtctagcaacttgtgatacatagatgacaattttgtgagtttttcaaatgtgtgtacagatttttgtaaataatgacttttgtaattaactcatgtacagcctcatcttgtatagttcatgatgaatgtgcaggggatcctgccccagctgtctgtatggttcctgggcctacagccaggcctgtgtggcacttccatgactctgattgacaggtgtcttcccatttggaccttggtctggccagagaccctgcacatcccactgtcagggtagccaggactgttcccatcctcttgaacagaggaaacttcctcatccctttccaataaagcacctatgccctcagtgacagcttgccatgtgctgctgctggggtgtttgtaacgaaaa

SEQ ID NO: 1960 - DNA, 2089 bp, Cricetulus griseus
tcttgatcagctgcggaaggatccggcctttccttgtcctccgaggctgtcctccctgacctgactgatgaacttgcccctgtgtttttcctccgctggctctactctatttctgactcccctctcagactggtgggagagcctgcttcacagtaactggcgtgaggtgatgcccctgctgtccctcatcttctcagccctcttcatactctttggcactgtcattgtccaggctttcagcgactcaaatgaggaaggagagtcacagcctccggataaagaagaagtccctgagaagcctgggaagacagagccagccttcaccaaagaaagcagcagcaagattacctaaaaaaggctttgtggaggttactgaactcacagatgtgacatacaccagcaacttggtacgcctgaggccaggccacatgaatgtggtctcatcctgtccaattccaccaagacaagcctgctgcagaaatttgctttagaggtctacacattcactgggagcagcagtctccacttctccttcctcagtctggacaagcaccgggagtggctggagtacctgctggagttcgctcaggacgcggccccgatcccaaaccagtatgacaaacacttcatggagcgggactacactggctacgtgctggccctgaacggccacaagaagtatttctgccttttcaagcccctaaagacagtggacgaggaggccgtgggctcctgcgaccctgactcctccagagggaagcctccctgtggcctcgggcccaagcccctcaagggcaagctgagcaagttgtccttgtggatggagcgcctgctggaaggttccttgcaaaggttttacatcccgtcatggcctgagctagactgagacatggactcttcaggtttttaacgtgccccggaacagggattttcaggagagtctaggctttaggttctcttccagagcaatggccagaagaaggctcctggcctggcccctgccatgcttctgccaaggcacatgctctcaacagaggacagcccaccacagtttctaggtcctgcatctttgaaagaggcctagttctaagcaattttacatgtgaccgtcttctgggagcaagcactgagaagtatactttgggggtatcccccacaacagctggccagccatggctttgaaaggaaggggctgagcagtgggtgagggtgcagcctttacatatggtcttccccaccaagagaagggagggttgaacactgactagagtcataaaagccctgtgaccctccctcactgcactcctgtaagcaccctcatagccagggcagagtctgcctagccagaagcgctgtaatgactgagccactgacttatctccagatgccttcctgcctctggattttagagtttgaatactaggagccataacctgtgatcgtgttctctgagcgtagatgagctgctatagagccagtagattgcagatgacggcagttactcctgtctgccaagagccaggtgcaggagccctccctgcctcgctcgctcgatcttgagtaaaatgccaggcgtgtcttcgtaccaaggaacctgacctctctgacaattgattttgaacattgttgtccccaaagtgctgaatcttcaagtcgtctcttgactgtgagctgagacttgttccagactcctgtctggcaggcagctagcatcctccttctggcctcccatttggcttctcagctcagttgtttccctcttcccttatcgctgcttcctgctgccagatcagacccatcaaatccagcttgcctggctccactcacctcaggctcagggccggatcatgttcgcccattcaacataccctttatttttagggccaaaccacaagaggagtttggacaactgtcacacatggtgtgttctactgtcaagcaagtgcccttttgtaaagtgaaaggcacaaatcagggacaggacatcactcagttagtattctctaatcataattgctttgaaccaagcacctcggatcctgactactttaaacactgagctccagtggtaagtgataaactatatgaa

SEQ ID NO: 1961 - DNA, 2088 bp, Cricetulus griseus
gacaaggcagaccagttcctagtgacggacagcggcaggaccgtggtcctctacaaggtttctgatcagaaacccttgggcagctggtcagtgaaacaaggtcaaactataacctgtccagcagtgtgcaactttcaaactggagaatatattgtggtacatgaccataaggttttgagaatatggaataatgaagatgtaaacctggataaagtatttaaagctacactgtcagccgaggttcataggatccactcagtacaaaagacagaaccactggtgctgttccgaagaggtgctgttcgtggattagaggccttgcttgcagagcctcagcagaccattgaagctgtcatacctgatgaggaagtgatcaagtggtcagagtttttcatggtattcaagcaacctgttttaatttttattactgaaaaacatggggattattttgcttatgtacaattatgcaaatcacacagcttaagcaaatacacactcttacttggaaaagaagaaaaatgtgttaaaccaaattttactgcacgtgtggatggaaaattcatctccctggtgtcattaagctctgatgggtgtatatatgaaaccttgataccaatatattcaagtgacaccgaaaaaaatcataggttaattagagcattgatgctcaaggcagttgtgtctgatgctgctagaaatggtactgcgctcaccatcctggatcaagaccatgtagcagtcctgggacctccgcttccagcttctaaggaatgcctctccgtatggaacataaagtttcaaacattacagacatccaaagagctgccacaaggaaccagtgggcaactctggtatcatggagaaatattatttatgctacatggaaaatgtctaactgtgatcccatacaagtgtgaagtatcgtctctggcaggcgctcttggaaagctcaagcatactcaagagtcagacactcattccatgccccattttgtagactgggaaacgtgttcaggatatgaccttgggtcctacagtgcagagcagtcaagaactctaaggagaaaaaaaagtgaaacaaatttacaggcagaagttccaggatccaaacaacttttatcaataataaagaatgattcggaaaaacacatagaagtagaactacgtaaatttttggccaagtcaacacctgactttcatactgtaattggagacgtagtagcaggacttctgggaaggtgtaaagcagagccatcgttttatcctcggaactgtctgacgcagctcatccaaacacatgtgctttcctacagcttgtgccctggcttgatggagattgccctagagcacacagatgtgcagatgttacagctgtgtctgcagcagttccctgacattcctgagtcaaccacctgtgcttgcttaaaacttttcttaagcattggtgatgactgtcttcaagacattaatatcaatatggagtcagtttttgattatagtgataccatacaagatgagaaaaaggaaataaaagaacaaactgaaattgttcaaaatggcttcagtccggaagacaatagctgcagtaaagatgatcagcaattaagtaaaaagcctggagatgcagcaaaggagaccatctctttccctgtgacctcatgtcctgtggcaccaaagcgagcggctctgctaaatgcagttctccactcagcgtacagtgaggccttcctcctgccacacctgaaggacatccccgcaaagcacatcacactatttctccagtacttgtatttcctttacctgaagtgtagtggcaatgctaccatgactcttcctggaataagccctccaactttgagccagattatggattggatatgcctacttctagatgctaattttactgtcgtcttaatgataccagaagcaaaaagacttttgcttaatctttacaaatttgtgaaatcccagatttctgtctattccgagctcaacaagattgaagtaagttttcgggagctacagaaattgaatcaggacaagagcggtagaggactgtactccattgaagtgctggaactcttctga

SEQ ID NO: 1962 - DNA, 2088 bp, Cricetulus griseus
ggacctggccacagccttctccatctactgcggcatcagcattgcccactctctcctatcaaaaaggtgaatgaggcccagtaccgcagccacctggccaatgagatgatgatgtaccatatgaaggtctctgatgatgagtacaccaagcttctccatgatgggatccaacctgtggctgccattgactccaactttgccaactttacctacactcctcgttctctgcctgaggacgatacttctatggccatcctgagcatgctgcaagatatgaacttcatcaataactaacaaaattgactgcccaactctggcccggttctgcttgatggtgaagaaaggctaccgagatccaccctaccacaactggatgcacgccttttctgtctctcacttctgctacctgctctataagaacctggagctttccagctacctcgaggacatcgagatctttgccttgttcatttcctgcatgtgtcacgacctggaccacagaggcacaaacaactccttccaggtggcctcgaaatctgtgctggctgcactctacagctcggagggctctgtcatggagaggcatcactttgctcaggccattgccatcctcaacacccacggctgcaacatctttgatcacttctcccggaaggactatcagcgcatgttggacctgatgagagacatcatcttggccacagacctggcacaccacctccgaatcttcaaggacctgcagaagatggctgaagtgggttatgaccgaaccaacaaacagcaccacagacttcttctctgcctcctcatgacctcctgtgacctctctgaccagacaaagggctggaagaccactagaaagattgcggagctgatctacaaagagttcttctcccagggagacttggagaaggccatgggcaacagaccaatggagatgatggaccgagagaaggcctacatccctgagctgcagatcagcttcatggagcacatcgccatgcccatctacaagctgttacaagacctgttccccaaggcagcagagctgtatgaacgtgtggcctccaatcgtgaacactggaccaaagtgtcccacaagttcaccatccgaggcctcccaagtaacaattcgctggatttcctggacgaggaatatgaggtgcccgatttggacggcaccagggctcccatcaatggctgctgcagccttgaggctgagtgatcccctctggggaccctccctgccctgccctccttctacagttctctaccagtctgtctgatgcactgggaaccagagccatgggtcctgggttctaggccaggatgtcccttgtgacccacacatgctatccttcccaggcctcagctttctcatctgtagaagggaagcaagattcccagtctcacacagactttgaagtgtcctgaggacacctctgtgcttctggtaggattggaaccattggaggaggctgacagctgggtagctcagtgctcccagagaggaagtgctccatcagaaaagacaggaatgaggggcaggaaggaccctcaagctgggggacagccccttatgcgcccttcaggtggcgcggcctgaagcaagctcctttccctaactaggcaagaccggatcattaggcagcctcttctctctttagatcaacgtctccatggttttgtggagcccatgagtggctgtggcatgctctgccaccctaaggcacagagagcctaacccttcttttcctctgagtgtatccccttggcctgagcccctctcccattcctgccatcagggaggggcctggccttaccccgcagggcttctctcctctttaaggccatatccacatgtgccctgggggctcaggagactccccccttgggcgagtggccactggcttctcttctgtttcgttctgtgtgtgtattgtgggtggggaggggccacctgccttacctactctgagttgcctttagagagatgcgtttttttctaggactctgtgcacctgttgtgtgtggtcccgtgggctgagtgctttgtacatgagaataaatctatttctttctaaccaa

SEQ ID NO: 1963 - DNA, 2088 bp, Cricetulus griseus
agcagaaccgagtgtgcacctgcaaagctgatatgtattgcgccttgccaacgaatactgacagctgtcgacagtgcataaggctgagcaagtgtggccccggcttcggagtggccggcacaagatctgccaatgggaatgtggtatgcaaggcctgtgccccggggacgttctctgacaccacatcatccacagatatgtgcaagccccaccgcatatgtagcatccttgccattcctggaaatgcaagcagagatgcagtctgtgcatctgagtccccagctccgagcaccatcccaggaacagtctacgtatctcatccaaagacccacaagaacccagcctctggagccagagccagagtccaatccaattccacccaccttctctgtctttgagagcttgaccccccgtagtgcacatagcaccaatggtggcatctctcttccaattggtctgatcgttggggtgacaactctgagtctgctggtgataggtctggcaaactgcttcatcctggtgcagaagaaaaagaagccctcctgcttacaaagagaagccaaggtgaggcctagagcaacagcgcctctcgaccacagccccagttctagcagcagctccctggagagctcagccagcgcgtggggacgaagaagggcgcccccaaggagccaaccccaggcaacagccacggaggaggtccgagggtctcaggaggcctgcgcaggctccaggagttcagattcttcccacggcagccatggaacccatgtcaatgtcacctgtatcgtgaatgtctgcagtagccctgaccacagctcacagtgctcttcccaagccagcaccacagtcggggacccagatgccaacccctcaggatccccgaaggacgagcaggttcccttctcccaggaggagtgtccttctcagtcccagtgggacgccccagagacactgcagagccatgagaagcccttaccccttggtgtccctgatgtgggcatgaagccgaatcaaccaggctggtgtgaccaggttgcagccaaagtggcctgacccctgcaggggcagcaccctgtaaatggacccccagttctagaccctcaatccccaggacttaacgactctttctgggcccatctcccttagcggcctccccagcccgacttgcaggtcaagtgagggctgaggcaaccgttgtggtgggaaacttctgccatggtgttatatggggcagtcccagcaagtccttgcccttctgtgacctctggctctcccgggctcttgcctgattctggcttctgagaggccccagtagctttccctcccaaggagctaacatcctcttccatgtgggcacacagagggctccagctcctccttctgaccttttaaggaacccttccaaggccacaccttcgttcaggggaatctcagggactgtagaggtcccaggcccctgcagccacctgccttcctcctacctcagcctggaccactccctctaactctccaactgcttggtactgtacccacggtgatcctgagtgcatgtctcagtctcaggtgcttggattccatgttcacagattccattggatatgaagttaggagttaaactactggaagtctgttaccatcgagactcaaaaagctcagccctctggaatcaagacttaggacctattggttagttctctgcagtgcatcagactggagaggctatggaacacgtctgcaccctggtggccagtcctgagatgacctcgggcttcctcggcaacaaaaacatgaatggaacggacagtatctgggtgttgcctccgttcccgtgcttgtgtgggccccaacagggtgtgctaaggagcatttttgcctttatgctggacagaattaattcctgcttataatggttttgttgttgtcttggcttagaccagattaggggattaattactttttttgtgtgtgtgtgtgtgtgtgtgtgtgtgtgtgtgtgtgtgtgtgtgtgtgtgtgtgaaggtgtcagatcccctggaactgcagttacagacagttgtgttttattaaaaaaattaaaaaaagtta

SEQ ID NO: 1964 - DNA, 2088 bp, Cricetulus griseus
gcacgcagcagcccgactggggtgtggaggacgcctgccgtctcctggctgagcacggtgggggcgatggattcgctgacccatgcggggcagcggccctgtgacctggctgatgaggaagtgatgaaccttttggaggaactggcccagaaacaggaggaccttcggaaccaaaaggaagcctctcagagccgaggccaagagccacaggtgccctccaacagcaagcacagaaggagctccgtgtgtcgtttgagcagccgtgagaagatctccctgcaggatctgtcgaaggagcgccggcctggtggggccgcgggcccctctcttggggatgaggatgagggagaagaagaggcagctgatcaccctcctgtgcaaccaagagccctcaatggcgtgtcttctcctgtgtcctccagccccaagagccctgtgccgccagaagaggctcccttctccaggcgcggcggtctccagaagacaggaagctctggtgccctgggtccctcagagaggaggggtgcagagggggttctcggtctgcagcgctcagcctcctcctccctcctagaaaaggcctcctctcaggccagggaaccccgtcttgccagaataacccctacccctgcccagaaagtgccagagccctctaccctgtgtgaggctgccatgcctccttcttcggatcactccgccccatcctccaggagggagcctggatccccagtgaagccaaatgccctcgcagcctctgcagcagccctacctgactccagggatcggcggaggtcctaccagatgcctgtgcgtgatgaagagtccgagtctcagcggaaggctcgctcccgccttatgcgccagtctcggaggtctacacagggcgtgaccttgacagacttgaaggaagcagagaaggtggcagggaaggctccagagccagagcagcctgccctgcccagcctggacccttctcggagacctcgggtccctggcgtggagaacgctgagggccctgcccagagagaggcgcccgacgggcagggccagggaccacaggcggccagggagcatcgaaaggtcggccacgagcgaagggggcccgcggagggggaggaggcggggccggcagaacggagcctggagtgcagcaccgtggatggcggctccactgcccgtagacagcgtttgcagagagacctcaatccagaatccaagcaggaacaggaagaacccgatggaagcttccggaagctgtacatggagcttcggagggagaacgagcggcttcgtgaggccctgacagagaccaccctgcggctggcacagctcaaggtggagcttgagcgggccacgcagcggcaggaacgctttgccgagaggcccgccctcctggagctggagagattcgagcgcagggccctggagcgcaaggccgcagagctggaggaggagctgaaggccctgtccgacctccgcgctgacaaccagcggctcaaggatgagaatgcagcactgatccgcgtcattagcaagctctccaagtgactctggaggggctcccgcaccgtatttatacagctgcttttgacacacgcaccccttcccccgagtgaacatgagtgacagggctccgggggaagttgttgagaagccataacctcctctcgggacctcagaacccggaggaaagcacagagtccccagaaccagggtggacagggtggaggtgggaggctgagccaggtagggaaatgttgccgagagtgggcaggcaccagagatgggaccaggaaggaagcaaggaccaaggaagccaggatcagtatccaggagcagagtggctgccccgggccacctcacgtgtgatgctacccagtatcccttccctccccagcagggatccaggaatgtgccaagagccccactggcctctgccaggtgggcctgtatatagggtccgtgtgcaatagggagggttgtcttctatttttgctgcctccttcccacccattgtctggggagggggagaaggtatttttgagacaaagcacaggcaccacaaataaagtcgtgacattgccactc

SEQ ID NO: 1965 - DNA, 2087 bp, Cricetulus griseus
tttctcaacaaggagctatgggaggtctggagaagaagaagtatgaacgaggctctgccaccaattatatcacccgaaacaaagcccggaagaagctgcagctgagcctgcctgatttcaggcggctgtgcattctgaaaggcatttatccccatgagcccaagcataagaagaaagtgaacaagggttccacggcggcccgaacattttaccttatcaaggacattaaattcctcctccatgagcccattgtcaacaacttcagggagtacaaggtgtttgttcggaagctccgaaaagcatatgggaagagcgaatggaattctgtggagcgcctgaaggacaataaacccagctacaaacttgaccacattgtcaaggagcggtaccccacatttattgatgctctgagggatctcgatgatgccctgtcaatgtgcttcctcttctccaccttcccacggacgggcaagtgccatgtgcagaccattcagctatgtcgccggctcattgtggaattcatgcactacgtcatcgctgcccgagccctgcgcaaagtcttcctgtccatcaaaggcatttactatcaggctgaggtgctggggcagcccatcgtatggattgcaccctatgctttctcccatgatcatccaacagatgtggactacagggtcatggccaccttcactgagttctataccactcttctgggctttgtgaacttccgcctttaccagtcactcaaccttcactatccacccaagctagaaggtcaagcccaggcagagacaaagatcagtgaggacacatatgcattggattctgagagctctatggagaaactagcagcgctcagtgccagtctggcccgagtggtggtgcctactatagaggaggctgaggccgatgagtttcctactgatggggaggtgacagcacaggaggaagatcgcaggaaagagctggaggcacaggaaaaacaaaagaaactcttcgaaggcctgaaattcttcctgaaccgagaggtgccccgtgaagcattggcctttatcatcaggagttttggtggggatgtgtcctgggacaagtctttgtgtatcggagccacctatgacatcacagactcctgcatcacccaccagattgttgaccggcctgggcagcaaacccccatcattggcaggtactacgtacagccccagtgggtgtttgactgtgtgaatgcccggctcctcctccctgtggcagagtacttccctggggtgcagctgcccccacacctctcacccttcgtatctgagaaggaaggagattacattccccctgagaagctgaagctactggctctgcagcggggagaagatccaggagacttgaaagaagaagaggatgaagatgaggatgaggatgatgaagatgatgtgatgtgggggaaaatgaggatgaggaagaagtggacgctgattcagagagaaggaggaggaagcgcacctgtcggtcttggagcagcagaggctggaagggaagaagccccaggtggtggccggcactgtgaaactggaagacaagcagcggctggcccaggaagaagaaagtgaggccaagcgcctggccatcatgatgatgaaaaagcgggagaagtacctttaccaaaagatcatgtttggcaagcggcgcaaaatccgtgaggccaacaagctggcagagaaaaggaaagcccatgatgacgctgtgaggtctgagaaaaaagccaagaggacaaggcctgtatgagcaccagctacctctcactggaagttggacatggcagaagcaagctagtgcaactcacgagtaccagcccaacaccctcatacttttggtggtgtgtgaccagccctagcctcctgtgaagttcatgctggtgtctggacaaagaggcctctacccagcccaattcttactccaggagtctgacaaacatcctcattttgctttgctttccacagcctcctacactgctgtgcccgtaattctcaggatgctgtcttggaataagggtggggagctcttattattaaatggctggacttttgcagtcaattgga

SEQ ID NO: 1966 - DNA, 2087 bp, Cricetulus griseus
ttgaatggtgcaatgtatttgccttccaaagaaacttgactacctcattaaattctcaaaactgacctgccctgaaagaaatgaaaagctgagtgttgaagaccagatggagcagtcatccttgtacttttggaaccttttggaaggtagtgagaaagcagtggtaggaacgacatacaaacatgtgaaagatctgctgtctaagctgctcaactcaggttattttgaaaatgtctcagttctcaaaaattctaaggaaaaactgcaggacctcatgacccagattcaaggaacttgtaactttatgcaagaatctgtctagattttgacaaaccctcaagtgcaattccatcgtcacagtcgccttcagcttctccagtttctacagtatctgcagaacaaaacttagcccaatcaaaatgatttcttcaagagccattacaggtgacatcctcagttacttgtagctcaaatgcttgcttggttactactgatcaggcttcttcggaaactgaaacagaacttatgacctcagagacctctgagatggccgtttccacaagtaagccagcatctgcacttacttctccaaatccccccttgtcaaagggcttccagttacctcctgcaagtggaatctcagcatccattagcacagcaccctttcaagccttgcagacagtgtttaatattaacgcacctctccctccactgaaaagaacaagaaatgaaagaatccccttgttcgcctggctacaatcaaaattttacttcaacaagtacacagacaataacccaatgccaactcccagctatacacatagaacagacagcccaacctccagagaccgggtaccatcctgatggaactgttccaagtaagacaatggcaaccttgccttttacccagcacccacgagtatgtttcccagaccctgctcagccgttcatcggtagtcaggcatctgtgagaggatgtacacgtggagggaggttactaatgaatccgtatcggtctcctggtggctacaaaggttttgatagttatagaggaccctcttcagcttccaatgggaattacaatcagctgcagctgcaagctagagaatatcctggaacaccttacactcagagggataatttccagcaatgttataaaagatcagggacatctagtggtcttcaggccaattccaaagcagaatggagcgattcctctcaggtgagcagcccagagagagacagcgagacttttaacagtggagactctgggcaaggagactcccggagcatgacccctgtggatgtgatggtgacaagcccagcagctgccatccttccagtacacgtctatcccctgcctcagcaaatgcgagttgccttctcagctgccagaacatccaatctggctcctggaactttagaccaacctattgtatttgatcttctcctgaacaatttgggtgagacctttgatcttcagcttggtagattcaattgcccagtgaatggcacgtatgtattcattttccacatgctaaagctggccgtgaatgtaccactgtatgtcaatctcatgaagaatgaggaggtcttggtgtcagcctatgccaatgatggtgctccagaccatgagacagctagcaaccatgccattctccagctcctccagggagaccagatatggttgcgcttacacaggggagcgatttatggaagtagctggaaatactccacattttccggctatcttctttatcaagattgaaattcagttcggagtaaaagaatgaagttctcactagtgaatctaaggaaaagtaatccttgccctggtgattgattgactggttggggaaaatattttgttcctagaggaagaaagagatccttactttttgtttcctctttatgtgaaaactttggagcagaatgacaattagcactaactttataaattgtgatgtagccttgctagttacacagtgaatatgtattgtttgcacttaaccctcaactgtgttaatggtccacttactgaactgactgcctcaacttcagacaagttacaatgccttgttgtgcct

SEQ ID NO: 1967 - DNA, 2087 bp, Cricetulus griseus
gcatgcaaacaaccctcgaagttcagtccattttgaaaatctcccaacctcacggagccccgagcttatcgaacgccaacccctctcctccgccaagtccttctcaacaaatcaaccttggtccgtcctccaatcctcatgctaaaccatctgacttccatttcttgaaagtgattggaaagggcagttttggaaaggttcttctagccagacacaaggcagaagaagcattctatgcggtcaaagttttacagaagaaggctatcctgaaaaagaaggaggagaagcatatcatgtcagagcggaacgttctgctgaagaatgtgaagcaccctttcctggtgggcctccacttctctttccagactgccgacaaactgtactttgtccttgactacattaacggtggagagctgttctaccatctccagagggaacgctgcttcctagaaccacgggctcgcttctatgctgctgaaatagcaagtgccttgggctatctgcactccttgaacatagtttatagagacttaaagccagagaatattctcctggactcacagggacacattgtcctgactgactttgggctctgcaaggaaaacattgagcacaacggtaccacgtccaccttctgtggcacacctgagtatcttgcacctgaagtactccataagcagccatatgacaggaccgtggactggtggtgcctcggagctgtcttgtatgagatgctctatggcctgcctccattttatagccggaacacagctgagatgtacgacaacattctgaacaagcccctccagttgaaaccaaatattacaaactcagcaaggcacctcctggaaggcctcctgcagaaggacaggacaaagaggctgggtgccaaggaagactttatggagattaagaatcatattttcttctctctaattaactgggatgatctcattaataagaagattacacccccatttaacccaaacgtgagtggacccagtgaccttcggcactttgaccccgagtttactgaagagccagtccccaactccattggcaggtcccccgacagcattcttatcacggccagcgtcaaggaagctgcagaagccttccttggcttctcctatgcgcctcccatggactctttcctctgaacactcttggggtggttccgaaggatctcctgcgtgttttctaagtgttttagttagcctttggagttgccagctgacagaacatcttgaaagagaatttgcacacctggaagcttggcaggtctcgtttagaaggaagatgcaggtctaagagggatctcctgcaggtctgtctgagctgtgatcacgaatattctgcaatgtgcctttttctgagatcttgttagctccaaagctttttcctatcgcagagtgttcagtttggtttgtttgttttttttttcttttctttctaccttgtggatttcccgtgtgaacagtggtgtgagtgtgctacgcctgatgacagacggttttgttataagcatcaatgtgacacttgcaggacactacaatgtgggacattgtttgtttcttccatatttggaagataaatttatgtgtagactgtttttttgtaaaatatagttaataactaaaatctattgaaacggtcttgcaacgatgtgcatccagatgcttaacggaaagcattgctgctacaaatatttctatttttagaaagggtttttatggaccaatgccccagctgtcagtcaaagccgttggtgttttcattgtttaaaatgtcacctgtaaaatgggcattatttatgttatttttttgttatttttttttgtcattcctgattattgtatgtatcgtgtaaaagaaagtctgtacattgggttataacactagtatatttaaacttacagacttatttgtaaaaccatcattttaatgtactgtaattaacatggttataatatgtacaattcctcctccctaccacactaactttttttgtgtgcaataaaccaattttggtttgcaataaaatcttgaaaactaaaaaaaaaaaaaaaaaaaaaaaaaaaaaaaaa

SEQ ID NO: 1968 - DNA, 2087 bp, Cricetulus griseus
  modified_base (92)..(92): a, c, t, g, unknown or other
tttgaaagggtgaacttcgacttaatagaagccttgttagagtggattgtggatggcaagcactcctaccctcccaggtgctataacttgtngtttttaccggggctagcagaaatcaagatgctgtatgagcagctgcagtctaactctcttttcaacaataggcgcagtcatagatgtgttatccatcctcttcactcatctttatccagtgaagagcagcaggcggtgtttgtaaaacctccagtaggtgtaactaagattataatttccaccaacattgctgagagctccataaccattgatgatgttgtttatgtcatcgattctgggaagatgaaagaaaagagatatgatgccggcaaagggatggagagtctagaggacacatttgtgtctcaagctaatgctctgcagagaaaaggtcgagctggccgtgttgcatctggagtctgcttccatttgttcacaagccaccactacagccatcagctcttaaagcagcaaataccagaaatacaaagagtgccattggaacagctatgcctaagaattaaaattttagaaatgtttagctctcataatctccaatctgtgttcgctcggctcattgaaccaccacatattgattctcttcgtgcctcaaaagtgcggttgagagacttgggagccttaactccagatgaaaagctgaccccgctgggctatcacttggcctctctgccagtggatgtgagaatcggcaaactgatgctgtttgggtctatcttccgctgtctggacccggctctcaccattgctgcaagcttggcctttaagtccccttttgtgtctccctgggataaaaaagaagaggctaatcagaaaaagctggaatttgcatttgcaaacagtgactatctggcccttctatgtgcatataagggttggcagctgagtacaaaagaaagtgcgagagcaggttataattactgcagacaaaatttcctgtcaggaagaactctgcaggaaatggctagcctcaaacggcaattcactgaactattgtctgacatagggtttgtgaaagagggtctcagagcaagggaaattgaaaaaagggcccaaggaggagatggtgtcctggatgccacaggagaagaggcaaacacaaatgctgagaatcccaagctgatatcagcagtgctgtgtgctgctctgtatccaaatgtagtgcaggtcaagaccccagaaggaaagttccagaagaccagtagtggagttgtcagactgcagccgaagtcagctgagttgaagtttgttacgaagaatgacggatacgtgcacattcacccatcctcggtgaactatcaggtcagacaatttgacagcccctacctgttgtaccatgagaaaatcaaaactagccgagtgtttatccgagactgcagcatggtgtctgtgtaccccctagtcctgtttggaggaggccaggtgaatgtgcagcttcagaggggagcgttcgtggtctccttggatgatggttggatccggtttgtagctgcttcccatcagatagctgaactggtaaaggaacttcgctgtgaacttgaccagctcctccaggataaaattaaaaacccaagcatggacctgtgtacgtgccctagaggttctcggattatcagcatgattgtgaagcttgtcaccacacagtaagactggccttggtgcctgctcttcaccacctcttgctcctctgcaaggcacagcagcacttctacctcggactgaagacctggcctggaagagacattttccacgtttggtatttctgaaaacatggggacactcccggcacaatttggagtgtcagtggtaggacagtccaaaacccagcttgcctctttgtgactgtaccaaactgaatgaaattcacctcataactcaaaagtgaatgtttaatacaagtttctgtcttaacctatgtactttttctcctagtttttattatgcattgtctatacatgattgatacttctttcccctgttttttactgggcatgaggagaaatgcttggtttggtttttccctgtcataataaagg

SEQ ID NO: 1969 - DNA, 2087 bp, Cricetulus griseus
gggttattgaagttaaaaatagtccaaaaaaatacatggtggttcgtgtggtggagatgcaaggagatgaaatgacacgaatcatttgggaactgattaaagaaaaactcatccttccctatgtggaactggacctgcacagctatgacttaggcatagagaatcgtgatgccactaatgaccaggtgaccaaggatgctgcagaagctataaagaaatacaacgttggtgtcaagtgtgcgaccatcacccccgatgagaagagggttgaggagttcaagttgaaacaaatgtggaaatcaccaaatggcaccatccggaacattctgggtggcactgtcttcagggaagctattatctgcaaaaatatcccccgactggtgacaggctgggtaaagcccatcatcattggtcgtcatgcttatggagaccaatacagagcaactgattttgttgttcccgggcctggaaaagtagagataacctacacaccaaaagatggaactcaaaaggtgacatacgtggtgcataactttgaagaaggtggcggtgttgccatgggcatgtacaacgaggataagtcaattgaagattttgcacacagttccttccagatggctctgtctaaaggctggcctttgtatctaagcaccaaaaacactattctgaagaagtacgatggacgtttcaaagacatctttcaggagatctatgacaagcaatacaaatcccagtttgaagctcagaagatctggtatgagcataggctcattgatgacatggtggcccaagctatgaaatcagagggaggctttatctgggcctgtaaaaactatgatggcgatgtgcagtcagactcagtagcccaaggttatggttcccttggcatgatgaccagtgtgctgatttgtccagatggtaagactgtagaagcagaggctgcccatggcactgtcacacgtcactaccgcatgtaccagaaaggacaggagacatccaccaaccccattgcttccatttttgcttggtcccgaggattggcccacagagcaaagcttgataacaacactgagctcagcttctttgcaaaggctcttgaagacgtctgcattgagaccattgaggctggctttatgactaaggacttggctgcttgcattaaaggcttacccaatgttcaacgttctgactacttgaatacttttgagttcatggacaaacttggagaaaacttgaaagccaaactagctcaggccaaactttgaggtcagacctgggcttagggggacaagtcttcgtggcaactaagtccacaggtttacatttttttttaatagcactcaaggataaaaacaaaaatcattttgtaatttgttcagaagacaaagttgaacttttctatatgtttacaggctttttctttttcatacagttattgccaccttaatgaacatgatggggaactttttttaattgtattttattgtgtagtagcaggaattatgttagtacccattcacattaactgtcactttttccttgctctaatataaatgaccaaaatcagaagtacactaaaatgtgaacaatagctacagtatgcttccctataagggtgaaaaagaaagccactcacttcccctgttgtctgtgagtgtgagcactgggggcttttgtgtgcaaatgttgcactgtgtgggagagctgtgcagtgagctcacacaagacttgaacaaatagaatgtatgtagctgaaatgcatggcagccatgtttgtgaagagcatctatgtgtccaatataccaagtatattttaaggccactggagaattccagctgtagactaaatgcaggctggaggtttgccctttttgatttcattttctcctgtggcctaacctaagtattacctaccccaggtagcacatttcatccatgagcaataagggaagctgtaccttttctggatttctgatggcctgtttcatttctttatataaatgtgaattttttttccacaagttgatattgaacactattccagtccttctaaactgttaattctcattaaaattaagtactaatga

SEQ ID NO: 1970 - DNA, 2086 bp, Cricetulus griseus
cgacaggaacgggaaaggtgcccatggcgtcggagcggcgcaaggtcaagtaccactggggcagcacgtcggaagggtgtcccagcaagcgcagccgctcccgggagcccggcaatgtggcctcctccagccgaccagttcgcagctgtgcgtcgcgtcctcgaggggccagcagcccccagcgtctgaaagcccggcgggggaacgatgtggcccgcacggcccggagctcagcccgccgccgcacctcctcttcctcttcgtcgtcctctctctcctcaggctcaggtgcaggcggggctgcctcccctggcttcctgattgcgagccctcgaaggttccttacgtccaagagatcctctttgcaccctgcccactcctcccttgaagaaatggcttctcttcggaaggaagcttgtaaagcacacagacagagaggtggtgattgagcatccctcttcagggagtgactggtcagatgtggatgagctggccactgtgaggttttcccaagaggagcctgtcttgctgaaacactcagcagttccagaatcttcttccttccccactgactatgttatgtaccctcctcatctgtatagtagtccatggtgtgactatgccagctactggactagcagccataagactcctggttatccattggtgggatccagcagccatgactcagcacagactgggaagagcagccaggaccttttgagtgttcattcctctaagtcccagagtatctccaaagacctggacattgcccaggaaagcaggtcccagaattcccattcacttcaattctccagaagcacagaggagaaggaggaggtaaaggggaaaaggacattccgagaggagacaccacctcgctacaccagagaacatacatgcagctccttgccaaggagccaccgggagatgaacctggaggagggctttattgatacccactgtcacctggacatgctttactccaagctgtctttcaaggggacctttacaaagttcagaaaaatttatagcacttccttccctaaggagtttcagggctgcatctctgacttctgtgatccaaggacactgactgatggcctatgggaggaactcctgaaggaagatctggtttggggagcctttggctgtcaccctcattttgcacgctactataatgagaatcaagaaagaaagcttttgcatgccttacggcaccccaaggctgtggcatttggagagatgggcctggactactctcacaagtgtaccacaccagttcctgaacagcaccaggtttttgagaggcagctgaagctggctgtgtctctgaagaagcccttggtcatccactgccgtgaagctgatgaagatctgttggacatcatgaaaaaatttgtgccctctgactacaagatccataggcactgcttcactggcagctactcagtcattgaacctttgttgaagtacttccctaacatgtcggtgggcttcacagcagtactgacctactcctctgcctgggaggcccgggatgcccttagacagatcccattggagaggatcattgtggaaacagacgcaccctacttcctccctcgccaggtgccgaggagtctttgccagtacgcccatccaggcctggccttgcatacagttcgagagattgccagggtcaaagaggagtcactgtcccatactctggcggtcctccgggagaacaccagtcgcctctacagtctttgaacagggagcaggcatcttctggcaaaggatgaccagtgctgcctgatagtttaggatgggctccatctgcctatccaaggtgaaggatatgttggagatcctgtcaaaactgagcaaaccaggatgggatgttacccttggaacctaatcacaaggcttcacctgctgtttggtggatgggtactgtggaatgggttggggagaggggtagttttgcctgctggcgacacggccccagggtaatcagtgagcaatacaatgagttggccagtctggatacctgcccagtggcctgggtttcccagcagtctgaataaagtacacttctttgtct

SEQ ID NO: 1971 - DNA, 2086 bp, Cricetulus griseus
tgatcaagagcctgactcacagctaaaacaagatgataccaagatttccagtgaagacatgaatttttctgttgatattaataatgaagtggcaagtcctccaggtagtgcatcttcattaaaagcggttgacattcccagttttgaagaaagcaatcttgctgtggaagaatttaatcatccacttcctgaatccaactctgaagagcagagaaaagaacctgatgtgcctgtgttcttcccaaatgctttgctggctgagagtgtgagcatgcgtttacaaactgagccaacagagggcaaaagttgagccttactggccagcagataaccagaaaatttaccaggacttgttgggtaaagtgaaccaactactaaataactcctcccaagagattgatcaaccacctaccaaagcagtaggtatcaaccatgagtgcaccaaaaccccaaatattcaccatgtaaggaaaaaaagcacaacccaggactggtagacaaagattgtgtactcagtgcaactattaaacagctgaggagcctgggagtgaaaatcgattctcccactaaagtgaagaaaaacgcacagaaagtggatcatgccagtgttttggcatgcatcagcccagaagcagtgatctctggattaaactacatgtcattcgctaatgttggcatgagcggcttaagtcccactggtgtggatttgagcatggaggcaaatgctatagctctgaaatacttgaatgaaaatcagctgtcacaactgtctcgcgctcgatcaaaccaaaataactgtgactcatcttttggccttctccatattaattcagacagaagcacggtggggcttagcttagtttcaccaagcaacatgtcatttgcaaccaaaaaatacatgaagagatacgggctcttagaaagcaatgacaatagtgaggatgaagagtctcctggccatgcagatagtgagattgactgggagttgactagaaaccctgcatgcagacctgtgcaatttgatcatcagaaagcgccttctcacaatgcctatgaaacatctcagtgttctgactgtggctctgaggacatgcacacagatatgccagtgttgagaaacatcacaaatgaagctgtccagccaagagctgcaaagcagttgaatgaagaccctgctttttcattaaggaatcttaaaccagatgctgcagtgagcctccgaactggaaaagcagagttcactcaacatcctgagaaggaaaatgaaagtgacactgcaatttttcctggacccctgcagcctcctgagactttaaagcaaatgagtagcatgcattctgtgggtaccttcttagatgtgaatcgtctcagacagttaccgaagttattttaactctttactcctgctttgtgatgtgaggactaggtgggtactgatggcacttaaggaagccagacctttggttttgagacaggggtttctctgtgtagctttggagcatatcctggcactcgctctatagaccaggttagcctcaaactcacagagatccaccttgtagccaggctggcttcagatttctcctcctgtcttctgagtctgtctcaggtatgcacttcacccagtgtctcccaaagacaatttcttacgtgatcatagtaagttataaaaccaagaaattacattagacacaatactgagtaaaccacagaacttttcattgcctttggttgttatttggtgggaagaggcagtgctgagggttgaacccaggacctcacaccaagggttctagcactgaactttatacttcagtccatgaggtgtgccattgatttgtattttgtgcgtatagatgcatgaaattatatcacatagcttccactaacctaaaacacatcctccagtccctgatcttcttatcatcactggaatgttttgtaatcatttaaaaatgtttcataaacagaactgtactttttaaatggtcttttttttaaatttagcattataccttttgaaatttactgcctttctccaaataatgtcctgagatctatctaagtgttgagtgtgtcagtaatt

SEQ ID NO: 1972 - DNA, 2086 bp, Cricetulus griseus
ctgatgcgctcggttcgtggggcccggcttgtttatttaattatttctagtgggcttctcccggcgtgtgcgcgcgctctcgctgctcggcggggagggggtggggggagggcccgcgcccggggggagttggagccgggtgatttactgtggtctgacccagataaggatgtacaaggctggggagaaaatgatcgtggtgtttcttttacttttggagctgatgtagtcagtaaatttctgaatcgtcatgatttagacttgatttgtcgagctcatcaggtggtagaagatggatatgaattttttgctaaacgacaattggtaaccttattttctgccccgaattactgtggcgagtttgacaatgctggcgtatgatgagtgtggatgagactttgatgtgttcatttcagatattgaaaccatctgaaagaaagctaagtaccagtatggtggactgaattctggacgtcctgtcactccacctcgaacagctaatccaccgaagaaaggtgaagaaaggaattctagtaaagaaagcatcagaaataagtatactctgttataatattcaacaaagttaaatccaaatttcaaaagtatccattgaagttatatcttctggtatcacactttttaaagatgacaagcatcccagttaaactagctgtggtagttacccgatgaaagcatgacgttccatctgtgtaatgtggttttagtgttgcttggttgtttaattattttgggcttgttttgttttgtttgttttttgctagaataatggctaactacttttcctgtttttccctaaacattttaaaaagtagaaatatgggaagagctttaaagacattcaccaactattagttttcttcacttagctacttatgtaactgtttgatcttactaagaaaacttatgcctcaaaataacaaaaaggaattttaagggttgatgggttttaaaaatatacaaactatctgatccaatgattttaatcaaacagtttgactgggcaacctttgcagctgataatgaatatttcgctttttacaaaattgccactgatttggatttgtgcactctaatttttaatttattgatgctctattgtgcagtagcattttgtttaagataaggctcatatagtattacccaaaactagttggtaatgtgattatgtggtaccttggctttaggttttaattcgcacgaaacaccttttggcatgcttaactttctggtaattaccctcacctgcattggttttgttttttggggttttgttgttgtttgtttgtttttagatccacagaacatgagaatcctttttttgacaagccttggaaagctggcgctcttctttccctctccatgtgaaggatgtatttaaatgaatgctggtcagtgggacatttgtcagctctgagtatcgggtgcttcactgtctaataattgccatgtgaatgttgtttttgactgtaaggctttgtcactaaagattttactctgcgttttcataatcaaaggtcataatatgtatagacatgctttgtagtgaagtatagtagcaataatttctgtacatgatcaagagtttattgcagcatttcttttcctgttctcttttttttaagggttagcattaacaaatgtcaaggagtagcaaggtcaacacagattttagaaggaagacttaacaacaggcacagatctgtggttctttggatgtgacactattggatgtgattctaaagtctttattgaacatgtcaaatttgtaagcttcatagggatggacataatatttataatgcccttcttatgtgttaccatagatgtgaaaccttatattgtctttgaaaatgttaaactgagaactctgttaacattttatggattggcacattgtattactgcaagaaacatttgattttcagcacagtgcaaaagttctttaaaacgcattcattctttttttttctaattttgttttaaagcacattttaaatgtagttttctcatttagtaaaagttgtctaattgatacaaagcctgagtgatcattctgtgttgtttt

SEQ ID NO: 1973 - DNA, 2086 bp, Cricetulus griseus
  modified_base (1919)..(1919): a, c, t, g, unknown or other
atcaagcagcgggctgccaaatatgccaactctaatccacaacctctccctggacagcctggcatgccccacgggtcagccagggctacagccacctaccatgcctggtcagcaaggtgtccactccgaaccagccttgcagaacatgaatcctatgcaggcaggtgtccagagagctggcctgccccaacagcagccccaacagcagctccagccacccatgggaggaatgagcccccaggctcagcagatgaacatgaatcacaatgccatgccgtcacagttccgagacattttaagacgtcagatgatgcaacagcagggagcagggccaggaattggcccaggcatggccaaccacaaccagttccagcagccccaaggaattggatacccacccgcagcaacagcagcaacagcagcggatgcagcatcacatgcaacagatgcagcaagggaatatgggacagatggcccagctcccccaggctttgggggcagaggcaggagccagtctgcaggcctatcagcagcgccttcttcagcaacagatggggtctcctgctcagcccaaccctatgagtccacagcagcatatgctcccaaatcaggcacagtccccacacctgcaaggtcagcagatccctaattctctctccaatcaagtacgttctccccagcctgtcccttctccgcgaccacagtctcaacgcccccataccagcccatctccgaggatgcagcctcagccttctccacaccatgtttctccacagaccagttccccacatcctggactggtagctgcccaggctgccaaccccatggaacaagggcattttgccagcccagaccagaattcaatgctttcacagctcactagcaatccaggcatggcaaacctccacggtgcaagcgccacggacctgggactgagcaccgataatgcagacttgaattcaaacctctcacagagtacactagacatacactagagacaccttgtagtattttgggagcaaaaaaattattttctcttaacaagactttttgtactgaaaacaatttttttgaatctttcttagcctaaaagacaattttccttggaacatgtaaaaactgtgcagtaaccgtttgtggtttaaagcaaacatgccagatgaacctgagggataatagattacaaagaatatatttttgttatggctggttaccccagccgttttccccccccccttgtgtgtgtggttcaagtgtgcactgggaggcgactgaggtctgaagccaaccatatgctcctgccttgccaataaggtttattattttttttaaattaatgaaaatatgtaatattaatagttattatttactggtgcagatggttgacatttttccctattttcctcactttatggaagaatttaaaaaagaacatttctaaaaccagaggacaaaaggggttaatgttacttaaaattacattatatatatatatatataaaaatatatataaatatattaaaataccaatttttttctctgggtgcaaagatgttcattacttttaaaaaaagtttaaaaaaaaaaaaaaaaagcctcctctttccacccctcaagtcaacttttgtgctccagaagattttctattccataagtctgagcgtaaaacttcaagtattaagataatttgtacatgtagagaaaaaaaaaatgactttttcagaatatacaggggcagctgccaaattgatgtattataatattgtggttctgtttcttgagagaatttttttgttatttttacatctaacaaaggaaaaatttaaaagagggtaagaaactactccagtggggtgattttaacatgcaaatgtctgaggtttcttggcttgctttcttccttactctgccccccccanacacatacactttctgtaaaacttgaaaatagaaagcaaaaaccctcaactgttgtaaatcatgcaattaaagttgattacttataaatatgaactttggatcactgtatagactgttaaatttgtatttcttattacctattgttaaataaactgtgtgagacaga

SEQ ID NO: 1974 - DNA, 2086 bp, Cricetulus griseus
cccggcgatggagccctggaggccaggcccggccgctcccggcccccgggggcacgtcggcccagccgccaggcttgggaagtcgtggccaacgctgctcaggacgtccgggcttcccaccttcctctctggcctccacccggtctggtcagccgacccaaaaggccgccatgcgcctgcctggggcctctccctgcggcctggcctgggggccacttctgctggggctctgcggtatcctgggggcgtctcagccccagccggtgcccccatatcgcatagaaaaccagacttgctgggaccaggacaaggaatactacgatcgcaatcatcaagtctgctgctcccgctgtcccccaggcaagtttgtctctgctgcgtgcagccacagccaagacacagcttgtaagacttgcgcccccaatacctacaatgaatactggaaccatctctccttctgccagatgtgccgctcctgtgactctgtgctgggcttcgaggaggtttccccttgtgccagtgatcggaaacccgagtgccgctgtaagccagggatgatctgtgtgtatctggacaacgagtgtgtgcactgcgagcaacctgtaatgtgccagcctggcacggaagcggaggttacagatgaagctacggatgctggctccagctgtgtcccctgcaagcaaggatacttccagaatacttcctcccctactgcccgttgccaaccccataccagatgtgagacccagggcctggtggaggcagctccaggcacctcccactctgacacggtctgcagaaatcaatccgagccagggacaatgctgctgctggccatcctgctgcccttggtctgtcttctgctcttcaccactaccctggcctgcgcctggacgaggcacccctctctctgcagaaagctgggtactcttctcaagaggcatccagagggagaagaatctcccccctgtccccctccaaaagccaacccacgtttccctgatctggcagagccacttctacccatgcctggagacttgtccccagcccctgctggacccccagtgaccccggtcttggaggaagtggtgctacaacagcagagtcccctggtccaggccagggagctggagactgagcctggggaacatagccaagtggcccacggtgcaaatggcattcatgtgaccggaggctctgtgactgtcactggcaatatctatatatacaatgggccagtgctggggggcacacggggccctggagaccccccagctccccctgagcctccatatcccactcctgaagagggagcccctgaccattctgtgctctctacaccttaccaggaggatggcaaagcttggcatctggctgagacagagacagtagggtgccatgccctctgacagggccaaggaacctatttgccacctgatgcctgatggtatctgagaaaggcaaggaggaacgagggtccagcaccttctccctgaggctgctctacccaccaggactcgcagggtgtgggtaggctctgagaagcagagccctaagagacttggcctcaggcagctcttcagagcagaaccggacactagcagggcacagtgcctgcccaggactcttactattgtctgagcaagcctgagtccttgttacagacctaccagtcccagaggctgcacatattcagcctcagatgcaggcatggcttgtgacccccgccctgactctctgcaccttaaacttggcaaaggagggagctggtgatagagtcacttgcaaggacatcacagggaccttgcaaggcttcgtggtgctcacccccaaccttcagaggccttgagggctcataccatgtggaccaaggtagaccctgagtgaagatgaagctgcatggaggagcatccctcccttgctcctgggggagaggatagtgagacagtgagcatgggggtttaggtatcattaccaggtatccaggagagtttgggaacaggagaaaaatggtaagtgtatttataaattgtaaccacatgcaaataaagacaagattgagatccttaaaaaaaaaaaaaaaaaa

SEQ ID NO: 1975 - DNA, 2085 bp, Cricetulus griseus
ttcggacatccgcggccgaggcgaacagtggcggaggcatctggcggcgggggcggacgcgggctcctctgtcgccgcgcaccgtttcttctgccacttttgtaagggcgaggtcagccccaaactaccggaatatatatgccccagatgtgaatcaggctttattgaggaagtgacagatgattccagtttttaggtggtggtggcagccggatagatgatagcacatcaacacattttgcagagttctgggaccgtctggatcatacaatgtttttacaagattttagatcatttctaactagcaatccactggaccaagataatagagccaatgagagaggtcaccaaactcatactgacttttggggaccaagtcggcctccaaggttgccaatgacgagaagatacaggtctcggggaagtacacgtcccgacaggtcaccagctattgaaggaataatccaacagatctttgcaggattctttgcaaattctgcaattcctggatccccacatcccttttcttggagcgggatgctgcactccaaccctggggactatgcctggggtcagacagggcttgatgccattgtaacccagcttctaggacagctagaaaacacaggtccccctccagctgacaaggaaaagatcacttccctcccaacagtgacagtaactcaggaacaagttgatacgggtttagaatgtccagtttgtaaagaagattacacagttgaagagaaagtccggcagttaccttgcaaccacttctttcacagcagctgcattgtgccatggttagaactgcatgacacatgcccagtatgtaggaagagcttaaatggtgaggactctactcggcaaacccagagctccgagacctctgcaagcaacagatttagcaatgacagccagctacatgaccgatggactttctgaaacaaagaccacacctgaaccagggctgcctgtattagtcttcttatcatagctgtaaattgtttaaaaactaaacaaacaaacaaaatcgtagatggatttaggaatcatgtaagaaaccccaacccatgatattaatgcaatgagtgtatttctctaaatttaaggttaggacttacagatgggattgtatcctcaaccaaatgcctcctgttcctgaattcagagtaatacctttctaagtgtgaaatttaattatgtccgtttgctcctgcctagtagtagaacagttccttaaagtctagctagggttctgctgtcatattgtcttataatggatgtctctacctctcctccagtctctatcccaccagtaatggacattgcagcaaatacagaagagccagagccctaaagtcttgttatataaagtcttttttgtcttaattgtacaagagtacctactcttggccacattagcaaggtaagaataattcaggggtctgagactctaatactgttttgtctttatcttcagagagcaaattaaggaaaattacagtgggaaggaaaagtggcctgtcatcttcactttgattttcttattttaattctggaagtacagtttccctaaaaatcaacatggcatgtcttagtcttgggttggaaaaaaatctgattttggttcctttttggcattaagttgggcagcatataaacacagaacagatgttggaagtctttttactactgagatgtttttaaggaccctcaactcattctttactgtctttcatactagggaccttacaataatttccctcataaaatagatttaataaatttccctcataaaaataggattttattttatcagtgcttctataccagttcacattcttggtaattcattgttatttaggaattgaaattttatgttgtctgttttagtttgtaaagcccatttttcatgtgtgaaacttcctgttccgttcagttgtagctatacttggaatcaatctgatcaatgtaatcatgcccaaaacagcttagtctgggaaaggtagacctcgctttatgttctaacaattaccatacacatgctctgtacgtgtttaaagatgaataaatggagattgt

SEQ ID NO: 1976 - DNA, 2085 bp, Cricetulus griseus
cggcgctggaggcgggcggcccgggcccaaccggccccccatggacgcccccagcacggggcgctgagaccccgcgtcgttgcccaactcggttcagcgcgccaagccaagatatctccagacaggacaagactctgaggaccctcccagcccctaacccagtgctattcaccaccccagcttgcccctagctctcccacctgccactccctggcccctcccaccacccgccctcaccccttggggcgcagggcatggtgtgaaaggctgagtactgaggcgggtaccatgggtgctgtgccctagggcctgggtggcgggggtgggtggcctttgggcgtggggggcgggcagtgtgcccaccccagtctcttggcgtgctggagggcgtcctggatggaactgaagtgaatggaacagaagccaagcaaggtggagtgtggggtcacgaaaaagaaagaacggccaatgttccctgaaaaccagcatgtcagggtatatccctagttacctggacaaagacgagcagtgtgtcgtgtgtggggacaaggcaaaccggttatcactaccgctgtatcacttgtgagggatgcaagggcttctttcgacgcacgatccagaagaatctccatcccaccctattcctgcaaatatgacagctgctgcgtcattgacaagatcacccggaatcagtgccagctgtgccgctttaagaagtgcatcgctgtgggcatggccatggacttggttttagatgattcgaagcgagtggccaaacgcaagctgattgagcagaaccgggagcggagacggaaggaagagatgatccgatcgctgcagcagcgaccagagcccactcctgaagagtgggatctgatccacgttgccacagaggcccatcgcagcaccaacgcccagggcagccactggaagcagaggcgaaaattcctgccggatgacattggccagtcacccattgtctccatgccagatggagacaaggtagacctagaggccttcagcgagtttaccaagatcatcaccccggccatcacccgtgtggtggactttgccaaaaaactgcccatgttctccgagctgccttgcgaagaccagatcatcctcctgaaagggtgctgcatggagatcatgtccctgcgggcagctgtccgctatgaccctgagagcgataccctgacgctgagtggggagatggcggttaagcgcgaacagctcaagaatggcggcctgggtgtagtctctgacgccatctttgaactgggcaagtcactctctgcctttaatctggatgacacggaagtggctctgctgcaagctgtgctgctaatgtcaacagaccgctccggcctgctgtgtgtggacaagattgagaagagtcaggaggcgtacctgctggcgttcgagcactacgtcaaccaccgcaaacacaacattccacacttctggcccaagctgctgatgaaggtgactgacctccgcatgatcggggcctgccacgccagccgcttcctccacatgaaagtcgagtgccccaccgaactctttcccccactcttcctcgaggtctttgaggatcaggaagtctaaagcctcaggcggccagagggtgtgcggagctggtggggaggagcctggagagaagggacagagctgggggctgagggagaaccccccacctcttctctccttcctcccatccttggatagatgcagctcccatatacccctgcactgcccagtccccctcagaacctcctccagcccttggacagggcaacaaatgaacttgctatgaaagacagtgtgggaggctggggcctaagtcctagagtttctgggaccctaacctctaagaaaataggggaagggaggaagaaataagagggacaagccatcctgattgtagggtcaggaggaatgaggaataggggcagatgccctcactcacccctatatacacaggagagccctgccaagtttcttggcctagattcccttcaggccacaggtctctacttccccaaatacctgggtcctgggtacaaaggacagtttggcttggct

SEQ ID NO: 1977 - DNA, 2085 bp, Cricetulus griseus
gccgccgcgttctgcccacattcggggcgcggagctgggggtccccggggggcgcccgcacttaagatggcgtctgcagcggacggggacgtgggagaggctctggagcagatgcgggggctgtggcccggtgtcgaggatctgagccttcacaagttggcgacgtccctgggcgcgtcggaacaggcgctgcggctcatcatctccatcttcctgggctacccattggctctgttttaccgacattaccttttctacaaggacagctacctcatccatctcttccatgctttgacaggcctctcaattgcttatttcaactttggccaccagatctaccactccttgctatgtatcgtgctacagttcctcatcctgcgaatgatgggccgcaccatcactgccattttcaccaccctttgcttccagatggcctaccttcttgctggatactactacacagccactggtgactatgatatcaagtggacaatgccacattgtgtcctgacattgaagttaattggtctgtgtattgactactatgacggaggcaaagacagggattccctgaccgctgagcaacagaaatatgccattcggggtgtcccttccctgctggaagttgctggcttctcctacttctatggagccttcttggtagggccccagttctcaatgaaccactacatgaagctggtgcagggacagctgactgacatgccagggaagataccaaacagcaccatacctgctctcaagcgcctgagtctgggccttgtctacctggtgggctacaccctgctgagcccccacatcacagaagactatcttctcaccgaagactatgatcgccgccctctctggttccgctgcacgtacatgctagtctggggcaagtttgtgctgtacaaatacgtcacctgctggctggtcacagaaggagtgtgcattttgtcggggctgggctttaatggctttgaagaaaatgggaaggcaaaatgggacgcgtgtgccaacatgaaagtgtggctctttgaaacaactcctcgattcaacggcaccatcgcctccttcaacatcaacaccaatgcctgggtagcccgttacatcttcaaacgcctcaagtttcttggaaataaagaactctcacaaggcctctccttactgttcttggccctctggcacggcctacactcaggatacctgatttgcttccagatggaattcctcattgttattgtggaaaagcaggtcaccagcctaatccaggagagccccaccctgagcagcctggcctccgtcactgccctgcagcccttctactacttggtgcagcagaccatccactggcttttcatgggttactccatgactgccttctgtctcttcacatgggacaaatggcttaaggtatacatgtctgtctacttccttggacatgtcttcttcttgagcctactattcatattgccttacattcacaaagcaatggtgccaagaaaagagaagttaaaaaaaagggaataatagatttccctggtggccgcaagctggactggtgcagaaactacttgtctcccttctcacagcactcctcacccgagagcagacgccaggagctggaagtcaccacagcactcccagctgtgccgatgctacagccaaaggggaagctcttgtgggaggagcagaggggcttcaacccctttggactcccccatgcacgttgccttatctcttccctctagccaggaacttgtgtctctcttctgccaatctactacgattgtatacgtgccgataccgccacccccccatggggggagggaagggtacgaggccctgcctgctccactttttctatcttggaactataccagataaaatcacttctgtttgttcagtttttcactgctagcacccctgactgctttctttcatacgtgttctctgtgcttgctgaagctgagctcatcagggtctctccttgaaggcacaagaatctaggaaatgaggaactcctaccttcaaagtccggaaaccagaacccgaagggggactagtttacactaccatgtgctg

SEQ ID NO: 1978 - DNA, 2085 bp, Cricetulus griseus
tggagatcacagatggaacttctgaagctgggcagtgggaagtggcctacagtgggtctgccacggagtatgtcttcacccacttgaaaccaggcactttgtacaaactgcgagcatgctgcatcagcaccggtgggcacagtcagtgttctgaaagtctccctgttcgcacactaagccttgcaccaggtcagtgccgacctccgagggttttggagaccaaagcacaaagaagtccacttagagtgggatgtccctgcatctgaaagtggctgtgaggtgtccgagtacagtgtagagatgacagaacctgaggacgtagcttcagaggtgtaccacgggcctgagctggagtgcactgtcggcaacctgcttcctggaactgtgtatcgcttcagagtgcgggctctgaatgatggagggtacggtccctattctgatgtgtcagaaccctggtgccgacatctctgagtacaggttggaatggggagaagatgaagaatccttagaacttgtttaccatggtccagacacctgctttgagatacaagacctgttgcctgctgcacagtattgctgcagactacaggccttctgtgtgccttgtactgaactgggaagagccgtgcaataatggatctgaaatcattgcttacaacatcgatctcggagacacgtgcattactgtgggcaatactaccacacgtgtgataaaggacctccttccagaaactacataccggatcagaattcaggccatcaacgaaattggagttggaccattagtcagttcattaaagactcggcctttaccacccttgcctcctaggctggaatgtgctgcatctggtccacagagcctgaagctgaatgggagacagtaactccaagacacacgctgctgatgacatggtgttcacactgcagttggaggacaggaataagaggtttgtctccatctacagaggacccagccacacttataaggtccaaagactgacagaattcacctgctactccttccgaatccaggcatcgagtgaagcaggagagggacctttctcagaaacctataccttcagcacaaccaaaagtgtccctcccaccctcaaagcacctcgagtgacacagttagaaggaaattcatgtgaaatcttatgggagacagtaccaccgatgaaaggcgaccctgttaactacattctgcaggtattggtcggaagagaatctgagtacaaacaggtgtacaagggagaagaagccacattccaaatctcaggcctccagagcaacacagactacaggttccgtgtgtgtgcatgtcgccgctgcgtggacacctcccaggagctcagtggagccttcagcccctctgtggcctttgtgttacaacaacgtgaggtcatgcttacaggagatatgggaagcatggacgatccgaaaatgaagggcatgatgcccactgatgaacagtttgctgccctcattgtgcttggcttcgcaaccttgtccattttatttgcctttatattgcagtacttcttaatgaaataaatccagcacactagaggtgtgaacggaacgccttactaatttgcctcgtagcatgttatattttgttgtgttttatacttttgtaattttaggtcagttttgttccttggcagcatctggagtattaaccttctgacattttcttgtgtttttaaaaataaagaacatctaactcattaaatgaccaaaaaaaaaaataaaatcccattatcagtgattgaaaggtttacatgtacccagaaaaccataatcatctctcagaagagtggatcaatgcattattgtgtgcctatattgatgtagtcgagtcctagagagctctgtattttgttattgactataataattagtgtaattagacttgtaaactgatggtatcaaggtaaatttgctctccattataatctcttcagtcaggaaatgattcctctacatggcactattttctatcacaagtctgtatatgtgctgtggatatataactctatatatatattgtcattacaaaggaacaataagataaagtgttct

SEQ ID NO: 1979 - DNA, 2085 bp, Cricetulus griseus
tcccccacgccaccgggccctccctcctggacagctccccaaaccagttcagcctctacacgtctccttctcctgcccaacatctccctagggctgcaggccacagtcactgtcaccaactcacacctcaccgcctccccgaagctgtcaacacagcaggaggctgagaggcaggcccttcagtccctgcggcagggtggcacactgactggcaagttcatgagcacatcatccatccctggctgcctgctgggtgtgacattggagggcgacacgagcccccatgggcatgcttccctgctgcagcatgttttgctgctagaacaggcccggcaacagagcacgcttatagctgtgccactccatgggcagtccccattggtgacgggtgaacgtgtggccaccagcatgaggacagtgggcaagctcccgaggcaccgacctctgagccgcactcagtcctctccactgccgcagagtcccccaggccctgcagcagctggtcatgcagccagcagcaccagcagttcctagagaagcagaagcagcagcagatgcagctgggcaagatcctcaccaagactggggaactggggccgcacccagtcctcacctgctgctcctgggagcatgaagagccccccagaccagcccactaagcacctcttcaccacaggtgtggtctatgacacgttcatgctgaagcaccagtgcatgtgcgggaacacacatgtacacccagagcacgccggccgcatccagagcatctggtcccggctgcaggaaactggcctgctcagcaagtgtgagcggatccggggtcgtaaagccacactggatgaaatccagacagtgcactctgagtaccacaccttgctctatgggaccagccccctcaaccggcagaagctggacagcaagaagctgcttgggcccatcagccagaagatgtatgccatgctgccttgtgggggcattggggtggacagtgatactgtatggaatgagatgcactcctccagtgctgtgcgaatggcagtgggctgcctggtagagctggccttcaaggtggctgcaggggagctcaagaatggatttgccatcatccggcccccaggacatcatgctgaggagtccacagccatgggattctgcttcttcaactccgtagccatcacagctaagctcctgcagcagaagttgaacgtgggcaaggtcctcatcgtggactgggacattcaccatggcaatggcacccagcaagcattctacgatgacccctctgtgctctacatctccctgcatcgctatgacaatgggaacttctttccaggctctggggcccctgaagaggttggcggagggccaggcatggggtacaatgttaatgtggcatggacaggaggtgtggatccccccatcggagacgtggaatacctaacagccttcaggacagtggtgatgcccattgcccacgagttctcacctgacgtcgtcctagtctccgctgggtttgatgctgtcgaaggacatctgtctccactgggtggctattctgtcaccgccagatgttttggccacttgaccaggcagctcatgacactggcagggggccgggtggtgctggccctggagggaggccatgacttgaccgccatctgtgatgcctctgaggcctgtgtctcggctctgctcagtgtagagctacagcccttggatgaagcagttttgcagcaaaaacccagcatcaatgcagtcgccacactagagaaagtcatcgagatccagagcaaacactggagctgtgtgcagaggtttgccactggtctgggctgctctctgcaggaggctcaggcaggtgagactgaggaggccgagactgtgagcgccatggccctgctctctgtgggcgctgagcaggcccaggctgttgccactcaagagcacagccccaggccagcagaggagcccatggagcaggagcctaccctgtgacaccctggcccccattcctctgggcttcatcattgcgattttgtttatttttctattaaaacaaaaagtcacacattcaaaaaaaaaaaa

SEQ ID NO: 1980 - DNA, 2085 bp, Cricetulus griseus
ggctttgtagacatgcaactcttcgcccttctggtgaccctgttctacaggtgggggctccacctacacccctcagaagctctacggagaggtgacctctcctctatatcccaagccttaccccaatgactttgagacaaccactgtgatcatggtccccagggggtacagggtgaagctcgtcttctggcagtttgacgtggaaccctctgaaggctgtctttatgactatgtcaagatttctgctgataagaaaactctagggcggttctgtgggcagctggactctcccctggggaaccccccgggagagaaggaattcgtgtcccaggggaacaagatgctgttgacctttcacacagacttctccaatgaagagaatggaaccgtcatgttctacaagggcttcaaggcctactaccaggctgtggacattgacgaatgtgcgccccagtccaactcaatggaaggtgactaccagccccagtgccaacacctgtgtcacaactatgttggaggctacttctgttcctgccgtccaggctatgagcttcagaaaaatggacagtcctgtcaggctgaatgcagcagtgcgctgtacacagagccctcagggtatatctctagcctcgaatacccacagccctacccaccggatctgcgctgcaactccagcatccgggtagagcggggcctcactctgcatctcaagttcctggatccttttgaaattgatgaccaccagcaagtacactgtccctatgaccagctccagatttatgctaatgggaagaacttgggtgaattctgtggaagtcaaaagcctccagaccttgacacccgcagcaatgcagtggatctggtgttcttcacagatgagtcaggggacagtcgaggctggaagctgcattacaccactgagatcattaagtgcccccagcccaagaccctagatgagttcaccatcatccaggaaccacagccgcagtaccagttccgggattacttcattgccacctgcaaacaaggctaccagctcgtggagggaaatgcccaggtgcaagatcaaggactcgtgggcagccccgaagcctgtctaatgggtacctccactacatcaccacaaaaggcgtgaacacctatgaagccaggatccaatactactgccatgacccgtattacaagatgaagaccagagctggcagcagcgagtctgtgcgagggttatatacctgcacagcccagggcatttggaagaatgaagaggaaggggagaagatgccccggtgtctgccagtgtgtgggaagcctgtcaaccctgtgaagcagaagcaacgtatcatcggaggggaggaagccaaacccggcaacttcccctggcaggcattcaccaacatccatgggcgaggaggcggggccctgctcggagaccgttggatcctcaccgcagcccacaccatctaccccaagggacacaacaaagaaagcaaccctagtaatgatattttcctgggccacacaaatattgaagagatcgaaaaattgggacatcacccagtccgtagggtcatcatccatcccgactaccgccaagatgaacctaacaattttgaaggagacattgccctgttggaactggaaaacagtgtcacactgggtcccaacctcctccccatctgtctccctgacaatgagaccttctatgacaaaagcctcatgggttacgtcagtggctttgggataacagaagataaacttgcttttagcctcaggtttgtccgtctgcctgtagctgatcgagaagcatgccggagatggctccagacgaaaaagagtaatgatgtcttttctcaaaatatgttctgttccggggacccgactctaaagcaggatgcctgccagggggacagtggaagtgcgtttgcagtctgggacagagaccgtgatgtctggattgccaccggcatcgtgtcctggggcattgggtgtggtaagggatacggcttttacaccaagttacttaattatgttgactggatcaagaaagagatgggagaggaagactgaccccagagttcactaggt

SEQ ID NO: 1981 - DNA, 2085 bp, Cricetulus griseus
ggcttgcaggctgctgtgcgggttcctgcggggcccggcgcctgccgcagcgtgccatggccctgcccggcggctcctggcggggaagcgcgaagccgctttctcccagagcccatcatccctgggccgccgtctgcctccaggctccacggcgaccgaggactatgaagaaggccccgacacggaggagcgcttttctgttcccggagtacgtcccggagcgggaccctgaggaactgctgagagagttgcaggagttgcgggagttgcatcagcggcagcaggatgaggagcgacagaggttgcagcggcgggaggagcggcttcagcggaagctgcgggcgggtctccggagtctgcaggtccccgagcttccagaagccacggtgccacccagcggcatctactgctcgggctgcggggccgagctgcactgccagcaccccagcctgcccggctacctgacggaggagaagttccgcggtgtgacccaggcggacggcggacgggcgcggaccgtgtgccaacgctgctggctcctggtgcaccatcgacgtgccctgcgcctgcgggtgagtcgagagcagtacctggagctggtgagcgccgcgctgcggcggccggaacccgctctggtgctctatatggtggacctgctcgacctgccggacgccctgctgcccgacctgcccaagctggtgggccccaagcaggtcttcgtgctggggaacaaagtggacctgctgccccaagacgcacccggctacttgcagcggctgcggaagcggctgtgggacgactgcatccgcgctgggctcgtgatggcacctggccaccgaggaccgcagtaccccaccggcgatgaccctcgggacgagaaaaagaatccgaatccgtcgaccaggtccagcaccgtgatcaaggacgtccggttgatcagcgccaagaccggctacggagttgaagaactgatctctgcacttcagcgctcctggcgctaccgcggcgacgtctacctggtgggcaccacgaatgccggcaagtccactctctttaacacactcctggagtctgattactgcaccgccaagggctccgaagccatcgacagggccaccatctccccctggccaggtactacattaaacctcctgaagtttccaatttgcaacccaactccctacagaatgttcagaagacaaaaaaggcttaaagaagaggcaaccaaagcagaagaagatcttagtgaggaagaacaaagccagctcaatcaactgaaaaagcatgcttacaagataggaagagttggaagaacattctcgcactccacagaacagacggaagacgttccctttgaatttgatgctgactcattggcctttgacatgggaaatgaacctgttgtggccgtgcaccagtgtaccaaacaagtagaactgaccccagaggatgtgaaagatgcccactggttttatgacacccctgggattacaaaagaaaactgtattttaaatcttctaacagaaaaagaagtggatattgttttgccaacacattctattgtaccaagaacatttgttctcaaaccaagaatggttctatttttgggtgctatagcccgaatagatttcctagagggagatcaatcagcttggtttacagttgtggcttccaacttccttcctgttcatatcacctccttggacaaggcagatgctctatatgagaagcatgcaggccacgagttactgcaggttccaatgggtggaaaagaacgaatggctgagtttcctcctcttgtggctgaagacattacattaaaaggaggtggagattctgaagctgtagctgatatcaagttctcctctgcgggttgggttgcagtaacaccttactctaagggcacactgcatctccgaggttacacacctgaaggaactgttctgactgtccagccacctgtcttgccatatatcgttaatatcaaaggacaccgcatcaagaaaagtgtggcctataaaaccaagaagccttcatccctggtatataatctggtgaaaaaataaataagtgaggcagacctgg

SEQ ID NO: 1982 - DNA, 2085 bp, Cricetulus griseus
atgccattgaccgggtagatcacatgttcacgctggagttcgatgctgaggtggatgagtccgagtctgccacgctgcagcagtactaccgagaagcaatgattcagggctacaactttgggttcgagtatcataaagaagttgttcgtttgatgtctggagagttcagacagaaaataggagacaaatacataagctttgcccggaaatggatgaattacgtcctgaccaaatgtgagagtggccgaggtaccagacccaggtgggccactcaaggctttgatttcctacaagccattgaacctgcctttatttcagctttaccagaagatgacttcctgagtttgcaagccttgatgaatgagtgcattggccacgtcataggaaagccacacagccctgtcacagctattcatcggaacagcccccgtcctgtgaaggtgccccgatgccacagtgaccctcccaacccacacctcatcatcccaaccccagagggatttagcactcggagcgtgccttccgacgctcggaaccatggcaactctgttgctgctgctgctgttgctgccgccgccaccactgccactggccgccctggcccaggtggtggtgaccctgcgccggccaaacctgtcaacactgcccctgaaaccagaggttccagtgtcccagaaaacgatcgcttggcatccatagctgcagagctacagttcagatccctgagtcgtcactcgagtcccacggaggagagagaagagccagcgtatcctcgaagtgactcaagtggatcaacacggagaagttgggagcttcgaacactcattagccagaccaaagactctgcctctaagcaggggcccatagaagctatccagaagtcagtccggctctttgaagagaggagatatcgagaaatgaggagaaagaatatcattggtcaagtctgtgataccccgaaatcctatgacaatatcatgcatgttggcctgaggaaggtgacgttcaaatggcagagaggaaacaaaataggagaaggacagtatgggaaagtgtacacctgcatcagcgtcgacacgggggagctgatggccatgaaggagattcggtttcagcctaatgaccataaaactatcaaggaaactgcagacgaactgaaaatatttgaaggcatcaagcaccccaacctagttcggtactttggtgtggagcttcacagagaagagatgtacatcttcatggagtactgtgacgagggcacgctagaggaggtgtcaagactggggcttcaggagcatgtcatcaggctgtactccaagcagatcacggttgccatcaacgtcctccacgaccacggcattgttcaccgagacatcaaaggtgccaatatcttcctcacgtcatctggactaatcaaactgggagattttggatgctcagtaaagcttaaaaacaacacccagaccatgcctggagaggtaaacagcaccttgggaacagcagcttacatggcacctgaagttattacccgagctaaaggagaaggccatggacgtgcagcagatatctggagtctggggtgtgtcgtcatagagatggtgactggcaagcggccgtggcatgagtatgaacacaactttcagattatgtacaaagtgggaatggggcacaagccaccgatccctgaaaggctaagccctgaaggaaaggatttcctctcgcactgcctggaaagtgacccaaagatgagatggacagccagccagctcctcgaccacgcttttgtcaaggtttgcacagatgaagagtgaagctaaccagtccgtggcctagtagtgtgtgaacagaatccctgatcactactgtatgtaatatttacatgaagactgccgagtgcagtgcagcctcttaaccctccaagactgaacactgcacaggtgacaagcctcacttctgctgctccgttgtctgctggctctgactgtgaaacctccttgttggcaagctacaagtttgttatgcaaaggctcgtaagtgaaaactgaagaaaaggttttttcaataaatggtttattttaggaaagc

SEQ ID NO: 1983 - DNA, 2084 bp, Cricetulus griseus
  modified_base (308)..(308): a, c, t, g, unknown or other
gtcacttttgcacactgacatcaggtcacaattgcgctatgagctccagggactcccgctgctcacccagatcttggaaagtgcctttagcatcaagtggaccgatgagtacgagtcggccatagaccataatggacccccactttcacctcaggagacagactgtgccattgaggccctcaaagctctcttcaatgtgacggtagacagctggaaggtgcataaagagagtgactctcatcagttccgtgtcatggcagctgtccttcgccattgttacaatcgtaggtccaactgaagacaaaacngaagagctgcacagcaatgctgtcaacctttaagcaatgttccagtctcttgttggatgttctcatttgcccattaacccatggagaacacctcaggaggcagcgactctggatgaactgcctggtgataaaacaactgagaaagacacagctttgaaaagcaataccatggtatacaatggcatgaatatggaggctgttcacgtgttactcagttttatggagaagagaattgacaagggaagcagctatagagagggtctaactccagttctcagcttattaacagagtgttcccgagcccatcggaacatccgaaaatttctcaaagagttttaccaccattgagggatgtgacaaatcgacctgaagttggctcaactgtgagaaataagctggtgcgcctcatgacacatgttgaccttggtagtcaagcaaattgctgctgaattcctttttgtcctttgcaaagagagagtggatagcctactgaaatacactggctatggaaatgctgcaggactgttggcggccagggggcctcttggctggaggaagaggagataattggtactcagaggatgaggacacggacactgaagaatacaaaaacgcaaaaccaaaagaggagttgcttaaaccaatgggactaaaacctgacgggacaataacgcctttggaggaagcactcagccagtattctgtcatcgaagagaccagctccgacacagactgaaaagcatcgtcacctgctccactctcaatatggcttttatcagcatcttttctctgtagctccaggggaatccttttctctaaaacatttatgcccttgctttggctagaaacacattagctggtttactcgttgagaacccagcgtatttaagaggtggtcctgtgttctctgcaacactgagacgtcacacagagcgggagttaggcagagtttcgggctaggagcagagacagtcattccatttcatgaggatgcagtgcggccttcactcagaagcagccctggtccaggcttgtagtcttgttgccaggattcaaacctgttacactcagaaaatttgtatgtcacttagctaaaacttcagaatacatctctcctatgaggagttagaaatgatggttttgttccaggcagctacatgtgcctatttattcctcaagttcctgaacactacaagtaccgtagggctggaccaccatctgtaccactgcatccagagcgtgcattctgaggtctcactcagggtgccaagtacatactcatcctccaggcaacagagaggatggggctccccgagtagtgggagttcttttgtggcctgtgctgggggtagggagccaacagcacccatatgtacataaaggtcattcgtatgtcacatgttttaaacaagggtctctgtgtgtatttgtgtgtgtgttctttctaccatatgtgatcagtttaatggtaactttatttaattaaaaaaagaaacacaaatagttactattaaactgattaaggctgtttatttttactcttagaatggtcatatgaagtagacgtgcaatcatgtagacagcaggccaagccgatccgtgccaaaaccgaaaaaggggtgagggttccttttcatatatgtatgtaagtgtacatataagtacacatacatacatacatgcacacacatagattatgtgcttaaccactgccttttaaaaactttaaattaaataaaacattggggatgattacaaaaatttaaaaaaaaaaaa

SEQ ID NO: 1984 - DNA, 2084 bp, Cricetulus griseus
cagcttcaaggtggacagcagcaaagaatcagcggaagcagcttgtgacatattatcacagcttgtgaattgctctttaaaaacacttggacttatttcaacagctcggccaagctttatggatctaccaaagtctcactttatctctgcactgacagttgtgtttgtaaactccaaatccctgtcctcacttaagatagatgacaccccagtagacgatccatcccttaaagtgctagtggccaacaacagtgacacactcaagctgctaaaaatgagcagctgtcctcatgtctctccagcaggtattctttgtgtggctgatcagtgtcacggtttacgagaactggccctgaactaccatttgctaagtgatgaattgttactcgcattgtcttctgaaaaacacgttcgcttagaacatttgcgcattgatgttgtcagtgagaaccctggacagacacattttcataccattcagaagagcagctgggatgccttcatcaaacactcgcccaaagtgaacttagtgatgtattttttttatacgaagaagaatttgacccattctttcgttatgaaatacctgccactcatctttactttgggagatcagtaagcaaagatgtgcttggccgtgtgggcatgacctgcccgagactagtagaactggtagtgtgtgccaatgggttacggccccttgatgaagagttaattcgtattgcagaacgttgcaaaaatttgtcagctattgggctgggggaatgtgaagtctcatgcagtgcctttgttgagtttgtgaagatgtgtgggggccgcctgtcgcagttatccattatggaagaagtgttaattcccgaccagaagtatagtttggagcagattcactgggaagtgtctaagcatcttggcagggtgtggtttccagacatgatgcctacttggtaaggactgcatgatatagggcatgatgaataactagcaccttaattttaagaaactgtattataataaaagtttatttgctctagttctgatacaattctactttgtggcacagaaatttggtatcttcagtgagcttataatgaatgatgtttgttggaatgcctacagtttgagtcgggtgattccttttttttgtagtctaatcacaatcaaatgtttaaagtctgaaggaaacaacctttgtattctaacatctaagaagtatactaataggtttctgaaatgttctctatgcattttttaaaatgtaaacctgacattttagggtcttttagttataaatacacctgttataaggtgtttaatatagctcaggaaagtgagcactttgtgagagaaatgtatggcatagctcataagagattgagtaaatgtttcaagtggtatgaaacttttaaaaattaagatataaatatcagagtacttagaacactgataaaatgttgcagtggttattaaggatggcacgtagagctagggtcaactctgaaggaaccagtggaatagaagagaggtagtgtttagctatgtatgaaccttaggtttctgtgaaatgtgctaaaccatgtgagttcttttcttgttatatcactaatgtttgtggtgccagaggcatttaaataaaaatcctacttaaaaaccaatttgaaataattaaaagtagaactttataaattgttgatgaacagttttcatgaaagaatattagtctctggtgaattttagtgatggcttatgctttaattttggaattacatagctacaatacaactttaaaaaatcaaaagacgttatctgtacagttcagaaacactaaaattttttttgttttttgtttttttttcaactttggggaatggatttgatggtgtataatcagttttactaaccaaagctttatttgaaaacttaactttttgtacaaattgaattacatgcttgaatactttaagtcactttataagcaaaatgcatacatagcacttaattttgtttatactgtaaaatatatgttaaatggttttatcaatttgggaataaagatagttactaagaaaaaccaaaaaaaaaaaagt

SEQ ID NO: 1985 - DNA, 2083 bp, Cricetulus griseus
  modified_base (712)..(712): a, c, t, g, unknown or other
cctaccaaaccctacctcccacgtccgtaagccagagctgtggtcagacaacttcatggatttgtaaagcagtgtctggtaaaaagacctgagcagagagccacagccactcagctcctacagcatccaattgtcaagagcgccaaaggggtgtcgatattgcgagacttgattaatgaggccatggatgtgaagctgaagcgccaggaagcgcagcagcgggaagtggaccaggatgacgaggagaactcagaagaggatgaaatggactctggcacaatggtccgagctgcaggtgatgagatgggcactgtccgagtagccagtacaatgagtgatggagccaacactatgattgagcacagtgacacattgccgtcacagctgggaaccatggtgatcaacacggaggacgaggaagaggaaggaactatgaaaagaagagatgagaccaaaagaaaggaaaaccaaatcaacagcttggcaaggagtgtatctggctctctgaaaaattcttcagattggaaaataccacaggatggagactatgagtttcttaagagttggactgtggaggaccttcagaagaggctcttggcccttgaccccatgatggaacaggaaatggaagagatccggcagaagtaccggtccaagaggcagccaatcctggatgctattgaagccaagaagaggaggcaacagaacttcngacaacaccagccccggcctttggtggcttcctgctttgccttgcttctttggtactggagctgctgtataaagtctccccagaggagccatctggtctcagcacaccagtgtgttccttgtgttatctccagatacagacaggcactcatgccaggcctgaagcaggatagagggctttgcaaaagacagttacggagttgtgccctgcacctttggctcgaaaccacagcccgaagaaactggaagacagttgcctttttatttccttctagtctcttctctctgacgggaccacaattgggttgcacctgaggatactgaaatccaaccccataattgcttttgctccctaacctgagagtcgataaaaaggaaggggatgttctcctctgtgaccagattctgttctttgcagttaaagcaagctttaaaaaaatgcaagaggcagctggtctgcaagacttggccagcaaaggaactacgtagcagagagaattagaggatactttgcagatcttgctggaatggaaaatggcagctagcattccctggggagcaagtttcacacactgtgccaggtgcactgcaggtttcattagcgcctggcagatgccaaaatgtataataccatttaaaacgaaatgcccccatcgaatgccaggaatgagagagatgacatcactacagaccctgcaggtgctcagagaccaatagcagaatattatgaacagcttcatactaataaattcaccagcttaagtgaaatagacagatacctgggaagtgatgaagtaaccaagcttccctgaagaagaagaaatggacaatctgaacacccagccccctttctaccaaaacctggtagctctgagagatatgctctaaagattgcagttctgttttggagaagttgttcctgcccaagccacacccatcaccctcctcgaccttcttttgagcactgtgtttgtaatttcattaggattacattcatcatctttggaatccatgttctttgggtttagggggaagtctcttccaccagcctgcactcagaccaacttggagagaaaaaaaaaaacttaaatgctgttgctgatgtacaatttaaaaatgtgaaatttttagctttaacgttttgtaacaaaaactaataacactggcttaaaatgctgacttaaatgctattttgtaaggtttggctgtaaatagtcagggtcagccatttgtatatgtgtgagatacagcatcttccacggccatttgtctttaacgtgaggtatttcctgtgcgcttttatgttagagttgttctccctcactcctccccaacacctgtcacctttgttttcaataaactgtcttttaga

SEQ ID NO: 1986 - DNA, 2083 bp, Cricetulus griseus
gcgggtcccagccatgggcggcgaggactactacctggagctgtgcgagcggccggtgcagttcgagaaggcgaacccggtcaactgcgtgttcttcgacgaggccaacaagcaggtttttgctgttcgatcgggtggagctactggagtggtcgttaaagggccagatgataggaatcccatctcttttagaatggatgacagaggagaagtgaagtgcattaagttttctttagaaaataagatactggctgtccagaggacctcgaagacagtggacttttgtaattttattcccgataactctcagctggaatacacacaagagtgcaagaccaagaatgccaacatactaggattctgctggaccagttctacagaaatcgtcttcataaacggatcaaggcatcgaattttaccaggtgttgcctgagaaacgaagtctcaaactcctgaagagccacaacatcaacgtgaactggtacatgtactgtcccgagagtgccgtgatcctgctgtccaccacagtccttgaaaatgttctgcagcctttttattttagggctggcaccatgtcgaagcttcccaagtttgagattgaattaccagctgcaccaaagtccaccaaacttagcctttcagaacgagacattgcaatggcgaccatctatgggcagctctacgtcctcttcctgcgacatcattctcggacctccaatagtacgggagcggaggtggtgttgtatcatctcccacgggagggtgcatgtaagaagatgcatattctgaagttaaataggacgggaaagtttgctctaaatgtcgtggacaacctggtagttgtccaccatcaggacacagagacctcagtaatatttgacatcaagttacggggagagttcgatggcactgttactttccatcatcctgtgctcccagcccgatcaattcagccatatcagatccctgtggcaggtcctgctgctgtgaccagccagtctccagttccctgtaaactctactcttcatcatggatcgtctttcaaccagacatcattatcagtgcgagccaagggtacctctggaacctccaggtgaaacttcagcccatagtcaatctcttgccagataaagggagattgatggactttcttctccagaggaaggagtgcaaggcggttatcctgtctgtctgttcacagatgctgacagagtcagacagagccacgctgccggtgatagccactgtttttgataaactcaaccatgagtataaaaagtacttggatgctgagcagagctacacaatggcagtagaagcagggcaaagccggagcaacccacctctcaaaaggccagtgcggacccaagcagtggtggaccagtctgacgtgtacacacacgtgctgtcaccattcgtggaaaacaaggagatgccgcacaagttcgtgatagctgtgctgatggaatatattcgttctttgaaccagtttcagattaccgtacagcattacttacatgagctggtcatcaagacccttgtccagcacaacctcttctacatgctccaccagtttctgcagtaccatgtgctcagcgactccaaacctttggcctgcctgctgctgtccctagaaagcttttatcctcccgcccaccagctatctctggacatgctgaagagactttcaacagcaaatgatgagatagtagaagttcttctatccaaacaccaggtgttggctgccctaaggttcatccggggcattggtggccatgacaacatttctgcacgcaaattcttagatgccgccaagcagactgatgatgtcatgctcttttataccatattccgcttcttcgaacagcgaaaccagcgtttgcgagggaaccctaacttcacaccaggagaacactgtgaagaacatgtcgcctttttcaagcaggtttttggagaacaagctctaatgaggcctacaacattctgaagtcccttgatagtattagtttttttaaaatataaaaattgtaacaaagtttaatttattgcattaataaagctaccttaaaactaaaaataaaa

SEQ ID NO: 1987 - DNA, 2083 bp, Cricetulus griseus
ggagatgtcctccgtgacgttgatgccaaggccttggtgcgctctgactttctgctgatatatggagatgtcgtctcaaatataaatattaccagagccctagaggagcacaggttaagacggaagctaacaaaaaaatgtgtctgtgatgacaatgatcttcaaagagtcatcccctagccaccctacacgctgccatgaggacaatgtggtggtagctgtggatagtgccacaaaccgaattctgcatttccagaagacccaaggcctccggcggttttcctttcctttgaacctgttccagggcagtagagatggagtggagattcgatatgacttactggattgccacatcagcatctgttctcctcaggtagctcaactcttcacagacaattttgactaccaaactcgagatgattttgttcgaggcctattagtgaatgaggagatcctaggaaaccagatccacttgcacgtaacaactaaggaatatggtgcccgggtctccaacctacacatgtactcagctgtctgtgctgacatcatccgccgatgggtctaccctctcactccagaagtaaacttcactgacagcaccgcacagagctacactcattcccgacataacatctaccgagggcctcaagtcagcctgggccacggcagtgtcctggaggagaatgtgctcctgggagctggcactgtcattggtagcaattgctccatcaccaacagcgtcattggccctaactgccacattggtgacaatgtggtactagaccgggcctacctgtggcagggagttcgagtggcttctggatcacaaatacaccaatctctgctctgtgacaaagctgaggtcaaggaacgagttaccctgaagccacactgtgtcctcacttcccaggtggtagtgggcccagatatcacgctgcccgagggctcggtgatctctttacaccctccagatgcagaggaagatgaagatgatggccagtttagtgatgattctggggccgaccaagaaaaggagaaagtgaagctgaaaggttacaatccagcagaagtaggctttgaaggccagggatacctctggaaagctgcagatgtgaacatggaggaagaggaggagctacggcagagtctgtggggactcacgatcaatatggaagatgagagtgagactgaaagtgagcggagcatggattctgaggaactggacagcagagcagtgtcccctcaattggatgacattaaagtattccagaatgaggtcctgggaacactgcagcgaggcaaagaggagaatatttcttgtgacaatctagtcctggagatcaactctctcaagtatgcctacaacattagcctaaaggaagtgatgcaggtcctgagccatgtggtcctggagttccccctacaacaaatggattccctgcttgacccaaaccgctactgtgccatgctgcttcctctgctcaaagcctggagccctgtttttaggaactacataaagcgtgcagctgaccatttggaagcattggcagccattgaggacttcttcttggagcatgaaactcttgttacttccatggccaaggttctgatggccttctaccaactggaaatcttggctgaggaaacaatcttgagctggttcagtcaaagagatataactgacaaaggccagcggttgcgcaagaatggacagctgcagaggttcatccagtggctaaaagaggcagaagaggagtcatctgaagatgactgatggggactgctggttcccgaggtgtgttactggttgtccacccaactgattggcggaacaagaaagctagctacagaagcatgagcggccactacagaatgagacttcacagaacagaagtttcaacttcagtgttcttcctactgctggcaaccatgtgcttctcatcctgactgaagttgggatgtgggaggttagagtgaaacaaaattctagggaaaatctagacagattggaggtaggccagaggaagtgctctgtgctccatatttccctcagggaacagtaaagagcagctggccctctctg

SEQ ID NO: 1988 - DNA, 2082 bp, Cricetulus griseus
agcctatataggcattacaagttctgatgttgttgggagacaaaaccaaagaaaaaggcaaggtggaagccaatgagtataaaacacactgagaagctggagaaggaattcaaggaatacacagagtcttcacctttggaagacaaggttattgagttggacataacattccggttcgcttaacacctagtggcaatgacatgaaagttctgcaaccacatgtgatagctgtacggagaaattacctcccaagcactaaaagtagaatataacacatcagcacaccagtcgtcattgagaattcagatttatagaatacagatccaaaaccagattcatggtgctatttttcctttcgtgttttatgctattaaacctccaaagtctgtcacaatggactcagcaccaaagccccttacagatgttagtattgttatgagatctgcaggacattcccagatatcacgcattaaagtatttcaaagtgttgattcaagaaatggatctcagattggatcttggatttgtgtatgccatagcagaccttattccaaaagccgaggtgactgagaaaacagaggttgaatattttaataaggatgtagaaacgtttgaacaggaatatgaaacagtttcatcagtagatcaatcccaaatcaatctctttgaatattttcatatatctcctatcaagttgcatttgagtgtttcactgagctctggaagagaagaagctaaagattcaggacaacgtggaggactaattcctgttcattctctcaatcttttgctgaagagtattggtgccacccttacagatgtacaagatgtagtttttaagcttgccttttttgaactcaactaccagttccgtacaacatctgaactgcaatctgaagtaataagacactattcaaaacaggctattaagcaaatgtatgtacttattcttggacttgatgttttgggaaatccctttggcctaattagagagttttcagaaggcgtggaagcatttttttatgaaccttaccagggggccatccagggtcctgaggagtttgtggaaggaatggcactaggactgaaagcactggttggcggagcagttggtgggctagctggtgctgcctccaaaatcaccagcgctatggctaaaggggtagcagccatgacgatggatgaagactaccagcagaagagaagagaagcgatgaataagcaaccagctggccttagagaaggcattactcgtggaggaaaaggcctggtttctggttttgtaagtggcattacagggattgttacaaaaccaattaaaggtgctcaaaaggaaggagcagcaggtttcttcaaaggtgttgggaaaggtttagttggagcagtggcaagaccaacaggtggcatcatagacatggccagcagtacctttcaggggatcaaaagagctacagagacttttgaagtagaaagtctgagacctcctcggttctttaatgaagatggagttatccgaccttacaggctgagggatggtacaggaaatcaaatgttacaggtcatggaaaatggaagatttgcaaaatacaagtattttacccatgtcatgatcaataaaacagatatgttcatgataacaagacgtggtgtgttgtttgtaacaaaaggaacatttgggcagctgacatgtgaatggcagtatacttttgatgaatttaccaaagagccatttattgtccatggaagaagattgcgcattgaagcaaaggaacgggtgaaatctgtattccatgccaaagaatttggaaaaataattaacttcaagactccagaggatgctaggtggatccttacaaagctggaagaagcaagggaaccatctcctagccaatgaagagggaacactgcctggaggcacagcaatccaatactacagttcccatactgtaccttctaacccctgtggaaaataggagtcatttcagggagcatatgcttttagatgctttaaaaaaaaaacaatcaattgggcaaacagttgtgtgattaaactactagaaggtccattcagtttcctaatct

SEQ ID NO: 1989 - DNA, 2082 bp, Cricetulus griseus
accaaggagctcattgagcagaccaagtgtgtgtacgaccgtgtgggcacccaggacttccaaggatgtgtcctatgagagtacacttgaaggcactggctgatgtggaggtgacctacacagtacagaggaacattctggacttcccccagcatgtgtctccgtccaaggacatccgtgcagctagcacagaggccgacaagaagctctcagagtttgatgtggagatgagcatgaggcaggacgtgtaccagagggtcgtgtggctgcaggagaaagtcccaaaggactccctgcagccagaggcagctcgctacctggagcggctgatcaagctaggccggaggaacgggctccacctacctcaggacacgcaagagaagatcaagggtatcaagaagaagttgagcctgctgtgcattgacttcaacaagaacctaaatgaggacaccacctttctgcccttcacacgagaggagctgggtgggctccccgaggacttcctgaactcgctggagaagactgcagacggaaagctgaaggtcaccctcaagtacccacattacttcccactgctgaagaagtgccatgtgcccgagacacggcgcctggtagaagaggccttcaactgccgctgcaaggaggagaactgtgccatcctaaaggaactggtgtccttgcgggcacagaagtcccgcctcctggggttccctacacatgctgactacgtcctggagatgaacatggccaagaccagccaaacagtagccaccttcctagatgagctggcacagaagctgaagccactgggtgagcaggagcgtgcagtgatcctggagctgaaggaggcagagtgcagcaagcggggcctgccctttgatgggcacatccacgcgtgggacatgcgctactacatgaaccaggtggaggagacacgctaccgtgtggaccagaacctactgaaggagtacttcccaatgcaagtggtcacgcgtgggctgctggccatctaccaggagctgctggggctgacattcacactagaggagggcgccgccgcctggcacgaggatgtgcagttgtactcggtgcgcgacactgcctctggagaggagatcggcaagttctacctcgacctgtaccccagggaagggaagtatggccatgcagcctgcttcggcctacagcctggctgcctacggcaggatggtagccgacagctggccattgcggccatggtggccaacttcaccaaacccacgcctgacgcaccttccttgctgcagcatgatgaagtggagacttacttccatgagtttggccatgtcatgcaccagctgtgctcacaggcagagttcgccatgttcagtgggacccatgtggagcgtgacttcgtggaggcgccatcacagatgctggagaactgggtgtgggagaaggagccgctggtgcgcatgtctcagcactaccgcacaggcagcgcagcccctcaggacctgctggagaagcttatcaagtcacgccaggccaatgcaggtctcttcaaccttcggcagatcgtcctagccaaggtggaccaggtcctgcacacacagacagatgcagacccagctgaggagtatgcccggctctgccaagagatccttggggtaccagccacaccagggaccaacatgccagccacctttggtcacttggctggcggctatgacgcacagtactatggctacctgtggagcgaggtatactccatggacatgttccacacacgtttcaaacaagaaggtgtgctgagccccaaggtcggcatggattaccggaccagcatcctgaggccggggggctctgaagatgccagcaccatgctgaagcagttcctgggtcgtgaccccaagcaggatgccttcctcctgagcaagggcctgcaggtagagagcagtgagccacctgcctgctgaccacaaaccagctcgccgcctgtgccttagcctagccagactgggtggcctcaatggccctcaggcctgtggatgagcttggggggcagtttctcatccttgtcatgccccggttcaaggtccc

SEQ ID NO: 1990 - DNA, 2082 bp, Cricetulus griseus
ctgccccacccctgactcccggccagaccaatgtgatcctatgccatgcaatgaagatgggtatctgagctgcaaagatggccaagctgctttcacatgcatctgcaaaccaggatggcaagggacaaatgccagtttgatgtaaatgaatgtaaagatcccttaaatgtaaatgggggctgcagccagatttgtgacaacactcctggaagttaccactgctcctgcagaagtggctttgctatgctttcaaacaaaaagactgcaaagatgtggatgaatgctctatgaagcccagtgtttgtggctcagctgtgtgcaagaacactccaggagactatgagtgtgaatgtcctgacggctacagatatgatccctcatcgaagtcttgcaaagatgtggacgaatgctctgagaacatgtgtgctcaattgtgtgtcaattaccctggaggctactcttgttactgtgatggaaagaaaggattcaagcttgcccaagatcagaagagttgtgagggtattccagtgtgccttcccttgaaccttgacaaaaattatgaattattgtacttggctgagcagtttgtaggagttgtcttatatctgaaatttcgtttgccagaaattaccagattttcagctgaatttgattttcggacatatgattcagagggcatcatcctgtatgcagaatctcttgatcactcaaattggctcctgattgcacttcgtgatggaaaaattgaagttcagtttaagaatgagttttcaacccaaatcacaaccggaggcaatgttattaacaatggtaaatggaacatggtatccgtggaagaattagacgacagtgttagcattaaaatagctaaagaagctgtgatgaatataaataaatttgggagcctctttaaacctacagatggatttctggacaccaaaatatactttgcaggattacctcgggtagtggaaagtgcactcattaaaccgattaaccctcgtctggatggatgtatacgaggctggaacttgatgaaacaaggagctttaggtgcaaaggaaattattcaaggaaaacaaaataagcattgcttcctcatggtggagaagggctcctactaccctggttctggaattgctcggttcagcatagattacaataatgtaaccaatgcagagggctggcaaataaatgtgaccttgaatattcgtccatccactggcactggaattatgcttgccttggtttctggagacaaagtgccctttgccttgtccttggtgggctccagctctgaaaattctcaggatattgtggtatttgttgaaaattcagtggtggctcgaatggaggccataactctgtgttctgaccagcaatcccaactgaaatgtaatgttaacagacatggcctagagctatggagcccactgaagaaagatgtcatctactctaaagatattcaaggacaactagcagtcttggacaaagcaatgaaaggaaacgtggccacttatctgggtggcattccagatctttccttcagtgccacgccagtgaatgccttctacagtggctgcatggaagtgaacatcaacggggtgcagttggatctggatgaagccatttctaaacataatgacatcagagctcactcatgtccttcagttaagaaaatccagaagaacgtctaatgtctgttttctgtgcttataatgcccctttccttgtaattatgctcacgcccctatcaccagctggcaggtgtcacctgtgaagtgcaatgtttgaaatgatgtggtactttgtccttcagatttttgttatataaaccacgttttttttttaaagtctttcttctattgcagtctagaaattaaataaggaaacacaggaaaattttaaatttcaatctacttgctataaatgacactgctttagtttgttatttttgttgtccctgaatccatcatttcaggtgtgtatcagacatcttgttgctgtctgagatagtaaaattttattttactgtagatattttacatcacatgaaaaataataaaagtgatacgtattttt

SEQ ID NO: 1991 - DNA, 2082 bp, Cricetulus griseus
gctggaagctcattgaaagcagccactggtggaggcggggctctggccagttccccttccaccttccccaccctcctcttccaacctctgtttggccccttgctctgttccagcgttgctgcagctgtttctcagcccttttcaacactccagcgaccgaccacaagctcttgtttccaggatggtgatccgtgtatatattgcatcttcttctggctctacggcgattaagaagaagcagcaggatgtacttggtttcttggaagccaacaaaataggatttgaagaaaaagatattgcagctaatgaagagaatcggaagtggatgagagaaaatgtacctgaagacagtcgaccagccacagggtaccccctgcctcctcagattttcaatgaatcccagtaccgtggggactatgatgccttctttgaagcccgagaaaacaatgcagtttatgcctttttaggcttgacagcaccacctggttcaaaggaagcagaagcccaggcaaagcagcaagcttgagtgttatgcgttcttccttcagcatcttgagaaataatgaatctccattgcttttataaaaaccttggcttcaaaataaataggctaagctgttgaaataatagactagttgatattctcgcatgcaaacaagcataattaaaatgtgaacatggtagtgagaaaatgagagatgaagttaaaactttaagtagatgtcatagaatagtattgttatctgccaagatattttatgttctgtaaggattttacaaaaaacatatgcttcttttttgatactactgtgtagcttaaggatatcttcatttcaacattgatgaattacaagagcaacaaaagagagagagagagagtttcctggcttctaaatgtaacctttcattgcacattcagtgatcatgcttctaagttgcttacctcagtaaaattatgggattttaagtcatggaaaggaagattgtaattcattttaaattcgcccttcttacaaagagctcaggcttttaattaaccattatataatatcttgatccttgttgctcacaatttactttctccttttggtgtttgctcaaagaagtcttagtggctgccttctcctgctttaatatagctggtgatcatgaatgccactgcctcttgatagctgaactttttgtttcagtttaggcagattgtgtcaacatatcagtccaagtagaaagaatcactggcatgctttcattttgtcagaaagaacaagtatcaaaggaaaggaacaacatttgaaatagtttgaagatagacatgacccaaatcactcaaccagaaggtattgatacggtacccttgtactgtattactttagtttttgaaaacaatcaccctttacttcaaattattatatcatatctgctgtttgcaaaactgtactctgcaaaatttcatcatataatgaagccatagctttgtttactgaaattcaaacttgatttgatgctttaaaataaatgtttttagaaattgtcaactgagaagcatgcttgagagatgaaagaaaaggaaataaaattctgaggattcagatgagttttgaaagaaactccacagtacgtgcctgcagaatgaaattcttatgcttttcatattacgttcagcatatttgtgtttataaatccagacttggcaatttggtgatttcatattgtggagctcatttgccttttacaaattttgttcttcagaaagttccatttttacaaaacactataaagtgttaattgtattgataaatgtaaacacttccttgggaacctgagcataggtgagtaaagaattttgaaacaaagattgttttgattggaaaagactaagtaaatacagggagttaggcgaaatcagatttcattcattatgtaaaaagggaaaaatgcagaattcacatggatttttgttaaccacttgttggtgtttaaaatatacagagttcatcatgaatccttgtctatgtaacacagatcttcttttcttctgatgaattccaataaaaacaattaagtgaaaaaaaaaaaaaaaaa

SEQ ID NO: 1992 - DNA, 2082 bp, Cricetulus griseus
cccacgtgaagcagttgtccgagcatcgccaagccgggcagctgtctaacccgcgtccgagcgccccggaagcggcgggggaccggaagtggcccgcggaggctgcagagctagtccgggagcccgctgtgaggcgactggcagcgctgcgacggcgccatgtccctgatctgctcgatctccaacgaagtgccagagcacccatgtgtgtcccctgtctctaatcatgtgtacgagcggcggctcattgagaagtacattgcagagaatggcacagatcctatcaacaaccagcctctctcagaggagcagctcatcgacatcaaagttgctcacccaattcggcccaagcctccctctgccaccagcatcccagccattctgaaagccttgcaggatgagtgggatgcagtcatgctgcacagcttcacccttcgccagcaactgcagacaacccgccaggagctgtcccatgctctgtaccaacacgatgctgcctgccgagtcattgcccgtctcacgaaggaagtcactgctgctcgagaagctctggctactctgaaaccacaggctggtcttattgtacctcaggccgtgccaagctcacagcccagtgttgtgggtgcaggagagcccatggatttgggtgagctggtgggaatgacccctgagattatccagaagcttcaagacaaggccactgttctaaccacggagcgtaagaagagaggaaagactgtgcctgaggagctggtgaaacccgaagagctcagcaagtaccggcaggtggcatcccatgtggggctacacagtgctagcattcctgggatccttgctctggacctctgtccttcggacaccaacaagattctcactggtggggcagataaaaacgttgttgtctttgataagagtactgagcaaatcctggccactcttaaaggccataccaagaaggtcaccagcgtggtgtttcatccttctcaggaactggtgttttctgcatccccagatgcgactatcaggatttggtcggtcccaaacacctcctgtgtacaggttgttcgagcccatgagagtgcagtgacaggcctcagcctccatgctactggagactatctcctgagttcctctgatgatcagtactgggccttctctgacatccagacagggcgcgtgctcaccaaggtgacagatgagacttccggctgctctcttacctgtgcacagttccatcctgatgggctcatctttggaacaggaaccatggactcccagatcaagatctgggacttgaaggagcgtaccaatgtggccaatttccctggccattctggccccattaccagtatcgccttctctgagaatgggtactacctggccacagcagccgatgactcttcagtcaagctctgggacttacgcaagctgaagaactttaagacattgcagctggataacaactttgaggtgaagtcactgatctttgaccagagtggtacctacctggctcttgggggtacagatgtccagatctatatctgcaaacagtggacagagattcttcactttacagagcatagtggcctgaccactggagtggcctttggtcaccacgccaagttcatcgcttcaactggcatggacaggagcctcaaattctacagtctgtaggccctatgccttctcacaattctgggcctcatctcagtagtgggttagagttggggggcgggtgggggtgggaccttaggaggagaggtctggtggggcaggggcattcacgtcatttcattctggtctggatgatggtctgagctagggtacatggaacactgctatccatgcagccttcaggccccagggaacggacatggaggaactgtcaccctataaatgctcagagttgtagtccggcacctcccccagcagtggcagctgttccatgcctgctctgtttcagctcttctgagacagggaggtgagccaagggaactgtgaaggggaggggcaggagagcttgtgctggtttttgtaagcagtgatctagtttcaaattaaaaaaaaaatccactcagtaaa

SEQ ID NO: 1993 - DNA, 2081 bp, Cricetulus griseus
  modified_base (2076)..(2076): a, c, t, g, unknown or other
cacccacaaagacccgaagacaggaaagccgaggacttcgccagccctgcaccccgagcagaaggcagaccggtattttgtgttatacaaaccgccccctaaagacaacattcccgcccctagtggaggagtacctggaacgcgccaccttcatagccaatgacctcgactggctcctggccttgcctcacgataaattctggtgccaggttgtttttgatgagactctgcagaagtgcctggattcctacctacgctatgtaccccgaaagtttgatgagtgggtggccccgacccctgaggttgctgacatgcagaagcacctacaccgaagcattttcctcaccttccttcgaatgtccactcataaggaatccaaagatcacttcatttctccatctgtatttggagaaatcctctacaataacttcctctttgacatcccaaagactcctggacctctgtgtgctctttaggaaagcaattcaccactgctccagaaaatgaataggaaacatacacatcatcctgaaccagatctgcctccttcccattctagagagcagctgtgacaacattcaaggcttcattgaagaattccttcagatcttcagctccttgctgcaggaaaagagattcctccgggactatgactcattcttccctatagctgaagacatcagcctgctacagcaggcttcatccagccttggatgagacccggactgcctacatcctacagaaaatacaagacataagaccttcaagggccaaggatgctaataatgaagtcacaatgacaccgaagccaatcagtgaaatgccgtcgtcacagctggagaactcagaggaggatgaggagtgcatgggtgcagcagccgccctgggcccgactgtgtgtggtgtggaactagactcactcatctcccaagtgaaagacctgctgccagaccttggggagggcttcatcttggcctgcctggagcactacagctatgattcagagcaggtgatcaataacatcctggaggatcggctggcccctgaactcagccagctggaccgaagcctagaaagacaagtgaagccggaccctacacccctgctgacatcccgtcataacgtcttccagaatgatgaatttgatgtgttcagcagggattcagtggacctgagccgagtgcacaagggcaggaggaaggaggagaacgtcaggagcctggtgaatgacaagcgagctgtggtggcacagtggcatcgctaccagcagtacagtgtggtaatggaggaggtcccactgcagccaggagaataccaggttgatgactatgaggacgagtatgatgacacatatgatggcaaccaggtgggcgccaatgatgcagactctgatgatgaactcatcagccgcaggcccttcaccacccctcaggtgctgagaaccaaaacgcctggagaaggacaggaggaagaatatgaagtggaggaggttgaagaggaggcccccaagctggaccatttcatccaggatcctgcagtgctgagagaaaaggctgaagccaggcgcatggctttccttgccaggaaggggtaccggcctgagaactccgcagcagtaacaggcagcccccggggtcatgggcaaagccgagaaaccacccaggagcggaggaagaaagaagccaagaaggcaaccagagccaaccacaaccgtagaaccatggctgaccggaagagaagcaaaggcatgatcccatcctgaggtggcagagctgcctgggtgaaggaggcccctcaaggccaccaccacacctcacctgccagccagccatgagcgccttcctatagaacacaaagtgccttatcccttggtgcaggaacccagtgccatcaagcaggccatctcccagctgtgctggtgggaaaggatggggatgaaaaaccaaggtgtccttattttgtgcagcaagacaccacctcacggaagtcctggatggcaggagacctgtatattcagaagcaacaaaaggcccgtgaataaagtttctgaccttctagcaaaaaaaaaaaaaaaanaaaaa

SEQ ID NO: 1994 - DNA, 2081 bp, Cricetulus griseus
ggccgtgaaggtgatccagagtttgccgaaaaatggatcattccagccaaccaatgaaatgatgctcaagttctatagcttctacaaacaggcaactgaaggaccctgtaagctttcaagacctggattctgggaccccattggaagatataaatgggaatgcttggagttcattgggtgatatgactaaagaagaagccatgattgcatatgttgaagaaatgaaaaaagattcttgaaactatgcctatgactgagaaagtttgaagaattgctacatgttataggtccattttatgaaattgtagaagacaaaaagagtggcaagagtactgatttgactcagatcttggcaatgttctgatctcttcaaatgccaaagctgttaatggtaagactgagagcagtgatagtggagctgagtctgaggaagaggaggcccaagaagaattaaaaggagcagaacagagtgacagtaatgataagaaaatgatgaataaatcaacagataagaatttggaagtcatcattaccaatggctttaaggatagctttgtttcatacctaattcctccccgagtggcagaagcaacgaagaagcaaaacctgtagatcacaccttggagcagactggaaacactgttgtctgtgttcaccaagatacaaatgatgatcacagtgaagatgcttcaggaattcatcatttgacaagtgattcagatagtgaagtatactgtgattctatggagcaatttggacaagaagagtattacttaggtggtgattccagtcagcgcttggaaagttctgttttttgtgaagatgctcaaatatctcctggaactggcagccttgggaaaatggtagtcgtggaaggaaaaggtggtgaagtaaagcacggaggagaagatggcagaagtagcagtggagctccacaccgtgagaagagaggaggagaaagtgaggacttctctaatgtcagaagagggagagggcatagaatgccacatttgagtgaaggaacccagggtcggcaagtgggaagtggaggtgatggagaacgctggggttcagaccgggggtccagagccagcctcaatgagcagattgcccttgtgctcattagattgcaagaggacatgcagaatgtcctccagagacttcataaactggaaaccctgactgcttcgcaggcgaaattatcattgcagtcaagtaatcagccctcctcacagagaccatcttggtggccctttgcgatgtctcctggtgcattaacttttgctattatatggccttttatcgcccagtggttggtgcatttatattatcaaagaaggagaagaaaactaaactgaagaaaatggcattttattcaagaagattgctgggcctggatgacctaagaaatgaaatggattgtggatttcacaagaaaatctcagtttgtgatattacatttcttttttgtccaatagtttgatatatatatatatattctttgtcactacacaaaatggtaacattttaaggactaatattgctgatacttgaaagatcaatctcaactaggttttaagccagcatacatagacttactctttttgtagcttgatggacactaagttattaattactgtttggtaatacatttacctgatttcctcccataagatatataagctgcttttctaaggcattgttatgattataagatttataaaaattacttttttaaattaaatgcaagaaagaatgcaacacaagagtggatttaaatgaggttaaatcagttttgtatcagtcactgaactgtcagccaggtagctggaaattgatggacgagtcctcttttacaaatgattcactgactagacttaacttgatgatggaaatgatgaatagacctagtgtatgtgtaaaagtattttccaagctgacacagagaattcatccgattttaattcaaccatacacttaatccttggtaatcatatttctttaagtgaggatatccaatgtctgcttcatagggtgctttgcaataaaatgaaaacatatttatactgtttttactaagg

SEQ ID NO: 1995 - DNA, 2081 bp, Cricetulus griseus
ccagggtgtacttctgggccgatgggactaacaattatggggatggtgtcagccccatggcctggattggcagcgtggacatcctgaggcggtggaaggagcatggctgtcagcaagtcaaatacgggcaatgctgggtgtttgcagctgtagcctgcacagtgctccggtgccttggcatccctaccagagtggtgaccaactacaactcagcccacgaccagaacagcaacctgctcatcgagtacttccgtaatgagttcggggagctggaaagcaacaagagcgagatgatctggaacttccactgctgggtagagtcctggatgaccaggccggacctagagccaggctatgaggggtggcaggccattgaccccacaccgcaggagaagagcgaagggacatactgctgtggcccagtctcagtgcgggccatcaaggagggtgacctgagcaccaagtacgacgcaccctttgtgtttgccgaggtcaacgctgatgtggtggactggatccggcaggaagatggatcagttcacaaatccatcaaccgctccttgattgtggggcagaagatcagcacgaagagtgtgggccgtgatgagcgggaggacatcacccacacctacaagtacccagaagggtcaccggaggagagggaagccttcaccagggccaaccacctgaacaaactggcagagaaggaggagacaggggtggccatgaggatccgtgtgggcgagagcatgaacatgggcaacgactttgatgtgtttgcccacatcggcaatgacacctctgagagccgtgattgtcacctcctgctctgtgcccgcaccgtcagctacaatggggtgctggggcctgagtgtggcactgagaacctcaacctgaccctggatcccttctctgagaacaccatcccccttcgcatcctctacgagaagtacagtgagtgcctgacagaatcaaacctcatcaaggtgcggggtctccttgtcgagccagcttccaacagttacctactggcagagagagacctctacctggagaatcccgaaatcaagatccggatcctgggggagcccaagcagaaccgcaagctggtggctgaggtgtctctgaggaatccactctctgagcccctgaatgactgcatcttcactgtggagggggctggcctgaccaaggagcagaagtctgtggaagtcccagacccagtgccagcaggagaagtgggcaaggtgagagtcgacttcttcccgactgaaattggcctccacaagctggtggtgaacttccagtgtgacaagctgaagtctgtaaagggctaccggaacgtcatcattgggccagcctaaggaaccccttcaccaagctccacctcacctgctgccaaccctcaactcaacctggtctttatcccgagataatgagcaacttcaccccttcaggttgacatggctgcctgggggctctttggaaggaaatgcacttcctgtccattctgttcctctggtctagttccccatctgtccccttagctgtgaggaatgtttgatgccaacacagtgggcaaagggatggtgagccctctggctcaatgaaggaaaagttctcacagggccaccagcctggtcctatgcttctgaagcctgccacccaggtccagggcacgctgggaaggaggcagtagcaccaggcctggacctggaccgtcctgcttctcacctatgcccgggcccctcagatgcagttccagaactactcataagctcctacctctccatggctgggccctcaaactggaagacttcagagcaggggagcgttctctgggtgacaagatcagaggatctgggactccctgaaatcccagagaagagcttgaggagaatcacactgttgcctttaacactttccgctttacacagagaattgcaccgtagccatgtgtctgccccattaccacacagctctgcttctgttggtttgtgcaagctttgggttccaagcaggcagtaggcatgcttttgaagcacacgtgagcactgaaataaaggtctatttttcacatt

SEQ ID NO: 1996 - DNA, 2081 bp, Cricetulus griseus
atgatgccgttcagcctcgtccagctgcagatcagcaggaacctgcatctccagtagtttcaccccagcagtccccaccaacttctccacacacatggaggaaacataaccgccatcccagtgggggaaatagtgagagacctcttgcaggaccggggccattctggtcacctttttggtgacacacaatcaggctcttctgctggtgatgcggtgtggtctgggcagtcaccacctccacctcaagaaaactgggtcagttttgcagatactccaccaaccagtactcttttaaccatgcatcctgcttctgttcaggaccagacaacagtacgaactgtagcctcagctacaactgccaatgaaattcgtaggcaatccagtagttatgatgatccctggaaaataacagatgaacaaagacagtattatgtaaatcagtttaaaaccattcagcctgatctaaacggatttattccaggatctgcagctaaagaattttttacaaaatcaaaacttcctattcttgaactttctcatatttgggagctctcagacttcgataaagatggagcattgacactggatgagttctgtgctgcttttcatctggtagttgctagaaagaatggctatgacttaccagaaaaactccctgaaagcctgatgcccaagctgattgacttggaagattcagcagatgtgggggaccagccgggtgaggtaggttattcaggctctcctgcagaagcacctccaagcaagtcgccatcgatgccatcactgaaccagacgtggcctgagctgaatcagagcagtgaggacactgctattgtccatccagttcccattcgcatgactccaagcaaaatccacatgcaggagatggaactgaaaagaaccagcagtgatcacactaatcccacaagtccgttacttgtgaaaacatctgacctttctgaagaaaataaaatcaattcatcagtaaaatttccttctggaaatactgtagcagatgggtacagtagttcagactctttcccttctgacccagagcagattgggagcaacgtaactcgtcaaaggtctcattcaggaacatcacccgataacactgcaccaccacctccccctccaaggccacaaccctctcattctagatcatcatccctagatatgaatcggacctttgcagttaccacaggacagcaacagactggagctgttgcccaccctcctgcagtgcctccaagacctcagccctcacaggcacctggtccctcagtgcatcggccagtggatgccgatggtctaataactcacactagtacctcacctcagcagataccagaacaaccaaattttgcagattttagccaatttgaagtatttgctgcatcaaatgtaactgaagaacaagacggtgaagccgagaaacatcctgaggtcttgccaactgaaaaagcttctgaccccgcaacctctcttcggattgcccaagcagacggtaaaattgaagaaaagacagctgctagtgttcctgccaatgtgagcaaaggcaccacacctctggctccaccacctaagcctgttcgaagaagactgaagtcagaagacgagttacggccagatgtagatgagcacacacagaagacgggtgttttagctgctgtccttgcgtcacagccttcgattcccagatctgtggggaaagataaaaaggctatccaggcatcgattagacgcaataaagaaaccaacaccgttctggccagattgaatagtgaattgcagcagcaattaaaggatgttcttgaggagagaatttccctggaagttcaactggaacaactccgaccattctctcacctctaagccaattgccgttaactgtgaacatgcccattttgaagcagttttgggtttggagcctatttggaaacccaaacattcagctcactgctttatcgaacattaaactttatgattctgttttgccctgtatgttcaccattgtatttaagtatcttttattttttaatttcaacaataaaagggtcaggaggacttttctggaagaa

SEQ ID NO: 1997 - DNA, 2081 bp, Cricetulus griseus
ctcaggcctgtccagctaccggctggtcttcatgctgggccagctattgcacggcgtgggtgccactcctctctacacacttggtgtcacctacctggatgagaatgtcaagtcaaactattcacccatctatatcgccatcttttacacagcagccatccttggacctgcagcaggctacctgattggaggagccatgctgaatatttacacagaagtgagccaacggacggatctgaccactgacagcccactgtgggttggcgcctggtggattggcttcgtgggagcagggatcactgcattcctcatcgccatccccatccttggctatccccggcagctaccaggctcccagcgctacattgttatgcgagcagctgaaaagcagcagctgaaagaccacagccacagaacagtgagcaatccggctttcggcaagactgtcagagacctgcccctctccatctggctcctcctaagaaaccccacattcatcctgctctgcctggcaggggccactgaagccacactcatcgccggcatgtccacctttggtcccaagttcttcgaggcccagttcagcttgagtgcctctgaggctgccacattgtttggatacctggtagtgccagcgggaggtggtggcaccctcctgggtggcttcctggtgaacagattcaagctccgtggctctgggatcatcaggttctgtctgttctgcaccttgacaagcctcctggccttctttgtcttcctcacgcactgtcccaacatgcccatggcaggcgtgacaactagctacgttgggagccccctgcctgaaggccacttggacctgaaggcggcttgcaacgccatttactgttgccaggaagagcactacagccccctgtgtggctcagatggtaccatgtactactcaccctgctatgcgggctgccctgcgggtgccgagacaggccccagtggccagaagatataccgaggctgtagctgtatccttcagaatgtttcctctggcttgggcaatgctaccgcagggaagtgcacttccacctgtcagagaaagcccctccttctggctctcgtgttcgttgtaattatctttacattcctcagcagcattccagccctgactgctaccctacggtgtgtctgtgatcagcaaaggtcctttgccctgggcatccaatggattgtcgtgagaacactaggcagtattccagggcccattgcctttggctgggtgattgacaaggcctgcctgctgtggcaggaccagtgtggccaccagggttcctgctttgtgtaccggaacgaagccatgagtcgctacatgctcattgcagggctcactttcaaggtgttgggcttcctcttctttgtcaccgcctacttcctgtacaagtctccatcagtgtcctcagatggcctggagacttccctgcccagccagtcctcagcctccgacaaccccacagaacagctccagagcaatgtctgacaccaccagcccctccacactttctgaggtctgttctcggataccctaaccccatcctcacagggcggcaacactgaggaccttgtaaaaccttgcactgcattctggggtcttgcgatgccccagtcacataggaaccagacacactcccaagccctagagtctcctaggcaccactacattgcacggaatgtcacctggtcctgacttcctgtgtctactgaaaagccccgtgcagggcagcagtgccctgggtggcatgatcctgtggagccagctacttgatgctttgcttgaatctgctcttgctgcctgttcttggagccagatggcctctgcgccaggcaggagcaacttgaatcgaacgttatgtctggacttacattttgcactgaacagtgtttatggaattagttttgtacctgatcatgtgactcacgtctgagcacactgcagtgagggtgtgatcccatctgaggtgccacacagatttcgtggacaacgtgtttctatgtttttggttaagagtgtgttcataatatattttaatatttaaagtaaaaaaaaaaaaaaa

SEQ ID NO: 1998 - DNA, 2081 bp, Cricetulus griseus
  modified_base (797)..(797): a, c, t, g, unknown or other
cgggaggaagtagcagctgagatcccccaccgttcaggaaaagcagcaggaactgaccccaacatggctgacaatggggacctggacttggggccagtagagacagagccaccctatgcctcacctaaatacctccgcaattttactctgactgtcacagactgctaccgtagctggaactctgcacctgggcctttccatcttttcccccacacaccctttgaccccgtgctgccctctgaggccaaattcctgggctcagggactggatttcggcccattggtggtggggccgggggctctggcaggagttccaggcagcacttggaggcaatgtccagcgcgagcagttcacagttgtgatgctgacctatgagcgggaggaagtactcatgaattccctggagagactcaaccggcctcccctacctgaacaaggtagtggtggtgtggaactctcccgtgacgtcgaggtggacttttccgatgcccagggtgccctcaggccctgtcccatgatgactctcacttccatgagcggcacaaatgtatcaacttctttgtcaaggtgtacggctatatgcccctcttgtacacacagttcagggtggactctgtgctcttcaagacccgcctgccccatgacaagaccaagtgcttcaagttcatttagagccttgccagttctgaggagatgatgagcagagtcagagtagtcgctcccaaggttcccaggtgttgaaggaccttggggacatttgtggggcaggggccccagaccctttggctgggggaancagcaggaagagtggaaaggggtagctgtctttatcttgaagtcagccacactgggcccacaatcctggtcaacagactcagggcttctgccacgagggcacgtgactgatagtgaacacatatatgcacacacatatacatatatatatatatttggtggggtgggggtgcacctgaaatttctgccaatctctccaagggagggacctacctggctatgtatttagtggagagggtcctgaccctttgttacgtggactgtcatttgcagtcccaccttcccagtggcactggctacagaaataagcaggatggacttggcctaggcaagatctcctgatctactctgacccctttttgttgcttcagggatgctgacacagccttcccctcctgctggaggctgcgcagtggggacgagtccctctggccagcaggaccaggctgctacagagtgccactggtgtcttctcgaaccttacaccaagggctggctgcctgagacatttagtccttggcaactcagcaaaggagtccagactccttaccccagctttctgtcctctcactgttccttgtagcagtagccctcttcccccaggggagccaaagagtgtggtgtttttcctaaatatgtggctgctattttgtcgtatcttttttttactttcccagtattgggggtggaagccagagctgtgggtgggcatcccgacaattgctctgccatgagcctcatccctatctgaaggaccctagcagcaaatatgcacagtgattgtatctgaaggactctctgtggcaagaggcagagaaagcagttggacactgcttgtcttttgggttggggagctaggggacatgcttgcatgatgttcccgctacaagcatggggagcctgcctggtgtttgaagcaggtcactatgggtcacttcctagtgcagcctcctaacacagggcacacctgggctacctagtcttagcttccagggccaggacaactttttcagttgctctttatcttgaggacaagggccacccacagagtgacagtcccccagggtgcctcaggccagtggaccacctacaatgctcctatctggggtggccttgttagtgagcatggagctggaggtgggctgcctggggcggctctggtaacataatttgtccatctgtctgccctttcaaaccatgagcacaaaggtcttacgttggattttgtaaaaaaaaaatgaaataaatggagaactttaactcaaaaaaaaaaaaaaaaaaaaaa

SEQ ID NO: 1999 - DNA, 2080 bp, Cricetulus griseus
ggtcagtgctgcttgctcatttaataaagccggacagcatcccagccagcatctcctcggccttcggaaagctgtctacagaactgcaagagccaactttcaagctgcaaggctagctaccctgtacatgctgaaaaactaccccctgaactctgaaagtgacaatgtcaccaactacatctgtgtggtaccttttaaggagctggggcttggcctcagtgaagaacagatatcagaagaggaagctcataacttgacagatggctttagcctgccagccttgaaggttttgttccaactctgggtggcacagagttcagagttcttcaggcgcttagccctattactttctacagctaattcgccttcggggcccttacttactgaggctttattgcctcaccgaattctgtctgatgtgactcagggtctacctcatgctcattctgcctgcttggaagagctgaagcgcagctatgagttctttcggtactttgaaactcagcaccagtcagtaccccagcgtttatccaaaactcagcagaagtcgagagaactgaataatgttcacacagcagtgcgcagcttacagctccacctgaaagccctactgaatgaagtaataattcttgaagatgaacttgaaaagcttgtttgtactaaagaaacacaggagctgctatcagaggcttatccgatactagaacagaagctcaaactgattgagccccatgttcaggccagcaacagttgctgggaagaagccatttctcaagtggataaactgcttcggaggaacacagataaaaaaggcaagccagaagtagtgtgtgaaaacccacactgcactgcagcacccttgatgcggcctgctctgcacattgaggacagagaccctatccctgaggagcaggaattagaagcatatgtggatgacatagacatagaaagtgagttccgaaaggatgatttgtatcacttgtctgaagaagacaaagagagacagaagcgtgagcaggaagaatccaggagggtgctgcaggagttaaaatctgtgctgggattgaaagcttcagaggcagaaaggcaaaaatggaagcaacttctgtttagtgaccacgctgtgttgacatccttgtctcctgtagacccagtggaatctgtaagtaattcagaaacacccatgaattcagatacaggaaaagtcactaggaatgacactgaagaggaaaatagtgagccctctacacgtgacattgaaagaaataggactgagtttgtatgtgatagccctcccgagggtgaaaataaaggtgcttctgaaaatgaagccttcctccaaggaactgaagaaagaatgtcctaccagtgtgaaagtggggctgaatttcctcaagctgctgctgctgctgctggggccaccgcccctccaactcccagggactcactacagctctccattaagcagaggctagcccgactgcagttgtcaccagaattcaccttcactgccggcctggctgcagaagtggctgccagatctctatcattcaccaccatgcaggaacagacttttggtgatgaggaggaagaacaaatagctgaaggaagtgaaaatgaggtggaagaaaaataaaagccacaatgaagtgattttggttgttcctttttcaaaagtgttttagcttcaagactggaaagggaaatgagtatgtgtttacgctatataaagtttaagagtgaatttacatggcaagtactgattcagaaactgacctgaaattagtagacacctgtataggcaggtctttaggaataggagaggaaggtaaggataatcttggcaattctttaagtacttttaataagaaatgaatttatcattttttgccaaactttgctgccataacgtaactagaataattgcagagcgtaaacatttagaatgagctctttctactgtctccttgcagtgtgtaactgcagcgatcatgttaatatgttgttcgtattttattttgtttataccactcctaaaacaaagatacaggttctgaataaaaatatttaattactacaa

SEQ ID NO: 2000 - DNA, 2080 bp, Cricetulus griseus
gcggttgggaacgcggagcggacgaattcgattcaacggggttccggaccaggctatggagcaggtgaatgagctaaaggagaagggcaataaggccctgagtgctgggaacatcgatgatgccttacagtgctattctgaggcaattaaactagatccccagaaccatgtgctctatagcaatcgctctgcagcctatgccaagaaaggagactaccagaaggcctatgaggatggttgcaagactgttgacctgaagcctgactggggcaagggttattcaagaaaagcagcagcccttgagttcctaaatcggttcgaagaagccaagcgaacctatgaagagggtttaaaacatgaagccaataacctccaactcaaggaaggcttgcagaacatggaggccaggttggcagagaggaaattcatgaatcctttcaacttgcctaatctgtaccagaagttggagaacgatcccaggacaaggacactgctcagtgaccctacctaccgggaactcatagaacagctacggaacaagccttcagacctgggcacgaaaatacaagatccccggatcatgactactctcagtgtcctccttggggttgatctgggcagtatggatgaagaggaagaggcagcaacgcccccacccccacctccttccaaaaaggaggccaagccagaaccaatggaagaagaccttccagagaataagaaacaggcactgaaagaaaaagagatgggaaatgaagcctacaagaagaaagacttcgacatggccttgaagcattatgacagggccaaggagctagaccccaccaatatgacttacataactaatcaagcagctgtgcactttgagaaaggtgactacaacaaatgccgggagctgtgtgagaaggcgattgaggtgggcagagagaaccgagaggactaccgacagattgccaaagcttatgccagaatcggcaattcctatttcaaagaagaaaggtacaaggatgctatccatttctacaataagtctctggcagagcacagaactccagatgtgctcaagaagtgccagcaggcagagaaaatcctgaaggagcaagagcgactggcctatatcaaccctgacttggctttggaggagaagaacaagggcaatgaatgcttccagaaaggggactacccccaagccatgaagcactatacagaagccattaaacggaacccaaaagatgccaaactgtatagtaaccgagctgcctgctacaccaagctcctggagtttcagctggcactcaaggactgtgaggagtgcatccagctggagccaacctttatcaagggttacacacggaaagcagccgccctggaagccatgaaggactatacaaaagctatggatgtgtaccagaaggcgctagacctggactccagctgtaaggaggcagcagatggttaccagcgctgtatgatggcacagtacaacagacatgatagccctgaggatgtgaagcgacgggccatggctgaccctgaggtgcagcagattatgagtgacccagccatgaggctcatcctggagcagatgcaaaaggatccccaggctctgagcgaacacttaaagaaccccgtaatagcacagaagatccagaagctgatggatgtgggtctgattgcaattcggtgataacttgcttttcccctcttcccttcgccaatgtggaaaggcgagctgggacggtggcgagcagcactgggcagaggggggggaagaaaggcttatctttatatttatacatgcctgcaaggaagacagactcatccagcgccacctcggaccctctcagcacacgcatggtctcttcactgctgcccttgagtgtccttccctgtcccaccccccacccccccacgccccgtcactgtctcggctgctcccctatagttggttattttttatttggggcagtgggttcatacggggaggggagggaattcttccctacctggggtcccagctgtcttcacttgttgttaccccacgtccttcaataaaacaagccagtcaggcgtggttata

SEQ ID NO: 2001 - DNA, 2079 bp, Cricetulus griseus
  modified_base (334)..(334): a, c, t, g, unknown or other
gcatggacctgtcacgtgtggtgctgcccacctttgtgctggagcctcgctccttcctcagcaagctctcggattactactatcatggggacctactctccagggcagccacagaggaagacccctactgccgcatgaagcttgtgctacgatggtatctgtctggcttctacaagaagcccaagggcatcaagaaaccctataaccccatcctgggggagaccttccgctgccgctggctgcaccctcagaccaacagccatacccttctacatagcagagcaggtgtccccaccatcctcctgtgtctgccttctatgtcagcaaccggagntggcttcagcatgagcggcagcatcaccgcaaagtccaggttctacgggactcactgtcgggaggcaaagtgaccatagcatgtgagaagaacaacctccaagctgaactggacttcaagctcaagcctttctttgggagcagcaccagcatcaaccagatctctgggaagatcacgtcgggggaggaggtcctggcacgcctcactggacactgggacagagatgtgtttatcaaggaagagggaggtggaggcactgaggtcttctggactccgagtgaggaggtccgcaggcagcggctgaagctgcacacggtactattggaagagcagactgagctggagtctgagaggctctggcagcatgtcaccagggccatccgtgagggtgaccagcacaaagccacacaggagaagtctgtgctagaggaggcacagcggcagcgtgcccgtgaacatcagcagagcctcactccatggaagccacagttgttccacctggacccactcacccaagaatggcgctaccgatatgagaaccacagcccctgggaccccctgaaagacatcgcagaatatgagcaagatgggattcttcacacactacaaagggagacgatgtctggccagacaaccttcctggggagtccggtgtccaggcacaagaggcctggccctgaccggcggctccgaaaagctagtgaccagccctctggtcatagccaggtcaccgagagtagtggctccacacctgagtcctgcccagacctctctgatgaggactttattcctggtagcgagagcccatgtcctcggtgcaggcaagaggcacaccggctacggatgctacaagaggctgtgctgtctattcaggaagctcagcaagagctgcataggcacctctcagccatgttgaactccacagtgcgtgccaggcagccgtcggcccctagcctcctgcagaacccccgctcctggtttctgctctgcatcttcctgacatgtcagctattcattaactatattctcaaataagagcccttgggatctgcagggcgaggcctgcagagctccctcctaggcacccagcactttacaccgacccatggaagcagtgaggcccacaggcatggccactgggacagaagggtccttgtataagaggatgacaggtggggcctgggggctatgagggtgctgtgaccccagctgtaggacccttcagggagcactaacctctccttcagggccctccacctagcaccggccttaatgctaaagccaaatgcagtttctgctctgcagtcatctcaatctcaagtcccactcccaagccagcccccacttgccacaaggcatcagatctgggggtcaggaaggcttgtgcaggttctggacagccactcactgcaacgagggagaaaacaaggtttccaagagcagcaggaaggaagattccaagatttcccagggctctttgggtggtgacatcaacttctgagcagtctgcccaccagtgccctggccaatggcagtgtgagcttgtaagcaagaaaaagtgcccagggggtgtccccaaaggccagggaggctcaagcttgccacatgccctgaccaacacagtcttcccattctgttgacattctgaatacatatagttgcaatattccaggcagctgtgtgccgtgaccagcctctgcatctggccccaaccctgtgtggatggccctctgtgcgtgtgtgtg

SEQ ID NO: 2002 - DNA, 2079 bp, Cricetulus griseus
ggatggacgggctggtggctcagtgctctgcaaggctgctgcagcaggaaaaaggagattaaatctctgactgctgagatcgaccggctgaagaactgtggtcacttagaagattctccgagtttggaccagttacgagaagaaaatttaaaattgaagtatagactgaatatccttcaaaggagtcttcaggcagaaaagagaagacgaccaactaaaaatatgattaacatcaacagccgcctacaggatgtctttggctgtgctattaaggctgcatacccagacttggacaaccctcctctggtcgtaactccaagccagcagcccaagtttggagactatcaatgtaatagtgcaatgggtatttctcagatgctcaaagcaaaggaactcctagaggaattgcagaaaacattaccaaacacctgccgaacaatgaatatattgacagagttgaaattgcggggtcctggtttcattaatgtccacttgagaaaggattttgtgtcagagcagttgaccaatctcctagtaaatggaattcaactacctgctcttggagaaaataaaaaggttatagttgacttttcctctcccaacatagctaaagagatgcatgttggccacctcaggtcaactatcataggagaaagtatgagccgactctttgaatttgcaggatatgatgtgctaaggttaaatcatgtaggagattgggggacccagtttggcatgctcatcgctcatctgcaagatcaatttccagattatctcacagtttcacctcctattggggatcttcaggccttttataaggaatctaaaaagaggtttgataccgaggaggaatttaagaagcgagcctatcagtgtgttgtttcactgcagagtaaagacccagatttcataaaggcctggaacctcatctgtgacgtctcccgtgcagagtttaataaaatctacgatgcattggacatcactttaatagaaagaggcgaatccttctatcaagataggatgaaggatatcgttaaagaatttgaagataaaggatatgtgcaagtggatgatggtagaaaaattgtcttcgtgcccgggtgttccataccattaaccatagtgaaatcagatgggggctttacttatgatacttctgacctagctgctatcaaacagagactatttgaggaaaaagcaaataagattatctatgtggtggacaatggacaagctgtacatttccagacaatttttgctgctgctcaaatgattggttggtatgaccctaaagtaactcaagtgacccatgttggatttggtgtggtgctaggggaagacaagaagaagtttaaaacccgttcaggtgaaactgtacgccttgtagacctgctgggagaaggactaaaacggtctatggacaagttaaaggagaaggagagagacaaggtcttaactgaagaggaattgacagctgctcagacatccattgcatacggctgcatcaaatatgctgacctatcccataaccggttgaatgactacatcttctcctttgacaagatgcttgatgacagaggaaacacagctgcctacttgctgtacgccttcactagaatcaggtctattgcacgtctggccaatgttgatgaagagatgcttcagaaagctgctcgggaaaccaagattgttttggaccatgagaaggaatggaaactaggccggtgcattttacgattccctgagattttacaaaagatgttagatgacttatttctccacactctctgcgattatatatatgagctggcaactactttcacagagttttacgatagctgctactgtgtggagaaagatcgacagacagggaaagtattgaaggtgaacatgtggcgaatgctcttgtgtgaagcagtagctgctgtcatggccaaggggtttgatatactgggaataaaacccgtccaaaggatgtaatccttagggttggagactgtttttaccaaagtggctattagtactgtttactttttaaacaatcaatgtggatacaaaagtagtaaaggaattttcaca

SEQ ID NO: 2003 - DNA, 2079 bp, Cricetulus griseus
ggaaaaagtaaccaaaccgcccgtggaccagcaacatggcgtggtccgctaataaggcagctgttgtgctgtgtatggatgtgggcgttgctatgggtaactcttttcctggcgaagaatcctcgtttgaacaagcaaagaaagtgatgactatgtttgtccaacgacaggtgttttctgagagcaaggatgagattgcctttagtccttctttggaacagacaacactaacaacgcccttgctagtgaggaccagtatcagaacatcacagtgcacagacacctgatgctaccaggtctttagaaggtgaagatgggctggatgagatctactccttcagtgagagtctacggcagctgtgtgtctttaagaagattgagaggcgctccatgccctggtcctgccagctgaccatcggccctgatttgtctataaagattgtagcctataaatcgatcgtacaggagaaagttaaaaagagctggatagttgtggatgcaagaactctaaagaaggaagatataagaaaagaaactgtctattgcttaaacgatgatgacgaaactgaagtttccaaagaggacactattcaagggttccgctacggaagtgatataattcctttttctaaagtggatgaggaacaaatgaaatataaatcagaggggaagtgcttctctgttttgggattctgtagatcttctcaggtccacaggagattctttatgggatatcaagttctgaaggtctttgcagcaaaagatgatgaggcagcggctgttgctctctcttcccttattcatgctttggatgaattaaacatggtcgccatcgttcgatatgcttatgacaaaagagctaatcctcaagttggtgtagcctttccttatattaaggattcctatgagtgtttagtttatgtgcagctgcctttcatggaagacttgcggcaatacatgttttcatcactgaaaaacaataagaaatgcactcccacagaggcacagttgagtgctattgatgatctgattgagtctatgagcttggtaaagaaaagcgaggaagaagataccattgaagacttgtttccaacctccaaaattccaaatcccgaatttcagagatttttccagtgtctgctgcacagagtcttacatccccaagagcgtttgcccccaattcagcagcacattttgaatatgctgaatctccccactgagatgaaagccaaatgtgagattcctctctctaaagtgaggacccttttcccgctgacagaagccgtcaagaaaaaggaccaagtgactgctcaggacattttccaagacattcacgaagaggggcccgctgccaaaaaatgtaagacagagaaagaagaaggtcacatcagtatctctagcgtggctgaagggaatgtcaccaaggttggaagtgtgaatcctgttgaaagcttccgtgttctagtgaggcagaagattgccagctttgagcaggcaagtctccagctaataagtcacattgagcagtttttggataccaacgaaacgctgtattttatgaagagtatggagtgcatcaaagctttccgggaggaggccatccagttttcagaagagcagcgcttcaacagcttcctggaagcccttcgagagaaagtggaaattaagcaattaaatcatttctgggaaattgttgttcaggatggagttactctgattaccaaggatgaaggctctggaagctctgtcacaactgaggaagccacaaagttcctggctcccaaagacaaagcaaaagaagatgcagcaggacttgaagaaggtggcgatgtggatgatttactggatatgatatagaccatggatgtgttgggaatctaagcatgccgtctctacgttgctgagagctcagacagagcatcctggaagccattcatggggacctgaagctctggcgatcagcagacagctcaggagcaaatcaccccaactttctacagaatgaccacatccacatatattacaaggggtaacttagaccctatccaaatttataaagagtcactattttttgattgg

SEQ ID NO: 2004 - DNA, 2077 bp, Cricetulus griseus
atcaacctgaagcccaaagaactttgcaagctagaagttacctttgcccccaagaagcgcatccctcctttctctgaggaagtgttcatggaatggatgggactactgcgtcccctctttctccttagcggctgctgtcaggccctagagatttccctggaccaggagcatcttccctttggtcctgtagtgcatcagacacaagcaagaaattcaagcctcacttctccatcaaccctgaagaaggctacatcactgcaggcatggaggttgctttagaaatatcctaccatcccactgagataggaaaggagagtctccataaaaacattctctgcttcatccaggggggaagccctctgagcctcaccctgtctggggtctgtgtgggaccacctgcagtaaaagaggtggtgaatttcaactgccaagtgcgctcccggcacacgcagaccatcctgctctcaaaccgcaccaaccagacctggaatctgcaccccatctttgagggtgagcactgggaggggccggagttcatcaccctggaggcccatcagcaaaacaagccctacgagatcacctacaggccccgcaccatgaatctggagaaccgcaagcaccagggcactctcttttttccctcccggatgggactggctggctatatgccctgcacgggactaccgaactccccaaagctgttgccaatatcttccgtgaggttccatgtaagtactccctatactgagctcctgccaatcagcaactggctgaacaagccccagagattccgggtcattgtggaaatgttaaaaccaagagaaaccagacctaagtgttactctaaagggccttgattatattgatgtactatctggctccaagaaagactacaagttgaacttcttttcccacaaggagggactatacactgcaaaggtgatcttccggaacgaggtgaccaatgagttcttgtactacaccatgagtttcagggtcaccccttctggcattataaaaaccatccagatgacaagctcagtccgccagagtgcatcagcctccatcaagttggagaatcccctgccctattctgtgaccttctctacagagtgcaagttgaatgacatcagcctaccttcccagttttctgtgcctgcaaactctgagggaacattctcatttgaattccagccgctgaaagctggagaaacctttggaagactgaccctgcacaacagtgacttgggttactaccagtatgagcttagtctgaaggccttgcctgcacctccagaaaaacctgtccacttccagaccgttcttggcagcaaccaaagcatgttggccaagttcaccaattataccaggcagaagacagagtactactgtaagatagactgttctgacttccacacggaaagagtcattaatgcagccccaggagcccagggtggcaccgaggtcagcgtggaagtcatttttgagcccagccacctgggtgagaccaaaggcatcctgagcctgttgtcactcataggtggtgaatacatcatcccactcttcggaattgctctgccccccaagccccaaggccccttcctaatcagagccggatacaacatcgtcatccccttcaagaatgtcttctcgcatacagcaaccttctccttcattgtggagaacccagccttcaccatccgggcttcagagtccgtgcggtccaagaagatcaacaacatcacagtctactttgaagggaacccatcaggcagtaaaacccctatcaccaccaagctgattgtcacctgccctcagtgtgaaggcaccgaatctggaatcaaatgggtttactatctgaaggggatcaccccataagtcacaacctcatcagccaatgccttctcagccccacaggccacattctgtgccatcctaacaatagagaagaaaatggagattttccaaggacttttgtatatgtgtccaattatagaggaagttatttctatgttatgttttacaaatacagacatgaaagttatgttccacattaaaatttatagtgacacacaac

SEQ ID NO: 2005 - DNA, 2076 bp, Cricetulus griseus
gtggaaatcaatggtcaagatctgaaaatggactagcaaggagggcagtggaaggtccttttgttacaccagacatggaagactgtggctacaacattccacagacagatgagtcgacacttatgaccatagcctatgtcatggctgccatctgcgccctcttcatgttgccactctgcctcatggtatgtcagtggcgctgcctacgctgcctgcgccatcagcatgatgactttgctgatgacatctccctgttgaaataaggaggcccatgggcagatgacagagatttccctggaccacatctgggtggttccctttggtcacacacgttggagacacagatggtacctgtggccagagcacctcaggaccctaaccaacctgccaaaatgcttctgctctgaaaagaaaagggaaagctgacaaaggtgggttacagggcttgcacctgtaggaaacagaagagggaagaaagcaagcaattctggtggcaggaatacccttagtcacctcaaacctgagttggaaattctgctgcttgaagcttcagccctgaccctctgcccagcaccctttagattctccaacccaacgtattctttctgtccttccagaagttctggtgttacaaccaggctacccggcacgtgtccccgtggtaccctggcagagaaagggccaatttcatttccctgctggctgaaatcagcagaaggaatgcagtttaaaggcagaaatataatcactttttagtcctaaatttaaactcatctccaagatagaagcccatttggactaagagaggtgtctttccacaatgtgtctgtggttgcagcctgaaccgaaatgagatggggaaaagggtttattagccaaagagctctgtttaaagctgtcttcaaggaacagtgcccatgagaaagtcctactggatagatgaattcctaccttgttaattccacctgtctctacctgcttcttctacatgctaggtggcactgaaatgtcccaaccccaaggtcccaggtgccctatgggacaacagttagaatactacagggctgggaattgtcttcccggcataggttcactccaaccgaggtgctaaaaggaacagacaggagaattctcctatctgtttcacaaaggcagaatcctgaagattcattcagcaggtatagggctgatgcctttgcctctgcctggattttgtttttattttatttttcttgcccaatggtacaaagtggtaggatctttatggtgtcctgagttcattactttcttgtccttccagtggcccctttatttatttggctaaggcatcatcacacattggctagtattaaaccacgaatgtaagaaatagagggctttttgactgtcattgccttcagtatctaggctgcctggagaaaggatggcagcctcagagcttccttacctccttctccacctttcctgattgagcagttttctgtcctgctctctgctgcccctcccaatagtccatgggtacccaggctggttcttgggctaggtagtgggagcctcactaatttcttccctgtcagttctaacacaacagacatgaaaccagtgttagtgggaagagctgaattttcctgggacacccgctgcatcctatccctatatactctatacaatgctttcaggtaggggacctaccaagcacggaattgatgggggaaagagaaattacacacagggcctctggagttgctggccctagccagctgcccacaagccataaaccaataaaataagaatactgagtcacagtttttcagctgggtcctcttcattacccttgcactggtgctgctctggctgagtgggaacacccccacaaccctagtaactggtgttcattttttttttaaggggaaaattttgcatttatttttcttttgatggttaattcctttgtatcataaatctatgaattatgtataaaacaaaaaatcttgacaacagcttcttgcttgtaaaaatatgtattatacagctctatttttaaagtctcctgaaaaattactggcctatctccac

SEQ ID NO: 2006 - DNA, 2076 bp, Cricetulus griseus
aggggaggctgcgcaggccatgtggcccaccctgcgttacatgggtggtgcctgcggtcgggcccgatgccactttgctaggggcttcctccgggcgagagagcgggcgtccgcgggaccagggctgctgtgcggggtggccgcagctccagcaccagctcatttgatatagtcatcatcggtggcggaatcgtggggcttgcatctgccagaacactcatcctgaaataccccggactttcgattggtgttgtggaaaaggagaaagatttagctcttcaccagactggacggaacagtggtgtcatacatagtggaatttactataaacctgaatctctgaaagctaaattgtgtatagaaggcgcagccctcatctatgaatactgtaacctcaagagaattgaacaagaagaaattcccagacttcaggccttgtatgagagaggtctacagaatggagtccaaggcttgagacgtgatccagcaggaggagataaaaaagaaggaaccatattgcaggggtctaatggctattgattgtccgtatactgggattgtggactaccaacaggtagctttgtcatttgcccaggatttccaagatgcaggtggttctatcttgaaagattttgaggtaaaagaaattgaaatagctaaagaaagcccttccagaagtaaggatgagatgaaatatccaattgctgtcaagaattctaagggagaggaagttcagtgtcgctacgttgtgacatgtgcaggactttactcagaccgtatttcagagttgagtggctgcaatcctgatcctcaaattgtccctttccggggagattacctgctcttaaagccagaaaagggctaccttgtaaaaggaaacatttatccggtcccggatagccgcttccctttcctaggagttcactttacaccgaagctggatggcaccatttggctagggcctaatgccgtgctcgcctttaagcgggaaggttacagacccttcgaacttcaaatgccagagatgtcatggataagagcagtttaaaatcctgacactgagtgtagcactgtgtaattttaaccaattatttatatcacacccctgtcctttggtcacactaaagttcccaagatgttggccaggattactgatgattcatacctacttgggttttcagaattcctataaacttttcgaggacatttctccacttttatttaatatctaacttggaggcattcacttttgtaaaccgcgaaagtgccttacatttttcctacatacttcatgaacatgttgagttggtgccaagtgccatactgtgttctctcagggttaatctttcattttcctcaccaacactgtgatggatgcttgagagggatgtgtgtgttgataggaaaatcttttcttgttttttattttttcttcacatcagcccttggtggttacatttattaagctatcccatccattaatttgaaatgacacatgctatgatcttcagttcaagaggcagcgcctcccaggtaaatagatgaggcagttattcaacacttgggatgggcatattgaaacattcagagatcacttacagaggaaactaaccctaatggctctccatagcaacagattcctaacaagaaatgcactgcatggagtccttctctgttctaagacttctaagtgatacaaacattgcatgaaaattattttactttgtgagtaagatgacaatattttccttttagttatggtgaaaagtgggcagtggctctctgtgtcatcctctgtgagatcttgtacacacgcactaagctgtgaaagactaaaattacaaaatcaactgtcatgattgaagcaatccttattccatttgggtctgtgttgtatgctccaaaataatagagaaaattttgttgaagtatgtcagttgctgtgtttgtaaaatatttgatatttatgtcactaagatgtttgttaaatgctgatataagcattttgtgtcttcctgagaaaagaaaaatgtatattagtaaaaaaaaaaaaaaaaaaaaaaaaaaaaaaaaaaa

SEQ ID NO: 2007 - DNA, 2076 bp, Cricetulus griseus
gttatgggccggaggaaagcgccggggagcgggtctctgggccgggtactcatccggcatcagactcagcgaagccgcagccagcgtcataccgactcctggttgcacacgagtgaactcaatgatggctatgactggggtcgtcttaatctccagtcagtaacggaacagagctcccttgatgactttcttgcaactgcagaacttgcagggactgagtttgtagcggagaagcttaatatcaagttcgtgctccctgaggctagatctggactgctgtcttttgaggagagccagagaattaagaaactccatgaggaaaacagacagttcttgtctataccgaggagacccaattgggacagaaaaactagtccagaagaactgaaacaggcagagaaagataacttcctaaaatggagacgtcagcttgtccggctagaagaggaacaaaagttgatattgactccctttgaacgaaatttggacttttggcgccagctctggagggtcattgagagaagtgatattgtagtccagatagtggatgctcgaaaccctctcctgtttagatgtgaggatttggaatgttatgtgaaggaggtagataccgctaaggagaacgttatcctgataaacaaggcagacttggtgacgtgctgagcagcgccttgcctgggcctcacactttgaaaaagaaggtgtgaaggttattttctggtcagctttgggagaaactcttcactctaaaaggaccaagaaaacagtgttgctgaagaagccagcagaaactgagtctgaaaactctagtttagatgagaatgaaattccacgcagatatttgctctcacttagtgaggagtccacaagtgacgaagatgacagtgagtatgaggactgtcaggaggaagaggaggaagactggcagacatgttcagaagaagacagcagccctgaggaagaggaaagctgtgattctgaggctcagaacagaaaaaaaccagaaaaccagcaaatgaacaattgtagccacctggtatcaaagcaggaattactggagctctttaagaagctacacactgggaagaaggtgaaagatggacaactaactgttgggctggtggggtaccctaatgttggtaagagctcaaccatcaacactatcatgggcaacaagaaagtgtctgtgtctgccacgcctggccacaccaagcatttccagactctgtatgtggaacctggcctctgcctgtgtgactgcccaggcctggtgatgccatcctttgtgtctaccaaagcagagatgatttgcaatgggatcctcccaattgaccagatgagagatcacgttccacccgtatcactagtttgccagaatatcccacgacatgttttagaagccacctatggtattaacattataaagcctggagaagatgaagacccctaccgacctccaacctcagaagagctgttgacggcttatggatgcatgcgaggattcatgacagcacatggacaaccagaccagcctcgatccgcacgttacatcctgaaggactatgtcaaagggaaactgttgtactgccacccccctcctggaagagatcctgtggcgttccagcatcaacaccaacaactcctggagaacaaaacaaaaggtgaagaagtccggctacagccaggcagaaaccaaaaagccaaacagattgaaaatgtggtcgacaaaacctttttccatcaggagaacgtcagagcgctgaccaaaggggtccaggctgtgatgggctacaaaccggggagtggcctgctgagcacagctgctctgagtgctgagaaggtgactgggaagccctggaaaaagcatggcaacagaaataaaaaagagaaaagtcgaaggctctacaagcacctggatatgtgaacttggctcaatagaagtggcacctgccctgtgcaggtggacaggagctaaagccactgctgcaaaattaattttccactaaaaaaaaaaaaaaaaaaaaaaaaaaaaaaaaaaaaaaaaaaaaaaaaaaaaaaaaaaaaaaaaaaaaaaaa

SEQ ID NO: 2008 - DNA, 2076 bp, Cricetulus griseus
gtttctgaactccaagttctgttgggctacgctgggaggaacaagcacggacgcaaacacgaacttcttacaaaagcccttcatttgttaaaggctggctgtagtcctgcagtacaaatgaaaattaaagaactctacaggcggcggttccctcagaaaattatgacacctgcggacttgtctatccccaacgtacattcaagtcctatgccagcgactctgtctccatctaccattccacagctcacctatgatggtcaccctgcatcatcccctctactccctgtttctcttctgggacctaaacatgaactggaactcccacatctcacatcagcgctgccacccagtccatccggatataaagctacaaaagactaccattctatgacctgttggatgagctgatcaaacccaccagtctagcatcagacaacagccagcgcttcgggaaacctgtttgcatttgccttgactccacaacatagccgaccaattaatatcacctcacttgtccgattgtctacgacagtaccaaaatacccattgttgttttcttggactgcggaaattggaagaacctattccatggcagtatatcttgtaaaacagttgtcctcaacagttcttcttcagaggttacgagcaaagggaataaggaatccggatcattctagagctttaattaaagagaaattaactgcagatccagacagtgaaatagctaccaccagcctacgggtttcactgctgtgtccacttgggaaaatgcggctgacaattccatgtcgggcacttacctgttcccaccttcagtgttttgatgcaactctttatattcaaatgaatgaaaaaaagccaacgtgggtttgtcctgtctgtgataagaaggctccatatgaacaccttattattgatgggttgtttatggagatcctgaagtactgcacagactgtgatgaaatacagtttaaggaggatggctcatgggctccgatgagatcaaaaaaggagtgcaggaagttactgcctcctacaatggagttgacggatgcttgagctccacattggagcatcaggtaacttcacacaaccagtcctcaaataaaaacaagaaagtcgaggtgattgacctaaccatagacagttcatcagatgaagaggaggaagagccctctgccaagaggacctgtccttccctgtctcctacatcaccactaaataataaaggtattttaagtcttcctcatcaagcatcgcctgtgtcccgcacccccagccttcctgctgtagatacaagctacatcaacacttccctcatccaggactacaggcaccctttccatatgacacctatgccttatgacttacaaggattagatttctttcctttcttatcaggagacaatcagcattacaacacctccctgcttgctgctgcagcggcggcagtctcagatgaccaggacctcctgcactcctcccgctttttcccgtatacctcctcgcagatgtttctcgatcagctaagtgctggaggaagcacttctttgccagccaccaacggaagcagtagtggcagcaacagcagccttgtgtcttccaacagtctgagggagagccatggccatggcgtggccagcaggagcagcgcggacacggcgtccatctttggcatcataccagacattatctcgttggactgacgccctcaccctgctgcctcccaccctgtccccagattcaatgacttggcagaagaggactctgtgctctgttttacctatcctgtttagaaaagtcacaagtcgttttggttttttttttaaagaagtcagtttccctaaagttgacagtacagtgcagcccacatgtggatccatagcaattctatttgataaacagtttgaaactcaaaaataaccttagttatttgctccactggttctgagtatacttccttacttagccttgcttatttttactcaccttttaatgacaagcatgacataggaagccattttttaattcaagaatcaatcggtcttatctactctcaatagcagaatatgtaaa

SEQ ID NO: 2009 - DNA, 2076 bp, Cricetulus griseus
cgtgatcaaaggtatgagggtgctggtagatgcccgagagaagcttcatattccctggggagataacaaaaaccagctccatggtgacaagttgatggcatttgatacccgtgcccccatggctgcccaggggatggtggagactcgagtttttttgcagtatcttcctgctataaaagccttgtgggatgacagtggtatacagaatgcctacgaccggcgccgggaattccaactggtgccttcacacacacacacacacacacacacacacacacacacacacacacacacacacacacacacacacaccattcttgatagacctgatttgtcttggatttgaacttttgctgtcttttttgttataaattccaatgttttcttgccttggtaatacatgagcttaagacatgtagtccaatatcagaagtacaggtgttgttagcataatttatccatacctgaatggttctacatctagtccttttttgccaaaaaagaatgtatcatttaaattcatggggttagcataactccagtgccgatgaacatttgaacatgtgcacagtaacacttggtttgttctgtgttaatttagcaaactatttttgtgcattggccaaaaactaactacagtgaaggcaaaagtcagcccctcagaaagcagttgtatccagttacacttaagctctgtggtgagaacacaaatagtacctggccgagcagaatcactgacttttctccgttgtgactggagttgagggctctgtggggaccggctttgcatgtcttgggggtgagtgtaatgacccgtgcctaactccacatattctgagatcctgcacccttgctgcataccaacgaatgatcacacaagtgtcttggttaactttgaaattttttatattttacagagttgccttataaatgaaagaacatcacaaattagaccctaattttttttaaaatggggaaagggctttgttccatggtttcatataatcttaattcaaggtgtgtttctgccacttaaatattttttaatgcctgaaatgtttctttctgccaaatgctgtctgtattaaattgaagcctccattttagtttttctctctggaaagggtacttgatagccagagggcagctgcagccaaatgagacagggtgtcctaaagaggagcatgtttttcctgtcgcaggcattggtgggcacttcacgcctaaggggtcctctgtgaagtttgcaagcccatgctctatagggaaatgcttgttcagttgttggcagctgttgatttcaggtaagagaaagaaagaccacattggtaccgaaagtgacaagaagtgttgttagatgcagcaaaaagcacgtgccctctaagtaagtcaccttccagggtaagccaaattcgagggcttctgttcggatgggatgcatttctcagcattcgtattcacacccggttatgccttgctcatatgaagaataatgtctaagttatgcggttatattctgaaactcaagctatttggaaatccctcaaattggtgctttcattatttaatgatacatttaggcaaaaccccaaacaaaccatttgaaacgtgactctgggttgcaatttgtagcgatgttatttttctcatttgagaagaccaagtgtcagtgttaatctgaatttcctgtatgaacccatgcaccctacctgtaaagcccagctaaatatttgtaacaaattcccaaataaacctagagaagccgctctgttacctttcatttcttttcattttatttggaagatggagagtgaagttctgacggtccttttttcttttttttccttttctttttaattttggccagtgttttggttccagagtagcagtaaattatttctacaggaggtctgagagtggaaggaatggtttcattttataaaacgagttgctattcattaaggcttcttacttttgtacatattttgcaaaatttgtctctttactattaatatttgctttgtaaaaattactgacatttaataaacatttataaacgaaaaaaaaaaaaaaaaa

SEQ ID NO: 2010 - DNA, 2075 bp, Cricetulus griseus
ggatgctagagagacagctaatctttcggcttgaagcagcagctggaggaaaaagacatggacattgcggggtttacccagaaggtcgtctccttggaggctgagctccaggacatttcttctcaagagtccaaggatgaggcttctctggccaaggtcaagaagcagctccgggacttggaggccaaggtcaaggatcaggaagaggagctggatgaacaggctgggagcatccagatgctggagcaggccaagctgcgtctggagatggagatggagaggatgagacagacccatgccaaggagatggagagtcgtgacgaggaggtggaggaggcccggcagtcatgccagaagaagctaaaacagatggaagtgcagcttgaggaggagtatgaagacaagcagaaggcactgcgggagaagcgggagctggagagcaagctctccacactcagtgaccaggtgaaccagcgggactttgagtcagaaaagaggttgcgcaaagacctgaagcgcaccaaggcgctgctggcagatgcccagatcatgctggaccacttaaagaacaacgcccctccaggctcagactagaagaataccaacaaggagaagcaagagctacaagagaagctacaagccctgcagagccaggtggagttcctggagcagtccatggtagacaagtcccttgtcagcaggcaagaagcaaagatcagggagctggaaacgcgcctggagttcgagaagacccaagtgaagcgtctggagagcctggctaatcggctcaaggaaaacatggagaagctgactgaggaacgggaccatcgcgctgcagctgagaaccgggagaaggagcagaacaagaggctccagcgacagctccgggacactaaggaggagatgagtgaacttgccaggaaggaggccgaggccagccgcaagaaacatgagctggagatggacctggagagtctggaagccgctaaccaaagcctgcaggctgatctaaagctggcgttcaagcgcattggggacttgcaagccgccattgaggacgagatggagagtgatgagaatgaggaccttatcaacagtgagggagactctgatgtggactcagagctggaggaccgggtcgacggggtcaagtcctggttgtcaaagaacaagggaccttccaaggcagcttctgatgatggcagcttgaagagttccagcccaaccagtcactggaagtccctcgcccctgacccatcagatgatgagaatggtcctgtagacagcacctccagaccccgattctcccacagctatttgagtgacagcgacacagaggccaagccgacagagaccaatgcatagccccttggctctgtcaggggggctttccaggctgtgcatggcgccggtagtggacctccatctcagcctcctgctcagggatgggtggataggttacctgctggaccactccaagctgccggacccatgggagtcaggagggaacagcaacacctcccctctgctggggtgagggctttcccttctcagtgcctgctgtctttctactgtttaatttaaatacccaaacctccatgcagctgcatccttgagagcgggaggggttgctgtcgcagctgggccctgtgggatgccttgggaatcttcccaccatcttcactcctccagcggtccttactcatgaagcctgcagccgggggacactggtgagcagagctggagccctggctcttaagaggcagtgtggggaggcagggcagcctggtgcttctggcttgggcctagcaagccttgttggagtattacgtgcaatgagcaattattcaagagctgatctcttccacctgcaccagtccatggcttccagcactgccttccttctgtccacagtgtagccagctcatttggtgctgaggacttgtggtgggcccagtggaaggtggatgtttccatctgtttaccagaccagagtcctaaccctttgtcatctttcttctgcccgggtccctggttcccacacacttaccccagacacagcaacaagtggtctg

SEQ ID NO: 2011 - DNA, 2074 bp, Cricetulus griseus
aacagaatcaccagagagcatttgactacttcaatttagcagcaaatgctggcaattcacacgcaatggccttcctgggaaagatgtattctgaaggaagtgatatcgtccctcagagtaatgagacagcacttcactacttcaagaaagccgcggacatgggcaaccctgtgggacagagcggtcttggaatggcctacctctatggaagaggagttcaagttaattatgacctggcactcaagtatttccagaaagctgctgaacaaggctgggtggatgggcagctgcaacttggctctatgtactataatggcattctaggcattaaacaggatattcaccttgcaaaacgcttttatgacatggcagccgaggctagcccagatgcacaagttcctgtcttccttgcactctgcaaattgggtgtcgtctatttcttacagtacatacgggaagcgaatattcgagacattcacccaactggatatggaccagcttttgggacctgagtgggacctttacctcatgaccatcattgcactgctcttgggtacagtcatagcttacaggcagagacagcaccaggatatgccagtacccaggcccccagggccacggccagcctccgtgtgggatcccagaagctgcttagagcctgctgccttccttttcagggacgagtagctctcgctggagctacagtgaatgtttgcttcagtgccatatggaatgacagctctcagtagctttcctctttttccttcttttctctctttttcctggaaacatacacaacacactcgagtcatgtctactgtgcccaactatctttcctgtgcgatccttttgtcatccttcagtgcgtgtaagctcctgcatcagtgtcctttacggtcctgacgacctgggaaaactcagttagttgcaagtttaaccaataaaaacatgcttaagtctgagaatagaacttgcctgaaaagtttaaaacagaacaagccaaacaggacgtcttcagggtgtgtgggaaatgcagtaactggggaagttgaccagactacatgcaagcacacacatttggcactttctataataaaaagggattactgagcggtttcctatactggcgactgtgacacttcgtagcagactcttcctcgaagactgaaagctttgctaaagaattctttgtgaacttcacttcttgtaatggaatagaagtaaaactcagtgaactgactccttgcactcacataggaatttgcttctttcaaagatggtctcaaaatgctttgctcccggtctcttcctgctcgtgggacatggtacataagcaaataggaattgggtttggtgtttctcttcaaaaataatgcacagtacttactaatggcatccatttgaaataaagtggcaataaagctagttaatgtcagtgacattacgccaactccaggcttcaggagttttagcatcaggatttagatttacagatagagtgtggcttctttgttccctctctctgtagcccatccctcctgctgcctattgtggtctgtctctggatgctgtagtgtctggtttttagatgggtcgtgttctttgggaagaagccaagtgtctctactcactagggatttcaagagaattggaaataaccaggtataccaatgatctgtatcttagagagactgtttacacatttagaaagctgactgtgtgcataagaagggacctttatttccttgtagggagccacccagatgtgcagtctttactatttattgaggaacaatctgacactatttctcttttatttacaaaacaatgttgacatgatcaaagtgtgaccactctactcgtcgagggggagttcttaaagaacagaagctggcattgtgaaggaacaccatagtagacttttgtaaatttcttttgtatttaatggaatgcagtgtaaaggctggtgaagtgtattataattgtgtaaacaaaccctgttaatagagagatgtacagattcgttttgtactgtatcttgaaacttgtgaaataaagatcccccctctggtta

SEQ ID NO: 2012 - DNA, 2074 bp, Cricetulus griseus
gacacttgtgcggcagcggcggcggtcactcggcgctccttcgcgacggttcggcctgtgtgccgcgagcggccgttgccagggcaggggggtcgctttgcggcatggcgatggcggagggcgagcgggctgagtgtgccgagcccccccgggacgagcccccggccgacggcgctctgaagcgggcggaggagctcaagacgcaggccaacgactacttcaaagccaaggactacgagaacgccatcaagtactacagtcaggccatcgatttgaaccccaacaatgctatctactatggcaaccgcagcctggcctacctgcgcaccgagtgctacggctatgccctgggcgatgccactcgggccatcgagcttgacaagaagtacatcaaaggctactaccgacgggcggccagcaacatggcactgggcaagttccgagctgccctacgtgactacgagacggtggtgaaggtgaagcctaacgacaaggatgctaagatgaagtaccaagagtgtagcaagattgtgaaacagaaggcctttgagcgggccatcgcgggcgacgagcaccggcgttctgttgtggactctctggacatcgagagcatgaccattgaagatgaatacagtgggcccaagcttgaggacggcaaagtgacaatcaccttcatgaaagagctcatgcagtggtatagggaacagaagaaactgcaccggaagtgtgcctaccagatcctagtacaggtgaaggaagtcctctgcaagctgagcactctagtggagacgacgctgaaagagacagagaagattacagtgtgcggggacacccatggccagttctatgacctgctcaacatatttgagctcaacggtttaccttcagagaccaacccctatatatttaatggcgactttgtggaccgaggctccttctccgttgaagtgatcctaaccctctttggctttaagctcctgtacccagatcactttcatcttcttcgaggcaaccacgagacagacaacatgaaccagatctacgggttcgaaggcgaggtgaaggccaaatacacagcccagatgtatgagctcttcagtgaggtgtttgagtggctcccgctggctcagtgcatcaatggcaaagtactgatcatgcatggaggcctgttcagtgaggatggcgtcaccctggatgacatccggaagattgagcggaatcggcagccaccagactcaggtcccatgtgtgacctgttgtggtcagatccccagccacagaacgggcgctccgtcagcaagcggggtgtgagttgccagtttgggcctgatgtcaccaaggccttcctggaggagaaccagctggagtacatcatccgcagccatgaagttaaggctgaaggctatgaggtggcccatggtggccgctgtgtcaccgtcttctctgcccccaactattgtgaccagatgggaaacaaagcctcctacatccacctccagggctcagacctgcggccccagttccaccaattcacagcagtgcctcaccccaacgtcaagcccatggcctatgccaacacgctgctgcagctaggaatgatgtgagctgcccacagccgcgcaccagggcctgcccagctcgatggccctgccttcggcctgctgccccgccccacggcaacgttggacccccttttactttgtaaagtttgtatttattcccctttaggttgcagagggggtggggcagcgcggggcagcagaggacaggttcctggtcagaggaaggagttgagaccgggtagggcacagcctgggcattcgggggaaggccaacctgggaaggggtggggccaagaggaggccccgcctcctcatctgcatggctcctcccctgggaaagcaatagggccttaccataggaaaaccccaaagaggatcatcaggccttctcctggtagcctcagtgtggggcggagctggggcccacctccagctattttatgttctgtaattaaatatgttaaaataaaataaagtcattattgtaagtcaaacctacaaaaaaaaaaaaa

SEQ ID NO: 2013 - DNA, 2074 bp, Cricetulus griseus
gagccttcgggcttggtagtaaggcgctgtccgaacgaacaggacccgagcggcagccgtgctcccgccttggaagtggttcaatcatggttgaaattaagaagatctgttgcattggtgcaggctatgttggtgggcccacatgcagtgtcattgctcatatgtgccctgaaatcagggtaacagttgttgatgtcaatgagtcaagaatcaatgcatggaattctccaacccttcctatttatgagcctggattaaaggaagtggtagaatcctgtcgagggaaaaatctctttttttctaccaatattgatgatgccatcagagaagctgacctagtatttatttctgtaaacacaccaacaaaaacctatgggatggggaaaggccgggcagcagatctgaaatatattgaagcttgtgctcgacgcattgtgcaaaactcaaatgggtacaaaatcgtgactgagaaaagcacagtccctgtgcgggcagcagagagcatccgccgtatatttgatgccaacacaaagcccaacttgaatttgcaggtactgtccaaccctgagttcttggcagaggggacagccatcaaggacctaaagaacccagacagagtcctgattggaggggatgaaaccccagagggccagaaagctgtgcgggcgctctgtgctgtgtatgagcactgggttcccaaggagaagatccttaccaccaacacttggtcctcagagctttccaaactggcagcaaatgcttttcttgcccagaggatcagcagcattaactccatcagtgctctgtgtgaagcaacaggggctgatgtggaagaggtggcaacagctattgggatggaccaaagaattggaaataaatttctaaaagccagtgtcggttttggtgggagctgcttccaaaaagatgttctgaatttagtgtatctctgtgaggctctgaatcttccggaagtagctcgttactggcagcaggtcatagacatgaatgactaccagaggaggaggtttgcttcgaggatcatagatagcttgtttaatacagtgactgataagaagatagctatcttggggtttgcattcaaaaaggacactggtgataccagagagtcctccagtatctacattagcaaatacctgatggatgaaggtgcacacctccatatatatgatcccaaagtacccagggaacaaatagttgtggatctttctcatccaggtgtttcagtggatgaccaagtgtccagactggtgaccatttccaaggatccatatgaagcgtgtgatggcgcccatgcccttgttatctgcactgaatgggacatgtttaaggagctggattatgaacggattcacaaaaaaatgctgaaaccagcctttatctttgatggacgacgcgtcctggatggcctccacaatgaactgcagaccattggcttccagattgaaacaattggcaaaaaggtgtcttccaagagaatcccatacactcctggtgaaattccaaagtttagtcttcaggatccacctaacaagaaacccaaagtctagatatttccattttatctgtgtttattttggtacttcagagtagccagtgtctgtctgatattaaacagtaaatgaactacatgtttttaaggagacaaaaatatttttttaatcatcaaatttatactagctacatgggtttaggaattaggaatctaggaattatgaatctagaataatttttacatatttttatattattgtcctctgagttattgaatggatgcaaaacaatcatgttgatttaaatgttgtcaatttttgtaaaaataaaaatgaaactttgaacactttttagcattacaaactgtccacagactgcactttaataatacaagggaaaggcagtcttgttttcctgggtgttgacttgtttgcttataaatggaattttgaagccatgaaatcactgtgctactatgggctggttaaagttctctgtacttttattttaatgtgatacgtcatttcactctgcatttcctcccctgcttaacatgaatagt

SEQ ID NO: 2014 - DNA, 2074 bp, Cricetulus griseus
gagtttgcagatgacccaggctgcccggctgtgtgacaactgcaaaaaggaaatccccgtgtttaatttttaccatccatgaaatccactgtcagaggaacattggtgtgtgccctgtctgcaaggagccattccccaaatccgacatggacgttcacatggccacagaacactgtcaggtgacatgcaaatgtaacaagaagttggagaagagacagttaaagcagcatatggaaactgagtgtcctctgcggcttgctgtctgccagcactgtgatctggagctttctgttctcaagctgaaggagcacgaagattactgtggtgccccgggacagagctgtgtggcagctgtgggcgcaatgtgcttgtgaaagagctgaagactcaccctgaagtctggtgggcgagtggaggaggaaaagaaaaatgaggctgccctcccctccctggaaggcccctgagagcctttgagtcggacccctttccacagtaggcctatcagccagaggaacaactacagccccattttccaattcagaataatctgtttgaagaacaagaaaggcaagaaaggaatagaagccggcagtccccaaaagagagtggtgaaaataatgcacacttggacttcatgttggccctgagtctgcagaatgaaggacaggcctccagcatggcagaacagggcttcgtgggggtctgtgcctgaggctgacccagcacatggtgggcccacttctctgagtgacataaagggtgcagctgacgagactctgctgccctgtgagttctgtgaggagctgtacccagaggagctgctcattgaccaccagacaagctgcaacccttcacatgccttacgttcactcaatactggcagctcttccatcaggggggtagaggatcctggtgtcatcttccagaactttctacagcaggccacaagtaaccaattagacactttagtgggcatgagcaacacagctgctgtggaagagagcatcatcatcccctgtgagttctgtggggtgcagctggaagaggaggtgctgttccaccatcaggaccaatgtgatcaacgcccagccacaggaaaccaccatgcaatggagggcatccctacacaggattcccagcctgaagacacttcaccagagctgcccaagaggctggtcaaacatcagggagacccatcttcaggctacatggatgtcaagcaggaagcagcaaaaggctccacctgctcgctgtctcccacgcagaacgatgaacaatagtgactacctcgtaacccccagatctgagtgccagcctagccctcctcgtgtgctgaaactcaacaactcagacagccaggatagagggcagagtcggggcagccagaatgggcctgtagcatctgggcatgctccagtgatccactctattcgaaatatctatccagaaaaccttgtgccctcttttcctcatgggccctctgggagtgctggtgcagtgtccaactgcctcttaggctcgtcaagaggagagactccaggttttcatttttcccaggttatggccattttgtgtctttgagattgtgctgtgcgtgtttgggtttgagggagggctagctgggagaccctggctgctactgtttgacagtagtgagatgagtgcatttgtggccctcttggctcataagggctccatccttagacagactatcaccaccactgcttctggtgctttgtggtcctggtggacagagaggagggttctgggaatctcagctaccagtgaatcaattctctccctggaagggcctgagcttgggtttgcagcatgttagggacaagttgagatgcacgcacatggactggaggccactttggtgcttgtgggtcactcaccaccctgttcctgatggggaatgtactgctttgttctcgatgcccccaccagggccacgcctgccctcatgaggactgaggttccagccccttcccgttttattttactgttctaattatctatttccttgtaatagaaataaagtttgtatccagagctacaaaaaaaaaacaaa

SEQ ID NO: 2015 - DNA, 2073 bp, Cricetulus griseus
tgtccgcgtgcgcaggcggaagtcccggattgaagcgccgccatttttactgctcggacgcggagcgagaagccgagagtcggagacgctatccgcttccatccgtcgcgcagaccctgccggagccgctgccgctatggatgatcgggaggatctggtgtaccaggcgaagctggcagagcaggccgagcgatacgacgaaatggtggaatcaatgaagaaagtagcagggatggacgtggagctgacagttgaagaacgaaaccttttatctgttgcatataaaaatgtgattggagccagaagagcatcctggagaataatcagcagcattgaacagaaggaagaaaacaagggaggagaggacaaactaaagatgattcgggagtaccggcaaatggttgaaactgaactcaagttaatctgttgtgacattctggatgtactggacaaacacctcattccagcagctaacactggcgagtccaaggttttctattataaaatgaaaggggactaccacaggtatctggctgagtttgccacaggaaatgacaggaaggaggccgcagagaacagcctcgtggcttacaaagctgctagtgacattgcgatgacagaacttcctccaacgcaccccattcgtttaggtcttgctctcaacttttccgtattctactatgaaattcttaattcccctgaccgtgcctgcaggttggcaaaagcagcttttgatgacgcaattgcagaactggacacgctgagtgaagaaagctataaggactctacacttatcatgcagctgctacgtgataacctgacgctctggacctcagacatgcagggtgatggtgaagagcagaataaagaagcgctgcaggatgtggaagatgaaaatcagtgagacataataaagccaacaagagaacacatctctgaccaccctccctccccaccctcccctggaagtccccattgtcactgagaaccaccaaatttgactttcacgtttggtctcagaatttaggttcctgccctgttgtttttctttctttttctttttttttctctcccctccccttttttaaaacaaacaaacaaacaaacagttttcagaagttcttaaaggcaagagtgaatttctgtggattttactggtcccagcttttaggttctttacaacactaacaggactgcatagaggctttttcagcattactgtattgtctccagccacatgtggcaagatcatcagtagaaatggaaatgacatttgaaagacattagacttctaggtgatgcatctaagaaagattaatcacatgatagaggcatatgtgctgtcatttttcctttttttcctttttaaattgttttataccaatgtttaaacttaattgggtgttagcttgaagtgttttgggggagtttgttgtaatggttttgctgtaaaatgtgtttggaactctgctgaagtgttgctgaaaagcatggtgctggtaacagttcaacaatccgtggctgctcattcttgccgactcctccccctctgaagcaggttagcattgaaggtggtatggaagcctgcatgcgtgttccactctcttcctcctcccttgctcctcaccctccctcctcctcctccttcgctcgctcaacctcttttgttcagtatgtgtaacttgaagctaatttgtactactggatatctgactggagccacagatacagactctgtattgttcttactgaaacacagcatggaattaacattaaacttaaataaaacaaacctaaattaaaaatgccaaatatattacgcctccatcctttatacttctaaaataaaatctctagtccaaacatatttgacagtattgtttgtctgaatgtgaaaatattccccattttatcttacatatatcatttgtttctcagtgatatgtatttggggcctggggaaagttctgtaatgtgttgaacaacaagtcagtagattacatgtcctgtctttcaaaccagttagcaacacagtatttatgtttatgtttatcattaaagtacaacaatcat

SEQ ID NO: 2016 - DNA, 2073 bp, Cricetulus griseus
cgcccgcccgcccgctcgcccgctcgcccgcgcgccgccccgcccgccatggcccgggactatgaccacctcttcaagctgctcatcatcggcgacagcggtgtaggcaagagcagcttgctgttacgatttgcagacaacaccttctcaggcagctacatcaccacaatcggagtggacttcaagatccggactgtggagatcaatggggagaaggtgaagctgcagatctgggacacagcagggcaagaacgcttccgtaccatcacctctacgtattatcgggggacccacggggtcattgtggtttacgacgtcactagtgctgagtcctttgtcaatgtcaagcgatggcttcatgaaatcaaccagaactgtgatgatgtgtgccgaatattagtgggcaataagaatgacgaccctgagcggaaggtggtggagacagaagatgcctacaaatttgctgggcagatgggcatccagctctctgagaccagtgccaaggagaatgtcaacgtggaagagatgttcaactgtatcacagagctggttctacgagcaaagaaggacaacttggcgaaacagcagcagcagcaacagaacgatgtggtgaagctcacgaaaaacagtaaacgaaagaaacgctgctgctaatggcccagtccactgcagagactgcactgcaccctccccagcccgaggccctcagaggctcctcgggggacagtctcagtttagtgccgttatttaaagaatctctccacgttttttgtatcgggaggcgccatcggcacttcctccccgttccccgtgagtgccaagaaggtgttggacgagcctgcccttccccgctggtgcccatctccctgccgaggcacctggacctggcgaggacgcttgccagctgagcggactgattaaccagtttgtatatagtgtatattgcattaaccagctgcacaccctcagcctgctctggcttttgcctccttcctgccaacctgctgcaacagaccctcccaagccctcctctcccatctcaacggcagcttcctgaggagccaacctcatgtcttagctgagtctttggccaacctggctgggcccatggagtgcactctacatggctcctgccatacagctgctctggaagctggggaacctggcctccacacaggccctgccctcggctggccctaggcctgcagttccacagagaaagtcagtcctggccttttggccaacaggtttttcattctgccttctagatgcctctgctataaacccaggggagctgtggcttctcacttacccatcatgtttcaattccagcagaaaggtagggtacccttgttcagatggagcttgcaagggggagcattaatttaacagacagccgaatgaagccaaatcaaacgaatcaggtttctcatttattttcttgagacttgtttggcttaatagcaaaagttatgactgttccactttgggttcagtatttttagaaaaggtgtatggcttctgttcactgtggggtcaggctctttccctttcatgagaaaggagggctttgcacccttgttccttatgtgtgcaagggcctcccactggagctactttgtagcgtagcaccaggcacctggggtgcatccagaggctgctggactatgggaagacacctccaagctgggataggcggttttacattactgacagacctgttttagtatgaaggtgggaggaagatttcttggccactgggaagaagtggcagtggggtgggggcagccagtattgacccattcccccccctggagtaaaaaccagggtaatatatgattactcccccttccccagacacttggttccctttcccttaaaggatcacgtaactgggaagaactgatttggacaccataatgtgttttagatttcttttcctaggcgatttccaggcacagtcctgactggacaatcatcacagattactgcagattttccatgttaacactgtggatgggtttttaatcaataaaactggggctttcttctacaaaaaaaaaaaaaaaaaaa

SEQ ID NO: 2017 - DNA, 2073 bp, Cricetulus griseus
  modified_base (2023)..(2023): a, c, t, g, unknown or other
tggcactaaagacccccagagaagatggggaggaaaaagattcagatccagcgaatcactgatgagcggaaccgccaggtgacattcaccaagcggaagtttgggctgatgaagaaggcctacgagctgagtgtgctatgtgactgcgagattgcactcatcatcttcaaccactctaacaagctgtttcagtatgccagcaccgacatggacaaagtgctgctcaagtacacggagtacaacgaaccgcatgagagccgcaccaatgctgacatcattgagaccctgaggaagaagggtttcaacggctgtgacagcccagagccggatggggaggactcactggagcagagccccctgctggaggacaagtaccggcgggccagtgaggagttggatgggctcttcaggcgctatgggtcatctgttccggcccccaactttgccatgcctgtcacagtgcccgtgtccaatcagagctccatgcagttcagcaatcccagtggctctctggtcactccttccctggtgacatcatcccttacggacccacggctcctgtccccccagcagccagcactacagagaaacagtgtttctccaggcctgccccagcgacctgctagtgcaggagccatgctgggtggagacctcaacagtgctaatggagcctgccccagtcccgttgggaatggctacgtcagtgcccgagcttcccctggcctcctccctgtggctaatggcaacagcctaaacaaagtcatccctgccaagtctccgcccccacccacccacaacacccagcttggagcccccagccgcaagcctgatctgagggtcatcacttcccagggaggcaaagggctaatgcatcatttgaacaatgcccagcgccttggggtctcccagtctacccactcgcttaccaccccggtggtttccgtggcaacaccaagtttactcagccagggcctccccttctcctccatgcccactgcctacaacacagattaccagctatccagtgcagagctatcctccttaccagccttcagctcacctgcagggctggcactaggcaatgtcaccgcctggcaacagccccagcagccccagcagccacaacaaccacagccgccacagtcacagccacagccacagccgccacagcagccacctcagcaacagccccacttggtccccgtatctctcagcaacctcatcccaggcagccccttgccccatgtgggtgctgctctcactgtcaccacccacccccacatcagcatcaagtcagaaccagtgtccccaagccgcgaacgcagccctgcacctcctccaccagctgtgttcccagctgcccgccctgagcctggtgaaggtctcagcagcccagctggaggatcctatgagaccggggaccgggatgatggacggggggactttggggcccacactaggcctgctgcgcccagccccagagcctgaggctgatggctcagctgtgaagaggatgcggctggatacttggacattaaagtgacggttcccactccctcctctctgcctccctgatgaagagttgacaatctcaccgcccacccctccctgtcctgggctcctcccgctcgatcccccacttccttttcttctgctccatgtcctgttgatggttacatttgtgtataattatattattattattattattattattattattattattaaattcgaattctcgctttagagagagggatgctcttgcccctttcttggccccaccatttttcactggtgggggactctcttttattgcgggaaaggggggacacttttgcacgttgtacacatatgctgcaggaatgggggcggtaggccttggaaaaggacaggtgccgagccctgcatgtggagccctcccatcccattcccagacaggtgtaaagaaccaaaaactatacaacaactgaaacccgtacagtcgactgaaaccccaaagctggcttgatgatgggtttgngtctcagggacaggaagaggtagatctctgcttctgggctgttcatggct

SEQ ID NO: 2018 - DNA, 2073 bp, Cricetulus griseus
ctctgtcggggagcgtgtgtcgcgctctcacgatggctcggctcggctcagccccgcagcctctcgagccgtctggagccccggagcctctttagtgtcggagttcgggccgcaggcggcgggcgagcaggacccctggatggactcttcctctgaagctttgctaatttgcagcagctgggcaatgctcctcactaccatctgtccgtcagcatagtcccgcgtcatttctccgtggtggcagggactgaactccgcattctgtataggaaaagcacctggatccctgtctttcaatggcttcgagacaaccagaagtgcctgctcttgcgcccagtgggcctctaggcaagatgtccctgcccatcgggatgtgccgccgggcattcagctatgatgatgccctggaggaccctgcgcccatgactcctcctccatcggacatgggcagcattccctggaagccagtgattccagagcgcaagtatcagcatcttgacaagacagaggaaggagcggccagtgtctcttcccttgctgtgactccagcaacagccactgacagttcagacaagacccctgtggtgaaggctaaagctacccatgtcatcatgaattccctgatcacaaaacagacccaggagagcatccagcgttttgaacaacaggcaggactgagagatgctggctacacacctcacaagggcctcaccactgaggagaccaagtacctccgagtggcagaagcactccacaaactaaagctgcagagtggagagacaaccagagaagagaagccacctgcatcggcccagtccaccccgagcagcacccctcactcctcccccaagcagaagtccagaggttggttcccttctggctcctccacagccttacctggcccaaaccctcacaccatggattctgggagtggaaatgacaagaactcagcagacaaatggagcctctttggagcccggcccctgcagaggtctgactctggttttgctgtccaggcttacaaaggtgccccaaaaccctctcctatggagctaatgcgtgcccaggccacaagaggaggtgaagacccagcaaccttcaagccgcctaaaatagatgtcccagtggtagaagggaagaaaccaccacctcgaacccataatctcaaaccccgtgacctgaatgtgctcacacccactggcttctagaatgctttgtgtccagggtctgcaactttccctgggctctgacataggagtgatgtagttaacaggaggcctgagtgacattgtgcagattgtccttgtgtgagagaaaccattttggattgctttcgggttggtagaaaacatcagtggtgctgagtggggacctctttttttttaatcatttatcctagagaaggactttgacccttgctctcctgggtaaatagtgctggtgtgtttccaaaacttaaggcctcttggttgttttcctttgatcaacacgagcagttacaaatcatgatagaggtgcccagcaactgtctggacagccatggcttcctgacatgctttagcttttagttgtgtgtgttttgttttttgagacagggtctcactatgtagccttagctaggctggaactctctcagtagactcacagagaagagctacctgcccctcctcccagtgctgggattaaaggcatacaccatcacacccagcttaagcttctgttagagtaaagaagatgacagatacaattggattattgtcttcagattcacatgaacttggtgtcaccttattctgataactttgaggccattttccaccaagttagcctcatatgtttaataacacatcttactaagcaaaggaagcaagaaaatgccctttttttcttctcattgttcacaggcctgttggtcttgcacactgtcacattcgcttgctagatcattttagatagtctgtttatataatgagttaactttctcacagagaagctctggagcccaagattgttgtaaaaattaatttatttgtgttatcttgtattgacaataaaaatctttactactttctc

SEQ ID NO: 2019 - DNA, 2073 bp, Cricetulus griseus
ggagccggcgccaagttcgacgtgaagcggttctcggccgacgctgctcgattccaggtaggaaaaaaggaaatgcaatcctgattcttcggaggtgctgcaagggctagacttcttcggaaacaagaagtctgtctcagatgagtgtggagcattacaaacacaccaggagctccaaaaggaggagaaaacagaagggggcctggttggaagggagtaaggagcccaagaagaaaaaagaagaagatgatttcagaattactgctcaagaagactttgatggtactatacagtggacatcctctgtggaagcaaagattcaagaagagaaaaagaagaaactaaacttacaggaaagttaggaacatactacaagaaaagaaaaggtacaacttctttcgaaacaaacacaagattcatgtccaaggaactgatcttcctgacccaattgctacatttcagcaacttgaccaagaatataaaatcagttctcgattgctgcagaacattctagatgcaggcttccaagtgcccacgccaattcagatgcaagccattccagtcatgctgcatggacgggaacttctggcttctgctcctactggatctgggaagactttggcttttagcattcccattttaatgcagctgaaacaacctgcaaataaaggctttcgagccctggttatatccccaactcgagaacttgccagccagattcacagagaattaattaaaatatctgagggtacgggattcaggatacatatgatccacaaagctgcaatagcagctaagagattcgggcctaaatcatccaagaagtttgatattcttgtgactactccaaatcgactgatctacttgttaaagcaggatccaccagggatagacctgacaagtgttgaatggctggtagttgatgagtcagacaaactgtttgaagatggtaaaactgggtttagagaccagctggcttccattttcctggcctgcacatcccacaaggtcaaaagagcaatgttcagcgcaacttttgcatatgatgttgagcagtggtgcaagctaaacctggacaatgtcgttactgtttccattggagcaaggaattctgcagtcgagactgttgaacaagaactgctctttgtcggttctgagactggaaaacttctggccatgagagaacttgttaaaaagggtttcaatccacctgttcttgtttttgttcagtccattgaaagagctaaagaactttttcatgagctcatatatgaaggtattaatgtggacgtcattcatgcagaaagaacacagcagcagcgagataacactgtccacagcttcagagcaggtaaaatctgggttcttatttgtacagccttgctcgcaagagggattgactttaaaggtgtaaacctggtcatcaattacgattttccaaccagctcagtggaatacatccataggataggtcgaactggaagagcagggaatagggggaaggctgttacatttttcactgaagatgataagccgttattaagaagtgttgccaatgttatccagcaggctggttgtcctgtgcctgaatacataaaaggtttccagaaactattaagcaaacaaaagaaaaagatgattaagaaaccattggaaagggagagcattagtacaactccaaaatatttcttagagcaagctaaacagagaaaggttgctggccagaacagcaagaagaaagaaactcttgaagagaaaagttaaaaatagataccttagaaggctatccccacagtgtaatttataagcccagcatgaattctcttggattatttaacagccatctttaccaaacatatgaaatcaacaaggacatgagagaagaaaatagtcctagcttactgatgcatcagggcaagcttcaccttgtaggtgaaatttatacaatggaaataacatgcattgacatttctgcctgaatacagagagatacttcttatagaagaaaaagagttgatgttgaaataacacccaaatgtggtgaactcttaggggttttgcccttcacgtgtg

SEQ ID NO: 2020 - DNA, 2072 bp, Cricetulus griseus
  modified_base (2066)..(2066): a, c, t, g, unknown or other
ctcctcaggaagccggactctacggggcgggaccccgggagagcctgagcacaagaacctggagccggccccgcacccctgcacttcccatcggggccgccgcgggagccctccccgcgggcgagccgctcgcccgcccagcgcgcagccatgagtgaaacggtcatctgctccagccgggccactgtgatgctttacgatgacaccaataagcgatggctctctgttggcactggtcctcaggccttcagccgcgtccagatctaccacaaccccacggccaactccttccgagttgttggccgcaagatgccggaccaggaggtggttatcaactgtgccatcatccggggtatcaagtataatcaggccactcccatcttccatcagtggcgcgatgcccgccaggtctggggcctcaacttcggcagcaaggaggaagcctcacagtttgcagccggcatggccagtgctctagaggccttggaaggaggtgggcctcccgtggctcctgcaccccctgcctggtctgcacagaacggcccctccccagaggagctggaacaacagaaaaggcctcctgagcacctggaacgccgcgtctccaatgcaggaggcccacctgcttccctgtctgggggcccgcctccccctccaggacctccgcctccccgggcccccctccagccccgggtccgcccccttcagggggatctgctgcaggtcatggagcagggggagccccgccccctgcgcccccactgcctacagcacagggccccgttggtgggggttctggggccccaggcctggctgctgccattgctggagccaaactcaggaaagtgagcaagcaggaggaggcctctggggggcccttggcccccaaagctgagggcagtcgaagcactggtggggggcttatggaagagatgaacgccatgcttgcccggagaaggaaagccacacaggttggggagaagccccccaaagatgagtcggccagtgaggagccagaggtccgagtccccgcccagagtgaacctgtacggagaccctgggagaagaacagcacaacgttgccaaggatgaagtcctcctctgctgtgacgacctccgaggcccacccctctgctcacagttccagcgatgactctgacttggagagggtgaagcaggagcttgtggaagaggtgcggaaggagctacagaaaatgaaagaagacataattgaagcctttgtccaggagctgaggaagcgggggtctccttgaccacaggacccactagagccatccctcctctctgcacttcccgcctggcgcctgctttccctgcctcaacttgaccaagagtacaccagaaggcatactccccgactgtctccacttggaagattccagagggtgtggcttcctggcgccatgaccacactccactggctgctgattggctgaggtcccacccctttgttccctttggtccttcccctctgccgtccccttggggctggttcctctgctggggatgtacccagtaaccccacagtaagggaaggaaggagggaacctcgccttcccttcttctcgattcactttaacgctttaatgccttggatttttttgtttaaagaaaagtatatatatatatttgggtttgggggaagggtaaatttttttttctttggttttgataaactggggtgtgggagtttttaaatgctatgactccaggcctgtcccattggaggcagctataaaagagggaggtatcccagcaggtgggggcggtttctgccaccccgggaacacctcccccttttcctcggctcctccctcttttctatgaggaactcagattctctaacttttttggaacctcagttttgtggttttttatttgggttaggatttcagggtccagaccatttttgccctctgggaagatgacgtgaggggaaaagaagaagaagaaccggtcctccagctcccacgcctcagcttcttagacttgggccttcgctgaataaatcttccgtttttaaaaaaaaaaaaaaaaaaaaaaanaaaaaa

SEQ ID NO: 2021 - DNA, 2072 bp, Cricetulus griseus
tcattacaaacaccactggtttccagagaaccatccaaaggctctggctatcgctgcatccgcatcaaccacaagatggaccccatcattagcaaggtggccagccagattggactcagccagccccagctacatcggctgctgcccagtgagctgaccctgtgggttgatccctatgaagtgtcctaccgaatcggtgaggacggttccatctgtgtcctgtacgaggaggccccggtcgctgcctcctatgggctcctcacttgcaagaaccaaatgatgctgggcaggagcagcccctcgaagaactatgtgatggctgtctccagctaaataggagccaccctacccgggcactctactgtactcatgctgccgtgacaacaggccaccgtatacctcaacctggggaactgtatttttaaatgaagagctatttatacatgttatttttttaaaaaaaaatccttaaagggagctgcttggaagtggcctccccaggtgcctttggaaagaactgttattgaatttgtgagccagtgtttgcctagaggagtggtttggggattggcctagccaaggtaaaaggggattcttggctgatcccccaggaggtggtaaaagggagcaaggaaggttagcaactgtgaatgagaggggtcaggatctttcctgggatgcctggatgcctggatgcctggatgcctggttcctctcttactcaggggcattcaagcctggtcttaaataatactacattgcctaatcttcttttgtgtttctgctgagaccctgggtagagtgaacgacctctcctgttccttctgttctgagcaggttctcttgaaatcttgtctcattcctgagtctacccttggggacctggaaaggctgtttcccagccaggaatctatatgaacatatttggagggtgggatgtaaggcaggtgtgcaaagacttgggtatagatggagggaaccacacaaaacctttgctctgctctgtgctgcactgctttgtatggatggatggcaaataatttaggggtgatttgcaatggaattttgggacccaaagagggatggttctctccctcccttttcctaaaccctgcttttgggaaccacatgaaagtccgaatgctgctaccattattcctttgagaggtggctcaaagctccagggaactccgggtcctttcttactgccttctcctcaagactcctgttccccgctcccctctttcatgtgattgggtcctggagggccccatttcctaggacaggagttctcaatcactgtgcaatagtcccaggaaattctgagactgggcctcctagcccctcctggcgccctggtgggtttctctctcagtaaaatccaaatttatctgtagatgtgtgcaatatatactgttatggactggagaaaattggaaaacactgggagaaaatggctttccttcaggtccagtgacactgatgagggtcctcagaagacctgagtctctcaaactgaaggacagagctagatagagtcagcccatcgctctccttaatgaggaatcgcttccccatttccaccgccatggcatcccatttcctggatttcttaactcctcagtttccactcaaaggtgctattttccaaacactctgcccagcctgctcaggcactcccagcttcgcacagccttcccaggcggcttcacctctctcgctttaaagttaactctgggcccacagacccaagtgctgtgggtggaaacaaagctgtgaattgctgcagatggttctcatgtcttgtccgcaaacaggtccctgcctctttagaagcagcctcctgctctcatgctgagatctgttctttcttgtcgatgttcactttaaaaatgacaaaaaccccagagctggactgttgagcaggcctgtctctcttattaagtaaaaataagtaatagtggtaagtttgtaagctattctgacagaaaagacaaaggttactaattgtataatagtgtttttatatggaagactgtacagcttatggacatatgtacacttttgttttt

SEQ ID NO: 2022 - DNA, 2072 bp, Cricetulus griseus
cacaaaatctgtatatacacgatctgtgattgaaccacttcctgttactccaactcgggatgtggctacgtctcccatttcacctaccgagaataacactgctccaccagatgctttgacccggaatactgaaaagcagaagaagaagcctaaaatgtctgatgaggagatcttggagaaattacggagcatagtgagtgtgggtgatcctaagaagaagtatacacggtttgagaagattggacaaggtgcttcaggcacagtgtatactgcaatggatgtagccacaggacaggaggtggccattaaacagatgaatcttcagcagcagccgaagaaagagctgattattaatgagatcctggtcatgagggaaaacaaaaacccaaatattgtgaactatctggacagttaccttgtgggagatgagttatgggttgtcatggaatacttggctggaggctctttgacagatgtggtgacagaaacctgtatggatgaaggccagatagcagctgtgtgccgagagtgtctacaagctttggaattcctacattcgaaccaagtcattcacagagatatcaagagtgacaacattctgctgggaatggatggctctgtcaagttaactgactttggattctgtgcacagataactccagagcagagcaaaaggagcactatggtgggaactccatattggatggcacctgaagttgtgacaaggaaggcctatggacccaaggttgacatctggtccctgggtatcatggcaattgaaatgattgagggagagcccccatacctcaatgaaaaccctttgagagccttgtacctcattgccaccaatgggaccccagagcttcaaaacccagagaaactgtcggctattttcgggactttttgaaccgctgtcttgagatggatgtggagaagagaggttcagctaaagaactactgcagcatcagttcctaaagattgccaagcccctctccagtctcactccactgattgctgcagcaaaggaagcaaccaagaacagtcactgaaaccacatccaccccagatcatcgtgccaagccttctatgaaagaaactactcaattcgggaactccgattcctcatgtcctcttccccttgccttgtttctcccatttcctgatttagtgctctcaagactttgatccttggaaaccatttgtctagcactgaagagaactgcaactggatgactgatccagcaatagccatttctaaataggaattcccttctaatccatgggcatgggggaggtgacttaatgagcaagggtttacctgaataaacctgtttctacgaaacagaaatctcaaccatcccattccttaccccttacaatcagttcttgactacataaatttatggtttgatagcattatcaatttgcaatcagttgaaatttctttagtgctttctttctgtgaccaaattgcccaaacacctcattgtatttgaaaaccataacagtttggaatgccatggggcctgataatctgccagggacatgaagtggctctgttgcctgaaccatgaccttggtgcagctgatcctgacatgggagaactaccatgtttttctttgtgtgtgcttctagcagctgtttgggagaaccatgacccagtagtgttccctgtgctatttctagtgaaatggtcttagctatgtagcagcttttgattccctgcatcccctaggctgctgcctgcattctgttataaatcttatttatagcactgagagatttcctagagcacatgctgagtaagagcagtgtgagaagtcagaggaaaagtgcagctacttttagcatatggctgggcttcagcacctggccagctatacttaggttatatttcaagacctcagcctgtttctacctggctgtggtaggatgcttggccagcattgtggcttgtcatgtcagtgccactgactactttgtcatgctcagaggtactgttgcctcagcagcacaagtttctatttccttcaataaaaggaaatgaaaatacgccaaaaaaaaaaaaaa

SEQ ID NO: 2023 - DNA, 2072 bp, Cricetulus griseus
ccgggacgcggcgctcacgatcctgcgcgcgcagcccggcctggccatggcggccccccgcccgcctccggcggtctccgtctccgtctccgtgtcggctccggcgttttacgccccgcagaagaagttcgccccggttgtggcgccgaagcccaaagtgaatcctttccggcctggggacagcgagccttcttcagtggcggtcggggcccagcgagcacagatgggccgggtgggcgaaatccccccgccgccccccgaagaccacctccactggaggaggagggaggacctgaggcccccacccagctcccaccgcagcctagggagaaagtgagcagtattgacctggagatcgactctctgtcctcactgctggatgacatgaccaagaatgatcccttcaaggcccgggtatcatctggatatgtacccccaccagttgccactccatttgttcccaagcctagtaccaagcccgcccctgggggcacagcacccttgcctccttggaagaccccttctagctcccagccaccacctcagccacaggccaagcctcaggtccagctccatgtccaacctcaggccaagccccaggtccagtcccagcctgtgtcttccactaatgtacagccccgaggtcccctttctcaggctccgactcccgcacctaagtttgctccggtggctcccaaatttactcccgtggcttccaagttcagccctggcactctaagtggacccgggtcacagcctaatcaaaaattagtgcctccagaagctccctcttctgtgggcacagggtcccctcagcgcccaagcctcacctctgctcagaagaaagagaagcccttagttcaagagaagcagcacccagtgcctccagctcagaaccaaaaccaaaaccaggtgcgctctcctggaggcccgggacccttgaccctcaaggaggtggaggaattggaacaattgactcagcagctgatgcaagacatggagcaccctcagaggcagaatgcgagtgtgccggtgcctgagttgtgcggccgatgccacgagcccctgccccgtgcacagcctgcggtccgtgccctgggacagctgttccacatcacctgcttcacttgccatcagtgtcgacagcagctgcagggagggcagttctacagcctggacggggtgccgttttgcgagggctgctataccgagaccctggagaagtgcaacacctgtgggcagcccatcactgaccgcatgctgagggccactggcaaagcctaccatccacattgcttcacctgtgtggtctgtgcctgtcccctggagggcacctccttcattgtcgaccaggacaaccagccccactgtgtccctgactatcacaagcagtatgctccaaggtgctccgtctgctcggagcccatcatgcctgagcctggccgagatgagactgtacgagttgtcgctctggacaagaacttccatatgaagtgttacaagtgtgaggactgtgggaaggccctgtccattgaggctgatgacaacggctgcttccctctggatggccatgtcctttgtcggaagtgccacactgctagagcccagacctgagttgaggatgggcctccttccagactacaggtccattccccaccgtggaccacccacactgagaccaatcctcgcctctaccctccctgcattccaaccccctccccagtatctcaagtgccctgacccagggcctcagcatgacctagaagtgctgaggccgggtcctggtgctgaggccggccctgggctccaccccttgcctctctcatgggattgcctatcattctgaggtccccaacccgaggctcacatttagtgctgttgcttgcactgctgcaccgatgccctgcgctggcctgagcagcctatgcactgtgcttgctgagggtgggagaatcccgaaccctccaggagcctggctgcagcagcctggacacccaccttcgccctgtgctgctaggttgtggccacagctaaaatgataaaacctcattttccagaaaaaaaaaaaaaaa

SEQ ID NO: 2024 - DNA, 2071 bp, Cricetulus griseus
  modified_base (2006)..(2006): a, c, t, g, unknown or other
  modified_base (2037)..(2037): a, c, t, g, unknown or other
  modified_base (2060)..(2060): a, c, t, g, unknown or other
tgtactgaactttgtgcagtacaaatttagccaccttgccccccgagagcggcagacaatgtttgagctctccaaaatgttcctgctctgccttaactactggaaactggagacacctgctcagttccggcagcggtcccagtctgaggatgtggctgcctacaaggtcaattacaccagatggctctgttactgccacgtgccccagagctgcgatagcctcccccgttacgagaccacccatgtctttggccgaagccttctgcgatccattttcccagtcacccgccggcagctactggaaaaattccgagtggagagggacaagctggtgcctgagaagaggacccttatcctcactcacttccccaagttcctgtccatgcttgaggaggagatctacggggcaaattctcccatctgggagtctggcttcacgatgccaccctttagtcccaccatgggtggaggcagcaacagctccctgagcctggattctacaggggccgagcccatgccagtagaagagaagaggaagcttcctgagaacctcacgctggaggatgctaagcggctccgagtgatgggtgacatccccatggagctggtcaacgaggtcatgttgaccatcactgaccccgctgccatgctagggcctgagacgagcctactctcagccaacgcagcccgagacgaaacggctcgcctggaggagcggcgaggcattatcgagttccacgtcattggtaactcgctgacacccaaggccaaccggagagtgctgctctggcttgtggggctgcagaacgtcttttcccaccagctgccacggatgccgaaggaatacattgcccgcctcgtctttgacccgaagcataagacgctggccttgatcaaggatgggcgtgtcatcggcgggatttgcttccgcatgttccccactcagggcttcacggaaatcgtcttctgtgctgtcacctcaaatgagcaggtcaagggctatggcacacatctgatgaaccacctaaaggagtaccacatcaaacacagcatcctttactttctcacctatgctgacgaatatgccatcggctatttcaaaaagcagggcttctccaaggacatcaaggtgcccaagagccggtacctgggttacatcaaggactatgaaggagcgacgctgatggagtgtgagctgaatccccggattccctacacagagctgtcccacatcatcaagaaacaaaaggagatcatcaagaaattgattgagcgcaaacaggcacagatccgaaaggtctaccctggactcagctgcttcaaggagggagtgagacagattcctgtggagagcgttcctggcattcgagagacaggatggaagcccttgggaaaggagaagggcaaggagctgaaggaccctgatcagctgtacacaactctcaaaaacctgttggctcagatcaagtcacaccccagtgcctggcccttcatggaacctgtgaagaaatcagaggctcccgactactacgaggttatccgcttccccattgacctgaagaccatgacagaacggttacgcagtcgctactacgtgacccggaagctctttgtagctgacctgcagcgggtcatcgccaactgccgggagtacaatcccccagacagtgaatattgtcgctgtgccagtgccctggagaagttcttctacttcaagctcaaggagggagggctcattgacaagtagtccccagctgggctctgcaatgtccacctcggtctcatctgatccatgtgggtgttcctggcccccctctctctgactcagcaggagaaactccagccatgggctccgatcttgcagacttttcagccagcaggcaatcccaagcctgcagctctgttcctgccttcgtcgaatcccatctgaacttggggagacatctggtctgggaccagcccctcattgaatgtcttgtggccaggggatgaactgtttgtttccnccaaaaaaaaaaaaaaaaaaaaaaaaaaaanaaaaaaaaaaaaaaaaaaaaaanaaaaaaaaaaa

SEQ ID NO: 2025 - DNA, 2070 bp, Cricetulus griseus
cagaaccagaagttgctggacttcctgtgcaggcagcagtgtatggaggagctggtgaacctcatcacacaggaccacccctcggacatggaagagaaggtccgattcaaatatccaaacacagcctgtgagcttctgacttgtgatgtgccacagatcagcgacagactaggcgaggacgagagtctgctgaaccttctatatgacttcctggaccaggagccaccactcaaccctctgcttgccagttttttcagcaagaccattggcaatcttattgcaaggaaaactgaacaggtgatcatgtttttgaagaagaaggagaagttcatcggcctgatgctgaagcacgtaggcacctcagctctcatggacctgctgctgcgcctggtcagctgtgtggaaccagttggtctccggcaagaggtcctgcattggcttaatgaggagaaaatcatccagagacttgtggaattgatccatccccatcaggatgaagatgccttcctgagaacacgatggtgacccatctgttccagaagtgctgcctggtgcagaggatcctggaagcctgggaagccaatgaccacacacaggcagcaggtggcatgagacgtgggaatatgggtcacctcacacggatcgccaatgcagttgtacagaacctggagcagggcccggtgcagacccacatcagtgaagtcatccgagggctccctgcagattgccgtgggcgctgggagagctttgtggaagagacactgatggagaccaaccgcaggaacactgtggacctggccttctctgagtaccagatccagcagatgacagccaactttgtggatcagtttggcttcaatgatgaggaatttgcagaccaggatgacaacatcaatgccccatttgaccggattgcagagatcaacttcaacattgaagccgatgaggacagtcctactgcagctctgtttgaagcctgctgcagtgatcgaatccagcccttcgatgatgaggaggaagaagacatctgggaagatgaggagactcgatgtaccgcccgggtgatggccagagccaggtttggagcccctcatgtctcagaaaattactcaaagaattccctggagcatggaggccaggacaggaaggctggcttagcagcagctaggaatgtgcctggattggccactccttcgtcccctacccagaaagaaggtcctcgctcagacagtgatttggaaggtactacatggacagcagtttttgatgagccagtgaacccgatgtctgcagccccaggagcttcaagggatgtgggttctagtgtatgggcagctggtccctcagctccagaggagaaaggctgggccaagttcaccgacttccagcctttctgctgctctgagtcagggccccggtgcagctcgcctgtggatatggaccacagccatgccgagggtggccagagtccaggcccagagaaagcctttggtcctacctccccttgtgcctggaacgtgtgtgtcactaggaaggccccactggtagcctctgacagcagctcctctgggggatctgacagtgaagaggatgagaaggcagctggtgctgtggaagctgtgtgcacaggtcatggtggaaaggcctccccactgcccaagacagaggaggctgttgccagcagggctgagtgtacggacagcactgtgttagctcctgcctgcccttcatctccagaagtgatcatcagttctgctgtggccaccacagcaccaagcaaggcaggccctcccacagccaccatagtcgtctcttcctcagtggctactacagttcccccagggccgatcatggcagtaaccacagcagccccagccttagttgccaccctgggaacaaaggacaggaagacagatgcccttccagaaggagctgccttaaatggtcctgtgtaaccgctgccacccagctgtggcccgccctggtcaggctgcttcctttatcaagaaaactacctggtgatgcaatttttttttttaattaaactttaaaataaatgctgcatttggt

SEQ ID NO: 2026 - DNA, 2070 bp, Cricetulus griseus
cagcagcagaagccgtagtcgctgtcgccccgcaggtaaccgccaccatggtgaagatcgtgacagtgaagacgcaggcgtacccggaccagaagcctggtacgagcgggctgcggaagcgggtgaaagtgttccagagtaacgccaactacacggagaatttcatccagagcatcgtctccacggtggagccggcgctgaggcaggaggccacactggtggtgggcggggacggccgcttctacatgaccgaggctatccagcttatcgtccgcatcgccgccgccaacgggattggctgcctggttattggacagaatggcatcctctccactcctgctgtgtcctgcatcatccgaaaaatcaaagccattggtgggatcattctgacggccagccacaacccaggagggcccaatggagattttgggattaaattcaatatttctaatgggggtcctgctccagaagcaatcactgataaaattttccaaatcagcaagacaattgaagaatatgccatttgccctgacttgaaggtagacctcagtgttctgggaaagcagcagtttgacctggaaaacaagttcaagcccttcacagtggagattgtagactcggtggaggactatgcggcaatgttgagaaacatctttgattttaatgccctgaaggagctactgtctggtccaaacagactgaagatccgcatagatgccatgcatggagttgtgggaccgtacgtaaagaagatcctctgtgaagagcttggtgcccctgcaaactcagcagtgaactgtgttcccctggaggactttggaggccaccaccctgaccccaacctcacctatgctgctgacctggtggagaccatgaagtcaggagagcatgattttggggctgcctttgatggtgatggggatcggaacatgattctgggcaagcatgggttctttgtgaacccttccgactctgtggccgtcatcgctgccaacatcttcagcattccgtatttccagcagactggggtccgtggctttgcacgcagtatgcccacaagtggagccctggatcgggtagcaaacgccacaaaggtcgctttgtatgagaccccaactggctggaagttttttgggaacttgatggatgcaagcaaactgtccctttgtggggaggagagcttcgggactggttccgaccacattcgtgagaaagatggactgtgggctgtcctggcctggctctccattctggccacccgaaagcagagcgtggaggacatcctcaaagaccactggcaaaagtttggccggaacttctttaccaggtatgattatgaggaggtggaagccgagggtgcaaacaaaatgatgaaggacctggaagccctgatgttggaccgttcctttgtggggaagcagttctcagcaaatgataaagtctacactgtggagaaggctgataactttgaatatagtgacccggtagacggaagcgtttcaagaaatcagggcttgcggcttatttttgcagatggttctcgtatcatcttcagactgagtggcaccgggagtgcaggggccaccattcggctgtatattgatagttatgagaagggcgctgccaacatcaatcaggacccccaggtcatgctggctcccctgatctccattgctctgaaggtgtcccagctccaggagaggacaggacgtactgcccccactgtcatcacctagaaagatggccagacgtggtacgtccctccacccaggacctatccacgccacccgattgaagagcatggacagaaactgtattcgcctgggctttttaggacttgatttttttacttccacttgatgaataaccatttgtgaggcacagccactgtatataggagagggaaagccgacctagggctcacactcaaatctgtaccctctcttgccctgtggaactgctgctgtgtgggcctttgtctcctagcatcaggtactgtttacatcacagtgtaaaggtctggagactgagggtcagcagtaaggttatcttctgtctctagagggtgcc

SEQ ID NO: 2027 - DNA, 2069 bp, Cricetulus griseus
  modified_base (145)..(145): a, c, t, g, unknown or other
gcggcgtggagccagagcccaggctggtggagcggccggggctggaggctgggagcgcggcgcgcacggcctccttgcgccattatccgcgctcgctccgggcgaggccggcgccgcgatggcagagatggggagcaagggggtnacggcggggaagatcgccagcaacgtacagaagaagctgacccgagcgcaggagaaggtcctgcagaaactggggaaggcggatgagactaaggatgagcagtttgagcagtgtgtccagaacttcaataagcagctgacagagggcacccggctgcagaaggatctccgcacctacctggcttctgttaaagccatgcacgaagcctccaagaagctgagtgagtgtctccaggaggtatatgagcccgagtggcctggcagggatgaagcaaacaagattgcagagaacaatgacctactatggatggactaccaccagaagctggtggatcaggctctgctgaccatggacacctacctgggccagttccctgacattaagtcacgcattgccaagcgggggcggaagctggtggattatgatagtgcccggcaccactatgagtctcttcaaaccgccaaaaagaaggatgaagccaaaattgccaaggcagaggaggagctcatcaaagcccagaaggtgtttgaggagatgaatgtggacctacaggaggagctgccatccctgtggaacagccgtgtaggtttctatgtcaacacgttccagagcatcgcgggtctggaggagaacttccataaagagatgagtaagctcaatcagaacctcaatgacgtcctggtcagcctagagaagcaacatgggagcaacaccttcacagtcaaggcccagcccagtgacaatgcgcctgaaaaagggaacaagagcccttcacctcctccagatggctcccctgctgctacccctgagatcagagtgaaccacgagccagagccggccagtggggcctcacctggtgccaccatccccaagtccccatcccagctccggaaaggcccacctgtccctccgcctcccaaacacaccccatccaaggagatgaagcaggagcagattctcagcctttttgatgacgcatttgtccctgagatcagcgtgaccaccccctcccagccagcagaggcctccgaggtggtgggtggagcccaggagccaggggagacagcggccagtgaagcagcctccagctctcttcccgccgtggtggtggagaccttctcagcaactgtgaatggcgccgtggacggcagcagtgggactgggcgcttggacatgcccccgggcttcatgttcaaggtgcaagcccagcacgattatacggccactgacactgatgaacttcaactcaaagctggtgatgtggtgctggtgatccccttccagaacccagaggagcaggatgaaggctggctcatgggagtgaaggagagcgactggaaccagcacaaagagctggagaaatgccggggcgtcttcccggagaatttcactgagcgggtgcagtgacggatggcagagcccctgcagccttccggtgtgtgaagaaccttttcccaaaaaatgtgtgctttccttttctttgtttttcttcctctcttttctgtttctgttttgttttgaaactcttgaaaagtgtcgggaaattggggagtggagcactaagccaagaggcgttccccaaagatgaggtggttttccaaagagccgtccagcccagttcagtggacttctccagtgttcccgaagctgctgtgtccccctagttgagttcctggtgcccgcatgttcagggcgggcttggggcgcagagccaccgccgcacttgcctgatgcttggtcgtgccaccgggcagggcttgggtcctcttctggcagctgccgtgggtggggcctgcacactggcccagcctggtcccgctctgcagaccacccgtgtgctgtttgaaaataagccctagtgttcaaaatgcagcgaaacaacaaaaaaaaaaacctgacaaaaccacccaaaaaaaaaaaaaaa

SEQ ID NO: 2028 - DNA, 2069 bp, Cricetulus griseus
aagcggcagggcagccagcccccatctctcaggaaaatcagttggtgtctgacaaggccagcgataagccagatgccctgtggctagaggatgttgaggatgaactgataaaagaagacattgtcctatccccacttccatcaatgcccaagctgcaagctgtgtcaaagccaattgacctctcattggcgaaggagatgaagacccttctgtttggctctaccttttgctgcttcagtgaagaatggaaacttcagaacttttccttcagtgacactgcctcgttaaaatacggcattgtgcagaacaagggtggtccctgtggggttctggcggctgttcaaggctgtgtgctgaagaaactcctgtttgacgaaggtagcagaaccaactctaatctccggctgaagccctcagatgcccagagaacccactgccttgccctggccattgcagacatcctatggcgcgctggaggcaaagagcaagccgtggtcgcactggcttcaggaacagcacacttcagtccaacagggaaatacaaagcagatggagtcttagaaacactcacactgtatagtttgacctgctctgaggacctggttactttcctgcagcagagaattcatcagttcgaagtggggccctatggctgcatcctgctcaccttgtctgccatcctgtccagatccttggagcttgtccgccaggacttcgatgtccccaccagccatctgattggagctcacggatactgcacacaggaacttgtcaatcttctcctgaccgggagagctgtgtccaatgttttcaatgatgtggtggaactggactcaggcgatggcaacactatgctcctcagaggcattaaggcacgcagcgacatcggtttcttgtctctcttcgagcactacaatgtgtgtcaggtcggctgcttcctgaagacgccgaggttccccatctgggtggtgtgcagcgagagccacttcagcatcctcttcagcctacagccagagctcttgtctgactggaggactgagcgactctttgacctgtattactatgatggcttggccaaccagcaggaggaaattcggctgactgttgataccaccaagaccagtcccgaggacagctgcagagaccttgtccctccccttgagctctgcatcagaaccaaatggaagggggcatcggtgaactggaatggctcggaccccatcctgtgacccttggatacatcaagcgctatgatttcagcactcatcaatgggatgacccctggaccccaggtcttaggggctagtctcttagaggagtcctcctgactgagtttgcatggccacagaggcatgcagagcctccagtttcttccatgaggggccgtggtagggcccagtgtgctgctgaggttccctccccatacagctgtgactgccaaagacaggaaagccatcaaagactctgcctttcgtctgcattcctcctggatagccttctttccagggcctctggtgtggctggccttgggaatattggacacttgttgctacagcttccataaagcaaaagtcaagcctatcccaactacagatctttgggggaacagggaggagccaaccatgccataggagaatgggagggcgggtatggctgtgtcctccaccgagctcccttggggcttgctgtgtaaactttagtggccattcacagcaggttcccagtagaaatgcttcctatatctccttgaaatgtttatgcatttgttttccttggccagggatgggcagctgcagagtgcctgactgaggaagttggtttccctgcagtggccttgtttatcggcctggggaggaaaagtatcttttcaatgaaacccacttagtctccttgccaggggctctttggcagcgctagagaaaacaaacaattcccagcactgctgcagaagtttaacccaacaaaacacagagcttgcttttctaggaccccaaatgcagattctccaatgatgccttggagtggaaggtgagcagagccaggtaccaccactcccagactttgaagcc

SEQ ID NO: 2029 - DNA, 2068 bp, Cricetulus griseus
cggaggcagcttgtgaaggttttgtgtggtctcgtcgccagcacagccgggcctacaggcaagcaaccatgtctaagggacctgcagttggtattgatcttggcaccacctactcctgtgtgggtgtcttccagcatggaaaggtggagataattgccaatgaccagggtaaccgaaccacgccaagctatgttgcttttactgacacagaacgattaattggggatgccgcgaagaatcaggttgcaatgaaccccaccaacacagtttttgatgccaaacgtctgatcggacgtaggtttgatgatgctgttgttcagtctgatatgaagcactggcccttcatggtggtgaacgatgcaggcaggcccaaggtccaagtagaatacaaaggagaggcaaaaagtttctacccagaggaggtgtcctctatggttctgaccaagatgaaggaaattgcagaagcctatctcgggaagactgttaccaatgctgtggtcacagtgccagcctacttcaatgattctcagcgacaggctacaaaagatgctggaactattgctggcctgaatgtcctgcgaattatcaatgaaccaactgctgctgctattgcttatgggctagataagaaggttggagctgaaaggaatgtgctcatttttgacttgggaggtggtacttttgatgtgtctatcctcactattgaggatggaatttttgaagtcaaatcaacagctggagacacccacttgggtggagaagactttgataacagaatggtcaaccatttcattgctgagtttaagcgaaagcacaagaaggacatcagcgagaacaagagagctgtcaggcgtctgcgtactgcctgtgaacgggcaaagcgcaccctctcctccagcacccaggccagtattgagattgattctctctatgagggaattgatttctatacctccattacccgtgctcgattcgaagaattgaatgctgacctgttccgaggcactctggaccctgtagagaaggcccttcgagatgctaaactagacaagtcacagatccatgacattgtcttggtgggtggttccaccagaatccccaagattcagaagcttctgcaagacttcttcaatggaaaagaactgaataagagcattaaccccgatgaagctgttgcttatggtgcagctgtccaggcggccattctatctggagacaagtctgagaatgttcaggatttgttgctcttggatgtcactcctctttcccttggcattgaaactgctggtggagtcatgactgtcctcatcaagcgcaataccaccatccctaccaagcagacgcagactttcactacctattctgacaatcagcctggtgtgctcattcaggtctatgaaggcgaaagggccatgaccaaggataacaacctgcttggaaagtttgaacttacaggcatccctccagcaccccgtggtgttcctcagattgaagttacttttgacattgatgccaatggcatcctcaatgtctctgctgtagataagagcacaggcaaggagaacaagatcactatcaccaacgacaagggccgcttgagcaaggaggatattgaacgcatggtccaggaagctgagaagtacaaagctgaagatgagaagcagagagataaggtttcctccaagaattcactggagtcctatgctttcaacatgaaagcaacagttgaagacgagaaacttcaaggcaagatcaatgatgaggacaaacagaagattctagacaagtgtaatgaaatcatcagttggctggataagaatcagactgcagagaaggaagaatttgaacaccagcagaaagaactggagaaagtctgcaaccccatcattaccaagctgtaccagagtgctggtggcatgcctggaggaatgcccgggggcttccctggtggtggagctcctccatctggtggtgcttcttcagggcctaccattgaagaggtggattaagtcagtccaagtagaggtgtagcattgttccacagggaaataaaactatttaaattggc

SEQ ID NO: 2030 - DNA, 2067 bp, Cricetulus griseus
cccaatgtttagtaccagacactaactcaccttcatccacagcaccggcgcctgagaaggacgcacaagatgaggtgctgccatgcttactgagtcccttctctcttctcctctatcatcttccttcagtgactgtcaccagccttctgcaacagctaatgaacctacctcaaagtgcaactgcaccagcaccctccaatcctcacctcactgctgtgctccagaacaagtttggcttgtcactgctcctaatccttctaagccgtggagaagacctacagagttcagatcctgctatagaatcaacacaaaataaccaatggacggaggtgatgttcatggcaacccgagaacttctacagatcccccaagcagccctggctaagccaatctctatacccacaaatctagtgtcccttttttctcgctatgttgaccggcagaaactgaacttgctggagacaaaactacagctggttcaggggatacgataaaagctctccagtgtgtcctctacctcctgttggctgccacctgcactgctgccatcaccaatggagtgttcttaatgagggaggggaggtagcttatgacccaaaggaaagtcttgtgggagcaacctgttttcagaggttatctctgaatgccagatatttccccactgctctgatacttctgctggtacttctgctggttcttttatcttctgtgttacacttttgcatgtcctacttttactcaattcttctcaattttgcattttctttgccctagagacacaaatataatatccctttatcccatcaccactattacagttcaaagtaggttgtagtctgccaaaggttccctccacccattgaagtctttttcatctttccttattagtatgaccataggagagccagaactaagtagaagtcaaggtataaggtaccaaagggtccttaaagaatgagttttaatttgaaaaatatttagttagcatatacctctaaaataaaccagctgatacatttttagtctgtttctgttccatcttgtaatttggtggattatacttttttaatatataaataacagggtacacagcacattacattaaatcaaacttgttaattggctgatgcccagctctaagctgagaagtatctttctccctatctgtattttctttgttcctgaccactgtaatggaaacagcacacacacagttaagccttttcctgtgatgactacagcgtgcttgagcctgtccctcaagtgcattcaagagtacccaagatgagcctcatgtagagcctgcttctgcagtgtagcttttgcacacgtgcactgtcttcctgacgtgacttctgtaagccatgcttctgcttctcttccccattttcatttagtgtcttgggtagaagcctccaaatgtagccgtggctgctaaacttgggctgctctgctcattggtctcctctaccctgcagcagaacgctgtcctggctgcttagtcttgcctgagccctatccactagcagccgggacctgggtttgaatggtagggacactttcctttgccctttcttaccttcagcagttagccaggataagggactttgctccctagtagttacagttctgaaaaaagataagttgaatttattttatattcccgtcctgatcctactttctgctcttctagcctttttgaatgtagtcagtggacaggctatgatatttaaagagaataaacattttgcacatacatgtattgtataacagtaaagctctccgttacaaccagctgtccttgttctcatctccatttcttctcattctgtggcctcaggctccaccagctgctccccagtgacagtctttagcttccctttgccatctgctgactgtctccactgagcctttcctaccttcccttcacacctgatcaagtaaacacttgattattttttcttccttattgtgctttttgttcagttctaattaataaaaataaaagtttctaaatttacatttttatagggtattgtaaataaaaacaaattgtatacttgaaaa

SEQ ID NO: 2031 - DNA, 2067 bp, Cricetulus griseus
cttgaatgggaagaagaactttggcatcagctacctggcgcgggaccggctaggacaggaggctttcctctccctcctctctgattgggacctcagcacagctttcgccactgcctccaaaccttacctgcagttgcgtgtagacattcggccctcagaggacagcccattgctggaagattggggacataattagccccaaagatgtcattggatctgatgtgctactggctgagaagcgttcctcactgacgacagctgccttgccttttacacaatccatcctctctcaggtggggcgtaccttgtctaaggtccagcaggtgctgagttggtcatatggggaagatgtgaagcctttcaagccacctctgagtgatgctgagtttcacacatacctgaatcacgaaggccagctctcccgtcctgaggagttgcgcttgcggatctatcatggcggcgtggagccttcacttcgaaaagtggtatggcggtacctcctgaatgtgtacccagatgggctgacaggccgtgagcggatggattacatgaaacgtaagagtcgagagtatgagcagctcaaaagcgagtgggcccagcgagtgaaccctgaggacctggaattcatccgcagcacagtcctcaaggatgtgcttcgcacagaccgagcccatccttactatgcggggcctgaggatggtccacacctacgggccctacatgatctactcactacctatgccgttactcatccacaggtatcatactgccagggcatgagtgacttggcatcacccatccttgctgttatggaccatgaaggccatgcctttgtatgcttttgtggcatcatgaagcgcctggctgccaacttccatcctgatggtcgtgccatggccaccaagtttgcccacctcaagctactattgagacatgctgacccagacttctaccagtacctgcaagaggcaggtgctgatgacctctttttctgttaccgctggctgctgctggagcttaaacgggagtttgcctttgatgatgctctccgaatgttagaggtcacctggagttcattgccccctgaccctcctgaacatgaagtggagcttgttggacctcccagccaagtgggagacactgactttggtagtcacaggggacggccagtacgtcagaggcacatgctgaggcctgctggtggaggagacagttcttttgaagatgctgttgtccacttagctacatcgagccagggacctagtggtgggggacgtctcctgagacaagccagcctggatggtctccagcaactcagggataacatgggccccaggaaggactttctagtccaattagcccacccagctaccctcattagctctaagtccctctctgagcccttgctgaactcctcagatccactcctctcctcctcttctcggcctgattccccatcttcttcatctcctccatctacccaggaggcttctccttctggtgacatagctgtaggatcccccttgatgcaagacataggttctcccagagatcctggcacgtccctaccacccccacctccaatgggccttcccccaccccaggagtttggccgagggaacccattcatgctcttcctctgcctggctatcctgctggagcaccgtgaccacatcatgcgtaatgggctggattacaatgagctagccatgcattttgaccgcctggtgaggaaacaccatctaggccgtgtcttgcgcagagccaaggctctctttgctgattatctgcagtctgaagtgtgggactccgaggagggagctgaggccacagctccatcttgattgtaatcactccaggtctccaacccaatggtactccattctttgccttgagggcctacacatgagacattattccttgcctgccatccccagacatgttggagcctggggccctctctccttgggtttgagtgtgtgtggttcagtgttgccactgccccacagaggccacggcctcttttctgtttttgttgttttctaaactatactttgcacacacaaa

SEQ ID NO: 2032 - DNA, 2067 bp, Cricetulus griseus
  modified_base (2057)..(2057): a, c, t, g, unknown or other
gggaagatgggcatgcgagctgtggtctatttacatgaccactaccatcatcgctgtggtgattggcatagtcattgtcatcatcatccatcccggaaagggcacaaaggaaaacatgtacagagaaggtaaaaaattgtgcaagtgactgctgttccctcccaatctggtggaagcctgctttaaacagtttaaaaccagctatgagaagaggagttttagagtgcccatccagaccaatgaaacactcctgggcgctgtgatcaacaatgtgtcagaggccatggagaccctgacccgaatccgggaggagatggtacctgttcctggctctgtgaatggagtcaatgccctgggcctagttgtcttctccatgtgcttcggttttgtgattggaaacatgaaggagcaggggcaagccctgagagatttctttgattctcttaacgaagccatcatgagattggtagcggtgataatgtggtatgcacctctgggcatcctcttcttgatcgcagggaaaattgttgagatggaagacatgggtgtaattggagggcagcttgccatgtacacagtgacagtcattgttggcctcctcattcacgctgtcatcgtcctgccactcctctacttcctggtaacccggaagaacccctgggttttcattggagggttgctgcaagcgctcatcacagaactctggggacctcctcaagttcggccgccctcagccacggctgcaagcattggggcagctgggattcctcaggcgggtctggtcaccatggtcatcgtgctgacatctgtgggactgcccacagatgacatcacactcatcatcgcagtggactggtttctggaccgcctccgaaccaccaccaatgtgctgggtgactctcttggagcagggatcgttgagcatttgtctcgtcatgaactaaagaaccgagatgttgaaatggggaactccgtgattgaggagaatgaaatgaagaagccatatcagctgattgcccaggacaatgagcctgagaaaaccgtggctgacagtgaaaccaagatgtagacttcacagaagtcttgagcaccaggctttggaaagccattctgcaatgtgtccatctcattgagctccctcgcgcagtgagagagcccccctttctcttttcctccctactctgataggattggaaaatatccaaaaaccagggaaggcttggcagcagccaaaatacataattttcagactacatttgaaattgttagaatcatctcatattattcttaccaagtaagctacttggttttgagtgagactcatctcatgccttggcctcagtgttctcatccagagaatgagtgactcctctagactcctctctagctgagattgctgtgacaccaggaggactctgcctgccctgtataacatggagatactaaaaaaggacacttaatggaacggacatttctctctaggggcaggctgtgtgtggctcactgggtccccggtccaaaattttggttatataagtagacatgtggaaggccatattatttttacccccttagaatattcagtcaaagatattcagtgggagccatcagatagtaccagctgccttagtttctgaccgaaaataatgagtggacataattacgctaacacactgagtatctagaaacagcatctcccaatctacaattagacatgttatatctatcttgagtatttcatgcatataaaggttaacactaggctatggtggagtaatcatttaataacgtcaagctctattttggaaatacactacagaagttaatgtatgtggcagtcattttacaacactagtagaaggaaagttaatcatgtcaaattaatgctgttacccggtgtgattttttttttgtacttaaccatttcttatgaaatcaggccctctaaggtgatccctttgccagtccgtcagaggctctgcatatgcatgcacccactgtggactgaaaaaacattactttgtagatgtattttcaaatagtttaattaaaaaaanaaaaaaaaaa
